United States Patent Application Publication US 2015/0240253 A1 - sequence listing, part 33

SEQ ID NO: 156418 - DNA, 574 bp, Zea Mays
cacaatcggacgactaacttggcgaggacgctttgggcgggtaccctcaggctttcgggtctccactgttttgttaagctcttgtccaaccatgatagccgtcggcttagcatgggtcgagtcagaagactctccagccaacatactgagtacaacatctatttctgcatcatctggacttgctagcatctcaaagtgaatctgtctctcatcattgggaagatcacgaaggtgagaaaccagagcctcaatgtcctcaggagagggtcgcgctctaagacccagaccaccatcactagtaggagggttggccacgaaattgaaaaatgacctatgaggtggcagattccaagcagaataggcaacaggagcaccaacatttgatatcttgcccctcgggatcatgtctagtcagctcaccagatcctcagtaggaattttcttgttggtgacccgggtagagttagtaataccactgtacaagtaagctggatacgccctgtctttcaaaggctaaatattcttgaaaacgaagtcagcaaccacaacttcgacagtcagacctctctccttc

SEQ ID NO: 156419 - DNA, 578 bp, Zea Mays
ggggatggcgagacggctgctcaatgtccatcttcagcgcgacggggctgagcagatggctgagagcgctagggaataatgggacgccctttgttggcggctaggaaggagcagagagcttcggcagcggcagttcgcgggtggcgagcgcggcaacaaagtggagagcgaagagcgaggagagagcagcaagggcgagcaaggagaagagtgaggcgaacctgcggcactgcagatataggcaacgagaggagtggagaggacgccgacggaggagctcgaccatgactattaatggcacgacatgagtgcgggaaacggctagcagtaaaggtggtgccgagtggaaggagagagagggcgcggacgtttcggctgggctgtgcggcaacgtgaatgccatgggcaggagaaccggcggcagcgcgtacgtccgatctagcagacgagcagattgagccgtgtctgtgtgggagaaaataattaaggagagagaagaaagtgatgaggcccacatgtaagggagaaagaacgaggcatgggatttagtgtgcgggcttggaagctgagcgttggtg

SEQ ID NO: 156420 - DNA, 614 bp, Zea Mays
gaagactataactctctgatcccatcaaaacctagccacttggattttgaaaagtctactgtgtttgaggtcgatgtgcccatgatgatgaagctgggttatttcggggaagctgagaagaagcttattcgttttgccggagaagaaaccactccaaagccgaaagatgacgaagtagtggttttcaaaagctttttcagagcaagattgcggtttcccttgaacgagatgattggggaagttttggataattatgaaatctatcttcattagctgacccctaacgctatttttaggcttagcgtcttcatctgggcccttcgaagccaaggaatggacccaaatgctgaagctttctaccgagtgcatgcgctacattactagacgaaggccagagaagatgggctacatgaaaattttggctgttataacttcgcgtatcgcaaggatacgaaggctccggtgctcagctatcgcaccaagtggccaaccggctggaaaagtgagtggttctatatcaaagctgatgagaagaagagggagaagttgaagacgatggtcatgagcccactgagtttaagcttcggactgactaggcccctgtgccgcatgat

SEQ ID NO: 156421 - DNA, 700 bp, Zea Mays
attttctataaagcatggggactcttttgcaaactcaccagggcgaaagggtatcgagttcactaagccatccgatcacgatcagaccaccaggattagatctccaccaaacatgaaatagtacgcgatggtcgttttccgatcatggatcaacggaccaaaaccacccacgccaacactcgatcccgaccactagatccgatccaactcccacgatttaatctggccaaagggtaagttgtttctaatcgtggccgcccaactagatccaacggtcaccagcccttcttctttcttacggtggctaggacggcggcgcctcccaagaaccatggcggtccatcgctggtgaaaatcattaacggcctaggcatcctaacaactacgtcctagatggtattacacgtaatagaaacaaatacaagcagagggggaaggtccataccgcgaattacgcagtgtcgcgccctacccacaggagtgcacggatctgcggcggcgttgtcactccggtgagcaattaagccgccactaatgatgctccaagcacaacccggcaaccgcgagattccttgaaccccgaccaagctccatcgcccacgaaaccgcccgaacgtcgatcaatcctggataccatggtggcggcgggtttctcttcctcgtggttcaggacgatgatgtccacgattcaaggtggcgc

SEQ ID NO: 156422 - DNA, 507 bp, Zea Mays
ggaggtttcaaacttcaaaatacccatttcactgttgtttcaaatccccgcacgctaggtgctcgatgaaatgcccaaaccactcaaacttgctcaaaccgaccccagatttttcaacaccttcatgacaccccaagtaacaccttcgctaaatttcacgccaaactgatatcctagacaccgatttaccaccgttttccatttatagcgattgattctgagccgagtgccacaaattcattttctttgccaaatttcgaaccaagcgcacacttcactcatatgcactcatatatacctactcgtgaagtatcggctcaattccaagtcatttaatgccccatctccaatttcaaacctcctatggcataattcatcgttcaaacgtcgttctcgcgtcgtttgaccccttgttctccaaatcactcagtttttgtgtcttcactctctgtgtatgtatttattcacatttcatatacttatgactatgtgactaatacgtgctca

SEQ ID NO: 156423 - DNA, 667 bp, Zea Mays
ccaagtctgagacaaaacttatatagttcgcttacatgggccagcccacaacgcaactcacgcacacaaccaaaacagcccatcaaggcgcacgaccacccctgcttcagacttcatctcctgctgactccactccctggctcactgcattctccgctatggcatccaccggtgtgacatctgcccccctgcaacgcttgcttggccccaagcaagagcatctggataacgctgacgcagaacatagtaatcctcccaagttgtggcatccgctggaatgtggctccacctgatcagcacctgcggcacagcccgactccctttcttgaccaatctgcgatccaatatctccagaggctgaacgttgtgaccactcagatccgaggaagtaggaagagtggtaaagacaggagtgtagtctgggatatatggtttcagttgtgagacgtggaacaccgggtgcacctgagcagtagccggcagctccaaacggtaagccactgcacccactcgctccaatatcctgtaagggccaaagaacttgaaggcaagcttaggacatggcctactgaccacagtgtgttgggcatacggttggagtttgagcaaaaccatatcgccaacttgaaatgtgtgttcagtcctcagacgatctgccttcatcttc

SEQ ID NO: 156424 - DNA, 673 bp, Zea Mays
ccctgatggcacacaagatgacaagaatatacattacacactttattttagtcaaaggacctataaaaatataagttgaaaaggagtcggatccttttatttatagtccgatcgatcgttcatcctccttttatatagaggagtgagattatgtgagagcgttgcatagcgtgcggattcatgtggtattagacttttaccataaagaactattagcattctcacaaatcatgattgcctcttcgatatatattcaacagtcgcctacttttacaagagtcaatcatttatgtaattgttccaacactttgtgtgtgtcaatcatttatgatagaaaatgcttttcgagccattagttaatagtggtgtctagcagcatatattgaatttcatgtatccataaaatatcatattagttgaacctcgatatacatatatatgtcatgatccttttgacacacgatatccatcgaactcaaggtgagatttgtgccacccttatagtagctcaacatttcaattgattattagtggatttaaacttgtgagtaactttttagtcacaccatggttaactctttaatacatagggatggccaagtacttaacaacattgaggggcctaaattttgtcttgatccactcatatcccatcatatattttactatacat

SEQ ID NO: 156425 - DNA, 537 bp, Zea Mays
tgtctgcaagttcatccttcgacattacagataggccaacctctagcttcaagaatcctatattttttgccatctcccgacagacagatatctccttattgtccggaagacagtatagaaagtcgtcttcatcagtgccattaaacaccaaggatcctgggggatacttcaaatccttggcatattgcatagcttcggcaatctgctcttctgatagtttttccctaccgcgtgacgcactataaattccaatccctaagtaaaagctccagcagcaggggattcagactttttgctagtttttgtagcatctgaaggtcttgctttgatattcttttcaacaacctccataggcactgtttctgcgggaactgaaggctcagctttagttctagcctgagtcatgacagcttcggcagtttccttcgcattcttttcacctatgttaggtacttctgtagaagcaggagtcagtacctttgtcgattccatgacagtgtctaatacgctggccattcttctcctttttggagttac

SEQ ID NO: 156426 - DNA, 967 bp, Zea Mays
ggaatgcatagtaacgggctcaaaccagcccgagccggcccatgaactgggaaatgctcccgcgttggacaatttgcgcagagaccctcgaggatttgaataaccggtaaagaacccttagcactattcatttgtgtctctaacgtttccaccgaggcccctcccttttcttttcttcgcaagatcaggtcctcgattacggacggcggagcagctgctccagtgagcttacactagccacaatacccaacaatccgcactcgactttggtctacgcttaattctacccttggcgctccactgggaatccccaatttggttggaacgccattctagagctcggtctacgcacaccgcggaacatgagacaaccccgacgtgttcccggtgacacagtacagcaacacacaaattgggagcatggtgagcttctgcaacgtaccaggacccaagaacagttgctaggaaggcgggtagaaggtcaggatagcgggtcgatggaggaggtgttcacggcggcgcggagagtggatttggggggattccaaattagggcgctacggtggatgatcggaggcaagggtgggagctctggcttcgtgacaacctaacggagctagcggcacactcaatttatagtgtccgagagcggtggctctgaattttgaaggagaaggctggtggccggagagagggggtgagtcaccggcgcaggttatcgtggctttcaccgtggcaaagccaccggcgatggacggacttactgctatggttcactacgacatgttaaagctactaggcacgtggcgcacgaacgataggtggccaacgctagcgaggatcatctcggccgggccgcagaccaagtgggtacggcgactgggcggcttgatccatccccctttcagatcttttacccctccacgactatcccctcaccagagagcacgaatcgtagcaccgatgc

SEQ ID NO: 156427 - DNA, 731 bp, Zea Mays
ggggctctttagaaaaacgaccagggccgaaggggtatcttgcatcctgaaccgcccgatccaaacccgacgcaccggattagatcgcgcatcataaaacatagacatttttttaccgttagatccaacatccatggatgagagtgagcccgacccgactcacccatcaccgcccgatatcgcgccaacgttctagattgcatccgaccgaaggggtaagctgcttctaatcctggccgttttcgcaagatccgacggtcgcgacgcgcgttgtcttttccccccaacagagcaaccggacggcggcgccgcccagtgacacggcggatccacgccggagacaagcgagccagccaccccggatcctaattctttaatcgaacggtgctacacgttgagggaagcgaggcgattcgattggggaggactttaccggtcgattgtgtcgcgcagggggtcgaccacggtttcccgcggagctacggcggcggaggaaacacgacgagaaatcactgactcacagagaatccatcccgcatagttaggccacaatcatcttcagtgccgcccgatggagctccccggatccttccctaaggccgagagccggtagggccgccgttcccgtgtggcctcccggttttatagaggtaagggcggagtccgccatggagctcggtcgaggggctccgcacttcgcgcggccgagaaacatggcgacaccgatggag

SEQ ID NO: 156428 - DNA, 356 bp, Zea Mays
gttcgcattcagtttactttttaaaatcgggtgtgacactacctccaaccacccctgctctcgctgaaggtccaagttcacctcctccaagcgagcgtttgtcgcccgcagggaccatcggcgtcctcgacctgcaagctcgcctcgcgtagatctcaccgaagatgggcctctccccacgaagttgtctgacatcgttacacgccgcatcgcgccccgagtgaaggcatgttgcctcactctcgagacgctcggccttggcttgaagggtggagactggagagctggtggtccctcttctcccagcgggcgatctgcggccgcagcctctccacctcctgctaggtggcccgcag

SEQ ID NO: 156429 - DNA, 425 bp, Zea Mays
cgaaatcttacagcgtcaatagatttccaacctgcgaggatcactgacacgagtaagaaggaaaaacaaacctgcggtgtcgctgctgttgccggaaactggccggcgttggtgttggcgtgaggaagaaggtgccgctgctgttggcgaaaactggccggcgttggtgttggcgtgaggaagaagagaacccacacatacactctggaggcgcgaaaaaagagagcagatagaaactgagggtgtggctacaattatagccggtgaggacactgccgatttctaccttccatcaatggagaaagttggaaaggaaagagatccacacattcaaggaaacaaagcagagaaaaatatagaaagggatccacctcagctaaaattacagaggtaaatatggcattcgcactacagacataaggcag

SEQ ID NO: 156430 - DNA, 592 bp, Zea Mays
gtcgaagcgagaccatatagggcgttgaatgattccttttacatcctccctttgacttaggtcattcttcacgtagaactattcctgcatccaggacctaggccatatcttccgaaatgtgggaactaggtggctcgccttagagcgaggtacgaagctgtaacaaccaaagttgttgtggtactgctcctttctagtagccttcgtctcataagacagttcatggatgttgcagaatcattttgcatctggttccggtccttggctcctcatggcccatataaaaatccccactttaatgatggctttaggagtaagttgatgaaggtaaatctcaaaggtttttagaacctcgaccaacaatttgtctaggggaaaccgaaacctggctttcatgaagcttctgtaaaccaccacttcgtcagcttcgggaagaggaacattatcttcccctccagccctcacaattgagatatcacgaaagtacctccccctcattgcatcaatctgcccttgtttaatagttgattttccgaagacaacatgactcggtctccatggccgatcttcggcatctttatttccgctttcc

SEQ ID NO: 156431 - DNA, 657 bp, Zea Mays
ccaagccgagcgctagccgctagtccaacagcggcacagcccatgggccacagcccagttgatagcctactacgcaaccctagctccctaactgagtccctaatcggttaatccctatccagcactccggctatcccagacggcatcctcccaggcggctgcaggtgcaccacggcactgcgcagtcgcgctcgcgcaccaaccagtcctcccactcccaggcagcagggcgacagtcataggcgcgcagccaccagatggccaagcgggccagccagtcccagccttccagcgcggccagccgcgcggcagaccagccacacgctcaggcgtcgtcaagcatcaagcctccatgactcgttaatcccaggtcccaaccttgctgccttggaggtgcagaccttgtgaagttgtgaagtggtgaagtatgaggctgtgagcgcctgagcagtgagctagacagccagtgcctggttgctgtaatgttgtttgtgatgttgtttatgactttggtgataaagtactgaagtggtaactgtgaagtactaaagtgagccagtgtgatcctgcagccgagcagaccatgtgattttgtaataatagttgataagtcttgtgtgtgatttataatagcgggtacccgaattttacccaaac

SEQ ID NO: 156432 - DNA, 2167 bp, Zea Mays
cctcggctccagccactgccacttgtgccttagccaccctcccctcctccgtctccttcctacctgccgttctaagaccacctcccgcaagccgcctcgctcacagcatcgtagaaaggtggcgcctgcaaccgccggcagcggtcgcccagggccgccgccaggggcgcccccctgtcttttccaggaaatctccgaactcgtcgcctcagtgaccaatggcgaagcgttacgaccccgaaggaatggcagtgcgccttctgatgacgtcggagctgctgctatggggtgcaccgaaggtgcacgaggtattgcttcagggagagcggcgatggcttctacctccagtgctggcagcatagcggaccgggtcgttcttggtgaccgtgcagatgatgggagacgtcaatcttgtggcactatcgcaaatactgcagcattctgccgggaggctggagacactggcatgacagtagattctgatgttgataatatcagcgcaatggtgcacaggattacaggaatcctccggtctgaggcacctgggccaccagtggagcagaaacttgagagcctgggtgctaattacactccaaaccttgttaacatggtgctgaagaggtgcttcaaggtcaggcaactgggattctggttcttccactgggcaaagcgactcccggatttccaccacacgacggagacatacaacacgatgctgtacattgtgggcgaagcgaggagctttggtatcatggaggagctcgtgggtgcgatggatagggagatgtgctccaaggacatcaagacatggacgattttattatccagttatggtaagacgagacagattggcaagatgctgtcaacctttgaggcgatgaggaaatcggaatccatctggatagacagtaaagtctataggacagttcttcacgctttgtgcaatgctgataagcctgagcttgcccttgagttctacaaggatatgcccagcaacatggaggtcaggactgatattcttcgactactaatgcgttgtcttgcaacatcagataatactatcgaaggtgtctatcttatcagagatgatatgattgagggcatgaaacatccagaggagtactgctacaccgaggctcttcaaagcttttgcatagcaggaaagtttggtgaggcatggaaagtctttcagaagatgaagaacaaattgttggctaactcatctgcacttgagaatctcctgagagggctctgcagagcagggagaatggatgaagctttgcaggtcacggaatacatgaagaggacatcaggtctaaacagtacaatgttttcgttcctcatcaatggctaccttaggaaaggggagcatatcaatgcacttgacttgctacgggagatgagagaatatggatgtgtcccactggcgtcatcttatacccaggtcatgcaacacctatttgcaaccgatcagtgtgaagaagcgtgcggactgtttgaagagatgctaaaaaaccgcgttgaaccagatattgttacgttcacagcactgattggcgggtatgttcgcagcggacatatatccaaagcatgggatgtcttcaggaatatcaataagaatgttcagaaacccacattgaaagcatatacagtcttcatgcgagagctgtgcaaggtgtccaggccccttgaggccgtagtacttttgaaggaaatgctggaatacgatttcaggccttctgagagaacattctgctggttaatttctgctttacgtgacaaatcctatttggaagaggcaagtaatgttgagagaatgcgagcatcttttaatttgcgaaaccctagagatggtttgcaattcgaacagttagatggcattggcaatattgataagtttcgaaaaatgcgcaagtctaatcctcaagaaaaagaactggcattggagttcaccagctccccgtcagatcaaaatggtaagacctccagtttcacactttctgatgacacacatcagaaagaacaagagcaggactacagtgatggagatgtcgaagaaatatgtcagattctgtcttcttctgatgattggggctcaacgcaacaggcactggagacgagatcagtccattttagtcctagtcttgttgatgccattttgaaacgt

SEQ ID NO: 156433 - DNA, 1041 bp, Zea Mays
tgctgccaaacaggccgttctctaagtttatctccaaccctcctgcttgtgatggtagcctgggtcatagagtgtgaccctcttctgaggacattgaggcattgattgctccactttggagtcttcccgaggctgagaggctaacccactttgagatgccagctagcactgatgatgccgagatggatgttgtgcttagcctgctggctggggagtcgtccgactctacccacaccgagctgatggctatcacgatgggcaagaatttgatgaagaagtggagattcggaaacccaaaggtgcccacccaaagcgttgatgtcgagtgaaccgcccgactgcacctatcgaggagaaaaagaagaggcgacttcagcgactgtcgtgcttggatcaggatgctggtctttctgtgccgatccttgacgatgtcccagtggacgccattcccaagtttgatgccaaaagcagtgataatgcataggctactggtggcattttttatgaggatgaagaggaggaagaagaagaaatcccattgatccgcaagaacagccgtttctacagaggcagcgaggggggtagcgatattccctctccagctctgtcggcacttgtcagtcttcaggggcttttaatatcagattttgatcaagcactggaagaagtcattcctaaagacatactatcggagcctcctaaagatgatgtcccagccatctgttcagaggtcccagatggtgggcttccattgcttggttctatcgggcaagaggtaaccctagtggtgtctcgcgcatcgtcatccttggagggcagtctcccatgcaaagacactgatccgggttattcgactcccatggaggtggctgaagggccttcaacttcagaagtggttgctgcagatgacccagcccccgagggtggcgctggagcccctgagggtgttgctggtagcgacccagcccttgtggatagtgcaagctacaatctagccctcgaggatgttcaggtgtgctctctttccaatgcttccatgga

SEQ ID NO: 156434 - DNA, 765 bp, Zea Mays
gcggcgccgctcctgctcacggcggtgaggtcgtcggagttggggcgagtgcgggctacggtggttccagggtcgccggggctggccataaacgaagagaaagactcggcgaactcacgagaccgaggtcagagaggggagaacaacggaggaaaggctccgggcgggtcggggcaattctgatgaggaatcgcggccgaggagagggggggtctgaggtgcgctagggcctggactagcttcagtagagcgaggggaacatcagggaccgacaagggggcgctggaccggattaattcggtcggtcaccgtgcggccgcggtggaccgccatgaccaaacttcggcgaagccgaaattggccaacgacaaggcataattgaggaattcgagcatgggtaccggtgtctcacctcggggtgaagatcggggtcgcttggcgcgatgtctagcaggctaggtgaccgacacggcgggcgcgggtctctggagaggccgagcggcgagggcggagcgcgcgcgagagcgagactgtgcgaaatgggacaggggagcgagtgcgggtgtgggcggtgctcaaaagggagctgggggcgtgggcgggcgatgtggacggggatcatggcgagcgtgcgtgagggcgcgtgtgctagtccacggcggggcgcggggaaggcggagttgataggggggtccaacggcgcagcaagagagagagcgagcacgcgggggaaacaactcggcgtgctgacgaggcgggcccgcg

SEQ ID NO: 156435 - DNA, 1100 bp, Zea Mays
gctcgggctatttaaaatagagccgttcgatctgggatagacggcggggattgggtggccggcttctgccttcccctccggctagtagaggcggcggcgcccgttcccgcggcagaggactcgccggagacgaggggcgcgggggctctgcgggtccttgggacgacctgggtggcaggggaggttggggagagcgtggggaacccaatggttgggactaggccgggacaggggcaccggaggggggtggtccacggcgaagtggctcggcggcggcgctaaaggactccggcgaggaattaagcgcagcgggggcagtaaaaaaggaagggagagggcgagagaggttccttacctcaaggcgaactccggggactcctcggtggcggcaaagacgcggtggcagctcgagtcgacggtggcggaccccggcgactgcgcagagaacggcgggtgagcgcgggcagaggaattcggggagggggaggggaaattggggcgtgtcccgggttgcggacgtcggggcgaagctcaccgtggcagaaggcacggcggggctccaacggcgacggagaaacgggctcgggcggcggcggttaatggcggcggcgctttggcgtgtgagcagcgtgggggaggtggaagggaggtctgcaggtgcgcaaatgagggagggagagaaggcgagcaaggttctgggctcaagtggccgagggcgaggtggttgcgagctccacgcgcgacgtgggcgcggagtccgcggcacgcgcggctcggggcggcggttacgcggagacggaagagctgaccgctcgggcccgcgagcagagagagcgggggaagcgggcgcgggcgcggggaaggcggtcgcgctgacgggcgggcccgccagggcagagagaggagagggggaaggaaggcgcgcgggggatgggccagatgggccgaaaggccgagggggcgggggatgtgggcttctttccttttttcttttattctggcatttgttttcccttttctttttatttactctatttgattcaaatctaaataggccacaaattcaaattagcacttccaagtattatgcaccaaacaaa

SEQ ID NO: 156436 - DNA, 299 bp, Zea Mays
ttttttttttggccaagatgacaacaccgaggagcaaggaagctagtcagctcccagaagtttctctgctacaattgcggtcgggagaggtacgggatagaagcgaagacaggattgaaccaacaataaaggcagcgaacataaaattggacgtcctataaatgctgctgctggtggtacggtgcatggtctaatgcaaggatgctattttggcgcagagactgcttattccggcctgggaagaagtcctgaaagaattcggtcactcctcggaccccgatgaacggggacgtcttagc

SEQ ID NO: 156437 - DNA, 693 bp, Zea Mays
aaggacttcacaccctggttgaccaaattctgggccccgatcgccaaacctccacagcgagatcctagatactgtcctcggggcgcggtggggcttctaagctcgatccccacgacgtgacgatgacgaattgacggattgacttcggcggctcccgccccctctctcgattttccaccccagcaacgaacggtgaggaacataggtacggatgtgtggggaagaggggaggtcagcagcgctcgccctcgtatataagctgaggcaaggtggttgggtacgagctaggagcggcgattccgcggtggttagttcagcgatggcggtggagttctgtgccgcaagtcagggcgatggcggttgaaacgacccaaccgaggagttcggcgtcgcgattcggttaacataacgcggccgcgacgcggtggacttggctcggttgcgcgcggcgcgcgggttgttgcgaggaaggagaatctagtgacgtgggggccatccgccagagagggaaagaaaccggaccagacgcgctcagaagtgaagttgtggctggcaccaggcccacgtgtaagagatttacgtgagggagatgacacctggtagtgcgggttcacatggaagcgagggagtcaaacacacaggcgcgacgtgagtggtgaagtgagtgggccgcgcgggtgaagttaaaatggg

SEQ ID NO: 156438 - DNA, 460 bp, Zea Mays
gatttgtggtttacgattcatatgagttggtcgatgcgcgaatatacttgtgaatctgtgggtttataaaatgttgtagtatatgttatgtctcggattgcggcaataaaaggcaagttgacgtgtatgttatttagcggcgatgtcattgctctagttaaccaaattgttagatggcgtggttaagctcgtaatcacggtgaattgcttgttgtagtttacatatgtatggttacggtcgcgggtaaaaagtagtagtgttcatatgctgtctacgttaaaatgcaaattattgtgtgaacaacatttcgatatcgactatcggggagaatgtgttgttaattaaatatggtacttctagtgctcataatgacacagataaaaattagtaagtccacttgttagttctcacttggttattttaactctaacaaatgtcaaagtgttataataattcaag

SEQ ID NO: 156439 - DNA, 469 bp, Zea Mays
accggagtgggagatttcggcggagcgccggtggggactccgccgtgggcgtggctgcgtaccagctctgctcgatcgcgggggagggatgacgacggctacggaccgtagattcatgatcaaacggtgcaaggaaggctcgagttgcgctcgatcgtcgaccacagatcttaaatcctacggtctgcatagaataccagttgttaaacctaaagatctaatctgggtcgtccagaaaggatccaacggctcaaaatgcacgataccccttcggccctggaaccttgcataagagcccctgcgtttagtcgaaatagaacccgccgtccagtggggagttttctaagtctagagttttcttgcgccaagccccctgctgtctctggtaatcttgcgcccagtccagagccgactgtaaatggaataatgaattagaaatagatttttaatatgaaaataaaccctagaa

SEQ ID NO: 156440 - DNA, 389 bp, Zea Mays
gaaggaagaagaccgtgtcctggccattggatcttttgccaacatgcatgattagatctgggtagtgcttcgcccgcgtatgttagatgtcgatcggatgaatcggggtagacctctggtatttaaaatgtggagcgttggatggcgatccgacggccaggagatggtaccggttcggaatgaatctggatctaatctgcaccattcatttgcaattgtgcggcctagatccgtagataccccttcggcctggtgtttttacagaagaaatcttatgaaattaggtaatgaacctgcggttcagtactaatttgtctgagtctaggtaattttaccccaaaaaccctgtgttctctggttatcttgtgcccagtccagagaattattaa

SEQ ID NO: 156441 - DNA, 551 bp, Zea Mays
gaatgattggtgtgatttggaattgtcaggggcttggcaaaagtgtgaaaagtgagttccttcgtgatattatcatgaaagagaaagttaacttcattggccttcaagaaaccaataagaaagactttgaagaatcttggctgaattttattagtggtaatagaaattttgtttgggtttggtctcctcctaatggtaggtcaggtggtttgttggttggttttgatgcggaaatgtttgatgttagagaaaaagagttgggggaatttatgattaggttgttggtgattcgtaaagtttcaggttttatttggaattttattaatgtgtatggtgctgctcaaaatgatcaaaaacagaaattcttgagtgagttatctgctttttgttctaattgttctcaccctttgttgattggcggtgactttaatattttcagaaaggaatcagataagaacaaacctgggggtactaacaagtggagctctctttttaattctattattgaggttcatgatttgattgagttggatcttagtggtcgtcatttt

SEQ ID NO: 156442 - DNA, 646 bp, Zea Mays
atccatctctacgattaggtgggtgcagccctcaggcgatttcttgaagggcccaaccaagtccaaccacaacactgcaaatggccaggtgatgtgtatggtttagagggcttgagctggcatgtgcgtctgtcatgcgtagtattgagaaccttcactggtacggacgacctgtttagtatcaaccatggtcgtgggccaatagaatccttgcatgaacgccttgctgacgagcgaccgtggggccgcgtggtgcctgcatgttcctacgcacctcggctagcagctgttgtccctcctcgagtgtcacacacttctgcttaatcctagaggcactcattttatagagcatccccttgataagcacgaaggtctttaccgtgcgagagagccacctggcctcggttgcgtccccgggcagagctccattcgataaacgatcgatgaggggcaggcgccagtcctgtgcaaccatctcgcgagtttgtgcccgtggggtagcttggtcattagcctccttgccctgctccccttttgtctctttgatctttacatatgactcgtagagatcgaaggtgaagatcccatccggatgggttttcgccgtgacactatggtcaaaagtttgtcagcgttcgcgttgaag

SEQ ID NO: 156443 - DNA, 1653 bp, Zea Mays
gtgaaggaagcttgggatgcggtgaaattgatgcgtctgggagccgatcgcgtgaaggaggtgaacgcacagaagcttctccaggagtttgagaatatcaagttcaaggacggcgagtctgttgaagatttcggcatgcggatcacaaatctcgtcggcaaccttcgcgccctcggcgaaattgttgaagacatccgcgtcgtcaagaagttcctacgtgttgtaccagcgcggttcacccaggtagtagtcacaattgaaatgttttgtgatcttaaggcattgtcggtcgacgagctggtggggcgtctacgtgcggcggaggagcgcattgaggacaaggtcgaacaggtggtcgacaagacggggcgtcttcttctcgccgaggaggagtggttcaagaaaaacaagcatcgcttccgctccaactacaaggagggaggtggtggctccggtgccagtgctcccaagcacaaggcgcagccacgatcagaaggtgggacctcaggttcagtcaagctgacctccgaggggacaccacggagaaaaggtcggtgtcgcaaatgcggcatctatggccattgggcggttgactgcaaacgttcaaggaaggagaaagcgaaagaaccacagaagtcggaggccaatctggccgtcggcagtgttgaggatcatggtgccctgatgttgtccatgtgcgatgttgcgcataactcatcttatgatgttcatttgacagagaagataataccaatgactgtccctgatggtgtgtgggtgctcgacactggagcaagcaaccacatgactggaaacatgtcgatgctgacacaacttgatcaaaaggttcaaggaacagtgaagtttggggacggatctcgcgtcaagatcagaggtatgggctctgttgtgatccaagaccgtaagagtggtcataaggttttgactgatgtttattacattcctgagttgaagtgtaatatagtaagtttgggtcaactggaagaaaaaggttttctttttgagggcaaaaatgggaagctgtgcatttatgatctggaacacaacctgttgatttctgctcctagaactggaaataggctgtatactgtcagatttggtttatcttcacctatatgtctgttagcaaattcagatcaaaaggcatggcagtggcatgctaggtatggacatttgaatttcagagctttacaggaattgggtgagaaaaatctggtagtggggatgccaaatgtgaagaaagtagagcaagtatgcgatgggtgtgtcttaggaaaacaacacagaaagcctttcccacaggtatctggttttagagcagaagaaaaccttgatttgtttcatgcagatttatgtggtcaaataactcctaagagtgtggggggtgcctcatattttctgctagtggtagatgatcatagtagatatatgtgggtggagatgctcaaaacaaaagatcaagcatttgaattgttcaaaggcataaaaatgagggctgaagttgaatctggtagaaggctgaaagccatgaggacagacaggggtggggaattcatttcaaatttattctcaaatttctgcagccaagaaggaattaaacactacactactactccatactctccacagcaa

SEQ ID NO: 156444 - DNA, 657 bp, Zea Mays
cgaaagaaactgttgctggctctagcgagggtggtctggtttatctaagatacacgttccggtatagaagccaatttgatgagccaaatgacgattggctaggggctgttgaggcaaccagtgatgagctgctgggagcctacacgaaggcagaagacgaagccatgaccattgcctttggtgctcgaggaaaaaagagactgaatagagtttttgatgtgattgggtttgtttatcctgactattgttttcctgtttgaaaacaaggagggaagagaaaaattgccacttcgacttcttctggtgcacagaagccgaagagagctaaggtcctgacccataggctgaagctacattgtttagaaaagacggttgtagtgcctacgacagagaaggtgaagtttgttgaaagtgccgaagttatccccttagctctggaaacaatttttgctatgctagtcgaagttagtgtcgatccggtagaagagccggggacaaagaaaacagcggaagaatagtcaaaactgttgagtcccacaatagcaacagggttgttgaagctatcaactactgcaacaaggactcctaggaagaggagaatggctagtgttttggatgctgttttataatccactaagttgcccacttctcctacta

SEQ ID NO: 156445 - DNA, 740 bp, Zea Mays
atcgcggagaagacggcgaacttctccctctacggtggagctcccctgggcggtactctccttgccggcggcgaactggatggcggccagggagcccaccgcggcggacgctatgccagagcataagccggactagcctcgcgcaggagcagaggggtacggtggagcaggagcttgggaacgagggtgtggacttgctaccatggatgagcacaacgtccaagagccaaggcgcagggcaaggatggtcaggtaagcggagggagttccactggcgacgagggaggaacgtgtcgggggggttgacggcgaggctggcctaccatggcgcccgcactctctctctttcagcgctacctagcgactcgatgttctaggggctcgaccctggtgtggttcgcggcgaggccacacgatgtgggactttatccccggaatcaggtgacaacaacccacccgaatcctagtggaagactccgagccggcatcttcgtagtttctgttggcgctccccgattctcttggggaggttgacgatgtcagacaggtgggtccctcggctagagagagcagtagcagcacgcgaagcgtaccggctgacaggctacccggttgggccgagtggtggagggaagtcgtgggctaaaagcaaggttaaggcccagttcggttaacactttattctttctttttctttgttttgtttccaatttcaaatattcaagctagattcaaatccc

SEQ ID NO: 156446 - DNA, 435 bp, Zea Mays
gcgactacagggagcacaatgagcggaaggagcgtgagcggagcaagcagcggcgacgagggagactggggctagcagggaagacgacaagcgagggagcgaggagggcgaccagagcgtggaggggaggcgacgggcgaggagtgcgacacaaagggagtgagggaaggaacggggagtgctgtaacagtaaccctagcgagatctgagtgcggcacgtgggagggagtggagggcacgtgttacagaagcgagccaggctcggttgagaagtccaccccgagcgtatgaattgagccaagttgggtgggtgcttttgcatctactaggcgaggcccaagtactaatgcatgcaaccaaacatgttgcttcttgcacttatgaaacctggctcgggctgtatacaaggaaccaatcgcgtccctagggaacatc

SEQ ID NO: 156447 - DNA, 413 bp, Zea Mays
ggcccctctcctattattgctcttggattctagcggttactcgaaggaaagagaatatattatccacaggtgagatcgatagtctgccggcctagtttgttttcaactccgttctatctttttttcttgctcatcggctcttctatctactcgagctcgctgtcgccatgcatcagatgggatttgtgcattctatgaatcattatcgatcgatccctccccaccttacccccacatccttcttcctctctctcgcatttcgttatgaggactcgttcgctctatatgctcctacgagtatcatcttctttttcttccttgtggtgaagtacagaacaatttttgggcgagatctgttttgtttcccttccctccaccacggcttttttatccatggtttgaggagtcattga

SEQ ID NO: 156448 - DNA, 855 bp, Zea Mays
agcaactgtaccggccgaacggggccatgaccggcgctcccgagcgacggacaccaaatcggacctaccccgagcatttcccctaacttaattgtgcaaatggtgatctattctcttctgttcacgagaacagcggagactacggacatttgatcgtgttcccgacgattaacgaggttctagcctaattggatgggtcagcgatcatccagagcaagtgagaatgccgaaacaagaacgcagatggcgagaagggacctgatttgggctggccacgacgaggtgttcttcgcggtggcagagacttgatttgggggaagtttgaaattccaaagctcgggtgaacgattacgagtgggagtgggtgctaaggcttcacgatgacatagcgcagctgccccggccatcaatttatagagggcatcgacggtggccgagaatttgaagaaggatgcgcggcggtcggagataagaaaggaccctggcgccgtgggttcgtgtcctcagtcgtggcgagctcaccggcgatgatttaacgactgtaaagagtcacggtgacgcgacagaggtgctcggatacgtggcgtaaggccgagcgacggcgatccccggcgggcttatctgctcaagccgcacggcagaggggaagtactgggggggtcaccggagtgctgtccagcgcatggctttaccgagcggtcttatctggtcaccggcgacgtgaatcgcaacggcggcggtgtgaatcttgacgcggaggagtcgccggcggtgaggatccaacgctggcagtctgatccttatcggactactgtaccatcgaagtaggattcagttggcctgacagtcaatgtt

SEQ ID NO: 156449 - DNA, 626 bp, Zea Mays
aaacatattcatttcaagatctgctgaacaaaacttgacattcttcaaagtcctaaaatcaatagaggtctttcaatagagtcctcctcagcagcaagccttcgaagaactgaaagattatctgataaagcttacaacattatctccaccttcaccaggggatccattgttactctatgtatcagcttcacacacttacataagcgcaacattggtccaggagacagtgaccgaaggtatcaaaaggcaaatgcttgtttatttcatctccgaagtgttgagtccatccaaaaaaattatacagaaatggagaacgtcctttatgttgtcctaatggcctcaagaaagctttgttactatttttagtcccacaatatcgttgtaccttcgtcgctaccacttaaagatattataagaaatagagaagcttcgagccaaattggtaaatgggcagcaaaactcaatgagttcatcatcgattttgtgcacaggtcctccattcagtctcaagcactggcatattttattgctgattggaccccaggctcacaagatgaagcatcctagtcaaatgaagttgtttggccagtttttttgtgatggctcatggggatctttcgaagccg

SEQ ID NO: 156450 - DNA, 783 bp, Zea Mays
cttaggggttgtaacgtgttgcttaatggtgtggtcgtatcatcctcctccccttgaaaaggagtcgtcctcgactctgaagtgtcttcacttgtatatggtaagaggtcagcaacattgaacgtgttgcttacgccatagcttggtggaagatctctcttgtatgcattatcattgatcttggcaagaacacgaaatggaccatcccctcgtggcatcaatttggatttgcgctgctcaggaaaatgctccttgtgcaagtgaatccaaaccaagtcccccggttcaaataacactttctttctatgcttgttcatgtttgtagccttgcgcactgctttgatctcaattgcttccttagtcttctcatgtatcttttttatgtatgcagcacgctcggaagcttccatattggttctttcctgcaatggaaggggcaacaaatctatcagagcaataggtttgaacccatatacaatttcgaaggggcataaattagttgtagaatgtactgccctgttataagcaaactccacatgtggcaaacattcctcccaatccttcaagttcttctttaccattgttcgcagcagcattgccaatgtacgattcaccacttcagtttgtccatcagtttggggtggcatgttgtggagaacaaaagtttagtcccaagctttgcccacaatgttttccaaaaatagctcacaaacttcacatcacggtcagatacgatggtcttgggcactccatgtagcctcaagatttctctgaaaaacaaat

SEQ ID NO: 156451 - DNA, 782 bp, Zea Mays
gatcgacatagccaaatcgacgtgtgtgcgacgtgaatcggggagtgagtgtgcggttaatgaggtcgggagtgcggagggggtgcagggaaggggcaggggagcggcgttgtcgacattgttggtagaaattgatgagcctcgaaccccagggttcgggttcaggatcggcattgccaaatcggtgtaataggggagtccgtgtgcggttaacgggtcaggagcgcagagggggtagcgacgcggggaagaagggcgggcgagcggtgctgtcgacgtcattagcggattggagcccagtcaggctgcagagggggagggagaggcggaggcatggttgtgccatggtctacactacaatcttaataatagtatagataataaatggtgatgaaatttatatgctctagcgggcatagttgttagaggaagtataataagctgatgtagaggaacgataaaatatgccatatcagatttatggtgatgtggaagaaaaacaattgagggtagagaaaaagcgagctgctcactaccagctgagagtgggctagctactcactgactccaagactctctatgagaaagagatgtggaccaaatattaaatatacagcttgtatcatgaggtggttattatatgagcaaccttttagttggttatatgacatagcaatatcataaagcgcgttatatgctatattattaaacatgctcttagatcattctcaattgaggttgcatgatattaattagtagactgcatagaattttcatgacat

SEQ ID NO: 156452 - DNA, 592 bp, Zea Mays
cgaattcgggcgctacggtgggtaatcgggggcgaggagcgatgctcggggttcgcaacatgctaacggagcaggctaggccatcaatttatagtgatcaacagcggtggcttcgaatttggggaaagaagctggcggccggagaaaggggtgagttaccagcgaacgctatcgtggctttcaccgaggcaatgtttcatgcgatggacaggcttcctatgacagtttactgtgacgtggtaaggcttcgaagcacatggcatccgggcggcagactccaacgaggtcacctagaccggccgtagggcaagtgggtacgacgtccagcccacggtctcatccacggtaaagatattttcactgtcggtcgtaatccgcacaccagagagcacgaatcgtagcaccggcgaggatcgcggcgcggagatcaccggcggcggtgcactgaacctggcgatctttgtcaggctactgtaccatcaagaccttcatcagtctgtctgacagagcattttcaggggtgtttttcacaatttttttatgtggcaactctctaatccgtctgtaacaaaattaatctcctatataccag

SEQ ID NO: 156453 - DNA, 501 bp, Zea Mays
aaggacacggcaagagctttgccatggccaaaaatttattagaaagggacacttacaaacactggataggaaagacaacactaggggagagggggggggcaaagaaaagaaaagaaacactagcaaaacagcccactagaaacccagcacgccacacaaacaaaatgctaaaacgctaaaactaactagaagctctttgcgggttgaaatcttctttgacgaaattggccacttctcgctcgctcttctcaagaccatgaaagattcttcgatttctttctttccaaatctcccaccaaaagtaaatacagagaccatcgaattccttgcgagcagttttctctacttttagtctgcacttcctccaccatccatagaccgacgagcactggtccaactttggcagataggagaggttgtaccacgagctgagccaactccaacacgattttgtgaatatgcaatcttttgctagatggcccaccgtctccggttctcgct

SEQ ID NO: 156454 - DNA, 373 bp, Zea Mays
gtgaagtgcgtgcttggtttgaatttaggcgaagaaaatggaatttgggcactcagcttggaaacgatcgctcgaaacgggtaattgagtgaaattgaagcctggtatatcggattggcgtgaaatttggcgaatatgttactggaggtgttgtgaaggtgcctgaaaaatttggtttcaatcggagcattttttggctggtttggacatttcaccgaacacgtggtatgcggtgagatagggttttggagatttggtcaatttaggctgtgaaaccctccctaaggagctagaaacctacaggattacttcaaggagcatacagggactcaatcaagcacttggattctcaggatttacacaagaatttgaa

SEQ ID NO: 156455 - DNA, 1211 bp, Zea Mays
attaaatatgaattaaacaagtttctagaattatttttatactagaaatcatttttttgttttttattctgaatttctctaaagattctggactgcagacacaaaaaccagggagctcggggtcccaatcataaatattaggacttataattccctatagcactccccggacgacaggtttatttcgaaataaggcagggtctctttaataaaatcgcccgcggcgaaggggtatcgatgatcgcggaccgtagatcgcttgatcagtggtcgtgatcagattacgaaccggtataccacgactgccctcagatctcgatccgacgcccgagacctaatgaaggcgtgatctatttcgaaccgtaggatcacgatctaacgactcccttttttaccaaaacgaattggtatcatctgatctaatctccaccgctcatcacccgctcaacggtccaccagttgtcttcttcctccatcagctcagcacggcggtggacgcagagttccacccagaccgcacaccgacacttgcgaaacattgacctacacacggatcctggccccggacccgaattaatcgaagtcccgaccatgctgaacctattgacctccatcacgccttggcctagcatgctaaaaagtcttgcacaacgcaccatggctccgcatagcgaccatgatggagagccccgacacagggcccccggcgccttcccaatttaatccaaagggcactaatcgtggcataggtgaactcgaaccgcttaaggagatggttaccgtgattatgggtgatggtgtggacacgagcccaaccgcggccatgcagtcccctctcttttcttctctgcgcttggtggcgaggcgtattatgggtcgaggtagccgtgatgcttgggttaaatagacgagcggagcggattagggaatccatgcatcgtccataaccataccgcgatgaatcccatcggatttcctggaatcacgcgtggtttgttacggtcggctttgggaagaagacgactgacagcacggccccacccatcagcgagacggtgcgcgcgcggaacgggagggactgacggccgggccccatgcgtcatttgcaccagggacgagtccgcgtgggcgcgactgagtggccgacggggcgggcccacaagtcagcgcaacacggcgtggacacagactgtaggtgtggggctgtcacg

SEQ ID NO: 156456 - DNA, 641 bp, Zea Mays
gccatctatagcctcctccccctagtttactatgagaatctcgatctcagggtcggcactataaagcagaacttgcagactccttgctcccatctatcaaaccatatccttctctatacccgagcatagagtttcagagcccgaccaccattgttagggtgtgatctagtgtttcgagctcgccatagattcaccgtcatcgagacaagcccagaagcttcactagagtctagaacgccccgaacacctagctttaccaacccgtgttgtcgggtctacggtagccattgacttgctaagctaccttgtcgtcgatgagtcattatctgtcatgccctactataaagaattgtcctagaagcttcatagaaaggcatttgtcctgttccagcttttccccaccctgtttaggctctatgtgtcaggaaattgctcgccgtcaaacttggtcaccgccatggggtcaatcatcgccataggtcgttacctagttactctgctacccttaattttccatcaatgagtttctcatatcctgctcttgttttttctagtagatcccattgctggagacactcagagtcatcgggtctttgttctctggtgccgccacgaggaacaccaccgccccaacacttgaa

SEQ ID NO: 156457 - DNA, 486 bp, Zea Mays
ttcaaaccggctatatttctcccttccctctccagctataaaagttgaggtgcgctcacctccttctcctcgcccctgctcttttctccccgtcgcaatctttctctccctctcgctcctccatgcacgcgtgtgctccaccgttccctgctgctcaaccccgtcccaccgtgccatcctctgtgttcggcatgccgctactcgtctgatttctccttacttgcccgtccgcactccatggtttcgcagctgagcctcgacgccgtttctccgatctccttgcttgttgtgccacgtgcgtgcctgctctgctctactcagctcagtgctgccgtcaacgccgttctgcgctgctgctcaccgttgtctaatgttccccctgcgcagcctctaatcacgccatcgctcgtgtcactgctccattgctatcatacagtgcgccagcccctcctgtaactgcttcgccatcgttcttcgtctcatcag

SEQ ID NO: 156458 - DNA, 431 bp, Zea Mays
tccgtaaaccacgctcgtcctccgcgctgctgcaccgacgaatcccgcccgcagctgcagccccgcagcgacgaatcccgcccgtagctcccacccatagctgcagcgacgaatcccgcccgcggaggcttccttctatggcgacgaatcccgcgctccatcctcgaatcaagaagcggcggttccttccatcctcgaatcgagcagcggaggattccttccatccaaaaatcaagcagccgcggcttccttctatggcgccccttccttcgacggctagccccgcagtggctccctctaatggcgttggcaaatcttccatccggatggcgttgattgcggggaaatcctctccctcaaagatctcaagccaccgcgtctatttctgccttcccgcctccgctcccactcctctctccctccctccgcac

SEQ ID NO: 156459 - DNA, 511 bp, Zea Mays
tttaaatttgacattctaccacttttctaagttaagacggaagggagataaaaatatcagccctccgatccgatctttagggaatcagattgtcgatggctctgtcccgatgcaaactgcatgtcacaatacattcattctctccgattcactcttttcggtaggggggacgaagccccctccggatgctaaggagttatgtgccaatcaagcccaacagtcactgtcaaatctcggcatcctacccgtcgtggctggactgtctaccacctataatcctcccttgtgtagggttgtgaacagcagattgagcaacacacaaccgaaagggaagcgaagctcggtagtgatgaaggatcaggtttaataccaacaacttcacctatcatttgtgcagtcaacactctcccagttaagctggatctaattgatgctcataggaagaatcctgttgaggagagggtatagatcattgcagctcctatcgacaactttgcctctggtaatttcc

SEQ ID NO: 156460 - DNA, 698 bp, Zea Mays
ttgtcaaagcaatgaagcccgaaggttgtgtctttgatttgctgatggtggacatgctgtagaatgtagggagagtagtaggaagatgtgtggaaaacctccttcgactgattttgccttgcttcaacaatttccttctgcttttgtataattatttggaaactcttcgtggtgtggcccttattttctccacaaaagaggcagaacaacttccttggttgagagttgtatcttcctccaaagcttcgaactcctcttcctcctcttggagctagtgggcaaaagttgttttgagaagattgctgttgggtccctgtctcatgaggttgattcttctatcattggggctggctagttttgtcttcatgctggcttgaattatgaatctttgtgatatgctttgagtggaaccttcctccgaagcccctagtcatctccacatatctttgggcatctttccttctttggcaaaagtcattgtttgctctgatatattcatccatctttcggagaagcttctccaaggattggagaggttttctagcaaaggcaaatggttctggacggaaccccttcatcattgcttcagtgacaatctcatttggaactatcgacgcctaagcttgaaaccaaaggaaccttcagacaaaaggttgtagatattcatcatggtcctaggtgcactagaacagggcctg

SEQ ID NO: 156461 - DNA, 525 bp, Zea Mays
aagctatagggacgaaacaagcaagaagcaacggtaatggaaaggtgggttcgtcaggggagagctcactcatcactgcgagacgacaaacttgcccggggagccatgggaaccaaagcgagagagtgcgggaggaagcaggagggcaggagagcgcgtcggctgggagatggcgaatcctaagagctagccaaaaatgaccagcgacggggagacgatggcgagccagatgcgatggcgaagttgatgaagagactgttggaagctttttgcacggagtttttcttttttttatagagcacgggctgtttagctagtctgttggagctgctattagatgttatttatagagtttaatatttacacagagacaaataaagagtcgagtcaaaaataaagtctgtgagtgatgttctaagtgcggccaatgactacaaatgttatttatagagtttaatatttacattttctagtttcttctgtgtgtcacccttgaccacctgcgccgtgtctcttctgtgtgcc

SEQ ID NO: 156462 - DNA, 1258 bp, Zea Mays
gtttcatggttagacaaaggtactaagtaataaacattatttaaacaattgctgcaataaattttatactagaaatctatttccataatcatttatcctctttctctaacctctggatcatgcgcaccattatagaaaagcacatgggcaactttataaaactcgcccagactcagccaaccatcaagtggactgcgggttaattatttaatttcatagggtctcttttgaaataaggctggccgaaggggtatcgatcgatcagggctgtcggatctaaaaccgacccacgagattagatcactcttttcatcgaaccgatatcggatatggaccgctagatcataatccgacggtcaacaatagtgcatgacccaaaccttccagaaccggtcgatttaatatgtacggttaggatttaaatagctgaaggggtattcattgtcagatcaggagcgtccgtagccgatctaacggctgatcacctcttcacaccacaatcccacatcagggatccaacggtccctggacttcttcccctccttgctccaagccgcgatggcgcgcacaccatacacggcggcggccacgccggagagcaacgacgccccgattttgagccctaacctatgattcgaatggtgctacacgatggggcgaaaatagcaaactcgggtgtagggtactcaccggagattaggctttgagtaagcttgccctcgctgcgcggcggctcggccgcgagagttggagtgcagcgacaaattcgtgagatcctcggctccaagcttcgcccgcagaaaacctgagaagcttccctgcgttctagcgaagctctacgaccagccgtgagctccgattgtgggcggtgtgtgggtttctaccgcggcggaccacccgtgcgtgatgacgacagcgtaatccacccggttctacagcaatggtggtgggttatgaggaatagaggagaaccggtcctaggattatggatttatagccccagggagtccgaccatggcgcccgcaactacctccgcgattggcgcatgtactccgagctccgcagatttcgagcgcgcgcggggaggagacggtcagatgatgcgtggtccgtggcacggtgggcaacaggtccacaggcgagcgcgcgcatgagagtctggccgggcgagggcatgtacagctggcgcaacgatccacggatttcccggcggccggtgtgcggatgagcgagtcgcgcgggggaagaagaagactc

SEQ ID NO: 156463 - DNA, 1076 bp, Zea Mays
ttgatgaggatagaataacttgggagatatatgtttggtaacattgctcttgatataaccttgttgcatctgagcaacacaagttgcattatcttcatagataatggtgggtgattcaatggaatgaatcccacatgatgattgaatgtgattaatcacccttcgaagccagacacattcacgtgaagcttcatacaaggcaataatctatgagtgattagtggatgttgttactagagtttgcttggatgacttccaagaaatagcagttccaccatttagaaatgcaaacccagtttgagaccttccattgtgggggtctgaaagataaccaacatctatgtaccctacgaggctaggatcttgatttcttccgtagaatagactgagatctgccgtgccatgaaggtttcaaagaacattttttattccagtccaatgacgtttggtaggggatgcactatgtctagcaagtaaatttaccgcaaaagcaatatcgggtcttgtattgtttgctagatacataagtgttccaattgcactaagatatgggtactcaggacccaaaatctcttctccttcatctcgtggtcgaaaaggatccttatccctttctgggcataagtagactgatgaatgagaatgcccgtgggaaggtgctcaagttgcaaacctaagcaaaatttggttttacccaaatccttcatctcaaattccgtctttaaaagattgtgtgcctcatcaatatcacgtttatggccgatgatgttcaagtcatccacatatactgatatgatgcagaaacgtgtagaagatttctttatgaagacacatggacaatcatcactgttagaataacccttattcataaggaattccttcagttggttgtaccacattctccctgacgtttaagccatatagagatttgatgagtttaacacaaaacatgttatgatttttgccattattcggtacaggtattccatcaggaattttcatgtatatgtccgaatctagtgacccataaagatatgcggtcacaacgtccatcaactgcagaagtagacgttttt

SEQ ID NO: 156464 - DNA, 649 bp, Zea Mays
caacattactgtgaagctgtcacaagtctttttggaaggtaaagcttctcccttgcttgttctacttccacatatgctggtgggtatggagttgttatgtgtaactcaactacaatgtatatatacaggttgtaggatgtaacttgggatgtgggtattttgtaacttcataactgaaaattgatgactatcgattttatagtttcatttgctatacactcttgttactgaaaagcacaattgagaatccatccagtttgagattaagtcgcttagtaatatgttataatcaatgtgcagtgttctttttagattgaattttcaattgttgataggaatagaaataatatgttatatttagtgtgcagtgttctttctagattgaattttgaattgttgacatagaaataaaacaccaaaagataagttttattcagtttttgttacaaaagactctgaaaggcttcttagtatttttggttacaatggaaagatttattactgtagtctagcataagagcggtgcaatttcatgtgtgtatttaccttttaatgttttggtgaatgttcttctattagaaagttacagcagcctctggtgacatgagaaaaactctaggcgattgcaggtacgacactcttgtttttt

SEQ ID NO: 156465 - DNA, 435 bp, Zea Mays
cggtcagctttgtctcggtttcaatctgtattttcgaagccttggcaatttttcctggagtagagcttgaagtttttatcgtctctagcgcatctaatacattaatcgtcctttttctcttgggggtcgccgccagatctttctgtgtcttcggtgcctccgctcctgccgaaaggcttagagcttctgatgttttcgtcccttcggctatcggttcttcaattttgtcagccttcggcattgcagccagctcttcaatcttctgcgtaagagcaggtcctttggcttcaatagccgaagaggtctcaccgccaaattcaagcactatggctggttcaatgtagcgtggtcggtgagtaagaaccttcacctttttcctcttcagcacaggctcgcttgaggcggctgaagcaacatccttctcagaagctgcac

SEQ ID NO: 156466 - DNA, 808 bp, Zea Mays
cccaaagtgcctcggcaacattttttcagtgtgcatcacgtcaatgttgtgtggaaggagcaggtcgtcatgataggggagccgagtcaagcccgacttatgtgtccacatatgctgctcaccatatcccataaaaccaccttctgtattggccacgagcccatctatctgttgacgaattttggcaccagtcatcgttgcaagtgggcggtctgtcactatgacacctttcgtaaagttcttgatgtctaggcaaaatggatggtcaggagagagaaattgtcgatgtttatcgaaggacaaatatttgccaccctttttcaaccaaatgaacctaagagcttccttgcaaactgggcatgggaacttaccgtgaacacaccaggcgcagaatagctcatatgccggtaagtcatgcatggagtattggtaccaaacatgcatttttgaagtttgtcttcgtagctcggtcatacgtccataccccttcctcccaagcacgtaccaattcatcgatcaaaggctacacgcccattttattcccggttgttcaggaattatcaacgacacgaatatattctgcctttgaaagcacacaccggggggagattgattgggataacaaacacgggccaacatgtgtacggggcagcgctcattccatagggattgaacccacctgtggccaacgcaacacgtacattacgagcctcttcggctttatcacggtgaatggcatcaaagtgtttccatgcttcaccatcagatgtgtgcaccatcttgtcaggattgtatcattttccatttt

SEQ ID NO: 156467 - DNA, 746 bp, Zea Mays
gaccgaagtccggcgacgatgatcttgctgttctggtgagacagggcctcgattcttgcttggagaagcttcacagcttatcggggaagctatccaagggctcggttgaggtagaaggtctctggaaaaggctagccacggtggccggcactcgggtggctcgggcgggtggcgcagagctcgccggagctaagggtggtgtctggccagtgagggtgagtgcggagtgaggtgaggcacgtctgggggtggccttaaagactcgggcgagcacagtcgaggggtggatctgacacgcgctcggggtgtgcgcgggcgagcgccagtgcgctctctggcacctgggcacggcgttgagcacgaggcagcgcagagagaggtcatgttcaagcgcggattggctccaaatcttcgcgattatggcgatgatcccgttgggagatctcttcccctcgcattcctttgtcgtttgtgtgtggaggcttatgggtttcactgactggatcaagagatatggagggatgaagttgggtttgtctcactgctgaactctgagagaaaatcctgggtttgacgtgtctagggcacgcatctcgatgccatcttcacacacattgcagaggggttagtatagaacaaatttgtcaatgggggcttaaggatttgagctagggattaaggtgaacgcgctcaagttctaggtgaaggctgaaattcagaattctgaatttcagattctccctaga

SEQ ID NO: 156468 - DNA, 926 bp, Zea Mays
ggcaacacagttaagtttttggacctttgtgcttgatttaacacttctttgaagtgttagcatgaaacactaagatctttaaaaaaggagatgttaataaaaaatacataataaaatgaggatacaaaaaaagtgtggaactcatctcatatgccttagcatttttattccatctttctttgtatcaaataagtttacaaacataacttcggctccttcacacaaggtgacacgaaggttttttgaaggctaagcaacacgaagctaagaccctcgaaaggtaaatttatacatggcattgctcatctattcatagggaagacaaacagtctcgtacaaaattacattcatgcccttagggttttgcatacatgattcacaaatgaccttgggacagcattattctttctctttctttcttgtcgtacaagactttatcttcttcccctttgtcccgtcgtgtccaaagcttgcctttcgccgaagagtaatgaactttggcttgcgactttgctttgtgcttctatagacgaagcctccatattcgaggtctagcttcgtctatcctttgtataactgaaatcacacttgtttatttcaaagcaatggatgtctgaggaccttcagcacaggtaggcccccaacagcttatataatgtgaattctatagcccctcaatatgtccgctcatgattgttgactttgcaaagttcacatgcctcaactttgttggctggatgtcattattgtcctcatcaatgtccaaatcctcactatcatattcggacccctctgccaagccatctagattaccttcaatttcacctctagctgccttagccaaatggctgctttcagcaattacaaccccttccttcacatcagcaacattctaagccatcgccagggcgagtttagaagctact

SEQ ID NO: 156469 - DNA, 528 bp, Zea Mays
tccacgagtcatgcagcgtgggtgccagatttcgggtgcgggaaccgccgcacgcggtagcgcgccccctcattaccgccgcaagagacaacagcctagtctatgacacgggggcccgggcccatgggtcatacaccttgggtgccggatcccgggtgcggaaagagcgaaccgccgcacgcgccggtagtgcgcctcctcggggccacgacagaagatagaaggtaattttttaaaccaatgcagcggtaatgaggcgtcccgcgcatggtccgacaaaaccaccaggcgtgggggacatgggtcagtcagccgcggggacatatatggtagtcggcgtgaccgaaggagattgacagagggtacgacagcaaacgcgctgaaatggcgcgccaatcaccaatcaggccatgaggaagcaaagtacaagttttggccccacctgcaggctcgcatcctcccctaaggtgggcccgagggccactatcggtaccctgaaactagggtaccccttactactgtgtaaag

SEQ ID NO: 156470 - DNA, 308 bp, Zea Mays
ctccggctaagtacctcagtgaaccaagaactccctggtggaaaccgattcaaccggtttttggtccacttctcccaacggctgccagcttttgggggatcctttaaatacccccacactctctctcttcattcacttctaccccttccacgatttcttggctgaccaacctccaaacaagggcattcaattcacctctcacacccgaaatcgcatctccttcaatcgtttgaaggatccttggtgtgaggtgaagtcgatctaacacactgttgatttcatcttgattctcccattctcttcatttt

SEQ ID NO: 156471 - DNA, 499 bp, Zea Mays
caggcgcccacctcccccttccttcgccgctcagttcgggcgagctcggtcatggcgggctttgcggactccgttgtgggcactcgcaaaccgatctcgggcgaccataagaaggacgaagctgagtccttatcctcccctttattctgtcaacgcgcaaacagtcccaaccgaaccaacctccaccatcaccgtgagaactctgagggccgagatctgctgcacggggcaagctttcccccttgccgatctgggcgcattgtcgggccgtggagcatcgcgggtgcgtggtgaagccgtccgtggtctcggcggggcgaatcaagagtcggtgcaggaggaatcgctcatcggcgtgtcaacgacgacggaaaccgcgtcgtcccgtgggcagcctcttcctcgcctctatccccaatgagtacctcccccaagggcttcgtattcatccgcgcatcatgtagagggcaataggagggagtttcgggctcgaatttgg

SEQ ID NO: 156472 - DNA, 618 bp, Zea Mays
gtgaggtggtcggcgacgtcggggaggtcacggtggtggtcggctcgtcgcttgcggtggtcggagctagttgggcctcatgcgcagacgggcgagctcattagcggtgaggattccagcctattcacggtggtagagttcaatcaaaccgtgtagtgagctttattgggtttcatggaaggtgtgtgcacgagtaattgaacaattgctcaccggttagcattggccacacgcgtcgatgggggaaacaactccggcgagggtggatcggtgtctccggtgaggtagcattcggtctcttgcttcgggaagctctactaggctctagggaagctagccgaggcgctggattgaaaggaggtagacaggaatggtctggccacggtggccgtgcttgggaggtcgccggagctgcgggctggcttgggaaagctaggcatagtgcggagggagtgacagggaggttagtcgagcacgagggcaagctttatagccactcacgggcatgacgcggacgtgggcgcgggggcgggtcaaccacgcgcagggctcatgctaccgtggctagtctgcgctcggtcggttaggcacgccatcgagcgtgtggcagcgctcggt

SEQ ID NO: 156473 - DNA, 779 bp, Zea Mays
gggggggacaccgtctattctgccaaaagtgcggtgaagatggtcaccacgcacgaggccccacatgacatctctccccgcctcaaaaggcagctcgtcctcgagctggaacgccggaaacttggtcatgaaggagtcgacgtcttcccatgtagctgacgcaggggactgatccttccactggatgagcacttggcgtatgccgcgggcgactcggatcttgacgacgcgttcgggttcaggggtgaccgcaccatggtgcaggaccggcaggggaggtgttgtcgctggtggagtgccatggaacttcttgagaacgcccacgtggaacacgtcgtggatgtgggcacgggcgggcagctctaggcggacatcgacggtgttgacgatctccgtcacccggtatggcccgtagtactggggctttagtttgtcggcgacatcggtggccagcgacgatggggaacggtggcggagttggagcaacacccattcacccacctgatagatgatgtcgcggtgcgtcttatcatagtgcttcttctgtaccgcctgagtctgctccaggcgatgtcgaacgttagccaggaactcctctcgttcttccatcgtgcgtgcaacagctgccacacgtgtttcctccggctcataggaggaaggagggtcacgaccgtagacgaccctgaatggcgtgtcgcggagggagctctggtatgcggtgttgaagacgtactccgctcacggaagccactgcaggcactggcggggttgatcatcgg

SEQ ID NO: 156474 - DNA, 282 bp, Zea Mays
gcttcctatcttgcctagacatctggatctgatggaaaccagagtatgcatctaggaaggacaagaggtcgcacccgaaggtagaatctacgatttgatctattcgtggaagtggatatgggtccttgggataggccttattgaggttggtgtagtcgatgcacatccgaagcttcccgttagccttgggaacgatgactggattggccagccatactgggtgatggacctcttcaatgaagccagcgtccagcagcttccagacctcctcacggatgaaat

SEQ ID NO: 156475 - DNA, 450 bp, Zea Mays
tcccatattcatttgttggtggaaggaaggaaaagaaaagtagattacaagcacttggtagctgtttacaattcacacttgttatacccaacatctcacgcaaggggaccgaccacttggaagcttctctgatttgaccccatgtggatttgtggactcctgtgcttcattttttagtactggggaccttcgttcactaaaataattactctcacaagcctgccactgttgcacgataaggggaaaaatagcttatattgattgctacaaaacctgactacagaaaagcatatgccgtcaagtgctatgatgtctgtgttaagtgcttaataccatgcatgtgcgatccacattgttgtcatgatcattaacacgagcaggcaaatgtatggtaatattggctagtggatatagctgtcttgttcacttatatcccaatgctgcaatttg

SEQ ID NO: 156476 - DNA, 363 bp, Zea Mays
gaaatgcccaaaccagccaaacttgctccaattgaacccaaatttttcaggcactttcacaacacttccagcaacatccctgccaaatttcacaccaatccgagatcccaggcttaaatttcaccaaaattcccgttttgcgcaatcgtttccgagccgagtgcccaaaaccctatttcttcgcctaaattcaaaccaagcactcacttcactaatattcacctatataaacctattcgtgaagtctcggctcaatcccatatcgtttcgtgcctcaattcgaattccaatcatcctatgtcactatttgtctgtcaaacgtcgttttcacgtcgtttgacttcttgatcgtcccgtcccgtg

SEQ ID NO: 156477 - DNA, 633 bp, Zea Mays
ctcaaagttaggctgtcaggctgataaagtctgaatttcagactgacaatgcaaccacagagactttgggcatgaattcaggcatgaacaagcaagaatttgcttaggattgctatgacaatattgtagctggtgtgtagctctacaactttgctgtagagatttgggcaagttgctatagaaatctgagagaaatttggccctaaactatgattgtcacgcgactgaagaacaaatgccatggtacactgctctgagtggatcagaacgccagctcacctcgccatcgatgatcgtcgtcccgattcatgcgtggtataggatggacaacgccggggagggataactcgtatgtggcgccatctcccgagctcagccggagttattcaccggcggccaccgaatcagtcgtttccgccgcggtgtcctatgcaccatgatcctacctcactataccactcctctacgtgctaggcatgcactaaagaagttatccgtggctgcgaagtgatcgccggaccgccgcggctataaatagctcgtgatcaaggacgaggtatgaacatcacacacacagtgggttgaatcgaagccaaattcacgctgcctctgccccctcctctcaaattgatt

SEQ ID NO: 156478 - DNA, 335 bp, Zea Mays
caagacacaacctagtccagtgccagaggcatcacaatacacatcaaatggcttgctgctgtcgggttgcgctaacaccggtgctgtggtcagatgttgccttaatgcatggaaggcatcttcgcacttctaaccccaaacaaacttggcttctttcttcaacaactcagttatgggcttcgcaattcgagagaaatccggaatgaatcttcggtaataaccagctaatcccagaaaactccgaatctgacggacagtcgttggtggcttccaattcatcacctcttgcaccttatcaggatcaatagctattcctgcctgagacatagtgtgac

SEQ ID NO: 156479 - DNA, 588 bp, Zea Mays
acaacaccgcgcaagagccggtatgagttcctttcctgtgatcgctgagttcttcttctcgggttgtgcgtctctgttgggcatttagagcttgggtgtggtgtttgggcaatgccgaccatggcaccgtcacggctactctagcgccgccgtgcgtgaagcgctcagggggaggcgcggtcgccgggtctctgcgaaccgttgatatccatagcgacgatctagattagatgatggcgtaccgattgggggaagggcggtggatcgtccgatcgggatcggatggtgatcattcctctgggcttcattaactcatgaccgtcgatcggagaaccaagggcttcgggtggggcgtgtggtcagatgaccgatcgccgttgatcctgccacgggtggataggatggcgtggaatacgtcagcgtagcagatttaatctagcgccgttcaagtctaatccagcgaccaggattgtaagataccctttcggctggcgcaaattgtagataagtccctgtagtttatagaaatcaacccgccatccacctggagctgtgcgctgtgccttagaaatcttaacctgagacccc

SEQ ID NO: 156480 - DNA, 731 bp, Zea Mays
attaatcatcaaaactgagctggtactgcagcttccagaaaattgccagagatgaacggagccttctaaccgcctgcttgcccttttgatccttttctcgtccagtttctgtgttgtttcgttagaccatgattgcagttggactatctgccatttgtttttgctctccatcagactcccatgacggtccaaaatccaatgctgtcgcagtgcatgcgtccaggtacgtgcaagtttcagtccgataatacatacaaacagcacaacgccaagaattagcagcctgtgatttattgtccagaacgacatatttttttataccggagggaatatatgatatttatggcgtggacgccattcaataaacttctactttaaacaactatatcacatttccacgatcttaatgtcagtaattacatgttgcttaaggctcatcaaagaaaacatagaatcgtccgacgagagtccccattggaagttaatatatccgaccagtggcggaggacgaaacaaacctaaggtatggcaaaacgtaagtgtcgggctatgataactaggagtacccagattacgcccctaaaacacgcttaaaccctaagaacatcatcagagtacgttccccgaggtcaaggaatcaagagccacgcctcctccgagcccccatcggcggtctttccaaaactccgcctcgcctgaccccgatctcagacgggccaagtgctcgggag

SEQ ID NO: 156481 - DNA, 426 bp, Zea Mays
gcaagcgccatccttggggaccgagttctttgtagcagccacctctaaggctgaaggattttcaaccacttccataggaacggagcaatccagatcagcctcctgactcttaaaaccgcgctccaaggtcgatgaggcacgagacgctgctctggataactctaccccgacagcaggcacgtcagcacaaatttccatcattccaccatctgccggctccgacgacaggtcttcagggaccttatcttcgatagcctgatcaaaatttgctagagacaattcttgcagaccaacaagagcagacaaagctggagaaggaacaccactactctccccactggctatatagcgccgactgttcttccgaattaaggggatttcctcctcctcttcctcatcctcatcaataatacggacagtacaccc

SEQ ID NO: 156482 - DNA, 824 bp, Zea Mays
agtacaaccaagaatagagttaagataagtcttgcaagtggtaaggaataggatataaccatgggtgagataagtaagacgccactcttgaactgagatgggagattggacattttagatgacgggcatagggtaattaccaagttaggatcgagagatgagaaaggtaaaggcaataacaaacaaaagcacaacaaaggacggagatacaaactcgcgggccaaagaagaggatacgaccaagggaaagatacataaagtacaactctcagaatgagacggaagagggacaattttaaagggtaggtatgagacaaacatcaatgtaggatatagaggtgtcaagggtacatatgataataatgaaaagcataacaaaggatagagttaaggcaagactcgcgaagtggcgaagtggagaaaacaatcaagggtaagatagataaggttccaatagtagggttgaagtaaagattccttaccgagggaagttataaggaagcaacgagatcaccaaagatgtgcgagataaaatgattgctcatggattgttaagaaacaagggtggtcaagggcatgttaactgaaatgtcttaaacatacattagggtatgaagataagcatatataaagatgtgggagtatacaagactccaaggatacgagcatcctaagaccaagggaacagaaattgccgaaagataatgacttaacaacggaataggaagaggtctcaaaagataagaaggttgtgaacatataaactagaatgcttaaatagtcaacagagttttcagaggtaagtatttgggacaagagcatgg

SEQ ID NO: 156483 - DNA, 530 bp, Zea Mays
cttcgcctcaaatcgaggtaaacggtgcaccattcattccacttttcactgggcatcgtgtagagagattcagattaagtttttagtatctgcggtgcatatttgtgggcagtccggtcgtgcgccgccatgcttcgggcagcgccaccatgggtgttccacgcgcaggaatgcgtgccacgtaccgtgcgatgtggcacgggcggataggattagatgctacgttccgtttcgcgcggtgtgttctacggcgttgattcgggattgggcggtggtgatttgatcgcgtgcacatgaaactgtgaccatcgatcgcgggtccgagggccacggcttcgtactgcttcatggcatgtggcgatctaatctgtaccattagtgcgtcatctaacagccatgatcacaagatacctcttcggccgagccccttttacattagaaaccctgagattattaggaatgaacctgttgtccagtgcatagtgcgctgagtcttaggaactcttctgtattaaccactggactttcca

SEQ ID NO: 156484 - DNA, 1508 bp, Zea Mays
tatgtccccgtattttgtcatggaaactgaaaaggaaaattgacaaattcattcggcgttttgttctaagatataaatattacaaaaaatagaagtattacagaaaacacatagtaatctattatattgttgtggaggctggggcgcggtaagccaggtgagagatgggggtggggcatgactaattaggggagaaaaggttgtggtttcggcgtcgcgggggggggggggggctatctgtcagtccgtacgaccggatgacaaaattaaggagaggcagaaccatgaaaggcacccttaggtacagggagctagttcagtgggagcaaacgtccgattagagggcgtgtacgcctttgaaaaaaccttataaattattctaataaaacaattcattgaactttatgcatgttctttcactaatgcacttccaccaaaagtacctttatattttaacattaaataaaacaatttgttcatgtaagcatacaaagacaatagatatacactaccctctcggtcgaattcagagcataattaagcatgtataactatgtcatctcgactatacatttaaatggaaaagtttttataagctcggtcatggtattggataatcaactcgaacaggcaacactgtccctcaaaatctccgtaaaatgtttggttagaacacacgcttcaatcgagcagacggtagaccatcaaagacttcaaaagcaggcacaaatctgaaagaaagaaaactgcaagtcattcatataatgtcacacttccagtatcattgttcccaaataagtcttatctcacctcatcaatctcatttcatatttgctcagatattgcatgtggttctctagggataatatatttacattcatttgaactgcacttcaaaatgtccactcattttagagaagcacaacagtggctcgatataattttctctataaatggagcaggtcaactttccagaaacacaaccaactatgtgtcttctgtgaaaagcatcgaaagacatttttatatgcaacaagaccgggagacaagataaattgccttggcaaattcctcaatagtacaagtgatcagcttttttaggacattcagacttcttcaggtattccacagattgagagcatcttcatcgttactttcatcatatttttcattgttgcttgtccaatcttcatcaccttcgtcttctgtttcagattctgagccttcatcctctgactcagcaatcagcatgctcatcctcctcactttttgagtaatttgtgctaggatttattgtattttaaataaacctaggccttcttttgcatgaacattcaatatacaatcggacttgtgcatcctctccatagaggcatcaggggagaccataataagaaaagatcaaaacaacacctgattgagcatacattcatgctactgcttcgcttatctctattcccaaatgccaaggttacacaattggcccaaaagaagccaccaacacaatt

SEQ ID NO: 156485 - DNA, 691 bp, Zea Mays
attgggctcgggctatttaaatcagggtcgcccgatctgggatggacggcggggatcgggtggccggcctctgtccccttctccagccagcagagacggcggcggccgcacctgcggtggagaagctcgccggagacgagggcgcgggggctctgcgggtccttagggcgatcggagtggcctgggaagttggggaaggcgcggggaatcctctggcgggggctaggtcgggacaggggcaccggaggggggcggttcacggcgaagcggctcggcggcggcgttaatcaactccggcgaggaattaagcgcaacagagagcaaacaaggtcgggagggggcgggagaggttccttacctcaaggcgggctccggggactcctcggtggcggcaatggcgcgacggcggcccgggtcgacggcggcggacctccgcgctgcacggaggacggcgcgtgagcgcgggcagagggaaatagggagggggaggggaaattggagtgcgtcccgggttgcggacgtcggggcggagctcaccgtggcagagggcacggcggagctccaacggcgacggaagaacgggctcgggcggcggcggtttaacggcggcggcgctctggcgtgtgcacggcgccggggaggagagagaggggtcggcaggtgcgcaaatgagggagggggagagggcgag

SEQ ID NO: 156486 - DNA, 651 bp, Zea Mays
gaaaacacgagacgagacgatcgataggtcaaacggcgtgacaacgacgtttgaacggtaaatagtgccataggaggtttggaatttgaattgaggcacgaaacgacatggaattgagacgatacttcacgaataggtttatataggtgaatatgagtgaagtgtgtgcttggtttgaatttaggtgaagaaaagagatttgggcactcggctcggaaacgatcgctcgaaacagggaatttggtgaaatttaagcctggaatctcggattggcgtgaaatttggcaagagtgttactgaaagtgttgtgaagatgcctgaaaaatttgggttcaattggagcatttttggctggtttgggcatttcaccgagcacgtggcgtgcggggaattaggttttcggtgaaatggccatttgaggtgtgaaaaccctcccgaaggagctaagaacctgcaggagagttcaaggcatacataggaacacattccaccatttggagtcactgggattcacaggatttggagaatttcacaaacggtggaaatgggagcctgtgcacaccaaaacagagagtgagagagaactgagggagagatggatgggctgctcaccgagagggagaggacgagcccaggcacacgatcgccgga

SEQ ID NO: 156487 - DNA, 681 bp, Zea Mays
cgatttcgtattatgcagcatttgtagctccaagaccaactgaacgaaagatgggatcattcttgtaacatcccaaaatcctaacctagggttgaaaccctaatctacccctttccctccatttcatcctttaattccaagaaccccccttagattttctttcatcatttgcatacaccttgtttgatcacaagcacctcacttagattttattttttcagcacctaagattatctattaattgttcaaaagaaaaggatataaaaaaatggataaaggaaatggaaaataaaaaaaaaagagaaaaaccctcctccctcccttgctgggccgtttcccggcccaaacccgcagccccacctccccgcacgcccgcgctccctctcccctcggcccaatttcggcctgctcccgcgcgcgtgccagcccgccctacgctctccctccctctcactggcgaagcgtccccacccgtcagccgccccctctctcgcgcgctcactcccactggcagtgtggccccgcttgtcagctgtttcgttgtcctcccgttgtcccttcaccgcagtcacctccggccatcgcctccgtcctctcctccgtcttctcaccgcacagggaagtttggcaccgctccgtcctcccctccccttgaccagcgtcctcgccggtaccgccccg

SEQ ID NO: 156488 - DNA, 354 bp, Zea Mays
ctggagtcggtatgccactggtccacattgttcaagaacagggaaaggaccaatgtaccagggtgcaagcttcccttttaccccaaaacgtgatacacccttcattggtgagactttcaggtagacataatcttcaacttgaaagtacaagggttttcgtcgcttgtctgcataactcttttggcgagcttgggcttctttcaaattatgaattattcgtcgaaccttttcttatgtttcctttaccatatcaggcctgaagaaatatctttcacctggttcagaccagtttaacggagtacgacactgtcgcccatacaaagcttcaaagggtgccattttaatgctctcttg

SEQ ID NO: 156489 - DNA, 481 bp, Zea Mays
gggatatgcaaaggctaagcttcttacttggtcgccagcaaattctacccctggcgaccctaatccctccatcaattgcataattctagctcaaaatccctctatccacgacgacggcgaaaaccgaggacaacccaaggtgttcccagcatctagcgtggtctagttcaattggttgggccgataagcatccttagcacacaaaggtgctgaaacaagggtaaggaggatgtgaatggacctggagacggcagtccacggcgcgatggttcacggcggtgcggagaaccgaattgggggaagtttgaaattcacgagctacggtggctaatcggaggtgagggcttgtgcactggacgcataacaacctaacgaagctcactggggcatcaatttatagggtgcatcaacggtggcacccaattttgagaagatgcgctggtggccaaggacaggggatgagtcaccgcggcgatctacc

SEQ ID NO: 156490 - DNA, 1103 bp, Zea Mays
cggggtccctcgcagttgaagcgcgcgtgcgggttttctcgctgacgtctggggcccactgtcaggcccatcttcatcaccgtaagcctcgaaacaatctcgtgcgcgcggattccgttcgtccttccccgtcaacctcatcccgagcatggcgggtcaagatccgagatcatctccacgcgcgactacccgtccataagaaccctcgcgcagcgcaccccgtgacccgttttctcccccgctatccttgcgcgagctcagctctcccagaacgtcgccgccttcgtgttcctcgccgccgccgcggaatcacgcgtctgctgtcaatccgtgcctggttgcttgccgtcgttctgcactgtaccgcgacgaagccatctgaggcgttatcgggcaagggtgaagacctttccacctccaatttctcgccggggcacgggcgcagccgcggatccgcaccgcgccgtggacggagctgggcactgccggaatccttgtaagaagccgcctcccatgttcgcctactcctcaatttcattcgtacctagttaattttggttttgaacgctggggcgcggtctccagtgagcgcgccgccgtggagagaggagtccggcgccgtgtttctgcgtggtggagaagagatggcgcggccgtcgacttcttgattgatggctgcggttttgtaggattgtagccgtaggatcgtaaatgcacgactgagattagaaactggatgccgatgcgcttgagtcaaggctgatcgtcgattgttgatcgtaggggtcgggtgcggttcaggttacattaaaccctcgccgttggttcccaatcggatggcggagggcgcgcaccgattcatcagctcgccgttctaatcgcgcccgttgtcgcttgatccgacggctaagatcgtttcataccccttcgcggcgtaggttttacaaaagaacccctatgctttctagaaaccaacccgccgtcctcattaacagtagactgagtctagggaattttctgcgctagcccctggactttctgaaaaatgaggcccagcccaatatagagttaaaatgataaaatgaattggaaattgaattttt

SEQ ID NO: 156491 - DNA, 323 bp, Zea Mays
catttgtgatagtatattggggactttgctaggtatggaagggaagtcaaaggatagcgagaaggctcgacttgacatggagcatttaggcatcaggaaggatcaacatgttgtggtcgggaatggaaaatacacgttgccatcagcacattacacattagttcaggatgagatgacatgattatgcaaatttctaggtgtgaagatgcctgatggttatgcctctaatattaagaggagtgtggatgtgaacaagtgcaaggtgtctggtctaaaaactcatgactgtcatgttatttttcagaagctattacccattgcac

SEQ ID NO: 156492 - DNA, 605 bp, Zea Mays
ttccttgctgatccattgttgcatgttctgtttgtgcatttggtggctcgccgacattttagaggtaatgcccgagtgatgcttgcgatctccacttttccgagttacagcctggcgtttgcgcccgacttatcgagacaacccatacttctactggcgtatccccttgaattccgaaccctagttctcgctttttttccaccgctttcctgtttcctgagttcttgagtccaccggcctcgctcgagagaccacgatggctcccaagaggaagagacagagtgttgctattccaatcatcccgccaatcgatcccatcagccaacttccattgaccgacaaccatgcgtctgttatttccgaggctgacattctgcacctcatcgaaactggtgttcttccgccaaaagagttgtgtccttgctgaatctggcgctgggttaccgttccgataggggacacccacgaagctgttatcttcgtgccatttctcatccaaggattggccctgccagcttctcctttcttccgcggccttctcgatgtttattctctgaatcttacccacttgaaccccaattttgttcttcaaattgccatctttg

SEQ ID NO: 156493 - DNA, 668 bp, Zea Mays
aatttgagaagaaattgctaaagaacagggggcaggttcaacacatagagctgctctgatcaaagcactgtcagcaccagctcgctgatgcagctacttgcggacgtccacacttttccgccacctaggcaccaactgcttagaacgctaggtcaaggtggcctgcggactgtggccatggtctcgccaaccatgcgctgacatccgggggtgcgcaaggcacccagtagcgctccagcaccgccgcctgaggcaccgctgaagagggcagacaggcctcccactggtattctttccggccagagccaccccctaccatggaccgcttgcccaacacccacattggcttcagcgcctcttgatcggtttccaagacctaaccgtcgtcgctttgcctagtgtcgagtagattcacgttgactttgttgagccctagcgcgcaagtggtggcaaaaacacagtcgcgagcagatctgcgcaagacataggtttgcatatttttccacgggtggggccattagagatggcaatgggtacccgaaacccatatacacggcgtgttttacccgatataaagacgggtatgggataaattctttacccatgggtacattaatgggcataatactctaaccatcgggtagacaggtgcgggtatgggtacgtac

SEQ ID NO: 156494 - DNA, 894 bp, Zea Mays
tttcaactttagctacgatgttttgtgtcactagtccagcaaaatgttttgtgtcacttttgaacggaattggacttgcgattactcaaatgtccattttacaacttttgtttgctgttgtgtttccagcttgtgtgcctgacaatcatagccactagccgcaccttctccgtgtttcactgtcgaaagcatttaagggcctgtttggaagcggagtttttatggtttttgagaaatatcgtagtatcagctaatactagagtattttggaccaaaatctgtttgggagatcattagaaaaaagggtttccaataccatggtttagccaaaactgcggtatttttatagtatttgacacacaggtctgaacccaagtttttcttcacgcgcacgctggcgcacaattttccctccacctgaccccgtctcgcgttttttgttctccacccgtggatgacggaaccaaacctcagaacccattctcagaactcactgccgccccaggtgccctcgcaaccgcgccgcccctaggttccctcgtcgtgagccgccgcctccttgccgccccaactctcccagcttccttgcctccctgccgcccctagctccctcgcctctctgtcgctcccagctatgatttctagctacacaccaccatgcgaggaatctgggaaggaagacaaggctggtatgttctgttatcccctatattcctctcttattgctagctagggttatagatttgcatagtttagctctgcactagtgatccctgtttggttcatgtcatgtgtgttgttctacagattggaatacatgagtttagcactgcatagtttagcactatatattttagcatgacatgaattttgtttgttctagggaaaattgag

SEQ ID NO: 156495 - DNA, 692 bp, Zea Mays
gtgggtgcgagtaatggaatagaaattcgggctaatccgatgcaccgaggtacaaaagcccctattcacagcttagtagttaagaggccccgccagcacctggtgggaaaacttttccgccatccaacctacgggacatcaagtcacttgggaagagttcaagttggcatttagggaacattatgttccggagggagtgctacaaatgaaactggaagagttcatctgactgaagcaagggggagattctgtgatgcagtgtctcaataaattcaatcacctctcccagtacgccattgatcacgtggatacagacttgaaaaaggagaattgttttatgaggggactaaatgatagactctagcgtaagatggcaacatgtttggacctcacatacagcagggctatcagtacagcactggcagttgaagccaaaaatgcgggagacggaaagtcaaagggatatgcgggtgaaagatcaattcagggacctaaaaagagaacaaggttggtaatccgacctttcaatccaaactgttcttcacgtcgcccacctacatatccattcaaacaacccgtatttattcgtcccactcctgcccccgctccgaccaatcagccgagtgcccctggtactcatttccctgcccttcccagttcctccagtggttgcttcaattgtggaaagtccg

SEQ ID NO: 156496 - DNA, 370 bp, Zea Mays
ctcgcccaatggctgccggcgacgcctctttaaatggcagcccaactgccctgctcccttcctccccacgccgtcctccctctccctcacgacagcagcaagctcctcccatggccgtcatttcccagctcggctccctggtcccatggatggccagcggcctctccagcttgcccatggcgttcagctggccatggctcctccactgcacccctactcccaaatgttgattccctctctaactccctagcgcttcccttctccccctcggttccttcccttcaggccgagctctctctgtccatggcgcccacctccattccagccatagcagcctccctgttgttcacgtcaaggaagaagacccctg

SEQ ID NO: 156497 - DNA, 538 bp, Zea Mays
gtgataacggtttagaatcggtggttgtgtagtcgtgaatcaaacgtgctcaaatatcgtaaattaaattttcttttcgtcctcttcaccccatcctcaccgtctctctagagagttatgagagggctagggtttggggtcaaggcctttctaacttattaaggaaaaaagtaggacaatgttgcacactgtaggaatcgaacacacaacctgctgatttaaacactaaagcataacgccgcactacatatgcattagtaattacaaaggaatatataaaggttttaaaagttgaggtatgatactaagccataacgggtcctccaccactgcttgcaaggctagggcaagggcataatgacatcatgtcatagcgaagctagtgtggtagttgtaaatggggatgctctaacactaaaggcgacagacaccaatgagtggaaggcattgtgtgggtagagatcgagttgggagcatgcatgcatggtattgatcgagtgatggcggtgggcttgaagctacccaataataaggacac

SEQ ID NO: 156498 - DNA, 772 bp, Zea Mays
aacagtgcccctctgtcagatacaatagttctcggaattccatgcaaacatactatttggtcaacatagatttctgcatatttctctgtcttgtgggtggtatgcaccggcaagaaatgagttgtcttagtcaacatatccacaatgacccatatagaatcgtggtgccgggaggtattgggcaatcctacaataaaatccatgcaaatatcctctcatttccaagatggtatgggaaggggctgtaaggtgcctaccaccttcaaatgactggccttgactctttggcaagtgtcgcattcagatatatacttagcaatttccctcttcattctggtccaccagtacaaggatctgagatcatgatacatcttgttactgtcggggtgcatggagaatttggaaaggtgagcttcatccaatattttctttctgagctcggggttcttaggaacaaccaatcggtctccaaaccatagaattcctttgttgtcctgatgaaagcatttgtatttgtccaccttctgtccgatcatttccttgatgacttgaacacccttgtcaccgatctgtgccatgactatttgctcatgtaaagtgggctccactgaaatataactgaaggcacctgaggaaacaacttctatgttcagcttgcacaactcgtcacacagggtggaaatcttggaatccatactcacacagttgcactgggccttccgacttaaggcatctgccacaacattggccttgccaggatggtaatgcactt

SEQ ID NO: 156499 - DNA, 643 bp, Zea Mays
ataatccagagtgactgggttcacaccttttcgcttgatgtacggatccgaagcaatgacgtcgcaagagctaaagcacggatccccatgagcaagccccacagccacccctgacgtcgacgaacctacctctaaaaaatcattgacggagaccgtgtccttgctttagaggcattgagcaaataccaagcacagactaaggcatggcgcgacaacaccgtcatcccaacagagttcaaagaaggagacttagtactcaccagaaccatcagaacagagtctcggggcaagcttgaacccaagtgggaggggctctacattgtcaagaccaaaacatccccgaatgcttacaggctcacctcaccatccggcgaagacttagaacactcgtggaacgtggataacctacgcaaattctttgtctagtcccaaggcctgagcacctttgtaattcttataaacaatgtcaatcaggcctgcactctttgcgtcccagggggtgaggtttttaacgacgcggagccgtgtaataaactgccacaaaagccccccccccaaagaaaacaaggtcaaactggcaccatggttgcaggtgtcgaaaaagaccgcgacaccggtcttaggcattcgacgcataaacagt

SEQ ID NO: 156500 - DNA, 934 bp, Zea Mays
tcccagaatgacgatccgttttgggagtcttgactttcgcttttacgtcaagaaaaagcggtcagggcctcggaagtctgaccccctccgccgaggagtctaggcatgactgtgggggccgatggaggctccagtgtcgaatgcacccacagagcgtccatccgcttcgggagcctcgacttcaccatcggtcgagagagcaacacggtcagggtgctcgtccgacctgccccgtctgagagcctcgacgccatcttggcggccctcagtactctcagcctcgccacgcgcatgcgatgcatgaggcctagatcgacctcgccttctgaggccgacaaaaaaggcgacagattgcgattcacatgcgccaaatccctcatatgatgatttgtcaatcttttttgcatcctacgcagagctctctgtgtcgtgtgacgtagagacgacaccctaccacggcggcatcgacgcctttccacctcgactgtgccatgccccggcggtaatcgccgccctcgtgtcatgcggccatctccccacgatggacgacctagagttcgtggagatggccggtggaggtggggatctcatctttgacgcgctctgcacggactcggacttggactcggatctaggtccctctaggaggatgacgagtagcggccccggcaacgaggggaacgaggaccgaccagccaccatagcttcgtcggcagtcccgacaagacgagacgccatgcatggtaggaccggaagatgcacgcccgctttgtaaaacccctgaacggttatgaataaaatgtgctgtcaagaacactctttgccacatacacggtaagcgggggagagagcctcggtcgtaccatggtctcccctctcccaatttttcctcttttcctttcccttttgctcgttccctgttagtaactttcag

SEQ ID NO: 156501 - DNA, 571 bp, Zea Mays
ggcaataggaagctataaacaagctagaacaggaagcaatcggggagttactgaccagaggagtgctggccacgaaggagttcttcacggcagcacgaagagcagggcagaatggttttgtggactgtgtgagttcttctggtgaaattgagtcgattgctcaagtgcttgtgtgcgtgatgtggtgaagaagcaggatccgagctcaatttataggccgatggctggaattggatgagaattgtggagctgtaaccgcgctggtgagctcacccgcgcgggcagagccacgacgatggtccggtgaccgccgattaaccgggcagtgccaccgcaacattttaacgccacatcgcggatgatctttaccgtggccgcagacccatccccaaccatggtggcgttcttatcgccggtgagatctttctgaagttcgatgaacagtgcgcgagtttcagttaaaaattgcctgacaacccatctttggaccatattatctccaaattcctcatggcaccaagacttaatacctatagtaaagttgttcttctacaatggctctacaactttg

SEQ ID NO: 156502 - DNA, 1369 bp, Zea Mays
ccggttgaaccggttttgaaaccggttgaaccggttttcggttttctcgtggccgactccttccctttttatgtctctccctctctcctcttcccttctcagactcattttccagccgccgccaccctcttgttctcctctctctcaccttcacactcctcgtcaaaaactttctcgagccctcactcttttggaagagtggttggagatccgttcttcccggcgtgtttccaccatcttcctccatctcattgggagatcttgaccaaatcttcggatcgaggtattgctctatattatttccttgtactcgatcctacgcgttcttgattatcatatgtatcattcattgggtacattttagtttaagtgattgcaacacttagattatcttcattttgtcacaaacattgttagggattagcgatttgatattgttcgttgtagttgaaccgctcatatgaacggttgaagtgcatgctcaatatcttatgcgtttcttctcaaacgtgtttgatccttgctcatcataggttctatttcttatttcttatttcttagaatggtgcgtcgaatgaacccgtcggtggtcgaatccgactcctcggatgaccaggaaatccacggagataccccacctcgctctcgatccaagcgagggcgcggaagcggcaatgtcatgccgggtgctgaggcctccgggtctcaaagtgctcgcggtcgaacatcccggaatccttccggacggtctcgacctgcgacgaatctgcaggcgtgggagcctacaagtgatgatgatggcgggaaggacgatgaagtcgatcttcccccggcccacgctcctgtgattcgcggcttggtcctccaccgggcagaggctcggcgtgctggcaatgagccagtcactgactttactgccagtggaggctctgctcttctccaggatcttcgtttccaaaatcctgtattgcgtattcgcgatgccaggatcgatggaaatcgcttttggactcttcaccacgtggatttctataattccgtcattctacccaagaagcatcaacccatcctgcatcaacgatatattaactgggaaggttgtgaagcgattggggacccagaaatgtcacaggcactgagggcctgtgaaaggaaacaaatgaagaatatcatgacattccaatatgattggaatgatgaagtgattgctcaattctactccactctctggataaagcttgctgacgaggagagtcattacaactacccctatctgaacttcttcattgaaggtagttggtacaaggtgagctatcgtcgatttgctcacattcttggcttttctgacgatgatatatctggagacaag

SEQ ID NO: 156503 - DNA, 536 bp, Zea Mays
tttagtggtagtaacaccaagggtgttacaaatctagaccgcaacatcgtaatggacggaccagatttgatctcacttgtaccctttcggccatataatctcatgccttgatttctgatcgggcggccactgtaacacccgaggtgttacccaaagccctgcccaaagaagcacatttgtgtcctacttaaactatatgctaaaatgggaagtgaaggaactcaaagttttagatgcttggttaagataagcattaaccatgacaaaaaagaaaaccctatccttcctacaatgttcacccacaaacaagattctaaaaccctaaatccttcttaagcccttaaaccctaaccatgggattaaaggggaaagagtgggcaaatgatcaaaacacaaaaaagggacctttactaagatgaagtgtattagtaaacctacaaattttgttaagagaagtattgcaaaaaggcccaacaaaaaccccaaaacaactctccaagaggggaacacacttgagcctttcaaaaaatttctat

SEQ ID NO: 156504 - DNA, 526 bp, Zea Mays
agtgctcttgatgcgtaggcaatgacttggttgtcttgcatcaaaacacaacccagtttagtgccagaggcatcgcaatacacatcaaatggcttgttgttgttaggctacgccaacacaggcactgtggtcagatgttgcctcaaggtgtggaaagcatcttcacatttttgaccccattcaaatttgctcctttcttcaacagttctgtcatgggcttagcaattcgggagaaatctggaatgaaccgccgataataccttgccaaccctaggaaactttgaatctgacgcatagtggcgggtggctcccaattcatcacctcttgcactttatccggatcaactgctatgccatcttgagagatagtgtgacccaagaatttaatctccttcagctagaaatcacacttagacaatttggcataaaggcgatgctccctcagacgttggagtactgtgtgcaagtgcttggcgtgctctacttcattcttcgagtacaccaaaatatcgtcaatgaagaccac

SEQ ID NO: 156505 - DNA, 321 bp, Zea Mays
tggtaaggtgctgtctacaaaggattctgtcatcaagtagctgtgtgcttcaaagaagcttgtcacacaagagctggaggccacccgcctcaacatcaaggccttagaggatgaccgtgttgtgatgaatgcgatgtgcgacaaagccatggacaaggttgtccgtgcggggcggatcctgatgagaaggcctagtgttgtggtgcctgaagacattgttgccgatgttcttgctgtgcccgatgtcgtgagccgaccatcttcttctgtcactcctgcagctggggcttcctgcaaaaatgctcctgcacactgacttgc

SEQ ID NO: 156506 - DNA, 624 bp, Zea Mays
ttttagtgcactaaataaccaacaaaatatagtaagaaagttttgccatttgaattttccaaaatccccaaatcagcccatgaacccatgccctatgggaaaattcaaaaattcaaaaaactgaatttcaaaccctttcctaaagttcagatgtgttccctgttttccaaaactcgaatcctcaaagtccaaatatcaaagtggcgccaaaataccctaggaacactctggagaagtttgagatcaaacccaaatcgtttgacatgacttgacatcggttttgtctcggtttgggcagtgctgacatagctatcttcaggccaccatatcttctcacccaggccatatcttcactcgggactcacacacaacagaaagaccttggcacggtgaagagacgctacacaggatccttggcaagatatgctcgttttggtcggccaacgggcgtttgaactcgggcagaatcacacttccacgtgttcgatctcgtgctcaagcgctcggccgcgcactggctgccctctgcgcgcgccgtgcacggtcggcttctgtcccccgcgcctgcgcccagccatgctcgagggcgcccataagtaccccgggtgcgcaacggtctgccct

SEQ ID NO: 156507 - DNA, 585 bp, Zea Mays
ccgttatatattaaaatgtgacatcatttctgtatcatgagccattatatgtaagacttaatagctgttggagttattctaatgggcctaaattaaccgatctgggaatttgatcgttggcaggtacaaaaggcccgcttgagcgccggatccagtacccatgcacaccgccgcgggcccaccgattaagaaatgaagctcaagacactcgcgctgaaaaattcaaggatgtgctgtatgtagggtagtggggtgccattaatccagtgcccatgcagccatgctcatgctcagccaaactgctgtgcacgtcgcctgccactcagatttttttagcgtgcttcgagcatgcatgagctgcacgatcatcaccatctcctcgatcgagtccaccttcatgttcctttcttcctccagggtcctccctcttcgttgtcacccctcttctcctccaagtctggagcctggacctggactccaccatcataaacgttcgagcatgcatgtcctccctcttcgttgtaacaaactgctgctgctcccaggcgcccttggcatctgacaatgctgtaagcaagaatatca

SEQ ID NO: 156508 - DNA, 410 bp, Zea Mays
ttcttggacagcatgtgcttgctccttcttgtgctttgatggacactcgcgcgtctagtgtcccatcttgccacaccttctgaactcatcaccagtggcctttccagacggtggcccacttggtgagcgccatccttggccacgaccgtgaccacgaccacgaccacgataccttccaccatggtgccctactcctccactgaaactgctgctagggtggtgcttgacttccttcttgcgtcgggcattccactcttctttcgtgaggtagagtcgaccactttgttgtagtgatcctagggcctcctcaaaggcgtcctccgctgccctcaatctccccaccatgtcagagacagagagggttgacaggtcgaggagagtggtgatggagaggacgatttgcttgaacc

SEQ ID NO: 156509 - DNA, 941 bp, Zea Mays
aagacgcatatggagcaaaatgatgccataaaggataaccgaacataccttgggacgacatatatggcatagctgaagaatatggacgatgcaatgaccaatagctttgttgagctggggcaaacctttcacccaaatgtcttgtacttgctttctttcttgtgtttgcctttgctccacttcttccaaaagcatcatccttacctggatcttgagaactcccattagatgtccacgtcatgcctcccatctccagctcttgtgcactgagtttttctagcctcttgtgccagattgataacccgagtgggcttctcggttgtttgggcacattgggcttctcaagttcagatttagtgcctggactatcactagctgatttctctattgtttgggtactgctagctgaagtatctaatacttcctccggctctgtaatgcatgaatttagatctgaacttttgccttttctattatccttcttcgctacataaacttgcttgaccatttgatccttattttgagctctagaccgattcttataaataaaacggtctttgtcgtatgatcgttcctcaaaatcagaattaaaatgagatgaatattctatgttatgtggtctaaaatatgaagaacaataagcatttgaatcataccagacccaagatggataaggatgaaagtacgaaggagctgaaccatattgcattagtattggcggcccaaaaggaggatatgttgctgatgcatgaaactcttctcctccccaatcctgatttctagatttacgcttcggaggtgattttgatggcttcaaaggtgctctagatggcttagcaatgccagtttgatcaacatcctttgccttaatttgctcatgatatttagccagaagttgctcaaaagtaacctttgccttttacccttttgtttatcatgac

SEQ ID NO: 156510 - DNA, 341 bp, Zea Mays
cacaaaggtgcgctggcgaccagagagaggggaggagttaccgcgacgatctaccgtggctatcactggttgaggagctacagcggtcactggtgagttgttacggctagcagtgaggtggtgagatggtcacggcgtggcatgatcacggcgaacggcgtacatcacgacgatggccgctcggccacatcgccggcgcgagtggatagatggcagagcggctacagagttctgagctcatccacagtgaagatttttcaatggtcgatcatagtctacgccacagagggcacgaatcgcggcgccggcgcgaatctaggcgcgcgggtcaccggaggcga

SEQ ID NO: 156511 - DNA, 765 bp, Zea Mays
ccccgccgtgcgttctggagcccgagcaccggtattaaaagtcggacgccgttccttcctccccgactcttgccctcgcgttcgctagtttcgcactgcatattcaccgcgccattggagaggaaacagagagaggggcaggatcgtccgctgccgttgactgccgcaaggagagcatttcagaccccgattgggttacccaaagctcgagttgctcgcgtataagcagtgcgtgggcgtaatcgaagaaaggttaacggcggccacaggaatctttcgccggagttggaggtccgccactcaccgtgaccggatctctctgcggcgtgctgtggggtacgtgctcgtccattgcatttatcatgtttagggcatcgtgcggagagattcgggtctgagctgtgtgttcgggtagagctttggggcgttgcggccatggcgccgccgcgcctggcgtctgtgccaccgcgtgggatcggtgagagagcggagttgggtcgtgccgtcggattcagtgcgaacggccagatttgtaccgagcgagtccccctggtcgattcgatcgggaccgttagatcggatcggtcggttctgggtgacccgagctacattaaatcgggaccgtagattgttgatccaaagactcctatagcgtaccggttcaatcccatgcggatgtaatcctggtcgtccaaagtagatcggatggttgtgagcgccccgtaccccttcgcggcacatttttgcaaaagagcccctctggaa

SEQ ID NO: 156512 - DNA, 893 bp, Zea Mays
aaagatcttcgccggggatgaacttggggcactgtttcgctctatcgcctcatccacttgccggcaacgtggccgagcggccgtcgtcgaggtgtacgtcgttcgccgtgatcgtgccacgccatgaccctttcaccacgtgattgtcagccgtaatagctcaccagtgaccgccgtagcttcttacccagtgaccgccacggtagattgccgcgatgactcaccccctctctctcggccgccagcacaatttcttcaaattgggcgccaccgctgatggacactataaatcaatgccccagtgagttccgctaggtattcacgcacccagcgcaccagctctcaccgctgatcacccaccagagcctctcaatttcacgtttaccccaaattcgttttccgcgccaccgtgaacgcctcgccgtggtcagccttctgcaagtcagttcaagcttctttgcttgatgttctggcctcccttaagtcccttaatactcgtagacctatttaattgaactagactgccttgaattgccaagaacacatcggactatcctcggttttcgccgtcatcgtgagcaggcatgctccggtcaggattagtgaaatttattaagggattaaggttgctaaatgtggaattaggtgtcggccgagttagggctctggtcattgagcatatcggccagtacaggttcgtcggagggcgtgctcaccggcgatccccaacggggacttgacgttgtaaagaaatcaaactctaagggccactttgcgaatgtcagagacacagagaaatagtgttaaggacactttacgggtttttctaatagctaggggtctctgtgcaaagacgccaacgtgggcgcgcgcgcgagcgcattttctcgtcc

SEQ ID NO: 156513 - DNA, 424 bp, Zea Mays
gttctttgttaagtattataaagtgtgcaatatcatatcagatctctgtgtttagttctataaaaaagagtatcaaaaaaagagaagaaagaaaagtaccaaaaaagtgttgaacaagattgtgaaagaaaagtagaacgatcagtttgtttatgtgcacaagtgctgaaagttcatcaagttgttcaactagtttgctattgtcatttggtgcaaaattttggttgggtctgatcgcaacacttgcattccaaccatactccttgatttgcatcaaatctgaaaattctttgtgcgtgtgtttgatctacttacatcactcgtatcttatggtcagcactaggcagtgaacttcaagttggatggttatttaactttacaacaactaggatttagattgcattccttgtttactattccccac

SEQ ID NO: 156514 - DNA, 932 bp, Zea Mays
gctgcgttgagcttttgaactcacgccgagcgattaaattttatcgtgggtacccgaacatgccgatcaggctaaattattaaacggctgagttttgccattggctgcgccctggcaacacgacgcaatatttgtgtcgtacgaacttggctgcgtcattgtgattgctatgtagcactctgtttaatcggacagctcccgttgagtcaaaccgccatcgtggagtcgcatattttttgcatgccctgttggcactattcgtctatcgtgatcatcgagacacaaatgcgcctgttgcgcacgttgtgtggacatttcgtgtaccccgactatcaagccatatatgcgcctgttgcgcttgttacgagggcttactgtgttgtcgtagccctgatggccgcacacgcattgacaccagttacgctggagcttgtactcgcgtagaatgtggtgggttatctgagcccctaaggttactttgtcgcgcaaccttcttaaacaatttttttcgctctatattttgtttgattgtgttgtgtggtatcatatatttatatatattgccaagtggccttaacaactatatcaagctctatagtgcttggaaatctgggaagttaaattgaaatacaacagaacatggataagttaattctcaactctctcctcatgcataaagttttacccgaagtaacccgaagatatataatataatgcatgaaagcctttttggcatagaagatatcacaaattgggattatattagtaagcaaaaaagaacttaccaaatgatttaagatcagaaatctcagtcatacattgctcaaccagatgttagcacattgttctctttgtcgctggatgacataaagcaaactatgagataaaaggacatgtaaccgctagcaacacgatgttgcgagtacatcgaa

SEQ ID NO: 156515 - DNA, 628 bp, Zea Mays
cggtcgtgctctggcgagctcagtgcacgtcgaacacgtgtagggttgtttctgctcttgttctatcctttgctgagcagccaaaacgtgcgaatcttgccctaagacctgtgagagatctcttccctgcacctagggctacctagttcatgtgagttccaagggtagatgtggttgggtttgagagatatgggggtgggaagttgtctttgtcctagttgtccacaccgagacaaaacttgtgccaagtcgtgtcaaacgacttagggttgggttcaaacttttctagggtgttctagaggtctttaggcgccgctttgtcaaatgggtcaagtggttttgaagttcgagtaagggtgaacatgtttgatctttggaaaagggttggttttggacttagaaaaattctgattttccttttatgctcaaccctttggtgaaccttttggggtttttctaaaaaattggggtcactttcttactattttttgtagggtattaagtgtactacatcttttataattggcccaagtcatgatcatgtggttttcatagccttttggtcatactcacttctagggctccaattgtccaaaagggtttgaattagggtttgggcaattctccc

SEQ ID NO: 156516 - DNA, 576 bp, Zea Mays
aattgcccacttccctttcacccccgacgccaagaaagtagtagggacttttgaaccgatcgaagatacaaaggagatatccatggaccccagtggcatcgacgataagacagtacacattagtgtcgtaatgtcccccaaataggaagacgtgcttatcgacttccttcgcatggagaaagacatattctcgtggaaaccctcggacatgtttggtattacgagggaagtcatcaagcactccttgtggattaaactgggtccaagttggtcaagtagtgactatgttgctttgacgaggagaagcgtaaggccattgacagaagataggaaatctcttgacgactggttttatcaaggaagtgtgccaccttgagtggctagccaacccagtgttggtaaggaaaaagaatgggaagtggcgaatgtgcatcaattccacaaacttaaacaaagcatgcccaaaagacttgttactactgccacgaatagaccaagtagtcgactccacctctgggtgtggggtgttgagctttctagacgcatactctggtaaccaccagatcgcgatggagt

SEQ ID NO: 156517 - DNA, 366 bp, Zea Mays
attcattgcttccataaaagcagcagggggattagttaagccaaaagacatgactatgaactcgaaatgcccatacctggtgcaaaaagctgtcttctcaatatcctcctcacgaatcctcaactgatgataaccagagttcaaatcaattttagagaacacctgggcacccctcaactgttcaaagagaacctcaacatgatgtagcggatatttattcttgattgtcacttgatttaaagcacgataatccacacataacctcttgcttttatccttcttctcaacaaacaataccgaggaagcccatggtgacctgctaggcctaatgaaacccttagccagcagatcatccaattgccgctt

SEQ ID NO: 156518 - DNA, 307 bp, Zea Mays
gtgttcgagtcttgttgctggtttaggtcgtgtcgtagtcgtagttcaactgctccatcgttgttatttgtttccgccgctagcccatccaccttacccatattacaagtcgagacaccacattaatcgatttgccctcgatagccgccttgtgtgaattctcgccacgctagccctagattaggttgcaagccgcattgcattgcagcccctccttgtttcattatctggcgcttacctattgcttataccagggaggtttgtgcccctgtgctctatagccgccgctacggttcctaccaatttg

SEQ ID NO: 156519 - DNA, 544 bp, Zea Mays
tggtgattgagtgcttactgtttatgcttgttgtttaactgatatgtgtagtagtagtggacattggtgcttgagtaacttgtttaacagatttgtaacttatttaacagagtagagtaatttgtttaactgatttgtaacctttcttaataatttgtttaactgaatagagtagtggacaatggtgcttgttgttgtattaccttatccttgttaataacttgctgttgtagagtagtggacaatggtgcttgttgttgtattaccttatccttgttaataacttgttgttgtagagtagtggacaatggtgcttgttgttgtattagcttatccttgttaataacttgctgttgtcgagtagtggacaatggtgcttgctgttgtattaccttatccttgttaataacttgttgttgttgtcgagtagtggacaatggtgcttgttgttatcttaccttaccttatctgaccataccttaccttttctgttatcttaccatatctgaccataccttactcttttttcctttctagggttttc

SEQ ID NO: 156520 - DNA, 380 bp, Zea Mays
ccaagtccccgccaagcaaatctgcgagacaggacaagcgaccaagacactgttgagcgagtctgcgaggcggggcgaacgaccaagtctccgccgagcaagtttgcgaggtggagcgagcgaccatgtccccaccgagagagtctgcgaggcggagcaaacgaccaaacagacccgcaaggagggagcccaggccaacgttgttggtccacgacggtcgtaataggacatgtcgccaccaaaccatgttcacaccatgcgtacagtaccaagggggtcacgacaacaaagtctccacccacataccagaaaggataggacgacatacctagtgcatgctcgcacatggtggaggagtgatgcaagggtgttgacagaag

SEQ ID NO: 156521 - DNA, 456 bp, Zea Mays
cttgtgcttagtctttcactcatttatgcaacacttacgtcaggatgagcgcacgaagaatatgtcagcgccagggggaggatacgacgaggaccctcctcgccccttcaggcaggtcaagggcaagacaatatatctagagcaacaggaaggccggaagaagcaccgtatggatagagccgcccgtgcagcacttgcagcggcagcatcggtagagcaagcagagcagggtggctagttgcagatctcctcacaccagattgcctatagggttcgtcgcctcacatctggacctcgctcctccgctccctctacacccgccacagcaactactccacctcccacttcgctagcccctgtcgctacagagccatccaccacttccccatacacaccacctccaccacacccgcttccactgttccccctcccgctctcatttccactccacccatt

SEQ ID NO: 156522 - DNA, 546 bp, Zea Mays
atccgagttactttggtcctaatcccctcggccttcctctcaaccctataatggagcatgtttctcttcaccctctgctataactctcacgcacggacgcttgatacgtagccactaggaaacgccaatctctcctatgagctccctcgccgatgtcgtttcccatccctcttctaggcatataaatccatccacccgtgccgagctcctctccgctcgaggctctctgcccttgccgcacttcactgcccagggtcacggcatcctgctgctattctagttctatctctccaccgccgtcccctctcatgccggagttgtcgccctcgacgctgttcgcccctcaccatcgcaccagctacccattcgatccacctcgctggagtcgtgttcgtggacagctgcgacgccgcgtccatctagctcgcccagctcactgacgatcgctagctgtggtgtgctgaacaaggtagatgatgccaaattttgctactccctagcttctacgaataatagtgtatgtctctgcgataatttttctatttt

SEQ ID NO: 156523 - DNA, 797 bp, Zea Mays
tccgcgaatctaggtcgttagatcaggactgggcggttaggatgggcactagggggcttcaccttctccgaccctgccaggggcagcgccatacgcggactcagcggcgaggcagaccggggctcctagggcaatagggtttggtatgggtagccagagaggttggggaggattcggcgaatcctttggcagggtcgaagttgcaggaatggggctgaggcgaccagacgacggaggggaagtcctcggtggatcgggggttactccggcgagcaattgcgcgcaacaaagggcaagccaggggaaattagaggcggggttagatcagttaccttgagagaatgctcagggactcacgaacggcgtccagggcacggcatgggcacgggtcgacggcggcggagctgcggcagggcagagaggacaggtaagcatggaccgagagaaacagagggggagggaacgaaccgaggggtgtcccgggtcgcgggtgatgaggcaaagctcaccgaggcaacagacacggcaagggctcgatggcgaccgtagaatgggcacgagaccacggcgaacggcggcgaagcttcctaggtgcgcgcgcagagcgagagagagggcgagggtgctccgtgctcggctgggggcacaactgagcgggggagggcgagtgagtgtggacgggctccagaaaaggctcgggcgtgtgggggcgtggccgggaaacgagcggtcgtgggcgagtccacggaggagagcgcgggcggctcgagggggggacggttctgacaggcggggcc

SEQ ID NO: 156524 - DNA, 606 bp, Zea Mays
atagcacttgagaacaagtccctaatagacccattttatatatcgctaaaatctagattcaaaaatatctgtgaaattcattaagaaattaaaaaaaaggaaaatatccagggatcggatcctatactaccgccgcttctctctccctgattctcccacgcacgggcggtgatatttccattcgtactctgatttttcccctacgcgcgttcctgatttttttcaccgccactgccctctgatatttccaccgtctgccttcatcttcctctggcagcgcgcgtcttctttcctggcggtgctccctccacgctcggccgcccaactccctgctcgcctctagctcccgcgcccggccggagctccctctcccttggtcggcgccctacctagtcccagtgtcgcggtgccccagcttcccttctccgcgagcttctccctgtgcccagcgccgctcgtgccttgttccctgcgtgcccggccctaagctcccatggcgcgtcgtgctcctctgctctccctgccgcgttgccctctctctcatccccaagtcacgacaagctccctgcccctccctcttccctggcgcatggatctctcttcccc

SEQ ID NO: 156525 - DNA, 299 bp, Zea Mays
cagcagagggtcgcactctaaggcccaaattgccatcggtcacaggcggatttgacacaaaaagggtgaaagctttgggaggaggtaggttccaggccgagtatgccactggagcaccaacatttgaaaccttacccctgaggatcatctcaagtcggcttaccaggtctacagaaggaattctcctattggtaacccgagttgagtcggctagccctctatacagatatgccggataggccctgtctttcagtggctgaatgttcttgaaaacaaagtcagtaaccacagcttcagca

SEQ ID NO: 156526 - DNA, 876 bp, Zea Mays
tatgatttctttaattagacctcattgattgtcaatactgttagtgcatcttgcaaaagaaaagattaacttctttagagacatcatgatagaattgtgaaagaattagatagtggtgatatatttcctggagaggaaaaaactaagaaactagtctcgcaaggccaggggatactaggtggggcacacatcataagacattggttcgtattcttttgatgtggtcatctgtgttagaggtgctagagaatattagtgaagatgcaagtgatggggaaaagaaaacacaagcatcaggtttgatagaaagaatgggaacttttgagtttgtgttcatattacatcttatgataagagtattggggaggactcaagatttatcacaatgtttgcaaagaaataatcaaaatattgttcgtgcaataggattgattggatttgtgctaaggaatatgaatgacatgagggaaaagggttgggatcccttatttgaggtagtgaagagtttttgtaccaaaatgaacatagtaatcccaaatatggatgacacaataccaactagaggcagatcaaggtgtcgtggagctaagttggtgagttactaccatcattttcataatggaattttcattgttttcattgatcaagtacttgttgagttcaacaactgcttccctgaaagatcaactcagttacttggatgtattgcttgccttgatccaagggattcttttgccaactttgatttagagaagttaattgagctatcaaagatctatggtgctgattttagtgattatgaacgtacatgctttatggaccaacttctcttattcattgatgaggttagaaatgatgatggattttgtaacaccc

SEQ ID NO: 156527 - DNA, 1408 bp, Zea Mays
agtaagcctttggccgatttgctgaaatctttactcttttttgcttcagagcagctacgggcgacttcaaagagctttttcttttctttccctcaccttgtgacgatagggtatagtctaggtaaacgaagtggatagcgtcgaaaacccgatttaatcttctcttgcctcaggctccgaaggcagtcgttaaggctttgtcttcctttttcaaaaagttacccaaaatcttgttgcacttcgactcaatggcttctagccaatcatcatccggctcaccaaactggtttctgtacttgtacgtatactttagatgcatcagaccacccttctctgcatcttgcttagttggactatcttcttttgtttctagcatctcccagtgactcgcgagtggccgcactttgaaggctaggtgctcttgcactaaatcccttgtaccaatatagctgcacacggcactaaaagccacaagagcaacttgagcttcatcagtcatgacaatagctgccctctttatgtcgaagtgtgattttataggcctttggatgatttcttttatgtcttctctctcctccaagtcattatttagtaaaactatttcttcatccaagaagctggtcatttgcttcagtatgccagggcaaggtaccgagcatctttccaatatgtgaagttgtagcagtcgaagttattatgaagatgctcctttttagtcgtctttgtattgtaatgaagctcatgaatattgcaaaagcaatcaacatttggctccacaccttggctcctcactgtccaaataaagattaatagcctcaccaagtcattaggagtcaggtgatgaaggtaaatatcaaacttcttcagagcctccactagcatttatgaagtgggaattgaagtccagctttcaaaaagctttggaataccaccacctcatattttttcaggacatgggatagtatcctctccaccaagcctgacaatagacatgtcatgaaaataattgttcttcatcacctcgatatgccccttttcatggtcgatttgcaaaggacaacatgactcggcttcaagggtcaatcttcagtatcaccagtatcttcttcaaatcaaaatctttactattattagagtcatctgataagctatccatgatttctttagtaatcttttcgacattggccctctctacgacatcgtaatatgcaacaggtgtaagctcattgctcttcccctcttcatccacttgagaaatcctaaaaaagaagtcgcacaacgaacgaattcttcgaagtaagcttcagagtttgagcaaataacttgaagccccgacaattgcgcaaggtgcgatgcatttccttgtggtaggggcatgatctgtcaaagatttcgtccagcgttcgcg

SEQ ID NO: 156528 - DNA, 678 bp, Zea Mays
gagcccgctacctgggagacttgtaactctctccttccttggtcatacaagtagagggacatgaaggagatgactctttgaggttcagacgaaggtagaagatccaacactaaaaggactcatccaatggtaagtgcagacaaagagatgaactagacaccagcaatctagaaccctcgctaagaaccaaacgagaatggagggctaagagaggtctgattagtaggtatctaagcttatgtccttctcatttttgtgttgatgatggtgaatctatcatactcaaaaaggatataaagtattacatatcttgtggcccgaaaatatataaactgaccatatgctggtaaccaagttgtacctagtactatcaggtaaaaaaagggccctcgatcgataaaaggtgtttcctttggtcctcatgccgtcgccagaaacgttccttcttcctgctctcgtctctccacccttgcattgcattccccccatcagtggatccaggcggcaagcaaactctgtttgacggcgcggatcctctctaggcatcgctgggcgcgctcgatggccatgagtgccctgtccttcgtccctcccggcggcgtgctcgcccgccgtctccgcttcccctcctcccgctcccgcacgctgccgcgcggctttctcttccgggtcgacgac

SEQ ID NO: 156529 - DNA, 615 bp, Zea Mays
agaccggccacggcggggcaccagaggcttggggttggcctaggcacgcacaggggatctggtggactcagccgagggcaccacgccagcgcgggagcaccagagggcgctgcacacggtgaggcgggctaacggcggcgcggggcaactccgccgagcaattgcgtgttaaccagtgcagtacacagggaaataggggcacgaggaggttgctcaccttgaggggaagcgctggaggcacggggcaacggcggaggcacatggacgtgacggggcgacggtggcggagctctggctgtgcaagaaccactccggtgagcgcagaccggatagaccagagagggggagggcacaccgaagggtgtcctgagtagctgacggcaaggcgaagcttaccgtggcactggaccgggcacgggcgcaacggcggccacggaacaggcggtggacgccggcgggcgatggcggaggttctcggttcgcgtgggcagagcgagagagagggcgagagagctgggcagagggcgcaaatggaagaggggaggtgggcgagcagggagcggggttcaaaaggtgcgcgggggctcggtcgtggccggagaacgcgcggtcgtg

SEQ ID NO: 156530 - DNA, 956 bp, Zea Mays
tacaataactattagaaaagtttggccaaaataattgtttaaaatccccaaaaaggccatgcaagtgggagctctctagggaaatctgaaaattcagatttctgaatttcagccctcacctagaactcgagcacgttcaccttgatccctagctcaaatccttaagcccctatttacaaagctgtgctaaattaacccctctacaacgtgtgtgaagatggcatcgagattcatgccctagacacatcaagtcagggatttcatctcggatttcagcagtgagacaaacccgatttgatcaccccatatctttggctctagtcaacaaaacccataagccgccacacataaacgacaaaaggaaggtccggtgaagagatctctcgacgggatcatggccataatcgcgaagatttggagccaatccgcgcttgaacttgaccattctctgcacttctcgtgctccacgtcgtgcccaggcgcaagagcgcgcactggcgctcccccgcgcacaccccgagcgcgtggcagagccaccctcagccgagctcacccacgcccttaacgaccacccccggacgtgcaacaccccactccacgcttacccccactgtcccgaccccgtccttagctccagcgagctctgcaccgcccgcccgagccacccgagcgccggccatcgcagctagccatttccagagacccctagcctcacccgagcctctgaacagtgtccccgtggagccgtgaagcttctccaagcaaggatcgaggccctgcctcaccggaacaacgagatcaccgtcgccggacttcggccacccgccaccgcacgtagaccgagctaccaggtgaaccattcttcaatttcttgtgcctacgacttccctgaccccccgtgaagcctctcgactcactggactgagctatctgaccgtgaccaggccggattcctc

SEQ ID NO: 156531 - DNA, 464 bp, Zea Mays
gctcctcgttctaatcagaaactgtcatatagattttttggggccttttcaggttctcggtaaaattggtgttgctgcctaccggttggccttgccggcaacgtctctgtttcatccggttgtgcatgtgtcgcaattgaagcgtgttgttccccatcctaccaccattgctgatctaccttcttcactggatggctttcagattccagaaaggattcttcaacgtcgtgtggtttgccagggcgacaccatcaaacctcaagtaccatcaagtggtcgaacatgccatctaccttggctacctgggaagacatggaggctctacatcagcgcacctgtttgggggtaaccaggttcttatccaggggatgtcagcaacacaacaagggaaatagttgaggcggcacccctggtgctcggacgacggagtattcgagacaagcagccgaatagctggttttctg

SEQ ID NO: 156532 - DNA, 349 bp, Zea Mays
atcaacccagatggcttctaggatgagcagaagagaatttaatgaggaatttggacaaggcttccaagaagaatttggggctggatattgttttgcgcaattatacaccaaccaaaagtttttttgacagaaacaagtgcacaaggaggctttagtcgatctagtggtcaagctaaagagatctacaagctgtgtaggtgtaacttcaagcgtaaaacacgcaaggcttcgaaaaacactaacacaagcatgtgataaatttttgaagattttacttgctaaacttgaggttgtttggagggggggtctttttatgaacaaacagacaacattttttttgtaaaaaggg

SEQ ID NO: 156533 - DNA, 318 bp, Zea Mays
tagccagtgggtagtagcagtactgtagcagtgtacacggtgcggcggctgatgggtgatggtgatggcacagtcgatgtcagctcaaatcagctctcgatgcaacagtgctggtgcggtagcaggctagctagctagcagcagctctcacacgctgccatacccgaaaccgaacggtgctcaataattaaacacaagcgtgcctctgtagatgctgagagcctgaggcagaagagaacgcccatttattttttacacaagccgtttggggccctcccatcccatttcaaaacgatgcctcgctgactcacgttcaag

SEQ ID NO: 156534 - DNA, 911 bp, Zea Mays
ggctgagcctgacaagagactgactttccttggtggtctgtgagaaggactgtcttgtttgcacaacttatgatacctttgtgcttggttaaccaatccattcctaagatcccatcaatcccttgggatggcaagacggttaagtctgccaagaacactaccccacttaaaagaattctgacttgggagcatttgagctagcatagaaggtctgaccctagggttcgggtgaccaagggaatctctagaggggtagaggggatgtcatgcttttccacaaaactagtggctataaaagaatgggatgctcctgaatcaaaaagtacagtagcgggagtaaattcaacaaggaactcaccgagcactactcccggagcttgctgagcctcctgagcatcgacgtgatttactcgtgcccttccttgatactgggtctttgttctgctggctgatggaggagggcgccttgggggcgggttgctgaggtattcttggggccattcaccgagttggagtaagcaggtcctgatgccttcaactggggggcagttgttcttgaagtgactggggtctccgcagtgccaacatgcatttgctggcgattggttgcttgcaaccgagggggcatgaaaggagctttgactctgctgactgaaccatgacggagtgggtccagctggtctaatgaagcttggtcccttgggtggaaacccaaaggatcgagttctctggtgccggtcttgctgctgagctcggaggacttggaatttcctcttgaggtgacctttttcttcttcccttgccctttccacttgcatggctttgtttgagaggtgcgagaagttgaggaagtcttggctagctaggatggtcttgagttctggtctgagccccttcaaaaaacgggccat

SEQ ID NO: 156535 - DNA, 483 bp, Zea Mays
ccggtcttgggatgaagtataagaagattgatgtgtgcgaagataattgcatgttgttctggaaggaatatgaagcggccacccattgtcagatatgcggtaaatcaagatatgcggaggtactaaaagaggatggagctacttttgctacaaaagtggcagttaaatagcttcgatatatgcccatcaccccaaggcttaaacgtctgtttttaaccccagaaactgtgaagctaatgttgtggcataaggaaggagacagtgagagccaagatccagacattatgatgcatccatcagatggcgatgcttggaaggctctggatcattttgacccataatttgcaagagaagctaggagtgttcgtctaggcttgtccactgatggtttcactccttacgacaatagttcaacttcatactcttgttggccggttttcatcatgccctacaacccccctcccaacaaatgcatgaaagaag

SEQ ID NO: 156536 - DNA, 445 bp, Zea Mays
gaaaagtgttcttcgtctaacgcggaaactaacttactacaacataaatgaaaaatctaaagtagcctggtgatggatccttgttctccatagcggatcctcttgaggggaggggataacgtcatggcaggtacttgaacttcagggggattccttccatcaagttgagcttccagggctacgatccttgcatgtgcatcctccagctccaagtgtaccctagagaggtccagggtagcactatccgggtcggtgttaagacttgccaccacaccagatagggtgttgaggcgatcttcattagctccacctggaacaatggtggtctggttttctccacaaatacgcagaggaagatgcctgtactttgtgttgtgcaactgctgccgataggtgtggctgagggaccatagagttcgcctagtagcatcgctgaccgaagcag

SEQ ID NO: 156537 - DNA, 696 bp, Zea Mays
atatgattgaaaataagaatgtggttgctacatcatccagcgaattagtttgtttttgattcaagaattcttcaacctatctagatacagagcacaacgagttaccatcaaactcaggagaatgttccagcgtgttgaataggctataattctgttggtcagaatttttcctcaaaaatgcaccatatttgttaacagcctccactcagccagataaatcctagagttcagttcttgggatgaaaatttatcaaatctttcttttaggacagtacctataagatcaggcaataaatgcatgtccaccttttagaatcagcagtctagtcaattcttcatgcagatgtggtaaaagtattatagacattagacaatatagggaatgtccaatacctaagactgaagaataaggtggatcgtgttgcacacatacaatgaaattgtagacttctcgtgtaactttgtacttccagatgatgtgtcgagtagcctaatgcatttctgaagaacacaaataatcagagggctgaaatctagagaacggcctacaaagcacaacagaaaaggttgagatacagatgaagttgaatctcatcaggcaatattcaaatagtagaagtgaaaagagtgagaagcatcaacaagatgagctagtgattacaaagattattgcaagcggtaaatggttattacaaa

SEQ ID NO: 156538 - DNA, 625 bp, Zea Mays
gtgcagataactcttaagggtaagaaatatcgcgtcgtgggtgaactcaggccactgttctgctccggctaccgtactcgcctgagtcacggccgcttcgaatagactcaccagagttagccacctcgcgaccttgcgccacgtgctttggtgctttaaccacgtcgcagtgagttacattagcccaccctttgatcgctggtgagcttgccacggtgaacgccatgaattgcttgcgccagtaacctcttccctctccggctgccacggcgccaactccaaatcacgagccaccgtccccgagtcctataaattgagcacaccctcgactccgctatgtaattatgcacccaacacactcactcgtgactccaattactcaccagagagcctcaatttgaaactctccccaattcggtctagagcaccgccctgcgtgagctcactgtgcccagcgtgctacaggtccgttcatgccctctgctctcctgttttagtacccttatgttctcctgatgctcctcgacccattcaattaagctagaccacgctagatcatcgggaacacctctgttcatccgtagttcgcgctgtcaccgtggacagtgtgattaagagctcagat

SEQ ID NO: 156539 - DNA, 699 bp, Zea Mays
ccagcccctggctcctcatagcccaaataaaaactccaactttagtcaaagcttcgggagtaagctgatgaaggtatatctcaaatgtcttcagcacttcgaccaacatcttatgcaagggaaaatgaagcccagccttcataaaacttttaaataccatcactttgtctgcttcaggaagaggaacaatactctctcctccagccctcactatggatatatcatgaaaatatttgcccttcatcgcttaaattttcccttgcttaatagtggatttcccgaaaacaacatgacttggcctccatggccgatcttcggcatcttcgttctcactctcgacatcaaaactctcattatcgcttgaggccccagacaacccagctaacatttcatcagtgattttgtcaatgttggtcctctccatggcttcatagaaaccagcaagcgcggggtccatgctcttcttctcttcgaccatttcagcgacgattacaaaaaaagccgaagctcaaaaaacaattgcgtgcgcagaagtagaaagctaaaacgacaaacacaacacaaagcttgatagcacaaaaatattttcagcacaagcccttatatatacacgcaaagcaccactgagcggtggggcccgtaatgcagaatgtttcgctattctagcgaagggaaggtgttttttcgaaccctcggcta

SEQ ID NO: 156540 - DNA, 557 bp, Zea Mays
caaagacatgccattctcattgctttcagttttatcctaccaatctagtgacccaaacagtttaattacaagtgaatcaacagaaaacaagatctacagactgcaagtatcaaaattaactaagagcagtgattggaacatagaaaattgagttcactaaacataataagcatatcaaagtcacaaaatggtgaagcagtgcccagattcataggagctaacaaattattttttagcctcatacctggattcataggatggacagtaccagtcgccggcggagatgcctgggaggatggagcgcctccattgttgtgatgtccacaaatcagaccctttaaatggatgcatcgggggtggagggcggccgcggtagtcttgccatagcgagcgaagcgggggtgcacggagggattggggacggggtgcgtacacggggaaagggggtgggaggcagggcatgaaggcgagaatggagcggcggtggcgagaatgacggcgcaaaggatgtcggggaggatgggacgcgagcatccttaggctggcatctcggcggg

SEQ ID NO: 156541 - DNA, 520 bp, Zea Mays
ggcgacggttggctcggggaaggggacgagcggtcttgccgttggaggaggtagccagggggttcgccggaggacccggatcggcgggggcggggctggccgaccacgccagaccgccgtgcgggcaccatggtcgttggccgaccgagaacagaggggagggagggaggagagggagaggactcacccaaaaaccgccgtgcagggacgtctgcttctgcgcgatctggatctggagagggagacgagaagttacgcgaccgtggagtgggtatatagaagagaacgtaggaggtggttgccaatttcgtcgtcaattgcgtcgcgaccaagcgagagaggcagttgcgagcacgaccagggtaaacacgagcagcacaacattggcgaggaaatatattctaatgaccccgtgaaaaggacacgagatctggaattggctcgacgagaggaagaaatatatgtatatttatatatattatcgagttttcgaaatactaaatttaggcatttaaatatt

SEQ ID NO: 156542 - DNA, 1216 bp, Zea Mays
gaaaacgtttgatgtccgcccgccataacgcacgctagacaaagtgagcccacaaccacctatgtcaaaacacatgcgtgaagaaattgcaagcctgcctctagccgccttagcatttgtgcatcctggcaagccccaccacaccctctaccctgagatagccttgtcgtgcacgccgagctgctatattaaagtgtcatgttgcaaaccttgaagtgatgccttagtgcagaaagccactccagcaagacctcgcgcacccgcctgagcacacaccatccacttgtcacaatcacaactaaatgaatgctccaccatgagccaagttaccctaccaatctcgggatgttgcaactacactgtgacaacgtcgccgctcacagtacgtcagtcaagactctccctccattataaactgtctttcctccgcctataaatattggtgcccttaccgtggaacctcccaatccaaccaccatctcattgtcgccccccattcgaccaatgtgtgccttactcttcaaaccagagaacaagtcatcgccgtcgatttgagccgtaggtgagcatgccatgatcttcgacctcttcctccctctcccgaagttattcttaaattatagaagttatgacctttgcatcgattaagacaactttcctcatggccataaattgcctattgaaaatatgcaaggaaaacctcacttaaacaattgtcgtataataagcataaccaagtttctagaagcttctacaattttcatgacaaaccttaatcataagcaaaacaaatttctaggaacaactatagataatcatgatgtacatagccttctagaactccctacattaatcatgataagtcatgaagcctagatatttttagacctccctagaaccatggtgatgtgtcataatgaggtgcccccatataaggtggaggtgacacattcatggtgaggtgtcactcatccatggctcctaggtgcctatataaggatgtgccccctcttgccatgacataccatcccacccccatccacacacattcaagggcaaggtagaagtaaagtagtgttaaagtgtaggagcccttgcataatcatatgtgtccttgttgtaagtattttgttatgctataaaaaatttatttgcttagtgcataagttgtgatccatttgaaggagtgttctgccttcactacaacacttatggc

SEQ ID NO: 156543 - DNA, 734 bp, Zea Mays
gggggatagaggtagtaaaatgcaacttaagtacgatttgggtcaccattttatttgtcttcatgaattaaacttgcttgaaccagacgagcgggacgatacggtcatacggatgagggttgacctatataagccttcaagataaacctttatgcagtcttttaagccatcaaattccttctaataaccacaaagtaattgtatgggcattcaacactggaataagagataagagcctacagtaaaaattgtattttgcgaataatatgattaattgtattttgagattataccataacgcgttgccttgtgacgtatgtaccagctagctgttgggatatataatgacgctgaaccaactggtgtttttgtgatcggattactatgagaagcgtgcgagagcttgcggcggcttcaggcatgcatgcacacctttgaagttaacttttgacgttttagcgcctgaaaagggccgcgcgcgcgcgtcaataattctgccattgacgataggatcgaattccatcgtgtagctataggtttacgtgcgtttataagtacatataaacacaataatctcatacgattttttttctatctatctctatccgcgtaatgattggactactgttttcagtctaccgtacgtaccagcaattacttagtgcctaattcctagctaacttccaaaacttaattacgtgtgtgcatatatatgcatcatcatcacatcacgc

SEQ ID NO: 156544 - DNA, 659 bp, Zea Mays
ctcgtatgaaggcttggattattttgttgcgttggatgtggctgcggcggagacttcgccgcgtgtggagggtgccggggatcttcctagtgcgagtactgggtataggcggcgaagggtggtgggaaaacatagtgtgggtgaatttttgcgaagtggtaggcgccgtcgtatttggatggagcgtggccgtctccgagtagaccgggttggtaaacgagaattgttgtcctcgccgattggggcgagcataggcgagggggatcttcggaatctttttgagggtgaggaattgaggataatgttgttcaattatagggagatgggtatcatcccgaaggttgagctgatgtaatatgtgatgccctcgccgtgtgtatgtaactataatttgtatggtaatgtggcctgttggccgtattcctacgcctgtgttggtttcggctgcgcccgtgggcgattttgcgcaaagtgtctttttaatgagagacttcgcttaacgcacttggtgtgctattctggctacacccttaggcgacttttttgcggagcgtttttaaataaaagacttcgattaatgcacttgttgagctattccggctgcacccttaggcgacttttgcgcagagtgtcttttaaataaaagacttcgattcatg

SEQ ID NO: 156545 - DNA, 520 bp, Zea Mays
gcacaatgtaaaaaaatttaaagctagttaattaagcttcaactttgatacagggtgatggttgggtcaccacataaaatatggagcaaattgcccccaaacatgctctgtcaagcgcttcaaacagagattccaatggtacagtagactgaacgagatcgcaggtgcagtgcaccttgccgccggtgatccctacgcctggattcacgccggcgaagtgattcgtgctcaccggtgctcggataacgtctcacggtgaaaagatctccaccacggatgagcttaagacattgttccgtctagccgccgtgtccgctctgccccgatcgctttgaatcaaccttcgccagagttagacacctcgcggtcttgtgacacgtgcctcggcactttaaccacgtcgcagtgagtcgcgtcatgcatgtccggttatcgccggtgagtccgccacggtgaaagccactaatcgctcgcaccagtgcaactctccttctccggccgccaccgcgccattccaaat

SEQ ID NO: 156546 - DNA, 543 bp, Zea Mays
ttcccgcttaaccagggccggattgagtaatcgggcgccatggtgagcttcacaagcgtacggggctgcagaaacaacattcgatttaggcagagccttaccagggtgatctggccacggagcgcggagttttgtggttgccggagacagaaaagggggaaactggggtcgcggcggctctgggcgaaatagggagatgggatcggggctataggaccgtaagaggctgtgctttcatcgtgcgcaatcaatttgggcgaaggtggagagggcagtgcgaatttgacttcgatttggttcactggtgttcgtgatgaccaagccttgccgtgatccagggggctatttatagccgcggaggtccggcgatcacctcgcggccgaggatagtatcgcaagcgcatgtcgaccacgtcggtagaaagtacagtgaggaagaattacggcatgagcgccaccgcggcggaattcgcaggcctcggtggccgccggtgaggtctccggctggactcggagtaaggtgccacgtatgcgctttttaac

SEQ ID NO: 156547 - DNA, 506 bp, Zea Mays
gcagcttcttcagcttgtcttgcttttgctcgggcgtcatggatatctttttcacttttcttcataatttcgtgagccatctctcagccaccatttgcccagatgtcactgtaaaatttcctgcctattaaacttgcttcagcagaggggtcctttgtatcatctacggagaagacagcttcgcccagggccatggtcttgataaggtcgcattccgccttctccaagatggctgaaatcccccgcgcaccagagaacgcgcagacatccccgcgatcacttagaatttcttcaaaggctttggcctcccaacttatccattcaataacgccttcggggtcgcctcgtatgaagttttcttcggaagaataggcacccacgttggcaaaactggtttttattttcttcacacagtccaaggatttttcaaagcatctttccttggatgtgcgaagttcttcaacgtttttctctaaataatttgtccagtattcgctaattccccg

SEQ ID NO: 156548 - DNA, 392 bp, Zea Mays
atcaagcttttgttcgatatgcttttgatacttgtcatagttcttcatatgcctcaacaatgtcgttgttgttgacccatgtgcataactataaagctttttacaatatttgcactttgcctttagtaatggattctccttatcgaccgggtttgtcacattcaccttatcaaaaacctcccaaaccttggatttgcctttgcagcccccctcaaccttaactggtttattcacccctttacgccttttcttgactctattcacatctccacaaccatcagattcatcaactctaacaacatcgacatctttcccacctagcaccatcatctcatcctcagacatttcatcattcttgtcaaaggagttgctctctgaatcagtctcatctc

SEQ ID NO: 156549 - DNA, 332 bp, Zea Mays
ggaaagtaaccgtgtgtttaatacttagaactcttagtcgatagtagaaattgttttggcttatgtagagaggtgatgacatgccgtaagtagtcatcacttcctctataattataagtcgagtctatacgcgttaggcgttccttaaatggtgcttcgcaaataagtgtattttgtgtagtatggattgattgtgagtgcatgtgtcgcaagaaaagaattagtgcgcatataggcgatgaatgggtgtgatgaaatggtgacatgccttcgtagtcatcatgtcgtctattggtgacctaactgaaggtcgtagagaaaggtcgattacc

SEQ ID NO: 156550 - DNA, 970 bp, Zea Mays
ctttgcttatggtcataaaggaagagcacaattatgtaaacacattcactcttttgattccatagaagttgggtattacaaatcctaccccgttaaaaggaatctcgacctcgagattaagatgaactagggaaaatgtggtgaaattttacttgcagttcctcttctctctccgaggtagtttcatcctctccatgatgactccattgtactttgcacatcttaatcactttattcctcgtgacacgagtcaagtatcaatgatctgattgggcactcagtataagtcagatcacgttgaacattaagttcctccactggtagttgctcttctggtaccctgaggcacttcttcaactgggatacatggaatacatcatgtacatccgcaagatggtcaggtagttccagttggtaggcaacttgccccactcacttgaggatcttgaagggtctgataaagcaaggacaacttccctttaactttaaatctcctcataccccgaatcagtgacacctttaaatacatgtgatcaccctactcaaactctaattgccttcttcgggtatctgcatagcttttcttcctagactgcgcagttctcaagttctctcatatcaaccggacttgttcctcggcctcttgtataatttctggcccggagaactgcctttcaccagtttgatcccaatatagaggggttttgcattttttgccatataaagcttcaaacggggacatcttcaaactggcctgataactgttattgtaatagaactctgcatagggtaaactcgtgtcccaactgccaccatgtttaagagcacaagctcttaacatatcttctagcacttggttggttctcttagtctgcccatccgtttggggatcataggccgagctgaaactcaacttcgtgtctaggcactcatgtaacttctgccaaaaccgagaagtgaactgggatcc

SEQ ID NO: 156551 - DNA, 498 bp, Zea Mays
gtggaagatccgtgtcgggccgctgcgaaccgtggacggcttccctaacctcacccttgtctctggtaagcccctgggataacttcagtttgacgtgcgctccgttttgcaccggttgttgggttgggggaaacacgggggtagccatcgcggttgttcaccggcgactcgccaccgtgaccagggcgcggcgctgccgtgtgtagctctggttgggggagatcaccgagaccgttggatgcgtcatggacggtggagattgcatcagagcataccgattgggggaactgtcctggagcgttggatcgagatccgtgggccacgatcggagtttaggaaattaaatctgagccgttaatctaggcatctgaggttcgcgttgcatacctgttcggcgagcggcgatctaatctgcaccattagcgcgccatctaacgaccgagatcacgagttacctcttcggccgagaacttttactaaagaaaccttggatctatt

SEQ ID NO: 156552 - DNA, 1236 bp, Zea Mays
tttgattgcttcgcttggtggaatccccaatgacgagaggcaggttcactttgagatgcctactagcccgagcgacgcagaaataagtgtcatgctggatatgttggctgaggattcctctgactcggctcctgctgaaacactagctgtagcactcatcccagagtctggaaaaacattggacattcagagacctaataatattcgcccgaaacgtctccaccaagctagtcatccaacttctcctgctgaagggaagaagaagaaaaagagacggcttcggcgagtgtcatccttgaatcaggatgccggcccttctgctcctgctgccggggaagtgccagtgccagtttttgttgaagctgaacccaatgggtgtgacccgactgatgctgaatccaatgggtgtggtcttgatgatgctgaccccaatgggtgtactgtccgtattattgatgaggatgaggaagaggaagaggaggaggaaatccccttaattcggaagaacagtcggcgctacatagcctgcggggagaatagtggtgttccttctccagcttcgtctgctctcgttgatctgcaggaattgtctctggcaaattttgatcagactcttgaagacatggtccctgaagacctgttgtccgagcccgcagatggtggaatgatggaagtttgcactgatgtgcctgatgccgggttagagttatcccgagcagcgtctcgttcctcgtcgaccttggagcgtggtcttaagagtcgagaggctgatctagattgctccgttcccatggaagtggttgaaagtccttcagccttagaggtggctgttacagagaactcggtccccaaggatggcgcttgcgtttacccagcccccgagggtgttgccggtgatgatccggctcgggtgggtagtgcgagctatgacccagcccccgagggtgtccgagcgggttctccttctcatacttccatggatgttcacgttgggtcttctcctccacattctggttgcatggcagcagcacgggcttcgggtcaggaggtcgccttagaggccggcgtgcctgatgacagagttttgatttctgctggtgacgctgaattggtcccctctgatgctctgcagattgcttcgactggtaatccttcatcaagtcaccaactgaattcccatgatttgggtattccttcgttcttctccaatctccaggtaatttggttttttctggc

SEQ ID NO: 156553 - DNA, 391 bp, Zea Mays
cgcttgagttggcgtgggtcagtgtggctgtgtgagcgagtggcagcaatagtttaacctgaccggcggacctgtggtcactttcttggcctgtcctgggatccgtgcgcgcgttctgaactactaatccaatcgaatcgaatcgcacctcgcgtggtcccgttttgcacgaattttggtcggtactgacggttctttttctagacaagttaggcgccaattttggatggatgctgttgccaaagacccaaagtgcgtggagtggagtggagtggagtgcctatccgcgaccacatctacaacgacaccaacatcatcaactcgacacaaaaatcaggcacctaagataaatggactccatcagtacgcccgctcgtttgcgagctctacc

SEQ ID NO: 156554 - DNA, 913 bp, Zea Mays
gcttgcaagtcggggtgttgggggacggaacgtgggtgcaaggggcgtcatccagggccggatccagagctggggcatacttcaaccagcttagcagcataagaacggctaacaaatatttaatatagcattactatttactatgctaaaatgtacagtatatatagtaaattgttgcttgcacttagctaaatttaaccgaatagagtgctcattcttctcaagctgactttgttttttcatagcagcagtgattgactgataagatcctcataatccttgagagccttgttgtgaaaactggtgcgagatcacctacaagaagtgctaatctgtcattgttcttccaatagttccagccttgtaccacaaatgcctcacggccatgatgggtgtcaatatttttatccctaaacaagtagcaacacaagcagtatgctttgtcctccttctcacaatctcactatattccagccaattagcatactggccaaaccaatctggattgaatcgacgcctctttcccgcaataatcctgaaaggaaaatcataagtgcgaggttgataaggcccccagagtaaatactttcttcttatttcattttgctgattggggtggtagtcacacattctcttcctttttttgctggatccctaggtagctcatccaaatcaattagttctggcactgaagagttgtgtttatatggcctcgctgcaagaacaggtgtaggtgcagcagctccacctccacctgaacttccgccattatcaggctctgatgtcactgattttcgtctaaaaaaatctttccatgtctagcctacaaaaaattggaacagactagaatcaactatgattaaataaagtataaaatgtctacaaactccatgtactactaaccgtaaggggg

SEQ ID NO: 156555 - DNA, 314 bp, Zea Mays
gagggtgaaaccatgcctcatgccggagttcgggcccatcttggacaggattagggaactggcggttggaggcttgacctcaatgcacgtactcggggatttcctgaagcgccgagtcatgccgctgcaggggaggccgcgtctgagttgctggtttatcggccccagcgacattggtaggatccaccgtgggcctgggaccgatctgacttgggaggagttggaaattttggtgtggggggtcaccggcgaggcttttatccctgaatccttgatgcttccccaggggatttcgccgctctgcgacaatcctg

SEQ ID NO: 156556 - DNA, 393 bp, Zea Mays
ctgggtcccatctggcggcgcgcttgcctcagctcattgaaccgctgattggtgggactacggagcaggtgcttcatcttcaacgacagcgattttcacggcaacaaacagagagagaatttggggactgcgatttgatgcggatcgttgcgcgtggccaagatcttcgccgcgcagacctctggacggggtcggccatgaataccctcgcccccgaactataaattgggcctgcgacctcctcttctcacctcatccagtccgccgccatcgccgttgcccgagagagagggagcagtggggagctcgaatcgcgccgccggggaatcagggaaatccgcattcgctgctccgatcatcgtgagtctcctcttgagtctacccctgcttctt

SEQ ID NO: 156557 - DNA, 616 bp, Zea Mays
tgggttcaataatgggcagtcgttgagacctgaccatttgagaggataatgggcatttgcgataatggcgcaggcagcaggattggcagacagtgccactgccctagctaaccggttgcgcgctctctcctctctctctcaagaatatttgtcgaatcggcaagcagggcaggcagagaagaaggcagctgtatttcttttctatcaattggaggtaggcagcaattcaggtctccgtctctccatctctcatcctctctctgtaatatgcggattaattataacgttatccacttcttccattctttgtgcttgttaattaagtgttttgtgcttgttaattaagtaaatatgtccttcaatttagtgattcagtcaatgcttgttaattaagtgaatagattcttcagtcagtgcttgttgatttagataattagattagtatttagtaagtactcagtaatattgtttgattatttctctttgcgcaaactagtcatgaggttatctcggtcactttcgagaggattcgccaccgaccgcgttaacattatgaacaatgatacgactctggaatgtgaagttgtagaacaaccgaatatttgaaggggttttc

SEQ ID NO: 156558 - DNA, 679 bp, Zea Mays
ggcaagggcgcgcgatggacttgaccgaacgctggggcgagcgcgcgggttgggcgaacgccggcgtgccgaccagggtcgaacacgtgtgtgcattcattctgcccaagttctggcgcgtgtggtcattcattcgagcttgctcttgccttggtcagtgcacaaaacctcttctcctccctttaagctaccgatcttgtgtgggggtcataggatttggcctaatggtttcaaagatatggagctctcaagtctggtctgtctctcagcccgagcccaaggcaaagctttggttttgtcgtgtctagggctcgcgtcccaatgccatcttcagacatgtggtagaggggttagttagacacatttttgttaatgggagctttaggattagagctaaggatcaaggtgaacgtgctcgcttttggttcaaatgctgaaaattcagaaatctgaatttcatgtttcccctttgaacctccacttgaatggcttgtttggagtttttaacaaactattttggccaagcttttataatcttcattgtagcttagttagtttatttcaattcttattattggcctaagtcatgatttcaagtttttcatggtctttcatcccttttcttattttctacttaaatagcttaattagggttggtattagggtttcaacattttcc

SEQ ID NO: 156559 - DNA, 608 bp, Zea Mays
caaagctccttgaagcgctcccaggacggcatgccctcgtccaacaggagtgcgtagtaccatgtctgagcggcgccggtgaggtggtaggaggccatccacgtccgctgctccaccggagtgcgctggccccagaagaaattgttcacagtgtgtgagccaattcagcgggtcgaccgagccgtcgtatgtcgcgaagtcgatcttgtaggtccgaggctggaaaggcgccgcgccgaacgtcgcgggagccgtagccgagggcgccccgccgatcactggagctgcagccggcgcggagcagaaagtggagtcgtggagaattgtgccgtcaacgccgccatagagcgttcctgacgccggaacgcccccatggccgaagcctgctgtgatgtgaggggtcgaatggaccgacgggcacgccggcgcagaggagtagactggctgcacgacgtcggtgagccacggcggaagcggggacggcgagtgggggaactggatctcctggatggggacgccgccgagggacaccgccggtgtgggcgcggtggtgtgcgccgtgctgtcctgcggcatcccgtaggggtagacagcgcccgaggcgggtg

SEQ ID NO: 156560 - DNA, 540 bp, Zea Mays
ggatcaaggcattgaggaagaaacacctcaaaagaagacattttgaagaccataagtgaagatcaacaagtgtcaagcaaagtttgagacatgaagagagtgtagccactcacggaccgtctggctgaggacaccagactgtccagtgcaccagggaacaatagcccaatggctagttcctggtggcaccgtggaggagagacaccagactgtctggtgcaaggctaacacgaggcaacgatcatctgcaacggtgaatccaatggctagtggagcaccggatagagagggaactctgccttgcttgaggtcggcctcgaccttagagaaaactacacctcgctcgacctcggctttgaccaactgcctcggcaacaactccccacgaatcctataggaagccactccgacaactgtactaacccctccctgtatgactgcatgccccgaggcaggcttgaccagggccttgggaggaaccttcgtctcgcccgagcctggcctcggcctacataacatcgaccaaatgatgccaccaac

SEQ ID NO: 156561 - DNA, 478 bp, Zea Mays
cacacagttttcaaatttgaatcgataaggtaatcgaacaaggtcatatttcttcttcgttcccttcatcttcgacatcccccagccacttgacgttggatacgtccagttggcctggtattcttgcaccaagtccctggtgctgatttgctcagccaccaccctgaattctacctcggccagctggcatgctgaccctagctgcatgttgcacaggggcctggtcattccgaagtttaaggacagcgggcacatgaccatcgtcatcagtttctccctcttcttctcatcagccttgatataaaaccattcacctttccagccggttggccatttggtgcggtaactgagaactggagccttcgtatccttgcgatacgcaaaattgtagcaaccaaaaatttcatgaagaccgtctgccctggccttcgtctggtagtgcaactcgtgcactcggcagaatgcttcggcatctcgg

SEQ ID NO: 156562 - DNA, 677 bp, Zea Mays
caaaggccctcaaaatgtcccctattgcaagaagaatctaaagtgctggaaagcttggtcatgacgtcaggtcctgggtggccgagacgacgatgccaagtggtgggggtggtggtggagaccaggatgagaggtgaatacacatctgtggacgacgaacggagcgtgtagaggggcccaacgctgtcacatcgggtgagtggggtcttggtggctagatccttcacagaaaaaccggtagggtcaaactcaatggaacaagaattgtcggtggtgaaccgacggacagaaagaagattgtgagtgatgtgaggggctacgaaaacgtcgttgaggtagaacggtccaaggagtaccaaggcacctactgaggtgactggaagagtggaaccgttgccaacaacgatcgaggtagggtgtgtggggggaggtgggtgtgagcgagagggcatgcctgtggtgggagtggtgtgataggatgcactggagtcgatgacccactcagagggcggtggggccaacaccttggtgttgtatgcggcgacgagggcggcagggtcctagtctgtaacgaacgaggatcatggtgtcatggtagactgtcctatgaggcatgtcgtaggcaggtggcgtagtcaggagagccgacgccggaggacgggcggcgctgggggcct

SEQ ID NO: 156563 - DNA, 353 bp, Zea Mays
ttcgcaccagagggtattagagtacaactagtggatgaagacgttattgggcttgctaatgaccttttgtgataccaggtttcctataatcccctctattcaaggcatacctagatggtttttgtatccactcaagaaaaacaacacacatcaatatgccacatcgtttctcaaaataaaataatgaccatggaaaatttatccaaattgagtgagagaactgtccaaacataggttaaggttgtaaggcacatttttccaccataccgttgctaaaaagttggaatatagagaattcaaacaatagatcaccttttaaaccacaaatgacgtttctatgattttgagggcac

SEQ ID NO: 156564 - DNA, 463 bp, Zea Mays
catggaagcgacatactagatgattattgtagggtagaagtgacggcggtcgtttaaggatccgaggacgacatggtagacatccctgggcccgaaggaatcgagacacttggacaagccatcaaaaatttcatcttttggcctcgaagggatgtcgaattggttgatccaccaacgtcgtcgttgtctcatccccaaccatctctgcctcctcaaactttagtacctgtacatccatcatcacctccacaatcttcacatgttgctcctcatcctttttctaacccaccgtctccgccacaagcatcaacatttaggacaccaccaccttctccacagcaatcaagggattcacgacaatcaaagaaatataaattccttgtaccaaaattgttgtccacattcgagaaaaagaagagtaaagctactactgctggcacagctcgatttttgaaaggaattg

SEQ ID NO: 156565 - DNA, 402 bp, Zea Mays
gtaacgcggcttatagctcccttcccccagctgcggatggtcagcccggtctctacggagtcagttgcgcgtggtagttgagctcggcgcggatttggggaagaagagcgggagaaacgtggccagcgcggacgactgaccaacgaccgagaagctgtacgtggagggaacgcgagtggccgagatccacggcggaatcgacggaggctgcatagctcatgacaagctattgactgggtgaagcgcacgacgagggggaagatctacagggaacgcgtgcaattctattgggggaggaagaagcttctggcgcatgggttgaaggactggtcagtggggctcgcctgtaagtgtaacggcgctagtggactatgcgggagtggaggagaagggaagtgggcc

SEQ ID NO: 156566 - DNA, 657 bp, Zea Mays
ttgcgagtgtagttgcgtcaagcccaagcgagtgtaaaaaataaaaataaaagagggagacaaggagcgtgatgacctgtatgtttgtgggccgaatatagactggactgatatctgagaacgagtcaggaattgagtggagatccaatagaattagaaatgaggtaattaatagtaattgatatgtgaggtcattaggaaagtcgatttagctggtgaatcgtttttggtttttttcagtacactacgtttattcaaaaaaaaaccggggggcatgtgttgaatgagaaatttgtaaccggatgatgcagggctgcagggacagacagaatgacctgataagaaaagaagaagggaagccgatcaacaaaaatgcatataaagcatatttgtgatgcataaaactagaagtccagaaattaaaacacaagccaaggtcaactagccgcatggaggaaagagtttgtttggatttgtctcctactagataggataagtcagttttattaggctaaacagtttcctattgtttaggctagaatatttcccgttatttagattaaatcagttgttgcatgctcgatcagaaggcttatataagcctactgtacgctacagtaaagaggaggcaaaaaagaattcttcattacttttctg

SEQ ID NO: 156567 - DNA, 1056 bp, Zea Mays
ccagctctcaaatctagactagagaaccagctggcaccatacaattcatctaggaactcatcaatgattggtaccgggtatttacgcttgaccgtgagggcattcaagtgccggaaatcaacacaaaatctccatgattcatccttcttgcgaaccaataagactggactagaaaacgggctagtgctgtgtcgaataattcccgagtctagcatctccgagacctgtctctctatctcgtccttcactgccggggcatacctgtagggccgaatgaataccggttgagcacctggcagcagtgggatggtatgatcacaagatcgtgaaggaggtaggcctttaggagactcgaagaccgactggaactgcttaataacttgggcaatccttgggtctaattgggtatctgtatgggtatcagcagcggaatgcagcaaataaaccacatgtagtaggtgcttgttatcagaagaaaagttaccctgtaacactgcttgcttgccctggtaagaaaatggcagccacctttctgaccaatgtatcttcattggactaaacttttcaagccagtccatgcccagaactatatcataagattgtaatggaaacactcggaaatcagtgacgaacacatgaccttggactgaccactgtgttgacttgaatacttgattgcaaggaacgacccctccatctgccacgtgcaccaacacttgtgtaggcaaaagtgacatcccagaaagtttagcagccagagatgtactgacaaacgagtgggaactgcctgagtccagaaggatgataaccatgtgaccttggcattcaccaataagctgcatcgtgtgccgcctggacggaccggtgaccgatgacaatgagagagacaacaattcttgtgttggggtggtctcagcgtccactggagaagattgagtattatcttctaagagttgccacatctcctcgagcacatgtaactgcactgtaggggagcaacgatgcccgggagaccacttctctgcacacctgtcgcacagtcccctcgcacgccgg

SEQ ID NO: 156568 - DNA, 597 bp, Zea Mays
gagagagagctcgcaatcgccgctgtaaccttgttgcagcgtgcttgggtcgggaagcagaggagagtaacctacgggctcggcgaagccgtccgcggccgaccaacggcttggggtctccaacagctattgaatcgtcaccgggcttgcgacggactgctcggcgacatcgccagctcagtcctcgtcacaaacgcggtgagtcccttttccttatcaaatttgttgtgagctccgcgttcgttttacctgatcggggggcatgggggtcacgggagcaccgtggggtgttcacagatcatggcgccgccacgctagctccagcgccgccgcacagctcgggtagcgatgggtggtgctcgcgggcggttggatggatagtgggcgatccagattaaaataaccataccccttggcataataaaatctgagccgtcgatccaatatcgagtggatgagactagatctttggccacttaaaacctacattgttgatttgagatccgaaggatctagtagcgtatcatttcagggttggggccaacctaatccaggccattcagggttgatctagcggtcccagcgcagcgatacccc

SEQ ID NO: 156569 - DNA, 339 bp, Zea Mays
attaacaatcaccatacgaagaaagtaggcacatgccttgtgatcccaggaggcaagttccatggaagcgacattctagatgattattgtagggtagaagtgacgatggtcgtccaaggatttgaggatgatatgctagacatccagatatccctgggaccgatggtatcgagaaacttggataagccatcaagaatttcatcctttggccttaaagggatgtcgaattgtttgatccaccaccgccgtcgacatcacatctccaaccatctccgcctcctcaaactgtagttactattgtacatccatcatcacctcctcaaacttcatatgttgctc

SEQ ID NO: 156570 - DNA, 565 bp, Zea Mays
tggggatcggctagaggtgaggttggggtccagggcaggatgcaatagggtgaccaaagcagcttcacctagccaggtaaaattttgataaaaatccctagtacaatctaccgccaaaaatacctgggtccaagcttggatagagctgctatgctgactccaacagttgtgcgctgctagacgtaaccatacccattcgccgacagcaaactcaaggggtcgtctctttttatcatgataggccttcatagtcacatgtgtctgaatgagcctttcccgtacatcagataggaactcatctggttccaaaagctgtgtgtcaaccacagcaatactagaagaccctggctgatagggccagtggcaacctgccatatactaccttgaagggagagcactagagggttgtttgataagaggaactgtagcagaattctacccaaggaagccactgagccatgattttggtcgatctcctcctaagcagcgttggtacatggtaatgaaccggttcaccacctcaaattgcccatctgtctgtgggtatatgcagtttcacaccggc

SEQ ID NO: 156571 - DNA, 796 bp, Zea Mays
cccctcagctcccaactagccattaagtcatggaacttctacaatgtgacagtggtgcatattgatgtgacacttccgtgcaagccaacaatgaaaatgagattgaagcttagtctagctcgactaatgtgtgaggaaacaagcatggtgggttaaagttgagcacttgattgcacattgaagcgtgcattttgcatgccctttaataatatggttattcctatactgtacttcaaatacaaaatgaatttatgaacttcaataagtccaccaccacaaccttcctgtaatgggagtccaccatgttatataatttcctcattactttctcacgggcttgtcaacttgataaatctcattagtcctctaatatatggttattagcaccaaaaaccacatcagagattaattgcacttacaaattttcccttttcggtgattgatgacaacaaaattagagcttacaaatggatgaaatataatatgagatttttggtccatgggtatatagactctccctcagggctaatttggaaactcaaatcccatccaggattgaaggggactgagaagaatcgcgaaacgggatttgagtttccaaactagcccaaaatgtataaagcaagaactgaattcttgaattggcatgcatagaaggtcaagttccacacaaacagataagcaatggggctacctctaaatctatgcatctaattgtgttacacattgtgtcacatggtagagtcatgaagtgaatgatagttatgcactttgagaatactagagttaccatgtg

SEQ ID NO: 156572 - DNA, 394 bp, Zea Mays
aggtgacaaaggctcctgccacaactctcaagagaaggaggatggccagcgtgctagacgctgtcatggagaccacaaaagccttgacccctgctcctacgaagaaggatgccgaagctatcatagtccaagccgaagccgaagctgggccttcagtgcccattgagacgaagcctgccgcacctgaggataaagatgagcaacaaactctagataccggcatggcagtggggcaggacatggtagaaaaagctaaatctcctgcccccgaagctccgtccgaagatgttgattacattatttgacatgcttggggaagagattatccgaagaagaaatcttagaagccagacactacgcccagaaactaaaatattcgaagggggccttagtg

SEQ ID NO: 156573 - DNA, 582 bp, Zea Mays
ttcattctagaaatcattttctattttacatcttgtactcctccagcgattatggaccgtggacataaaaatccgagagcacaggggtcgttctaaaaatattaggacttaagcttaatacgttaacactacctctggtctgcgggttaattcgtacaatctacaggggctcttagcaaaatggcaacggcgaagaggtaccggggatccagagccgttcgatcataagctgagggcctagattagatgtactaccccagtgaaccggtacgtgatgtgagtcattggatcctcatcacgcggctacatttaattggagcgaagggggatacggtgatcaaatcccacacgtcggattcaaatcgggcaaacgacattatccaaggccgaaccgcaacatgagatttgatcccaaccgtccacatccgaacgaacggccaggagatcgcctccgaccttcagtagccaagctcggtcgcgcacaccacgcccgcggcggcgccattgccggcaagccaccaccccacgccccagtgctccaaactacaaccgagcgcgtgcaacacgtagaggaggtcaagg

SEQ ID NO: 156574 - DNA, 770 bp, Zea Mays
actggtggtcgtaagtcaaataaataaagaatgggattgctcgaatgactctatgggtaccagcaaaccctgaggcgctattatgataaggccatacgacatcgatccttcgcagtgggagacttggttccttcgctgaattctaacagggcaagggacggcacaaattatcgccactatgggaagggccattcatggtagcataactcactcggccaggatcataccgtcttactcaaatggatggcacgaaaatagggaattgatggaatatagagcatctcaagaagttttacccctagccagatttcaaaggctatcggggcagcattgtattctgtaatcggaaatacatcatcaataaaaataattcattctcaaaggcactcgaactatttattatcaatctgcatatttactcgactcagggtgatcattataccctactaacgaagcaatcagcttaagtcggcagtgacttaagacggtgcaacatgctcacgcttacttaacttagggtgaccactataccctactaacggagcaatcgacttaagtcggcagtgacttaagacggtgcaacatgctcacgcttacttaacttagggtgaccactataccctaccaacggagcaatcgacttaagtcgacagtgacttaagacggtgcaacatgctcatgcttacttaactcagggtgaccactataccctactaacggagcaatcgacttaagtcggcagtgacttaagacagtgcaacattctcacg

SEQ ID NO: 156575 - DNA, 804 bp, Zea Mays
cggagtttgtcgtgtataggagaggaggtgtggccaagccctgtagccggtatggcctttgtactcgccgttgacttgtgccgggaggaggatgtctggttcttgtatttgtatatttgactacgcggagagccaaggctagggcctagggctcggtcacgtacccgagccggtctgatggggaagttgtccaagtcgtagtggttggagcagtggtgggtatggtaaaaagctcttggtaatacgtcagctctgctacttctggtgacgtcggacgccctttcattggtaatatcgaggccgaagccatgctcgggtgaggtggaaatcttcttgaagtcgtggtcgagcctgctctagggctcgcaaccgtgtaggatacagtgggaggagtggccttctgtggaattcacggggagcaggtaaccgaggctaggctcgggcaggcagagattgttccgaggctaaggccggcttcaggcgagacagagtttctccctgagggttagcccatgctttgccgtacgcgcgtcccatctggagctggcagacggcgtgggggaatagctaccataattcctgggcacgtgtcatcatagttggtgaaagtggacaccgcggtcctatcacttatgttcgcctgcgacgtttcgtggggtaggtacatgcattgaatgctcatgtcccctatggcctttggccgagacgggctcgagctcggggttgtcttccttgcccgagacgggcgaggtgtaaatggtgttctgtggagaagggacctcggacgggacgaggatttccccg

SEQ ID NO: 156576 - DNA, 795 bp, Zea Mays
gccatggtgcggtcacttccgccgcggtgtcacccatgcctcgttttccccttactgcgcctcttctctacgtggtagccatgcgtgaacaatgcaatccgcggtcgctgatcgttagtcggaccaccgtggctataaatagcaccatggaccacggcgaggtattcacatctccaccagtgagctcagttgaagcccaaattcacggaatcctctccacctctcccaaaattggtagtgcacggtgaaaccatagtactttacggccgtgtagccccaatctcacctcccaattccacccggaaccgtcgcggcgccgttttcccccttttctatcaccggcaagcaaaaatcctctgtgtcccgtggccagctacttccatgtctgctcctgctcgttttaatcgtgtttcagcaccaatatacactcgtgatactcatcggctccgcccttcttgctcggccacgctcaatcacccggaacacatgaacttgtgttcggtattccccgctaccgtggtcacactaagtcagagccataaccacgcgattgaagcttgttcctgggttgtctcatgtccgtaatacttacccagtaattaaattaggcagccaccaccagtaggatcatcgacggtgagcgcgccgtggatttggacctattcgaagaagaaatagaactagaggggcatttttgtatgatgtcagtgactctggaaatagtcccgggaacgctttccaagttatttgaaatagcgagggccttttcgcaaagtcggcaccgcggacgcgggc

SEQ ID NO: 156577 - DNA, 1089 bp, Zea Mays
gattcgtctccctggaacgaactcctgcacctatcgtcgagtctgtagcttgctccgtacgtagccgctgtccgcgagagaagtggagtgcgtgggcacggcgcgaagccaaaatcagcgccagtcttcgcgtgtgttgagcggccccctcaaccgaattcctaggatcatttagctgggcgctggggactcggttcctccctttctctctccccagtgaccctatcagccgccgcgggcaacaccaactcgtcagcatcattcgcttcaccagggctgcggctgaagccttctctctctactcattccttctcgcacggccaccattttcgttgaccggagatctcgcgggagacatcgttgttgtgcgatgccaggcggccgggagcatccagcctggacggtctataaggctacgatgccatggctgactccccaacaccaagcccctggatctggcgcaagctgagtcacctccacctatacgccatgactccgccgccgtggaaacatcactcgccaaatccgattgcgccgccgcaaccacgctctgcgccgctgggtgagaggaattaaaggatcgggatttcgttgtgggctcctcggcgtgcgtcatgcagtcaccaatttgagcaatagctcgttgggttcagctcagcgtcagcctaccgccattgggagtgtccgcgccatcaacctcggtgagtgcctgtccatgaggtctgcgtattatcggattcgcgtaactgcatcccatgtcgtgatccgtctgcctgggcactggtgttatcctctctggcataatcaccaatgcgtgttctctgttgccgtggggttcgatgtcggggaggaagaagggtgttagccattaatgttaggattggtggggcctacgccggttgaagtcgcgccgccgtagggagacctgtgcgccactttggctctggccggaggtagatgatgccctgagcaccattggattgagtatgggcgtgtaggattagatggtgcggtgagtgatggcttgccgtcgtggatgattaggcgtcatcgcgtcgtcacagttctcgaccggagttgaggagagag

SEQ ID NO: 156578 - DNA, 443 bp, Zea Mays
gaaggcccagcttcggtaccagcttggattactgcagcttcagtttcggccggctttgtttcagcttcggtttgcgcttttgaagcctcggcaatttttcttgaaggagtagagttcaaagtctttactgtttccaacacatctagcacatttgccatccttctcctcttgggagttgcggcagaacttttttgtgcctttagcaatgttacttctgatgaagggcttaaaatttctagggcttttgtttcttcaatatttggcttttcagccttatctttctcagtcttcgactcagctagctcagttgagggtaccttcggcattataaccagctcttcagtcttctgtgtggggggaacgggttctcttagttcagcagctgaagaagtctccccgccaaatttaggcaccacgaccggttcaatataacgtggccggtg

SEQ ID NO: 156579 - DNA, 380 bp, Zea Mays
tccttcaaaattttctcagcagcttcgttcagaagtttgttgacagcttcgtcaacagcttcttcagcaattcttatagtttctagtgccgccttcatggctggatcagcttcaggatcatagggctcaggtggcggtgaaagttcagctacaacaaaagtaatttgttaatccgaagccagaaaaaatgttgaagcaacaaaacaattgaaatacctatgcgccttgcgcgttcagcaacctctttggctcgcttggcttcttctcgggcttcgtgggattctttctccttcttctttatagcttcatcagctaactctcggccgcctttcatccaaacgttggagtagaatttcccgcccatcaaagtagcctcagcc

SEQ ID NO: 156580 - DNA, 675 bp, Zea Mays
taataatgtagtttaactagtagtgtaatgtagtctaagtagtaatgtaatgtaatataggatcgaggggcgggaggccgaatcataatgagtcggtcttcattttgtaatgatccccccactgatgaatgaaaattgttctcacgccaatctgctattgcgtattatgttcttttgcctgacagtccgttagcttttagaggtaatgaccgagtgatgttactttgcttcgaccaaaactctcccgagctatcggcctgtccctttgcgcccgacttagtgtgccaacccgtacttttgttgacgccctcttggcctctgaaccctagttcctgttttttcctccactgctctccagatttctaagttcccaaatcttttcgcattttgtccctgaaccgcgtcgtttgaaaaatcgtgatggcacccaagaaaagaaaacagagtgctgctacgctagacatccctccgattgatcccaacagccaactcccttttgctggtaaccacgtttctgtcgtttctgaagctgaccttctgtatcttgttgaaattggtgttctaccgctgaaggaactatgttcctagcggatctagcgcggagttactgtctcgacggaggatacccacgaggcagttatcttcgcgccttttctcatccgaggactggcctta

SEQ ID NO: 156581 - DNA, 776 bp, Zea Mays
gcggaggcccaagccgaccgcaagcgcactaccgagctggagcttgaggtgaagggtatgcgcgcctaccatgagagagtggaggccaccacatgagtgggtgtggaccaggcgcacacactttttgtggatgcttactgcaacctaggtgcacagatggccccctttgacaaatcagaaggggatgtggggactcgtttcctcgagtggctgcaggaggagctagagtctctcccatccatcgtgacgggtctgatgtcctatgtgtcgctcatgtcctgtgaaggggctgcgaatgccttggcctgtgagggctgtagacacttcgaggcccttgaccggagcaacgaggactttgacgcttgtgtattctaggtcgaagacgacgtactgaagtgctcagccggggggcgctttatgataggatgtggggtcctcacggtagtggtgtcgttcgagagagagccgatcgggcgctggcacatgtatgcttgtacccttggcgaggacatcccttatattttccttgtctaatgcactgttgtattgtcctctcaggcgatgagggatgaagaggtcgaagaccttgccggcttggagagctcgatagcccgacaagatgccgacgctgaggtgggagctaaaaagcagtcttcgcttacgaaggtcggcgttgatgaccctggggcggcggagactgcacaggtgtaatcattagagtaggactggtacgacaatatttttactttgtttgatacttaaagtcggctgctgca

SEQ ID NO: 156582 - DNA, 774 bp, Zea Mays
gtttcggatatctgaaataaataatctggaatatttgctcaacaagatttgataatatggtaatatgcaatacttcagtttggaatgtggcggagaacactacttttttggttggttaatcttgtatatttagtctgtagttgaactatgcttccggatgaatggtgatagaatgttggatggtttgttttgggccttaattttttgcttgctcactgatggatcatgatggaatcttggatggtttgtttctgatcctgtgttgctttgatatgctgatatgttgtggtggtctggtgatgaagtttttggctccgcttgtgatttaaattgttgcctgatgatcagttgatgctcttcaatctgtagtagttcagttttcctgtataaaatgctgcattggatagttggtcatgatctattttttcgtgtatattttttgaccgggatatttttcgtgtatagggctgctatttctatccagaactacctggaaagtggaaaaaatctagaaacctagtagtaccccgtttcactttttttggaagtatgtcaatatgccatctggttcatgttcacctgaaaatctgaagtttaggagtgaaccaaaatgaattaaggcagggaggctgtaaaatattgttttgcactggagtggagagtttgaaatagtgtgggataagaggtaagataggaaggctggaggcagcctgttatttgtgtttccctcgttaaaggccactccacttgatgtattttgcaacccttgtctgc

SEQ ID NO: 156583 - DNA, 442 bp, Zea Mays
ttcaagtgatttgaagttccatgctgaatcattcccaggttcagattctccatctcctggcataatgtaatgtcagaagtcctcattgttaaattatggcaggaggccttgcgactgagtgcatctgccactacattagctttgcctgggtgataatggatttctagttcataatccttaataagctcgagccatctcctttgtctcatattgagctcagactgggtaaagatatacttcaaacttttgtggtctgtataaatgtgacagacattccctagtagataatgacgtcatatcttcagggcatgaaccactgcagctagctccagatcatgagttggataatgctcctcatgccggcgcaactgtcttgaagcataagctattactcggccttcttgcattaatacacagccgagactagtgcctgatgcgtcac

SEQ ID NO: 156584 - DNA, 628 bp, Zea Mays
tcaagattaaggaacttccgagaataactaggggaattctgccctgagttcatcttttctttttccaagtggcctcatcttctgaatgatgactccactgaactttgcacatgttaataactttactccgagtaatcctacgagatgtttccagaattctgacagggtactctaaataagtcaaatcctcattaacattcagttcttccataggtaactgttcctccggtactcttaagaatttcttgagttgtgacacgtgaaatacatcacgcacatccgacaaactatcgggtagctctaactggtacgctacttcaccttttctttccaaaattttgaatgggccaatgtagcgaggggataattttcccttaaccttaaatcttttcattcctctcatcggtgaaaccttaaggtatacgaagtatcctacttcaaagatcaactctcttcttctattgtcagcatagcttttctgtcttgactatgctgttttcaaactctctctgataatctgtacttgcttttctgcttcttggagaatttctagaccaaatacttgggtttctccggtctgattccaataaagcggtgttctacactttcgtccataaagtgcttcaaa

SEQ ID NO: 156585 - DNA, 658 bp, Zea Mays
ggcaaaatgtagagcaaaagaaacaaaaattatagtagatatgcttcgaattcttgacccagcccctctggtgcttcagtagatatgtttggattccggaacaatgttgttgtctgttcgagcttcggactcttccctcgcgtcacgctgctgctaatattgatattacccctaaggctgctgattgtaagatgaagttggaactggtgcaggtggttgaggtaaggcccacatagctggagagtgacttgttgaggcaactgaagctgtagacaatggacgtggctattggttgcatacatactctgggatgtatggagagtagtacgaagaagtatgaagaacttgcttcgacagattctgccgtgcttcggcctcaactatttccttctgcttttgtattgtgacttggcaagtaattgttgtgtgtcccttgtcttctccacagatcaggcataatagtcttcttggctaggagttgtattttcctccgaaccttcgttctcctctgcctcttggagatggtagtataactctggtgcatccctattgactgggagttaccatgctgcccttgattatggttgtttttgtcgtcaatttggcctaggttgtggattgttctaacatatcttggatgaaaccttcacccgaagcc

SEQ ID NO: 156586 - DNA, 1015 bp, Zea Mays
agatttacaaagagggggaacaagcgagcctgctggcgacattctcaccggcaatcgggtggcacagagaccggaccacggcgaggcgcgggtgtgaggccgatgcacacaccgacgagcgatttcggttgcctttctcccttggtgagaccccaagcacgcgcagagcttcccagggaaacccacatgacccgctcgaggttcccatgttgccgtagccacaaatcactgacagcgaccacctctgcccagttcttgcaaccacggcggccctcggcttccactcactctctctctctccgctctctccctcatagttctgttcggccaccgatgtagactctcctgaagctgggtgtgggacagatttgaggagaggaacgcgcagcgaagctccttataaggtcacgggcgatagagccgcgccagatcgaatccccaatgatgcggtcaaattagttgcgattctctcaatgtcgcggcaatggttttgcgcatgcaatgaagaggaaggccgcgaataccctgggtccaacccaaacctcccgcccgaatcgcacggtgctgacgatcacccggaggtgcggcccgcgcgcagatgctgttagaatggagggggaagagctgacaacttgggcccacctgtcggtcacaagggaaatctggagtgatatctggctgaccagtcaggcccacaggtaagccggttcagcgcgcacgtgagtctgtcgcgcgggtgagcaggaaaggaagtgggccaggccgagaggggagaaatggcccaagtgttggtttctcctttctttctttctctttttttttattttcatttttcatatttgctttgaaattcaagtttcaatttcaaacctttgttaacttcaaatatacatcagcaactccaacatgtaagcaattatataactttatttatttactattatttttttgaatgattttatagagcataatataaaacgataatcagttctcctattctttaacttttcaattt

SEQ ID NO: 156587 - DNA, 530 bp, Zea Mays
gctgaagatgaaagttgtcagatagcccttggtagcctttggtcggaggttatcagactgagaaatgaagccttagagaaagataaaattctgctttcattggtggatagagtgaagaaatatgaagcaaaatttaatggtcaatctgaagcccataaagctgaagttgagaaccttcagaaaaaacttgacgaggctaatgaagattttgaacttgcaaaagcaaagcaagaaataagtgaatggtcgaatgctaggctggaaaagaatgttgaggagcttcgtgaatccaaggagagatgctttgagaaatcctcggattgcgtaagaaaactgaaaaccagctttgccaaggtgggtgtgtattcttccgaagaaaagttcattcgaggtgaccccgagggagtcattgattggataggtgaagaagtcgaagcctttgaagagatccttagtgatcgtggtgatatttgtgccttcgccggcgctcggggggttgcaacaattctggagaaggttggttgtgacca

SEQ ID NO: 156588 - DNA, 747 bp, Zea Mays
ctctccctgcttccccacgacacgcagcagccaccgcgtccctcctctcacttcaacaaccgtcacctgtcgagatctcgcccacgtctcgaggaaatcgacaacgactcccatttgatcccagccccgtcctcctctccccacctcgtctcacgcccgtccttgccccatgctccgccggtgccgctgcaactccgcccgatgaactactcattttgcccctgggtctcgacaagagtttccccgccctcgcgtgcgccagcgtgcaagcctagcagctcggtggcctgggtgcgacggccaacagcttgggcgtgaccaagccgccctgtccgtgtgtcctccggtgggtagtccctagtcgtggacccctcgccccctccacttctcccgtgcgtgcgcgagcccgagcccacagtcgagccggccaagtgcagcccctacgcccatccatggcgaacggccagaccgcccctagccgagttccccatgccccgctacgcgatgaactatcctgtgcgattacaatttggagagagagaggaagaaggtcctccttacggaaaatgccctcgacgaaataggtaataaacattctggtttataagtctcgtagaaatcatttgctacacctttctatctatatttatttatgcgcaagtccgtgatttaacagataaacgatagctctggtgttaaacatatgttctatattgttcaagttgtgttggccgtgtaagaacatca

SEQ ID NO: 156589 - DNA, 343 bp, Zea Mays
ccaccacctcctccaccacttggcatcatcgtctcggacatcccggacctgacatcatgaccaagattaccagtagcctagatctttcatgtagtaggggacattttgagggcctctgtcatgcttgtcagttaggccggcatactcgtctcccattcaccacttcttcttctcaggatgagcaggcttttgacctggttcattgtgatctctggacctctcctgtactcagtctttctggttataaatactatttggtgattttggatgacttctcccattttctttggacttttcctcttcgattgaagtctgacacgctcaccacccgcacacacttctt

SEQ ID NO: 156590 - DNA, 600 bp, Zea Mays
ttcccctctgcgccgcgcgcgtacatctcactgcgcctggggccccatcatgtcaggcccgtcgtccacaatggccatgccgaattccgtgggtgagggcggggtcgttgagatttggccgatggtccatgtcgatccccttgcgcctataagaaccagggccacgaccttcacctctcgcctcagccaggtaagcttgcactgacagccaccgtcgtgcctgctatcaccattgacgcgggtgagtgacccaccaccacggttcatgtgcacgcgagggtcaggcttggtgattggcatcgaagcttcctaagatcaccaacagagcgtgtgggtcctatgcgagcaactctggaagcgtgtggctagctggcctcaccagaattcgtcaccgcaagtcgtcaccgcctttgggtccctgctccgtcgtggcccgcacggccatctcgtcaatccacagtaaggcgcctaccaccctgtttgttgtcctccctgccctgtttacaactggttcgcataggtatggggtctcgtggtcggccggtcagcaagctcgggtgggtgctcagccactcgatgcacacgcaccactgcagatgt

SEQ ID NO: 156591 - DNA, 512 bp, Zea Mays
ccgggacgccgggcagaggagggtgcaagcagggggcggtcggctgcagggttggcctacaagcctggctcgaccgaacagaggaggggtactacgctggaatgtccgagctttcaagcgtggctatggcatgaagaggcactacgcttggcgagattgcgtgagtggctacatgactgcatctgggcgagaggcggaatgggaagccgttagcgctgttgagcctgagcactgccgccgtcgcctgcatgtcgatcccgagtaagggagggagtggaagatgagcgacgacgctgcgagaaagatgaaagtagggagtagaagatgagcggtgatgaggcaaggaagaagaggcgctgcgagcaagggagggagcagaagatgagcgatggtgctgtgaagatgatgaagaggtgttgcgagtaaaatgatagatgaagatgggagcagaaacgggaggtgactgtgtgccttcgctcgacgtgatgctccacgcgctgactgtaccggtg

SEQ ID NO: 156592 - DNA, 532 bp, Zea Mays
tcgtgtcttcctccacaagctttgcctccatccacatgtatataccatgatagggtatcccatttgagcacatctctcccacgtccttcactcaagcatcatttgtcatccatcgcaccgttatgttttgtagctcatcatgtttcctttccaccacctttttgggagtaacttacccgtaattgatgatgaggacccacaagatttagtggctttgtctgaggtggtttgtcatcgtcgttgggaggacccatcacatggtatgggtctttcagttccacgagctatcataccatcgatgaatgtcccatccttgcacactacttcggttcgaacctaatattcggaccgtacatatacatatcttgcaaggtcgccttcattatgctttgttcgagtttatgtatttagacaagtttcttatccataggtttatgatgcgtcaccatgtttttgaacggatcctatacacaagccaacaattcgatgtttacttcagtagccgcgcgcggactgtagtggacttgttggc

SEQ ID NO: 156593 - DNA, 736 bp, Zea Mays
tgtacacctgtgtgaggcctacctcggaattcttcctcattttggattatggaagtatttgtatcactgtcggcctgggatggctaggggcagcaccagctcattggcggtgcaagtctagagatgcgccgcgggaggaagacagaataccttgacattcctctcaaggacagcattaaagggtggcgccttgagtggtttattgtggaaaaccacgacaagtccctcccccctcggtcggggagacagccatatgtacgcactccgagttgggttgagtctcccactgccttggaggtgatggaagctagggttctgcttgctgagatctgtctgctgaaggagagaggtctgactgcgaagctgtggttgccgactttgttttcaagaatatttaacctttgaaagacagggcgtatccagcttacttgtacagtggtattactaactcaactcgggtcaccaacaggaaaattcctactagttcttggtgagccgactagacatgatcctgaggggcaaggtatcaaatgttggtgctcctgttgcttattatgcttggaatctgccacattctaggtcatttttcaatttcatgtccaaccctcctgctagtgataacagtctgggtcttagagtgcgaccctctcctgaagacattgaggctctggttggtccccttcgtgatcttcccaatgatgagaggcaagttcacttttcgatgccggcaagtccg

SEQ ID NO: 156594 - DNA, 758 bp, Zea Mays
acttaactgcaggattgtattgcaaaaggatagaacgaatacaaattcaatctctataaaaggaaaggtgaatcttttcaaagaattcctaagcttaaagaaacaattgaaatgctttaaatcaacacataccaattaaaaagaattctattacagacgggattgcaggttttttctctgtgagtattaccttgtggttattagatagaaaaatgaagcagaacagaaacatcatgaggcatcaaaacaaattgaaggtttggacatcatgatgttatccaaatggctataccatgttatcgtaatgaaccttgatgttgtaatctggctttgtttgaacattttttggaggaaatgtgcttttggtttgttaatattctaagtctttatgagtgttgaacctagtaagttgaataattcttgtccgcttatttgtactgcaggatctaggtaaggcatctcatccttggattattatggaagtgaaacaaatttccctcagagaaaaaatgattatcattaatggcaaacatcactatatcttcgtagtcaactaataggtagagaatcacaacaaattttttgcaacagtttcactcatgctacatgcaatcaacaaaaagaaaggttagattacaatcatcctaaaggctaaggagctagaaggacaggtgaagaaagtagctaagtacatgcctttaatggctttagattcacaattatatacaacacatcaaagagattattttcatgcatcg

SEQ ID NO: 156595 - DNA, 651 bp, Zea Mays
cgaaccgatatctagtgatagccacccgatctatgatcaacggaccacagcgacccacaccattatataaccgaagcccttagatcagcgatcgatggccacgattgaatacactaaagcgttttcctgtgatctaatctggatcgctcatcgggagatcaacgacccccgcggcttttcccttcctaatcacccaggccacggcggagcgagcgccccacggtggagcattgccgctgcacacccaatcctggcctcctagtaccaatctcctacggaattcagtgctatgcaaaggatccagaatggcgaagctagtggtggcgtcttaccggaggattaggtcgctaggaacgtctgcccacgaagaaggcggatccgcggcgaagtcttagctccagcgagcggttcacgagctctgaagggttatgtgcccaccactgcacacacacaagttccaacccggtctcacgatgcttcctgaccagctgccaaagccagaatggtccctcccccgggaagatcaacggcggcggcaagcttcactttgtccctcactaaacttctcttcgtcagtgaggttcacgcacgtggttctgggtttaatgcagtggtcagcgacctaggcttaaatagtctggggggaggggg

SEQ ID NO: 156596 - DNA, 886 bp, Zea Mays
gtgcaccttcatcaagaaccttaccagctgcttcccttttgagaacctgccggagctattgcagccattgatgttcctcttcgagcttggtgtgtaacttgcggagctgttcgaggtgggtcatgtgactcccaggaggggtctaggcctcacccggctctcctgcttccccaatgtgtaggggtggcatgtcattctcttaaggcatgctgagctggttccctccgtcgtgctcctcgtgacccgcatggaagcactcccgagttgggtcataaccccctcatcggtattgtagtcatcggagctgttggagagctgtttgtcacacgtgaacaggaactgtagcatggacttggggtcacatagctcggagaagtcgtagccaatgcccggaccatcttcctccttagagtcgaggcaccctaaggggaagggaagaccagcgtacaagttggtgagagagcgggtgttgaagtttggctgaaaagggatggggttgaacactgatggttctcccccatcccttgacatggcctaccatggagggaccaggtgggaggagcaccatgtcgtactcaatctcgagcgacatgaactctagactcccagacctgatcaccgtgtcgagcctcaagggatggtgaaagacagccatctggagtcttgatgggaactgagtcttagcacgtgactagcccctatctggcgtgccaattatcggtgttcgcatccgtggacctaaccaactagtaaaataatgtcgtgtgccccagacctagatggtgatgcgagttgacacaagtcatttatcctagttcgggctaggagaggccctacttccaacagagggaggatgagacttatattagtcgcacctaagtggttg

SEQ ID NO: 156597 - DNA, 605 bp, Zea Mays
cgacagatggtaagtaaaaattagaaggacgttttcttcttgctcggccgtgggcataggtctctcactggcatttcttcccccatagttccctctctaattttccaatcacatcgcaatctataacaacctagtatcggatagcttggcttttaatctacactacatggcttctgctgataatatcatcgaatatttcatcccacgcattcaacaacgcatcttcaagcaacgacggtggcttggcgtcgtttttgcatggtcctctacatcggcttccttaatgttgaaagccatagctctctctcctaccaatttcgtcacacctttgtccccaacattattgacattcacatgggagtagcaacacccatggcactatcgttgacgtagccatcgtcgtctctatggggcggcgccactaggagccatcaccatctccattgatggtggacttgtgcgccaacaaatcgattgatcttgcaaagatgcaaacctcacccttggtggtttagcaagagctgtggcgcaagacagttgtgcttgtgcaacgtgagcgacaactaacgttggtccccagcactagacgatagtggctataggcc

SEQ ID NO: 156598 - DNA, 717 bp, Zea Mays
ccggattggaggaagggtttgtggcgacaccggaattccacgccagggctcgacgtctgccgctgctcgtggttggcctcgactactccacgatagccggtaagaaaaccctaaatcaattcacgttcgcctccgattcgtttagggttagtcgtactggagtttagggccttgtttggaccgcttggcgtgcaccgacgatggcgccgccgcatcatggcgggtgcgctgctgctcggcgggatctgggaagaaggtgatcgcgcgggccacggtatccgttgatccgaccgggagcggctaggattagatcatagcttacctcttcgcgagattggatctggatcgttgtttcgatggtgtgcggttttgatctggttgggacatggtcgtctctcaaccatcgattctggatctggtgatcagggggaaaccgcggttacataacgcgtgcgcttcgaatctgggccgaccatcccagataggatgactcagatatgccaatacccgttcggcctgggcaaaatgcagaacagcccctcggttctatcaataccaacccgcagtccaccacgggaacagcctatgtcttaggaggtttatactgagccccctgggttgtctggatatcgtgcgcccagtccatagaaatagaaaacctaagaaaaatcaattagaaaatgatttttagtattaaattaattgcagaaacttgtt

SEQ ID NO: 156599 - DNA, 573 bp, Zea Mays
tggttggacctttgatctttttctcttctattttattatgagagagatacatgttctatatattatagaaatgagatccttcaaggacatatttggtatttgcccattcattagggtttcctaacaaaaacgacacagagttcacttcgccgggaaaaggaaaaatacaccaactcctactgggtccaatccggcccactaactctcatactgggcttcaacgctcgacgcggcctgtcagtcttctttgactctttctgcactgtgacagtacacgtctgcagactgcatgtctgcatgcatgcatctccgagccgggctacggcgttttagaggccgtttgggacggctctcccgtggctccagctccggctccccgacggagctctcccaaacgagtctactgaaatagctctttaaagagagcagaagccagtttagctcctaaaagccggagcccaaaaaaccttttctcacaccggctcctcgcccatcccagtgcgcaggcaccacgtgcagcctctcccaccacgcgcagcctctcactggcgttcagtaaagagccgttttgtc

SEQ ID NO: 156600 - DNA, 3955 bp, Zea Mays
gagcatggactgcgcaccgcaggtacatctccacacatttgttaacccgctcactttggccgtcagtctgtgggtgatatgccgtgctcaggttcagcttagtgcccaacagcttgaataattgactccagaaaatactcgtaaagattttatccctgtcactgacaatagatctcggaagaccatgcaaacggaccacctgatccaaaacaacttgggccacctgtgcagcagtgaaagggtgtttcatagctataaaatgggcatacatcgagaaacgatccaccacaaccaagattgtatcatagccactggacttgggcagtttttctatgaaatccattgcaatatcctgccaagcgccttgagggaccggaagcggttgcaataaaccagccgggtggactctctctcctttggccttttgacaaattggacactgtttgacaaaatcttccacatcagtcttcatacccttccaaaaaaacaatttcttcagtcgatgataagtggtgtgcaccccggaatgaccacccgtggcactatcatgcaatgcagccaccaactttgtccgaagagcagaattttggccaacccaaatcaaactgcccttcctgatgactccttgagatagagagtagccatgctcatccgggctgtggacacacaaccgagccagctgtgactgcgcatcagaattagtcacataggaattcgtaacttcttggatccagagaggttgaacttcactgattgttgtcaacgccatcacacagcccacacgagaaagagcatcagcgactttgttctctttgccctgcttgtagatgactttgaactgcatccccataagctttgccatggctttacgttgcaactccgaatgaagctcctgactacccaagaaactgagagccttgtgatcaatccggatttcaaactcgctccgttggagataatgacgccaacgatccacaaccataatcagggcgatgaactccttctcatagattgaaagtttttgattggtaactcccaacgccttactcaagaaagctataggtctcccctgctgcatcaacaccgctcccaccccgtcatcataggcgtaagtttcgacagcaaatggtatgttaaaatcaggtaatgccaataccggagtggaaaccatagcctgcttcagacgttgaaaagccagttcagcttctggtgtccacttgaaagcccctttctgcagtaacttcgttagtggccgggcaactatcccgtacccttgcacaaatcgcctgtagtaccctgtcagcccaagaaagcctcgcagatcagtgacattcattggtgtcggccacttgagcatagctgctgtcttctgtgggtcagtagccacaccctcaccagatataatatggcccaaataaatcagctcctttttaccaaatacacatttcctctctttgagataaaacttgtggtcccttaaggcagcaaagaccagcctcagatgctccaaatgagaatgccaagtgggactataaaccaagatatcatcaataaagatcataacaaattttcgaaggaaaggagctagcaccaagttcatcgcacactggaatgtagccagagcgttagtaagtccaaaaggcatgacccgaaactggtagtggccctggtgagttttaaacacagtcttaaactcctcggaggcgcccatgcgcacctgatgataccccgaagtcatgtccagactggaaaagaattgagtgccagcaagctcatccaaaatctcctcgaccaccggcatcggaaaccgattcttgatggtcatatcattgagcttacggtaatccacacagaaccgccacgtaccatccttcttttgcactaaaaggaccggagaagcaaatgggctcacactgggggtgatcagaccggatttcaacaacgcagcaacttgcttttcaatctctgtcttatgatgaggagaatatttgtagggtcgagcattgaccggaatggatccagggagcaacggaatatgatggtcaaatggtcgagatggaggcaattcagttggtataacaaaaatgtcactgaattcccccaacaacacctgcaattctggatggatctctttgctgttctcctcaatcacctcctccaacaatgcaaacacccagatatcattccctcgcagccatttctccacctgtagagtagaaacttcctccacaacctgatgttgtgcagtattgcctaccaactgaacctccactcctttgtcaacaaaactaataaccttatcatcccaattacaatgcatgggactgtgtctgcacaaccaatcatagcccaaaatagcatcatatgctcccagccccaacaccctcatatcacattgataggtatgcccattggcccaccattccaatgatcgtaccatcgtgtcactatacataatctccccatttgccaccctcactttagctgaagcacaaggatgcactggcagccccattctatctaccaactgcttgttaatgaaactagtggagctgcccgaatccaccagcaccaacatcacctgattctgcaataaggctctcagccatacattcctcatttgtggtaccactaagagcattaagtgacaacataaaattctcctcttcccttttttcctcctgctcaatttgtgtcaacgtttgctcggatagtgtcatacccaaatcctcgacagtgagggcatgcaattgcatctgcacttttttggacagtgagcttgatggccaggttcaaacttgtcgccacaagtatagcacagcccattctgcctcctatactccttcaccaatctctctttagacggctcgggtaaggaagcagaccctctagtgtcggatttggacacaacaccccccaaacggccctgattgaccatcttgaatgacttctgtcgttgtttgtccaatattccttgttggatcctggctaacaatgctgctcgttccaccgaagctggcaaatgagacttaaccggtccttgcagctcttgcttcaaccccttaatgaaatgggccacaaaaaaagtctcatctaaatcatgattatggacaaaagttgcataccgcgcctcatcaaacacctttttgtactcctccacagatccagtctgcctaatctccagtaaggactgcatggcctgtgaatactcctccgacccaaacttcaacagcacagcttcacaaaactcttcccacgagcatggaccatactgaatcataaaaatctgaaaccaccgagacgcattcccctccatgttcaacgatgccgacacaacccacactgattcagggacccgataaagtgtgaaataatcaacacatctgtcaatccagatcctgggttcctctcctgcaaacctgggaaatggcatccgtggtatgggtagatgaccttcctcaatctcctcaatccgacgccctcccatgtcacggttgtgatgcaacggaacacccccatacatgcgattgttttctggtggtgcaggtgacggtgcagcgccgcgaggccgaccgttgagcacggacttcgacgactccatgtcccgcgccatctgctccagacgcagttccaccacctccttccccgtttgttccaactgttgcgcgaaacggactctctcctccatcgccttctgggccacgtcggccgccaagcttgcctgcgccagcaattgttgttgaacctcatccatgcccacgaccttctccgtgagctgatcgagcttcgccatcatcctctcccaccgatctgcatcttcccgctccttggtagtcatcgcctccagaataaaccgtgtctgcgtcgagggtttcggtacaggcaccgtcgcgaccaccgaggaggcagcgcgataggatcgcccacgtcgaggaagcccgaatctgataccagg

SEQ ID NO: 156601 - DNA, 529 bp, Zea Mays
caactataaaatccatactgatttcttcccatttccattcaggtaccttgagaggttgtagtaatcctgctagtctttgatgttcgaccttaactcgctgacacacgtcacacaatgcaacatgagtagcaacatctcttctcaaatcgtaccaacaatacttttccttaagatcctggtacatctttgtacatctagggtgaatagagtaagctgaatcatgagcttctctcaaaataagttggcgcaagtgttcgatttcgggtacacagattctcttcttaaaccatactgtgccttgttcatcttccgtgaaatctggggctttacccaaaccaatcaaagctttaatttccttaattttctcatcagactcttgtgctttacgaatctcttcttccaaagtagatccaacttccatcaccgttgcttctacattattgagaaatccaaggttgagttgttccatttcccagcacaattcttgtgacatcaaatgagtagtgatgttgttcacttgacccttacg

SEQ ID NO: 156602 - DNA, 338 bp, Zea Mays
gcacgggattggtggagagatagaccgcactgacgttgtcactatagacaagggtggcatgctgaagggggctatggagctcctggagcagctggcgtagccaggaggcctctaccacgccgttggccagagcgcggtaatcgacctctgcgctagagccagagatgacatgttgccgcttggcggcataggagacgaggttgacgcccaagaacaccgcatatccagaagtggaccgacgcgtgtcgggacagccagcctaatcagcgtcggtgtagaccacaagctccaacattggggagggtcggagtagaaggccatagtcgagggagccgtgg

SEQ ID NO: 156603 - DNA, 401 bp, Zea Mays
gccttttgttgtttgatggccattgaagtgagggaagggggacctcgctcttgctagtttgttgtgaacaacgaagactacctctacttttgttatttgactatgatcagtgaaggtaaccttttcttttgttgcattgccagtggagtgtgccttcattgccgtggacttgagagtaggctatgattaggtgctcatcttcttgggatgcatcgcgggcttgttttctgtagtggatatggtgggtgccaaatgttggattcttacagatgagaaacaaataagatggacaactatgcaaaaacaagaaaagtgaggaacaatggctctcaaaatatcttgtcagctatcctatcaccctatctgggtaggggtatttatagggtaatgaaggggtagcc

SEQ ID NO: 156604 - DNA, 762 bp, Zea Mays
gaaagaccattagtccaggtacaactttgatgcagactcgcttgcatgtagtcgcataaaatttggagcaatagccgtttgaattcggcctggcaggcgtactgttcactgaaattcagaaaaatctcgccgagaataagatcaccaccgtggctgaggatcggactgcggccgcggtaaaaatcttccgtgacgtggtgcataaacactgaggtggcgctgcccggttaattggcgatcaccggacgctcgccgtggctctgcccgcacgggtgagctcgctagcgcacttgcagatccttgaatctcatccatcaccggccgtcttcctataaattgagcccgagcgctgcttctttaccacatcacacacacgagtgcttgcgaaatcgacccaattccaccgaagaactcagataggccataaatctcctcctcactgttcttagcgccgccgtgaaggacctcttcgtgggcagcccttctagggttagtactcgcccaattgtctcttgttctagcgtgtctttagcttcctattgctctcggtgccgtccaattgaattttaccagagccccaccaccggaacatcccgttgttccatagaacgccaccatatacaccctctctgtcgacccgcttccctaccctcgttcggcctaaattcaatcgtgtgcctagtccctggtgaacccgtgaagcttccccaagcttcaattttagcgtcaatcccgttagttgtccagaacgcgatctccaag

SEQ ID NO: 156605 - DNA, 310 bp, Zea Mays
tgaaatcttggccatagattttgaatccggtggctaggttaagtcaatagcgtgggactttctcaaccgtagatctcggatcctgcgatcaacagagtgtaccggttcatgcattggtacatctaatctgaactgttgaaaccagatctgacggctcaaacaaccccgtaccctttcacccgaaccattattcacataagcccctgtccttttgtcatatcaacccgcggtccacagtggctgtgcgcagagcctagtaattcttgcgcagagaccctgcggtttccagtaattggcgcgcagtccagaa

SEQ ID NO: 156606 - DNA, 280 bp, Zea Mays
ggttgacctcagcctcgggcagcaccgggttgacctcagcctcgggccacgcgccgttcagatctccaaggtcttcgacatcctcggcacgtgccatctgcagcaacaacacactcattcagcaaaaccacacgtacccacactcaaccatacgaaacaaaagataagctttacctgctctctcgcccggtcagaccgctccctaaccgcctctcggccatgaggaccccacatccgatcgaagagtgcccccgcggactgctttaccacagggtcttcg

SEQ ID NO: 156607 - DNA, 759 bp, Zea Mays
cggcgagctggccctgaggagtcaaacaaaaaatttgcggagattgtcaatgttccaagaatgctctaagtcctcgccggatggcgttgttagcctgtacgcgctgggggacgctttcgtattgacgttgaaagggccctcccactttggctctagcttgccccgggactctgtccgagctgtccggacgaggacgaggtctccttcgctgaattccctcaggatgactgtgtggtcgcgccatgctttcgtttgagcttgatatttgtttagggcatgtagggcgaagacacggtctccatcgatgaggttcttcgaagtaggctcgtctacgtcggggacgacgggcgtgactgtcagtggtgacccatgttttatttcttgcggggtcatggcctccgatccatatagaaggcggaaaggggtgaacccagtcgccctgcactcagtcgtgttcagcgcccagaccgcttcaggtaacaggtcggcccacttgcctttcttgtcgtcgaggagcattttcttaacggctgtgaaaattttaccattggcgcgttccacgactccgttggattgcgggtggtacactgaggcgaaggcaagcttggtgccaatggagaagcagaaatccttgaaatcttggctgtcaaattgcttgccattgtcaactgtgagctcggacgggactacgaagcggcaaacaatgttttgccagaagaacttctgggcagtcttcgatgttatcgtggatacagccct

SEQ ID NO: 156608 - DNA, 703 bp, Zea Mays
actagagcgccaacaagctctctcactaaataagcgacctgatctgagttcttctgctgatttctgaagatcctgttgtttctttctaaccataagctccaccaaaagtagatcataagcccatcaaattttttcctagattgcctattacaaagacctcttagattcctccaccaatcatataacgactctgttgtctggtttcctcccagaaaagaacagtttccccatatcaatatttggctccacacctctctactgaaagggcaatctttgcataaatgggttaccgtctctaatgctgagttacaaagacagcaaactgggttgcattgccaatgtcttttctgaagattatcagcagtcaacactttattatgcaaaagagtccacgcaaaaaaacgacacttaggttcagtttttgctttccaaatggggtcaattttcattgtgcaataatttgctgtaaattggatcttataagcgttgcttgcactgtactcaccatcatctgtccatctccaagaaatggagtcttctaaatcgttgagctcgtgtgtactattgatggcctgccaaaggccgagcaattccttgaattcttctgcaccatcatagggagagcataattggatccaacggttgtttctcaaggcctggaaagttgaaatgttcttcctttttgctttgttgaaaagagttg

SEQ ID NO: 156609 - DNA, 350 bp, Zea Mays
gaacgcggcacgtgatccttcctaagaatcctggaaagcaacatcaagtgcgtgatcttggaacgaagaacggcaacacaacgtgatccggatctgaggaggatgtctgccgactgcccggccgcgggcagcggctgtcgccaggtacaccaaccaaccacacgcacgccgacaccactcgctctgtccagggcctccaggcaacaagcacagcacgaacgacaccaactgatcgtgtcgtgtccccatcacacgaagcttcagtttcgcctctgccggtgttaccgtatcatgaagcaaggaccaaaccgagatatgtctgggacaagtttctcacactgtttgcgtga

SEQ ID NO: 156610 - DNA, 399 bp, Zea Mays
tgcttttttgaagtctggctgcgaacacaacaagattgttaatagacccaacttcagcctgtcaccggcagacttagatgatgttccgaatctggctcgaagtattgcaaacagatttataaagttagtatggacaaagggtggtcggagcaaagctggtgacgaagctcggagtcacctcaagctggtaacaaaatcataccttattcttaccttttcctttgactttttggatttggcttataaaaccttcgtacagattgaccaggccgaagctgcagctgcagagtagaggaacgaagctccagagatagtgtcgaagcttgcatagtcttgtaaaagtagctcaaaaaactcctgtaataacttgtataaaatatgatgtaatctgagtttcac

SEQ ID NO: 156611 - DNA, 371 bp, Zea Mays
gttttatcagtcttcggctcagctaacttggctgagggtgccttcggcaaggtggccggttcttcagctttctacgaagaagaaattggctcctttggggcagcagctgaagaagtttccccgccaaactcaggcactatggccggttcaatgtagcgcggtcggtgggtaaggaccttcaactttttcctcttcgacgcaggctcgcttggagcaaccaaagcaacaacctttccagaggttgcaccctttcttttctgcccccgtggcgggtagcgatagtcagggtacacaaatccaatagcatcaaaaactctatttaatcttttcttttttcggctcccgaaggccgcagatagtgcattatcttc

SEQ ID NO: 156612 - DNA, 600 bp, Zea Mays
cttgggagctccggacttgtacgtacaggggtccagtgtccctgtgtggaggtccgaacccaatgatgcatcctagggtgtattatctatccttgccacgtggtgcccttagacccgcccatgtggtggggtcgggtgatgttctccatgtggcctggagacgtcgtatgtgtacaacatcttcatactgtagaagagggtaccgaaagtggcccccgggcccgcctcaggggaggatgcgagcctgcaggtggggccagagtctgattagcggttggtctgctgctcctgcgcgcctgttgacacaattactgccggcccgcctatggtcatgccgtctgctatgcctattccacggttgactggcccatgaccttcgtactcaatgtcactgttgggccacacgcggggtgcctcgagtcgctgcactggttctgaaaacttatcttttcagtcttccgcgacggcctcgaggagacgtggtattggcacgagcggcggtgcgatttttttgcacccagtaaccggtgtgccggttgcatgacatgtgggcctgggcccccatgttggaccgctggttgcagcgaagctgagggggcg

SEQ ID NO: 156613 - DNA, 522 bp, Zea Mays
tcgtcaacatccccacctttggcggcgcaaggtgggaaaactggcgcaacgactgggtgattgccagcgccgagaccaacgactgcctcgtcctatcgagtgatgggccagcgctcgaccgcaagcaacggaggaccaagccgtccctctcgccagagttcctgcctgtattggataggatcaagggcttggatacgggcggcttgacgtcgatgcatgtggtcggcgacctcctgaagcgccggatcgcgccgctgcagaggagaccgcgcctgtgctgttggttcaccggcgcgaacgacatcggcaggatccagcgtgggccaggcaccaacctgtcctgggacgagatggaagtcctggtgggagggattactggggaaaccttcatccctgagtccctgatgctcccccaaaacatccctgcgctctgcgacgacccagggctgaggacggcgatcttggccacgctaccgaccctcgacgagagcggcgtggcggttcgccagaccagcggccagg

SEQ ID NO: 156614 - DNA, 493 bp, Zea Mays
gacaaattataatacaagttatgctaatatgtgtatcagtttatgcaagtatagtatgcgcacgttccgagtatctgggcccacgagaagattgtgctcccgcaatttgggtagccgtactagtccccacacaaatattggtattacgatgttatatgttttagtttacgaaacagtaatgcatgtgtcggtctatgggccatcgcgtagatttcatcccgcatattatgtgtatcgggcccacgatcccacccacgagtttgcagttatccagctcacctcacccgcaacgcacgcggcggcggaaccctagacatacccgccgtcgtcgccttcatcttctccaccgcagagagagcagaaatcggccggtcctcattccactccacacatcggtaagtccaccgccatctccttcattctctccgccgcattcgtgtcgtcgccttcatcttctccaccgctgtgagatcggaaatcggctggtcctcat

SEQ ID NO: 156615 - DNA, 332 bp, Zea Mays
acaacctttcattcgtaatttcctttgcctaccaacacctcgttttgctaaaggtccttttacaacatggtccatatcaacttgaggccactgtgaacgatcccttataggatagatgactctacagtatgcttctctaaacttttgtactgaataaaaatcatgcaaatagttttcgatcctttcacttctaaaactagtgatgacaactatggcatggtcacaaggcttcccagtgtgctgccactccagacatgagcactcttgcgctcctagatcaacaatatgtctttcttgtttggggctattatcaaaaacctcagcatgaccat

SEQ ID NO: 156616 - DNA, 667 bp, Zea Mays
agtcaggagcaacgccgactcccctccctcatgtgttgtcccgcgctcatcaggctctccaggaaaccgagacggcgatcctgcgggagtgggaggcgctcgagaccgagcaccagcgccttggcgactggtgcacccaactggaggagcgcactaaggcggcgtcctgccaattcacctcagagcggaccgagcttgagcgggagcgtgagggcttctaggaggacatccgaaaggtgtctggccgagagcaggagatgacccagaaggagatagggctggtcaagaagaaggagcacttggaccaaagggagaaggtcatcacggcattccataaaaagctgaaagcctacaatatgatgctggagaaacagcgggatgagtaggctgcggctgaggtgaagctgtagaagctgcaacaggaacttgacgacaaggctagcaacgttgctcgcgccgaggaaagcctcaaggcgaaggatgcctccctagagaaatgagagactgatctcgcttggcaggagaaggacctcgccttcagggaggagatgtgggaaaggcagaacaagttgctggtcgagtttgagctcgaggcaaaggagaaagagaagcgattggaggggaaagagcgggcactggaggagcaggtccgccagttccaggcggc

SEQ ID NO: 156617 - DNA, 1635 bp, Zea Mays
ttctattttatgacgccaaatattcctcgctagaaaattgaatatttacaccatgtgccaaccgcctacctattttgctctgcttggtgcgaaagcttcggtctcctcctgtccgtgtccccttagtcttctgccattcccgctatcgcggagcgcgcgggggtcatgcttgttgcctcacctactccagaggcgtcaaaggtttccgtctacttctcatccaactcttcgatcactttcttgatttttgccacggtggcggtgctggagctgaggtctaaggtttcgaacatgcggtagaagcaccatataagcctttccataatggaattccaaactagaagatggaatatttacagttagttagaagaataatccattttctgatgccaaatattccttactagaaaattgaatatttacaccgtctgccgcccgcctacctatcttgccctgtcgggtccgaaagcttcgctctcctcctgtccgtgtccccttagtcttccgccattcccgctatcgcggagcgcgcgggggtcatgcttgttgcctcatctgcttcagaggcatcaaaggtgcgttgctactcctggcaacttttggtttctcattttctccatggtttcttcctagagctttttccccaaccactgatggagcagcaggtgattcagatttatcgacagccgttggaagagccggacatgttttgggcgccgattgagctcagcatcgcgagtgacagccaccacggactacaggtacgtaacgaggatcgcctcctcgattacacttatccattggtcttcagttgaatctgggcaaaaatgatgtatcgtgagcgatgcctactgacgacacaccgatatgaaaagttgtatcatgactgataggatttgtttgccctgtccacaatatgtatcgtgagcgatgcctactgttctccgtgtgaatggctgtatcatgactgattgggttcgtcggccctgtccacaagttgtatcgtgaacgatgcctattgttgttggccttgtccacaaaatgtattgtgagtgatgcctcggacatcatcaccaccctaagccacaagacaccgaccctaaaaaaggtatggggtcttagacatcatgagtcatgatacaaccattcacattggtgtgtcgtccctgctgaggcatcgcttacgatacatcatttgaacagggccatgaaatcctatcagtcatgatacaactattcatatcggtgcgtgctgaggcatcgaaggaaaatgatacaactattcatatcggtctgatagaaccatgcgtgctgaggatacaaccttaccgatagaattttacgatcaaaacaaacacaaagacaggaaaatggtcggtgggatctgcctgtggtggcctccgacgaaagcgtagacgtcggagaagatgcagaggacgccggagaagaagcagaagatgcagaggacaccggagaagaagcgtcgatgctagaaggattcttattttggaaaccacgaattgatttttaagtgcttttgttgatgacatgtgcttgaaagtgtactattttggactgctattattttgataaactatgctatatgcacttatcatatttgagactacatttagt

SEQ ID NO: 156618 - DNA, 574 bp, Zea Mays
gggaccgtgtgcgtactccacgagatgctgattccgcttttgattgatctgtcataactctctgcaatttttgcaggtagcgtgtcactgattctgatggtttcttgacattgtcagtggcgattcgctgatgaattgtctttgaagtagttggcccttcaacattggtgtcaacctttgcttcctttttgatgtttgcatcaacattctgaggaacaattttgtctacgtccccctcgtcgagttccttcacaagaggtgatatgattgtttcaacgatttttgtggaggtcgatgctatattttcctgcaccatggggtatggaatgatcgaactatctttctgttgcattggtgttgaattcggcgttggtgacttatgacgcgatacacggcttaagatcgctcatcacccaacttgatgtcgcgtcgatgccaaaggaccaactcgttcattgcctcctgcaaagttatgatcccctcaactggaaagtctatctcccaatcttcacaaccattgtctgtgatctctagaacttggaccacagcatagtgtggcgggagaggattatcc

SEQ ID NO: 156619 - DNA, 915 bp, Zea Mays
tagcttgtcaaagaccagggttaagtcttccactagggtcgatcctctcttagtcttgactacaatgtcatcaacgtatacctctaccctgtccctaatcaggtcaccaaaagtcttactcatcgcccgtacaaatgttggcaaggcgttttttagaccgtaaggcattacaacataacagtaaagcccatccacagttacaaaagcgatatgcttcctatcttgcctagacatctggatctgatggaaaccagagtaagcatctaggaaggacaggaggtcgcacccagaggtagaatccacgatttgatctattcgtggaagtgtatatgggtccttgggacaggccttattgaggttggtgtagtcgatgcacatccgaagcttcccgttagccttgagaacgatgactggattggccagccatactggatgatggacctcttcgatgaagccagcgcgcagcagcttccgtacctcctcacggatgaaatcctgtcgctcaatggactgtctccgaggcttctgactcaccggtttggcgtcagggtggatcttcatatggtgctcgatcacctccttggggatcctaggcatctgcgacggttcccatgcgaatacgtcggcatttgcctggaggaaggcgacgagcgcgatttccaatttctcctccaaattgcccgcgatgcgagtggtctgggaggaatccctgctgagttggatagtcttgacgggaccaccatctgctccagatggttgcaccttaggcaccttggtaggcgccttggtacaagaagtcgaggggtccctcccccgtcatccgggcgagtggtttctgtcgccagggcgtgcaacttctcgatagctgcaagcgcagcagggcggtcgccccgcacggtgaggaccccagcaggg

SEQ ID NO: 156620 - DNA, 891 bp, Zea Mays
ctagcatcaagatggcaccatttgaggctttatatggcaggcggtgtatctcccctctgtgctgggagactttgggagagagatccctggttggtcctgattgggttcagcagacttctgagaaggttcgggaaattcgtcagaatattttggccgctcagagccgtcagaagagttatgctgatgtgaggaggcgagatttggaatttgtagtgggtgactaagtccttctcagggtatcacctactaaaggagttgttcggttcggtgtctccggaaatcttagcccgagatacattggaccattcactatctttgcccaggtgggcaacttggcatatcgcttgcaattgccggattccatggcagggttgcacctggtttttcatgtctctatgttgaggaagttcttgcgggatccgaaccatcagatcaagatggaaccaattgctgtgcagtaggatctgactttagagtgtcgtccggtgcatatcttggagtcctcggagcgtgttttgaggaagagatcaatcaagtatgtcaaggtcttgtggactaatcagtctgagcgcgaggctacttaggagcttgaggagctgacgcggcagaagtatccggaacttttcgctgtgggtgagtattgttgattcattaatcttttcttttgtcgttccgattgaagcgtcagaattcgaggtcgaattctttttaaggggggtagagtgtgatacccagtttgcaaagaagagaagttggaggtcatttttgctttgttttcttttgttgtttctctttcgagtggtgcgtatttggggtttggaatttttgggaagcattcaccagtaaaatagtagaatgaggtttagtctcatgcgctggggtcggaaactg

SEQ ID NO: 156621 - DNA, 464 bp, Zea Mays
ggcggctgctcgcattggtttggttgctaagcgggcgcagcaggttcgttgaacgacgcggaggcggagtgagtcatggcctagtactagtaggagcaaggcatgtcatgtgcgtttttcgctccgcaaggctgcacgttttgaccggagtggtacccgcggaacgtacctcgcattccatgaaccgtcagacggcagtgggtcgtggccgtacggcgggtcgtgtgattgagaggacagggagatcggtttggggatcacgaggggctggctgcccgagagatcctgaaccccggccttttcggccggtgccggtgccggtgccgctgcgctgtgcatttcaggaacggtggcaggagtggtcggtcgtcgcctcgtcgtcgtgatggttgcgttacgttgcgggcttcccggtttcggcgtcgtgggatgctggtgcgtgctcgttcgttggtcgccttttg

SEQ ID NO: 156622 - DNA, 429 bp, Zea Mays
ctcggtcacttggtaaggcccgacgaagtgcggcttcagcttgcccttgtgcgcctgtggcagggaagatgcagcctattggcgaaggcgcaacagcacccaatcacccacgtcataggagaccagtcgatgcaggcggtcgtagaacttcttctggacggcctgggcttgttccaggcgatagcgaacatccgctaggaactcctcgtgtacaaccattgtcttggccactgccaccacccaggtctctccaggctcataagagcagatggaggggggtccctaccatagaccaccttgaaaggagtgtccttgagcgacgattgatacgccgtattgtagatgtactctgcccatggcagccatcgcagccactgacgtggttgatcccccgtgaaacatcggaggtacatgacgatgactttgttg

SEQ ID NO: 156623 - DNA, 328 bp, Zea Mays
gctattacccccgaaggcaccagcaacaagccagacagttctttttccacgaaaatgcagacagaattaaagtgcaacacatcaatggcaagtcattgctcaagagttatttctaagaacaacggccgcattggatacaaacacaaattgtcggtcagctataaagaagcaaggcaaatacaaaggatgtgcacaagatcaagcccgaagttcactacattatataaggggggaatttcttacacaaagcaaaaggccgactcattatgagccgggtttcttcccccttttcgacaaattacattactacattacactactactacac

SEQ ID NO: 156624 - DNA, 1077 bp, Zea Mays
aaaaagaaaagggaaaaagatgaatagtaatgggctgaaaccagcccaagtcagcccacgtccagggaaacacgcccgcgcgcacccgtgatgtttaatttgcacagaggaccctagctttttgaacaaacgataaagaatcctccgcactattcacatgtgtctctgacaattgcaccgaggcccctccctttctatttcttcgcaaggcgagatccccgaccatggacggcggagcagtggctctggcgagcctataccggccggaaaatgcaatgactcggcccctccgctgctcaacacctaattctaccctcggcgacactaatccctcaaccaattgcggagttctagctcaaaatctctctgtccacggtgatggtgcgaactgaggacaaaccgaggtgttcccggctatctaacatggtatagttcaattggttgggctgaaaagcatccatagcacacaagggtgctgaaacgagggcaaggagtgtatgaatggacctgcagacgtctggccacggcgagctcactcacggcggcgcggagaactgaattgggggaaatgagaaattgaggggctctagtggatgatctgaggcaaggactggtgcgttggatgcgtaaatacctagcggaacacacaggggcagcaatttatagagttctacggtggtggcgtccaatttgaaggatttgtggtggctgccggaaagaggagaagtcactggcgcaagtgctattgtggcttttaccggggcagtggcttaggcgatgaacaagctacctagagcggtctattgcgatgtggtaaggcgtcgaggcacatagcctagccggataacggcgaactccgatgatgccagcgcgattaaccatggcgggacacgacggccggtccggccagagaccggattcaccccgcactagatattttcatcacgccccgacgttatctactcttaccgtggcacgaatctcccaggcgggcgcgaattgtggtggcggatcaccggcgtcgagtgcacggcaccggagatctttatggtcactgtaccatggcgatcatgttca

SEQ ID NO: 156625 - DNA, 834 bp, Zea Mays
gtatttttaacatttttctgtaattttctagaaattctttaactctggttgaaagggaaaaaagaaaaagagtcaacagtaatgggaaatctggcccgagccgccccagctaaggcagacgcacccgcgcacgcgcccgcgcggcggttttgtactgcggaccctggctttgaaaacaatccgaaagagcccgcgacactgttgcctcagtcgctgacatttacaccgaagccctccaagttctaattctttatgacccgaggtccccgacgtcgcacggtggagaaccgagctccggtgaactcataccggccacgatacttaaggactggtgctctaatttggctgagacgtaattcaacgcctatcaagtgtttcccctgaatcaatttcactagcggagctctaaatcgtccagtccacggagacaacgcagacaacagatgaacaaacgtgttctcggtgatctagggcagtctagctcaatcaaacgggtcgagcagcattaggagaacctaagtacactaaaatgaacgatcagagagtatgaacagacctggaacaagttggctacggcgagggctctttcacggtggcggaaaccgatttgggggaaaagagcaattcgtgggctctagtgagtaattgagggcacaagcggttggattagatgttggattacctaacggagccgagggagtgctcaatttatagcgtgcttgagcggtggctagtgaatttgatggggacacgcggcggccggagagaaggaggggcactagcgcaaacgattagtggctttcaacgtggcggactcactggcgacgagccagg

SEQ ID NO: 156626 - DNA, 812 bp, Zea Mays
gccagcgattcgtgcactactatatgtccatggagctcgtccaagcttcggttcccaactactataatctaacagcaagctgacgtgacacgactcacagattaatgtgcagtgatcatcttatcctgttgtgtaccttactttaagtgctactggatggtatcgagtccctattgtttgccaatttggagattgtatactctcctttccttgcattgtaaactttggtgcatctgagtgcatggcgtcttcatccatgtcagctgcttgttgtttacgttccatatcgcttccattggaaacccgagcagatcctgaggaaacgacgaccagcccgtgttaactgttcaagatgtccatccatggtgatggtgcattattgctcgcggatttcagcagaacagttgttggagcgaagacagaacgaccactcgatctctttattctgcacattaatctcctgaacagttgttaggcgtagggccattcaaatagggaagaagcgaaggcctagcaaaagatcccaaagacaataggatccgtccccaccgccctagtggcgaagccaatcggacgaactcacctacgaagaggtcagcctttgagtaccatacaaaggttttacaaagtcgaaggtgatcggcttcatgggttaacaagagtaacaggccgctaggtcctcgcatcgtgcaatcacagagtaatggcactcaaccactccgggtttagagagggtaccaattctggtgtaataggaagacttgtacttacaatccttcaattacttcgttgtacagtatatgtcggaaata

SEQ ID NO: 156627 - DNA, 354 bp, Zea Mays
ggaactccaaagtgccaagcagtgatgaaatgtacagggcaaagggatcctcatagacaacacaatttgcctgacgatggcatatccccagggaagcaggcaagcggtgctgtgctacgccagaactgcgtggaggctacaccaagcaaatgcaatagaagagagttgtgcaaaccctagaaaggatcgaacaacgcgagcagtgccatagacgctaggccaacagacatgttggcatccatttcttgccacaaaccgaatgccctccctctcccgtgacgatgcaacatatccaatcaatcaatgaagagcaacaactccacgctactcctcaaggtttcatcccaagtggcg

SEQ ID NO: 156628 - DNA, 1085 bp, Zea Mays
agtctgtccaaaaaggattttgggatcatgggagaatcaaaggtatatgtgcacataccgctgtaagatatatgtactgtgaaaaggaattagactctcgttattccaatagagtactgcacttagttggaattttcaagtctcctagtgtcttgggaattgtacttatatagttcacctttagaaaattcaagggaacacaattaaaaattcctaaggtagctatctagagagctagattattctgtgaggaggcttaactatagaaacaagacatacattagatgcaaagtacttgacatcgagttagtttattaattaggtgaatatcagatcacaagattgttaatcccaagcgtgctgcagatacataccgcattgagattcgcacaatgggaccctacgtgagttacaataggtgacacttttaaaacttctataagtatctgcagtttagtgcacacaagggtgcaaaacgttagccaaatggtaggaagggaaaccctacaaagtaaccaaccaagagagctaagactacgagtctgcaacttaaagctgcttcttccttctctgagattttgtgctagcttttctccaaatttagttagtctttgataagagcagagccagtgcttagtgacccaccttgtttggccccaaagaaatatatggtagtcccacactgagtggaagaaagggttcgttttagctccagtaatcagcagaaaccagaatcttttagctacttcctaccgagtgaagtttgaccatacagattaaccgttaggttttgtagctggtaacttcttgtaactagaagcaggtgagcactgcttgagatatacagcatctaaccagtagtttgttgtactgtgtaaacatatggatgccatcagaagtgatgacatagagaagcaagatgaagttatgttacctggattcaggtttcatccaacagatgaagagcttgtcaggttttaccttaaaagaaaaatccagcagaagtctctccccattgagctcatcaggcagctagacatctacaaatatgatccatgggatctcccaagtaagcttctgtgcac

SEQ ID NO: 156629 - DNA, 3098 bp, Zea Mays
caaccaggtagtaacatccctgtccccttcctctctcaaccaaggaacagccatcacaggaggtgtataaccatacagaattttaaagggagaacaatccagagcagtatggtaggtggtgttataccaaaactttgctaaagccaaccactgcctccatttgtgaggatgatcatggactgcacacctaagatattgttccaaacactgattcaccctctcagtctgcccatctgtctgaggatgatatgcagtagaaaacagcaacttcactcccataagctgaaacaaatgtgtccagaaataacttgtaaacactttatctctgtctgacacaatagttttaggagccccatgaagcttaaccacagtgtccagaaacacctgagctaccccttgagcagtgtatggatgtttgagggaaataaaatgagcatatttggagaatctgtccaccactaccaaaatagtgtcaaaaccttcagatttaggcagcccttccacaaaatccatagaaacatcctcccaagcacctgtaggaataggcagaggctgtaacagtcctggtggatgcactctttcacttttagcctgctgacatacttggcactgccccacaaactgagtaacatcattcttaagtcccttccaccaaaccattttttcactctgtgataagtagcatgcactcatgaatgccctccaacagcactgtcatgtaaagctgtgatcaacttagtccttagagcagagttgtctccaatccaaatcaccccattcctccttataattccctgatgcaaactgtagccctgctcattaggactttgaatcaaaagctgagtcttcaactcttgagcctccatatcagtttcatatgaatttaaaacctcctgaacctaaagaggttgtacctcagacacttgggataaggccatgagataactcactctggacagagcatctgccacagcattttccaccccctttttgtatactatctgaaactgcaaccccatcattttagacatagcctttttctgaagtttagagtgtaattgttgttctaccagaaaagtaagggactggtggtcagtcctgatgatgaaaggagctctctgaagatagggtctccatttgtccacagccaaaatcaaagccaagaactccttctcatatatagacaagtgcttgttcttttcacctaaagctttgcttagaaaagcaataggtctcccttcttgcatcaaaacagcccccattcctatatcacaagcatcagtctccacaataaaaggaatatcaaatctgggtagagccaacactggagtagtagtcattgcttgtttcagagcctcaaatgcctgttgtgcttcttctccccaactgaacttgttttgcttttgcaataacttggtcaaaggtttggctaagactccatagcctttcacaaactttctgtaataaccagtgagacccagaaatccccttagttcagtaatattctgaggtataggccaagccagcatagctgtagttttggaagagtcagtagctaccccttctctggatattacatgaccaaggtactgcagctctggttggacaaaggaacacttcttcttcaagaaaaactgatgttccctgagtttagtaaacaccaacctcaaatgacccaagtgttctgccagacaggagctatacactaatatatcatctagaaaaaccatgacaaacttccttaggaaaggctgtagtatagcattcattgcacattggaaggtagcaggtgcattagtgagaccaaagggcattaccctgaactgataatgtccctgatgtgtcttaaaggctgtcatatactcatcctcctccttcattcttatttgatggtaacccgctgtcatatccagactagtaaaatactgagtccctgctaactcatccagtatttcatctactaggggcataggaaatcgattcttgatggtcatgtcattgagttttctgtagtccacacaaaatctccaacttccatcttttttttgaaccaacaagactggagatgcaaagggactcatgctaggcacaattagaccagaagctaatagttcagagacctgcttctctatctctgttttgtgcaatggtgagtacctgtagggccttgagttcacaggtatatgtcctggtaccaaagaaatatgatgatcataatctctggaaggaggcaaaccagtagggacagcaaaaatatcctcaaactccaccagcaacctttgtaactgctcagggactactgcttctttcttatccaccacttgctccagcataaccaaagcccaaacctcattgcctttcaaccatttattcacttgtagaatggaaatttgtggaacctccttctactgacccgcatctcctcttagctgaacagtcactcccttgtccacaaatgtgagcacattctgcagtcaatcacattgcataggactatgctttttcagccaatcaaaacccaaaatcaggtcatacacatccaactccaataccctaagagtagtagtataggtatgacccccagaccaccactccagatcaaccaccttcttgtcactcctcatcttttctccattagccaccttcacgtccactgctgcacacttttgcacaggcaagcccattttatccactaaattttgactgacaaaactcagagaactgccagagtctatcagattcaccaacatctggttatgcataaaaccttgcaccatcatacatccatcactttccattccactgatagcatttagagacagtttatacaattcttcaacctccttgtcttcggactccagatgctccaacacaggatcagtcaacaccatgcccatgtcttccacagttaaggcatgcaactgaggcaccaccctcttgggacacttcccttggtgacctggctcaaacttttcaccacaagtgaaacaaagtccattcgctcttctaaactccctgagttgcctctcctttgttagatcacctagaataaatcctcccttattgtcagtcttcagattactgcccacagccttatt

SEQ ID NO: 156630 - DNA, 560 bp, Zea Mays
tgcacttgggctagtggtggaggagcaaggtggccgcacacctcactcatagctaggtgaagctcttacagttcgacgccatgctcctttagggaagtttgcaattgaaatagcatgggaatggcagtgtcacaagcgatcgagagcttgcgcgcttcgtcctccgccaccttcttcacctccttggccacttccatagcatcctgggcctcagagaacttctagaggtctgcaaaggagagatcatggagcaaccatgagcaccaagggccaacaaaagctcgaccaaaagcccactcctgccgaaggtccaaatttgccttctgcagacgagcgttcacagcccatagggtcgactcggcttcctcggcccacgagtacgcttcgtgcaggtcttgctggagttgggtcctctccccgttgaggcgtttagaatcaccgcgtgccttattgtgccccgagtggtggcgtgttacctcactctcgagatgctcgaccttggcctagagggtggagagctcgtgatctatctccctcgagcgggccacttctgcctgcag

SEQ ID NO: 156631 - DNA, 409 bp, Zea Mays
tgcatataaccgaagtcgtaaagtcaattagagcagtactaaccgaggttgatgttgtagtcctcggcagccgcggttggaacaacttgtatcgtggtaggaacaatttgtcctcggcaacgccatccacatagttatagtgcccgcacaacatatctcgcctcattcgtcgcttgccgcgcatggagggggtggttgttggagccccgcggatgtggatgttgtgtggcggaggcagatccggcacgaggttgttttgcgcagacagcctagatttggatggcgaggggatgcggcggatccgacggagggcggctgaggggaggatggcgtgtggggatggggcaggtactggcgagtggaggatgaagcgcatggctattgggcgacagggatgatgaccggcgcg

SEQ ID NO: 156632 - DNA, 1058 bp, Zea Mays
tattggcacatgttaaacaaacatatctaaaataaaacaattaacaaataacacactactaaattatgcatcatgctggcttttgtttgtttgtgcaatagatgaaaagagtaatctcattaatggaaataaattaatgtcaaaattaaggatttaatacctaatttgagagtttgaaaaagagaagatatataaaatataaagaaagtttatatatttccaaaattagtacctttagggtcacaatataattttaagaaaatttggtacaaggtttgaatttaaaatttgaattcaaattgaatttgggaaagagaaaagtaaatgcaaaagaaaatgggaaaaagacctaacctaactgggcctacgacaccctattcggcccactctcctcttccctcgtatgcacgcatggcccaatatttcctccatcccgcgcgcatgcagtaggctgacaccggggggcctaccgatcagccagcggccacacgcatgaatcaagctgcatttatctagtgacctacaagccgacttcgcatgtcatccccgccgccgcagcaacaaacccagcgccatgcgcggaccttcccattgcttcgcgcatgctgggcctacctgccagtcgcaccgacctcgcaaaagctcgctgcgtggtggggcccagagaccatctctcccgcggacttcgtgtgccggcaaaacagaatggccgacgatgtcgcgtccaccgcgactaaatcgcgctcactccagggtcctcgccatacctgggttgtttaagagtgtggtcgccttcctttgcacgcgaccgggtcgcctcgtcctagaagttccattgccatagacagagtagagtgtgagagggggatcagagggaagaaggtgctgccaccgcagtttccgcacgccatcgtgggcttggcctttgaccgcgccaatcaaggtgagacctctgccatgttttcgtcctcctttgtacgttgtatagcgcctagaccagggacgaatcgtgggcttattgcacggggatttctcaccggagtacaccgcacgacgga

SEQ ID NO: 156633 - DNA, 910 bp, Zea Mays
aaaagagaagttttcattttatgaccaaataatatatttttaaactagtttgactcgcccaaattcttctatagttgcatcttttatgaacgtagggagcatcttgaaagagggatacgtcatgatccactttttccatttgccaagaaagcaaattccacgaagctatcacccaaaataattcaatgtgatgttgcttgctgcatctcgaattaatttctgtctatatgaataccctattcgcttggctttaatttgtatcggcttctattctacagtatttttgcctctataaattacaattgcaatagtgcaaacaactgattttattctgaagcgaacaacctatagacataaaatttatacatgttcgagccctcctgagcgataatacctcacgtccagtttaccggtggttatgttctgattattttccgtgccccttgggacatctccttcttctttttatagttgaaacaaggagtctggtaggagttttattggaggcggtctaatacccaggctaactattagctttaggacgttctaaacagaatctagcgtggaggtttgagtgcttggaaaggtcttaaatgcaaatttagattgcggtagatgaaacaatttaaatatttcaaggaattaaaacgagtcaaaattttgttcatggatcaacatagaaagagattattcaggtattagaatatagttctttttagataatgatttctttggaacccaaaaaacacatatagggaaaacaaaggattggatctaatgaaaatgggagaacacaattcgtttcaaagtgctccttatttaagaaatcaaaatcttaaggctattttcaacagattccctatcacatctcctatctcatcttctatttcaaactttagtctacaaacaa

SEQ ID NO: 156634 - DNA, 952 bp, Zea Mays
cgtcgatgtttgaaggccaagtgcgagaaggcaaatctattcgaacatgccatcgacgaggacatattccaatggattcgatagtagcagtgataataatggaaggtagaaacgtccattggagaagatgaccccgtcttccatgggccaagctcgagcgattgtaatggtgtcggtgatgaagcgaagttcgggtgcttctaggactaggtttggttgcacgttggaggtagtcgtggtactagggatgcttaatggagtttaggaagagcagacattgttgccggaagagccaagacaatatgtggtgctatcctagtgtgaactctagtgagagccatgatgcgattgttattcctggaagattcaagcatggcaaagttccaaaaggtggggccaagggaagacaatcatggtgagccactaagaagtcatgaatctagagtgtctcgtcgtcgacgcggagtggtacattgaagcaagctccatggtagcaatacaactgccattgctgatcgagattgctgtgtcgacgtggcgttcaacatgtcttgctagactagtaaagttgacattgataatgtgtgtggcgtcagtggctctagcaaggaacatggttctccaggcatgtatgcttggctcttgatcgttggtgaggatcatcaagcttggctcaatgttctttgggctatagtcattcaccaaagcggtattgaacaaatgcttgcacttgtgcgcttgagcgaactactagtcgtagttgaagcataggcaacccaacattgttacaccatctcctctgttgtgaggtgtttgaagctacggtgcggtgatgtggttggggtttctatagtcattgttggggttgacgctgtaggcgtcgtaacaagtgtcagcttaaagcgcatgtggaggttgtggtaccattcttgttgctctagtggatgttgac

SEQ ID NO: 156635 - DNA, 279 bp, Zea Mays
ttaagatttagactgatatacgcaacactattttatccataagggtccttcaggggctcatgcataccattcgtcgtttggagctagtagttgacttcagatcaacaagtaaaatgaccatcagggtctagcgctcacaagaacagtcactggttgcattgtgcttttaaggacataggaaaaatgtgtgcagctaatggtagtaaagtgcacggcattaggccaatgctgccaagcaaatatttttggtatgcagagatgtatagtccaactcgtttt

SEQ ID NO: 156636 - DNA, 712 bp, Zea Mays
cagacagcacaagtcaggtcaggtggacagcagttgattggtgtttgtcgttttttgtccatgcgacggaaatggagaagatgcatgcaaccagcaaccacgatgaggcaaaatcaggagcgaaataattaataaaaggggaacactcttggtgttggtggtgtactggtgtggtagtgcgtctgatgatgacgtgtacgtgtttgttagttggtttaattaattaattactactcgactctctttctgtgtcctaatcccgagccggagacagttgagaggtcagcttcagcaggctggagtctgatgccactcctcatttgatgcgcacaggtttggacttgtacaaccagcctcaagaagagacagacagctctgtgacccgtagacgacgcctgattctgaatggatctgttttgtgctgtgctcatcaaggtaaggaagggatatttcagggacgcttttgaaatggagtttggccaccaagaaccctgatttccaggcacgcttgcgtcgcgcggcagggctggagtggcacgcgacggcaggcacccacacacaaaacaggtgcgggaagctacacccaacggataagggatggatcgactcgaccatcgatggcgaaagatatcgcccggccggggatgcaagatgaggacgacccagggcaagtggccaagcagccgtgtggccgtccagggcgccgcagcct

SEQ ID NO: 156637 - DNA, 620 bp, Zea Mays
agagccgccaggtcagagatctcgccgccgacgatccctccgccgcgattcgtgccatcaccgtctcgattcgtgctctgggtaagtggataacgctcggagtacgtcgccgtggataagctacggctagtaaaatattccagccaccgtacagagctcgccgcggtggattctgataagcacgccggtgaccgccacctctcggccttgtgccgcgtgtctatacctttccactgcaacgccgtgacctgctctcgctctccgttgatcaccggagtaactgccacggcgtgggacacgaattcgttgcgccagtactcttcctgccctccggccgccagcactgctcgaccaaattgagcaccaccgcttaagccctctataaattgaaggtcgggtcagctgcgctatgttatcgcgaagccgaagcacccgttctcaccgtcaattaaccaccgtagccggagaattcccttcttcccccaattcggtcgactgcgccgccatgaatcgcctactcgcggctagctgattccaggtccgtccttgcccttgttgttcatgttttagcacccacatgtgcttgtgatcgtcacctgcccagcccttggtgcttgaat

SEQ ID NO: 156638 - DNA, 420 bp, Zea Mays
gaggaaaggagcatgtggtgacttatctaagtcgaaggttggtggatgctgaaacgaggtacacttttattgagaagttatgcttatgcttgttttatgcatgcaccaagtgtagatgttatttactgtctaatcgttgcactgtttctggtcaaaccgatgtgatcaaatacatgttgcataacccaattatgagtggtagaattggtaaatgggcttatgcactcatagaatatgacttggcctatgaaccattgaaatccatgagaggctaggtcgtagcatattttattgtagaatatcggattaatgatactcataaattagacatatcatacctcaccgtttctccttggactttatattttgatggatcggtttgcaatgaagggcaaggaattggcattgtgcttgtttcac

SEQ ID NO: 156639 - DNA, 750 bp, Zea Mays
cagtgataaacagtgtcgcgtcagaagtcagagcgcagaagttagaggtcaccggacagtgatgaacagtgccgcggcagaagtaagacacctgtccctgtgcccaatttcccctattgcgccctgtgctcggccaatttcaccttcgccggtgctcggccgtggcggaccgtcgtgctcgcgcggtggccggccaatttagcccagtctagttccccggagtaggtccctgtgtcacccctgcctctgctgaagctagcccaggccttagcgcgccttaagtcccctccccgtgcccggaatggctcaccggagatactctggcccgcccgagaccttctcaccgctgttctcccttctctgcccgtggattcatggcctcttccccgccattgagttcgccgtggcgttctctccctctctgcccaactccggcaaccccgaagccaccctagctcgcgccagcctcaactctgtcgaccccatcgccacggagaggaacagcgccgctcgcagctgtccgtcccccctggtctgatcccctccgtccgattcagatcgcacgactcagatcacggataacgcttcgcgcacgcgcgtctggcaccctggcccgcctgtcagcactctccccctctgtcgctgacactccctggcccgcctatcagcgctcgcccgctcgagcgcgcacgccctcggccgcagatctaatctcagccgttggttttagatctggcggttaaattcacc

SEQ ID NO: 156640 - DNA, 982 bp, Zea Mays
tgcatgcatcatatttaaacaatactaagtaatcttaccctcttataaagacatggcacacacaaagactactcagtggaaggcgactgaacctcagggtgtacctcaacaccagttagctcctcgacatgaggggagcagtagcgggagtaatgatcccataggggatctagaggtcagagttgaacgtctaatggtggaactgtgccatggaagcagggagcgtgcgcgtgatagccgccatgagttgtcagtagaggttgatagtttgcaacgggggattgtggagcaggatagggctattgactgggctataaattcatgatctatagcctgggattgcaaggcgactacccgagcccaggtgaaagagctaagcgtagccctgaaaaatctgcaagcgtataataatactctacacgaggaagtgcacgtgttgtatggccagctacatccgaacgttccaccggaggttgcggcgatgggagctggtgcatcaggagcagctggcgaatgaccttatggggagttggatctctttggagcccctccttccatgaacatcacagatgattgttctcccgaagctagcagtggagcgggagcagccaaggacacggatgactagattaatgtagtagtaggttgtttccttatgtaatctaaataaggaaaagtgagttgtataagttgagtgtgtataattagaacaagtttggaataatgtaacagaggttgtgtaatcgtggcatgtaataatcaagtatgctttcttcttcagatgtcgtccagaactcgtgctgaggatggggctagaacttcccgtggtggggagtaaactccgaacccactgcctgtacctcccacgctggcagaggctatcgctgccttaattaatgccactgctgataacactcgtattcttcgagaaatggctaggaatcaaattcattagcagggaggcagaggtcaacaccaagcc

SEQ ID NO: 156641 - DNA, 369 bp, Zea Mays
ccgtttgaggctctatatggcagaaaatgcaggactccactgtattgggatcaaactggtgaaaggcagttctttgggcctgaaatcatacaagaggcagaagaacaagtgcgaatgataagggagaatttgaggactgcacagtcaaggcagaaaagttatgcggatacctggagaagactactagagtttaaggagggtgatcacgtatatttgaatgtgccaccaatccggggtatgcgaagatttaaagttaaagggaagttatcccctcgcttcattggacctttcttgatcttaaagtgagtgggagaagttgcatattaactaaaactacccgatcatcttgcggaagtacatgatgtcttt

SEQ ID NO: 156642 - DNA, 635 bp, Zea Mays
actaagtatgttgggcctcttctgtcttcacaatagcgagatcggataggccactgaattatactcttaatgtcctccctcttgtccaagtcatccacgagctaggccatttctatcgaaaagttggaacaggatacctggcatctggccagtatacgaagttgtagcaaccgaatttattatgatattgctcttttctggtagattttgtttcataaaacacctcgtggatgttgtagaaatagtcagtatttggctccaaaccctgactccttactgcccagataaaaatcccaaccttaatcagagcttcgggagtaagctgatgaaggtatattttgaacctttttagaacctcgaccaacattttgtgaagaggaaagcgcagcccagccttcaaaaagcttcggtgagcaaccacttcagctttttcaggaagatgaacagtgctctccccactaggcctcactatggaaacatcgtgaaaatatttacctttcatagcatcaatatgtcctctcttcatagctaatttcccaaagttaacatgatttggtttctagggtcactcttcggcatcataagcctctctcgaaatcaaaatccttgttatcctcggaatcgtcccatagtcc

SEQ ID NO: 156643 - DNA, 273 bp, Zea Mays
ggctgaccggcgaccatctgtgcgcgctgtgcggttttagttccagaatccagagttccagacttcaccggcccagatttctcgtccagacacgcgcgaacaacaggtggaaggggagctacaggtgatgaatttcagttggatgaagatcttctttaggtaactgggtggtaatgtgtgctgtgtggtatctgggactggtagtattagtaactagtaggtgtttctttgctgttttcagtattgctgaattcatgtcatgtttaccctatc

SEQ ID NO: 156644 - DNA, 446 bp, Zea Mays
caatagggcagccaaacgagccagtcaaaaagatggaaagagagtaaagtcataatagcttgtactgtggctgacagccatttactttttctgtgtacgagaacatgaccccaccatctgctctatttgttggactatactaccgctatctttttgtctgtgttgttgaagcgtgtatcatatggctggacagacaaactagactactagagacactaaccaaaggcttgaatgactgctcgatttgcattgcctctgttggattcagtctaatatatatatatcaaccctaaaataccattatgctcttgcaactgcaacgggtgtcgtcgcgaccgactgctgctggaagccagaaaagcgtgctctgtcttacaaggaaaggaaaggaaaggctggatcataaacaacaacaaacacgaacctatggagtaggagctagcttc

SEQ ID NO: 156645 - DNA, 657 bp, Zea Mays
aaccgccctgcgtgatgcagtgctactgcaccttttgcgaggtgcctgcttccaattgtttggattgggaaggaacacgggggcattgccatgctacatacaagtaattgaccagaatgtgtaaggctatcttccaccaacattctttaaatttcatttttcattctttacaacacaatataaaagattatgttctttatatctttgaagtcccccgaaattttatcctccgcttttctttttttttattcattttttattggccgccgtacgacaggagatgtattccgtgtgatgttgcactggtgccacgacaccagcagttctcttcccgcgcttcaaccaacagaatagcagatgaacaggcggacgctacatttggcggacgccgaggctacactagattttagcgggcggtttagagatccttgttacaggtgttgcggacgagagatcgttgttggaggtatatattggggagtataatatactttacgctttagcgtttgttgttggggatagtctaaattggagccttgtcatgttctgtatcgttataattctcattggtagttgatgcaatataacaggaatcagttaatttcacaagaagtgttttgaagatacataagcaccattctatgtgcttgtcatgac

SEQ ID NO: 156646 - DNA, 769 bp, Zea Mays
ggccattggtgatagtttggactgtcgcagagggtgaagagatggtcgccttcaggctctggagctgctcctcgacgctggttttgttggagcaagggcttgagggcacacttgcggatctcaggtggcaggccataatgcttgggatggaacggaagctacagaacctcttctcgctggagatggaagagaagtcaagctgctgcaactgctatggtgtcttcatagctttgggtgccctctttatatagggaaaagaggttgacgcaactgcacagctgaataagcagacggcaagagccaaggggcatcactagctgagcttgattaggagtctgtctgctgtcatgtctgcattatgggtggcaaaatgagcagcacgggtgaaggggcattgaattagcatcagattcacactaatatcatgtgatccgttaattaacatgcaagttgccggtggaagcatggacagctatttgacttcgctcacatccaggctcccaagacgtgtttaatcatctgattctagaccattaggtgcagctctgaataattagcttattattgtcgcactgtcatgttgcaagtatcggcagcaaaggatctgttctagctcataatatgcgcacgctttgccagagatgcccatgtctcttaaacattaaaacatcgtgagagaatagatatatcagttttctaagggcagacagcagaaaagagcaattccctattttgttcacagtggttctaaattttcctgaatttacat

SEQ ID NO: 156647 - DNA, 785 bp, Zea Mays
tcaattcatcacaaaaagataccaattgaatagatgacataatacaacttatgcctcaagatctataacattttacaagcaacctaggcacgcttcacacatgatgatcattacaacacatataccaattgaaaaacgacaagatcatacatacaaaaaccaatatctaagcgcaccattatcacaaataaattttcttaggtacaccaatttaagggggtcaacatattaaagcataaagcacctaagcctactaccaattgaaaggcaggaacatagctatgatcacaatcaacgaaacttcaagatatttaatgaaattgcatagttccattctccatgcctttgccttttacctgaatgccatcgatgaccgctggcttggctgacgtggctgatgctgattgcgcggtcggccgttggtcaggcgtgtggctggcacaccggacagtctggtgcacactggacagtccaatgatttatagccgcagcgccccaacatcttcccgagagtggcctattcgccaggggcgccagcctgggcaccgaacactgtctggtgctctcagactggtgcaacttttttactccaatttgtcttcttttgggatgatccctagcacttagacacacatagttagccactaaaacaattgactaagtcttgggatcatacctcttcattccaggatttctgatccactttagacagagcttcaaaaccatcaagtcaacttgacttgatctagattattacacataagctccaacaccttgcaaaggtc

SEQ ID NO: 156648 - DNA, 584 bp, Zea Mays
ctcccactcatggcctacgggcccctcggactgcagcacactcaaaacctacgaacccttcggactgcggcgcatttatggcccgcgtgccccagcctatggtgcactcatgacctatcgagaataggcatgagtacgcagaccgcttgtagggaacaacaagacaaatcgcaccgagccccaggctacagaggccaggggttggcatagctcgaatgatggcactcaggccccatgctacccgcatcatccgctataaagaatacaagacaaccagatgaccgtagggcccacgggcgcgcgtggcttcacctagggtagaatgtcccgtttttaccattgtccgataactccttcttgaggaagccaccgctagctgacatgctccttggcctataaaaggggaggtcagtccctagacgaacgagaggacaccgagacaagaggagacgcctagacagacacctaggcgcaaagacgacaaactgatgggaggaaggaggacgcaccgaccaggactggaggcaaaccaagacttatttgggacaacactctgtagctcttaactccacctcctccacaac

SEQ ID NO: 156649 - DNA, 748 bp, Zea Mays
gtagaaactcggcgtcaccctcatttggacgtcacggggacactcaccgctggtcggcgatgccatcgctagtgatggtgcctcgtggtcgggaacgacagtggctgctgctactgttgcgggtccaaatatggacctgaggccgatgccggtgttgcggggtggcggcgaagaggaacatcagcttcagcttcatctaggcgtcatcgagcttgtggacgagcgtctggcgggatgacactcgaatgatcgaccgtgagttgttggccggttaggttagtgaggaaagctcccaccaattattggaaccaatcgccattcggcagtggcagctacaggagaagctggtgcaaccttatctaggcgggcgccctccttcttgcgggtggagaagcgggtgggagtctgttgtggagtgggcgagtgggacacgacgactgacatggcatggaggttgcagatggcgtgaagactggcgactggcgtggaggtcatggtttgctggcggaggaagttcgttgtgagagccaatcggcgcgaacgcgagaagcgagaggctggctggggcttgtcgtgcagagggtgcgggaggcgacacgggtgttggcgagcgtgcgcgggcctgggggtggagtcatggtctgcttgtgtacgatagaggtgagttggtgtgcattttggtgcgggtggagaagcgggctggagtatgttgtggagtgggcaggtgggacgtgacaactaacatgtc

SEQ ID NO: 156650 - DNA, 314 bp, Zea Mays
gaagctagtcgcccccctgaggagcgagtccaaggcgccgcatggccgcgccctggaggaacgtgtgggtggagccggtgtccaggagggcgaggaggcgctcgcccttgatcgtcacgggcaggagcatagattggtacgtcctgatgcctgccagagcgtgtacagagaccacaagagcgtgagcgtgagcgtccgctgcggcggcggcttcttcgggcgaggccgcggccgcatcgtcggctgccgcctcctcgtcggcgtcgaggaaatcgtccacctccaggaagaacaagcgggggcacacgtgccca

SEQ ID NO: 156651 - DNA, 401 bp, Zea Mays
ctcatcggtggatcgggataagacctcgccgccgttgatcgatcactgccgtgcgccgcgtgtccaggcactttaccacgtcgcagtagctcggcttgcgatagttactcatcgccgatgaagtcgccacgatggaagacacgaatccactgcgccagtaatctcccctctctctggccgccagcacggctcggccaaattgagcaccaccgcttaagccctctataaattgaaggccgggtcagctgtgctatgtcatcacgaaaccaaagcacccgctcccaccctcaatcgttcgccagagctcacgaatttcgagttttccccaaatcggttcatcccaccgcaagaacaccctcgccgtggccagtgcaattgaggtcagttcaaaccttctgctc

SEQ ID NO: 156652 - DNA, 678 bp, Zea Mays
attaattatagccacaccagaagcggagtctaatttctaaatacattcatgaaacctagattatgtttcatctttactactcggttttgggatcatcccttcgaacgggtaaggctcaggtcatgaagggcaaagtccagggggagagaagcacattctcaatggtggtctagagccatgtatccacttagcctggtccagcaccctaagccgcacactccaccatcctaggatggctgttccagaacctagagttggcccctaaaggcttaggccttatcctgaccaagggacaggtcccgagaccctgctcggcgaggttcagaaacaaaatccagaagattgaaagcgttcagaataaggacccataagattcgccgttgagctccataacgaggccatgtgcagggataccttttttgcagatcaccggacggggaggcagaaaggagctatcacaagagcggtgtcgaccactactcccctcaccaggcgaagcccggcgctgccgcatgtctggcgacacatagcatggaccaccaaggaaactcggtctcaacctgcagagtacaaagcgcatcagcattaactacggacaagacatatacctgcccactccagcggcgggcgctacgacctaagtacacagaccgcatggtggctcacgcattaccgaag

SEQ ID NO: 156653 - DNA, 392 bp, Zea Mays
aaagctctattgtaaaagaaaaaggaaaagcttcaatagtgctgggccaattctagcccaagcggcccaacaccagagggaaaacgcgcccacgcccacgcgctggttgttttgcgcaaagggcctcgaggttctggctaattggaaacgagtgcagttactgtttttctgagtctcggacgatttgcacagaggtccttgaaattctatttctttacattgactgctccccgacggcgaaccgcgcgagagccgtgctccgtcgagctggactgggcggagcacgcaaggattggtgctcaccgacgactgactccagattccgatctaacccgaggtttcccccaagttaatttcgtaaatgggtgactggttctctttggccacggtga

SEQ ID NO: 156654 - DNA, 567 bp, Zea Mays
agctccttcgggagggttttcccacctcaaatagccgtttcaccggaaacctaattccccgcacgccacgtgctcggtgaaatgcccaaatcagccaaaaatgctccaattgaacccaaatttttcaggcaccttcacaacacttccagtaacctacttgccaaatttcacgccaatccgagattccaggcttaaatttcaccaaatttcccgttttgagcgatcgtttccgagccgagtgcccaaatctctttttcctcgcctaaattcaaccaagcacacacttcactcatattcacctatataaacctattcgtgaagtatcggctcaattccatatcgattcgtgcctcaatttgaattccaaacctcctatggcactatttatcgttcaaacgtcgttttcacgtcgtttgacctctcgatcgactcatcttgtgtttcctgtgccatatttctcttgtgtatgtatttattcacatttaatatacttatgactatgtgactaatacatgctcacctcttctgtcatttcagggaccttgattgcacgtgtgccgtctcccg

SEQ ID NO: 156655 - DNA, 371 bp, Zea Mays
tcgtcgtaggcagatacggtcgccgccaagcggtcctctcacccgcgccaccgattctgggttccggatggtcctagcgagtcactgtgtcatcctgcacctattcgtgaccgccacgggtgaatcaatcaactgagctgctgttgatttctcgctgaagtggaggaagcaccgcgacaccgtacttcgtcattggcaggactacgcagtactcgaaccactggtatgtttatgcccccgtcaggttcgtagattcccgtaccacgcgcacctcccttcgggttagtctagggcaccgggtcgtggttgggtgagtcaccggcgcggtttcgccgttttggctgggcgctgttgctcgggtcaccacggga

SEQ ID NO: 156656 - DNA, 687 bp, Zea Mays
ttaggcaatgcggagtgctctcccaagggcgaggttgtgcctagacacacacatgtcccatccggagttgttcgagaacagtggctggagtaggggagtagtgtccgttattcgagggcgtgcgtcatcgtagttggctaaagtagatgggacctcgctcccatcgtcccctatttgactatggtgtcacatggagtagatatccgaatcatcacatttaatgcgcacgtctccacagttctcgttcatttggttgaggctaggcccgaggacgtcctctgtccaagatgagcttgggtgagatggaaattgcctttccgagaaggggggctcggacaagacgaggatttctcctagacgctgcctccacccgaggatgggctcgagcgaggcatagttttgagcgaccgtcgagcggggcattgggcaaatcatggttcaatcctgcttgatcctaggtaacatgttttctgattttttggtacttaggtgttaggtatgattatgggcacaatatgggtacccctaagtatgatacccgacaccttctctttgcattattataacattggagtgaaatattacaagcctagctagaagaagaggggagggaatggatggagttagaggcaaggatgggggaggagcgggaggcagagttggcggatcagtagaggatggtggaga

SEQ ID NO: 156657 - DNA, 1066 bp, Zea Mays
taatttcacgaacggcgatctaacctactctgtccacggtgacagcgggtgttgcggacaactgaacgcgttcctgacgatctatggagtcttagtttaattgaccgggtcgagaagcaccacaagcacatagggatgctaaaacaagaacaaggaggacgtgatcggacctgtgacgggctgaccgcggcgagctcacacacgcggtgttcttgaccaatttgggggaaatcttaaattgaggcgctctggtggacgatctgaggcacgggttgcttcactgggtgcgcaattacctagcggagcggacgggggcggcaatttatagcctttgggggcggtggtgctcaatttcacgaagatgtgctggcgaccggaggggaagaaagttactggcgcaagagctcagtggcatctaccgtggcgacctcaccggcggcgaacttatgcttcagggcggttcctaatgacgcaccgcgacgtggtatagcttcgaggcacgtagcttggccggataacggtgaacgccggtgatgccagcgcggcttaccatggcgagacacgacgctggtaaaaacagtggtcggagtttatctccaacgcaatgctttataccgaggagtgcttatccgagctcggtcgaacgtgaatcgtgacgctggcgcgaatctgggcgcaaaggtcaccggcggcgaggttcactgaacctgacccgatcaggtgactgtaccatgggaatcatcttcagagtgcctgacagaacatattcaaggcagattttctccaagttttgcatgacaacttcatcatccttctgcaccaaagttgtagacctataaaccatcttcacctttgctatagcatcactagtcagattcctactggatcatgcttagaattgagctctaagttcttgcaatcccactgttagtctgacttcagactttaagtagtctgacagcacgactttgggcacatttttctccacatttttcataacaacaatgtttaatcccttatacaaagttgttctcctaacatagctctatagatttgatgtggtgac

SEQ ID NO: 156658 - DNA, 463 bp, Zea Mays
ttgggccaacagacaccaattcggcccactttcccttttgctccacgcatgcgcacggcccagaaaccctaccgtgtccgacatatgggcccttgtggtcagcggctccacgcgcatgctctggctgatgtgcactcacgaacttggattcatcccagcgcctctgctgcgtgggccctacggggcagccacccagtcgcgcaacctcgcgcgcgtgaccccgcgtagcgccgcttcaccgacatgtgggaccgcttgccagcctcatcgtcaagctcagaacggcgcgggcaaaatccgaactaaccctgacgagatccccggaggccattgaagctaacttcgccctccgtatacctataaaacgcggctgcgatgcgtctttcgtcatccctgtcttgtgccaggtggaccagggaccccgtcgatgagcaccaccgaaataggtgaggataagtccctg

SEQ ID NO: 156659 - DNA, 593 bp, Zea Mays
gtgttggttcctaacaagcgggcccaaacactcgggagtaggtgagagcaattgtgctcgacaaaatgggaagtgtgttggctcaattgtcttatcaagcgtatcctatccgagagttggacaagagtatttataaggtaaccaagggtttggggccaaagtatgtttaaggccttggttacagtgccaccataaaccttgttacaccgcatgttacactctcgctgggggctggcatttaggtttgtgtggcccaccacattgcagggaccgcctcacctcgacccatgttgtgcgcacttttgtctcgatggtctttgtcttgtggtcttcgtctctgatccccccaatgtccttactgacaattcggccactccttgactccagcataaggggagtgttgtcagtcttcgtgcttccttgggaccatctagagtgaatgtgtcttcacttggtggttaggcctttgcaacaaactagtccaaatttgcctctggtaattgcatcttcttaggccaagggagccctcgattcttgaatatgtgaacaaacttgtggttggctgctagtaactgagagtgattgaggtctag

SEQ ID NO: 156660 - DNA, 301 bp, Zea Mays
ggataagtgggactacaggccacgataaagaaggagatatgtagaatagatagtgatcacaacttgtaaagggataactctttggtcgtgtatataaggccaagggaacccctacaaaaaggtatctcatctcatcacatcacacaccagccctcatcacaacacctgagcaccatcacaactcaattttaatcctcgtacccctgagaaattccagtacatagcctccataggaagtagggagttacgcattctagcggcccaaacctgtataaatcctcgtgcaagtctgatatgctcc

SEQ ID NO: 156661 - DNA, 686 bp, Zea Mays
gtcctatcaagttaacctaactatgcaagcatggtgagaacataaaagttagagtaaagtgcgctagcgatccctaaacttgtgcagttgtgtcatgtcaatccctaaaatgtcaaaatgatcgtttaggtccgcgaacagtaatctagtgtcatttaggtccaaatgggtgtgtgtggcacgtgtttagcttacgtggcttcgccacaatgtcatctacgtggctggcggaagttcttctttgcacttaccccctcacgatcgcccagcagtccacgtctccttgtcttcgagacttccatagaccgtcgttgcccatgtgctatcttgttgatcatcgatgaaagaagttgtagtggcggtggcaaccgagagggatcatagagagatggcgttagggttcaggaagttcaaaaggtaggtggtcaatccagcaacacgacgtgcaaggatagtggtgcgattacgagagaaaggggaaccaacgccagtgtacgatgaattcaactttgcctcctagttttagatcgtatggttaggggtcgaatcatgtttgtgtagaatattgtaggaatacttgaattttggacatgttattgcggactcaggcaaaattgttagggttttgggtcttttagtgtgtttgaagttgcggctgttaatgtaggttccgatatagaagagtt

SEQ ID NO: 156662 - DNA, 299 bp, Zea Mays
tttgcatagacatgggcttccatgagtcttcacccatacatatggaccgtattcgactaccaagtgtccaagtcccagcagacttacagtcttacagacccaactcaagtactcaaccctaactcccgtgctccatcctcgtgccacacttagtgcccctctcccgccttggtggccggtgactcctctcccgtgctccatcccgccttgatgcatcccgcttctctctccgtgctccatccccactcggtcgctcctctcccgcctgctcgccagcaccagcacgggtcgtgctccat

SEQ ID NO: 156663 - DNA, 716 bp, Zea Mays
gcggggagatggcaaggaacatagggtttctgaagctcgagcttggcctctctgcaatgtcgaaggatgaccttgcagacagcctcgcttataacagtctgaaggtaaagatgttttgacttataaatagattatttttgtatcttttattattgtgatgtccccccttttttggtagggcttaatcttgagcaatgctttaagggcacaaaagaatgctgaagacgaaagctgccaaatagcccttgggaaccttcggttagaggttatcagactgaggaatgaagccctagaaatggataaaattctgctttccttggtagacagagtaaaggtcagcgaagccaaacttactgcacagtccgcagctcatacagccgaagtcgaagatcttcggaaaaagcttgccgaagctaatgaaaactttgaacttgcaaaggcaaagcaagagataagtgaatggacaagtgagaggttggaaaagaatgtgaaagagctttatgaatccaaggaaagatgctatgagaaatccttggattgcgccaagaaactgaaagatagctttgccaaggtgggtgcatactcatcagagcaaaagtttattcgaggcgatcctgaaggagtcattgaatggatcggcgaagagggtgaagcttttgaagaaatgcttagcgaccatggggatttttgcaccttcgccggtgcccgaggggttg

SEQ ID NO: 156664 - DNA, 409 bp, Zea Mays
gataatatgtagaggtgactttcagtagtgaggcgactgtggtgactacgttaatcctgagaatttgtcggcacagtcttcatagaaatagaggttttgtgtgtatatttataaggtgaatgtccgttataaagaaatacaggggggaaaatagtagcaacacggaaactgatgtccagatacagccaaccaggcacaacgacatatgtatctgaagtctgaacaataaccgtgagacgaactgaaagcaacaggggagcaaggaggagtacaggggatccaaacccaatccgctctgaagatgagggtctgccatcttgcagcaggtctagtctagggctccgcacagttgccatggaggatgctgaaccgttgccattgccaggaggatgctgaactgttgccgtgg

SEQ ID NO: 156665 - DNA, 280 bp, Zea Mays
tggaaatgggaagaagttggtatggatttcattgttggactaccccgcactcctgcagggtatgactctatttgggtgattgtggacagactgacgaaagtggctcacttcatacctgtgagaactaactacatgggagccaatatagcagaattgtatatgactcgaatagttttgtctacatggggtgcctaagaagatcgtgtctgaccgaggatcacagtttacttctcggttttggaagaagttgcatcagtgcatggacacacagttgaatttc

SEQ ID NO: 156666 - DNA, 394 bp, Zea Mays
ggccggtccgcggcgcggtggcgggtgtccacggcggtgaggtcgccggtgaggttgccgggtgcaataggaggtggggaggggtgccctgtgaccgtgagtgtgtggcggagcttcgcgcactggttaattggactgatgttcactaggaaaggggagaaaatggagctcaccggagtgacggggaagaacagcggcgctagcttgatttgctcagggagaagcggaggagttggctggagctggtgtggagaggacggggctcgggtggctccttttataggcgcctgggagagggagagggatggaggggacggcgagcgccaacgagctctccatgatggcgggaatggagctaacggtgattgggacggctcgggctggcgaggggtga

SEQ ID NO: 156667 - DNA, 642 bp, Zea Mays
cccactaaatcacacccgaattggtcaactggttgccacgatgagcttcatgggtacgtcgagctgctaaaaccacacgcgagaagcgcgcaaccataccagaatgatccggccatggagcacggagaatttgtactcgccggtgactgagaagggggaaaatgtcgttgcgacgagctcgggtggaattaggtttgttggggctatacggtcgcaaagggctaccgattcaccgagcacactcaatttggggagatgtggagaaggcagtacgaattttggcttctaccaagttcactggtgaaattgtgagtgcctcgccgtggtctatggcgctatttatagccacggaggtccggctaacgaacaacgtccgcggattgcattgttcacgcatggttaccacatagagaagaggcacagtaaggggaaaacgaggcatgggtgacaccacggcggaagtgaccgagccacaaagaccgcaggtgggatatctccggcacgcacgactgggttcgcgggatggtaccacgtccgaagttatctctctgcgatcgactcccttcaccaaatcactcgagcacatccggttcaacagtgcctcagatcttatccgcgttcttcagatatttacagtgtttt

SEQ ID NO: 156668 - DNA, 769 bp, Zea Mays
cagattgacacttgccactacggtatcatcatcctgaagcaacggcgacccaacctaaacctccatcgaagcagcgggggaacaccctaccaccacaccctcgggggttgtagcaccctcaggggctggggccgggtcgacggggtgatgaaccactacatcaacttcctgaaagattggtagacttacctctggctctgccaataaactaacatcagggacctcatctaagcgatcaacacaaatgtccacaacatggacctcaggcagctcatataacaaggcctctgagacagcctcttcaaggtgacattccatgactgatattgctaggccctagattttcatcatccttgcggaacggcaaagctcgaagcatcactatgatccttcgtgcaccgctcatgacggaccagcggaagatccacttcctcatcctcctctgcctcttccacgacatatctagccgacttaccagcaccaccaccctccaccttatcgaccaaatcaacgtccaccccttcatcaccaacagtcggctcagctcaagcaaacaccgattgcatatctgaagtgcgtcagagttttctcctcttctgtttgccctccgagacatcagtctatgcatctggctagcttggtcgcttgtgcctaggacttgcaaggctatacactttctccttgatggcgcccggttgctcgggggctccgctcccctgttcaagctctgcagacttagaggactctccagccagcatgccaagaatgg

SEQ ID NO: 156669 - DNA, 585 bp, Zea Mays
gaactattagtaattaatggatctaaatagggccctaggacatatacaaccccattaaaaggttgacttttagagtggccctgaagttttaggggagctttaaagaggaccattgtggacaatctaagtagttaactcatgctagaaggaaaggccaattgcccgtattatcagataaactactttctctgacttatggccacgtcgtcgtcaacgatcctccctcttcataccatgttgccaatgatgttggatgttgttgccaggagcaagtcaaagaggagctttaccttcaagtggtgggctcggggcaggtattatcgctacctcgcacatgatcaccaagtcaactcatgcaagaactccttctgttgcatccgttgttaccgctctggtcatcgagagcgacattgtcgcttttggtcttcctctcctactcctcgagttaactcctccgtacattgcaatcttcctcaacaatggaggacttgggccgaggtagtggccaatccttcaccaagtacgttgttagctaacgacgtcgccaagtctccatcgcaaggacatcacaatctttcgtcgact

SEQ ID NO: 156670 - DNA, 542 bp, Zea Mays
tgaaatggtcgagatgatcgacgtgatgcacaaagcgaaattgtcacacatgaaggtgatgaatgttctaagggagtctattggtggttcataaaacttgaacatcagcgaacatgacaatttcagcacacttgtggccatgggaatattgtaatccacatttatagtagagtcattttgccttctgataagcatacaatgtggccaacttatcttcagtgttataagacttggcaggtacctgaggtggtgtggtgttgggctgagaagaaggtttgttgttagcacccacatcaaggactaaggaagtatatttgttgaagcccctataagaaggcttgatgttgcgtgtttggctcccatctcggacctcctcctgcaaatgagcaagcacataggaagtatcaagatctctagggcattgaaccaaaacaacagaatgaacatcatctttcaacccatcaacgaatttagtggtataataaaggggatcaacatggggttggttggcgttcaattgacccactagttgggagaactgc

SEQ ID NO: 156671 - DNA, 415 bp, Zea Mays
gcggtgtccggcggcggagagtacgtgtgcgggctcgtggaggagaggatacagtgctggaggtggtcttcggggacgtttccgcagagcctgcggttctcggccgtagcggcgggcggcgggttcgtgtgcgggctggcgaaagactccggcgaggtgaagtgtttcggcggccgagaagccgtggggcgagagccgaaggggagccatgccatgctcgccgcgggagagcggcacgcgtgcgcggtgaaggcggggagcggtgaggttgtgtgctggggtgaggcggcggcggtggcggccgcgtcgccgacggtagcggggcgttcggtttcgtcgctggcggtgggagacgcgatcacgtgcgtgctgtgggggaactggacggtcgcgtgctggccgccggaggaggcgg

SEQ ID NO: 156672 - DNA, 981 bp, Zea Mays
agacaacccacatgcgctattcagttgaacatggccagagggagacgcgagaattcaagcatgtggatctaaagtatcgcaaccaaccctcatgcatgcagaggataagataaacacagtgaaggatcacacgcgaccatgtgggtcgagacaattccgtagttgtaggcttgaaggtggtagcgagctcaagtgtgtaactctaatcgcatcgtgtatataaggcatgatagggacccctaaaaggcgattggatcttctattagacacatctagaacactgaactcatctcctctgtaacctcaaactccagcaacacacaagacgtatggtattatgctccttagcggcctgaacctgtatacatctttgtgtcatgtcgtgctttgcatgaaccatcgagctacaatcaacatcgccgaccaccaaaagtactctacggtataccccatagtgtgttgtcagtgctagacactatcagctggcgcaccaggtagggggtgcaacatcgactatggatagctccatggctgtcaccttcaccaccatcgtcaacttcgctctgggtgagatgttccattttggatcaatctcgtgcatcgctgactagagcagagccccaccgcatcgtcgacatagagggtaaaatcaagagatagttagcagctgctccaactcggaagggtccatccactgggcctgaaatgactcccgcgagatccatggctagggcatgcctggccaaggcacaggccgtgccgactcaccctccggttcaggcgccccgactggtccctcaaccactgccacaagggtccttagccgtatggaacatgaccaataccccaccgggcatgaccaccctgtggtcttactcgttgaggcctagaaacatgaggcaaagcacctctaggcctagcaggacatctctggacatgaggatcatgaacaccatgagaagggcaattcctgttcttcta

SEQ ID NO: 156673 - DNA, 363 bp, Zea Mays
gacgatggcgtgccgccgtgcgcagtgaccggagttcgcgggattgggttggatttggaacgagggcacgctggctgttgattcgtgaatgagcggtcgcgattatatctggggaggaatggcatgcatcatcggatccacttttgatggctaggatttgaagccgcgtatcgtttcgctcgggtagttggtgaccgtagatgtgagatcctgtggtaggaagcaattctgggtttcattaaacgctgaccattagatcgggatcgaatgggcctagtttcgtatcgattcagaaagccttcgatctaatcgtggccatagctcttggattggacgaccaggatagatcgataccccttcgtg

SEQ ID NO: 156674 - DNA, 1078 bp, Zea Mays
gcggtgtccatgtggggcctctgtgtcatccttgcgcgcgcatcctcgtggagtcactgccccgtgggctcggtgtgctgacaaactcccacagctcgatcgcgggcgggattaccgaccatgccgagatccttgccggaccttgcatgccatctccgcacccgactcgcccacaaatagtgcccttcggcctcgtccgttcgtgccccctttcttcgctgccactactccacagccaccatcgtgtcgccgcgtccgcatcgccatagaaatcctcgattgagctattgttcgcgtcgtcggtgataccggggtcttcctcaggcgtggggagagtcggtcgtggttgtgctactcgaaatttgccgctgacacgccacaattccttgtcgtggtcaatcctcgccttacactgtgtccggcatcatcgggtcgccaaaactaggtatggaaacctcacccgtgttcgtcttgtttaacgcaacgtgtagagccatttaattagagtttggtgcgccttggcctgggatttgcctcgccggcggtggtcttcgccgtcgtcttccgttgggggtttggtcagggggaggacgacatgttgtgggcggtcggtaaacggatcggcggtccagaacatatcacggtgtagaagaaatctgagtcactggatcaatcacaggcggtgcagattagatggcagtgtactgtttcgtttggttagatcagggtcattgattcggtgatgaacggctcagaactgtattgcccatcggacgttggatccaaatctgacggccagagcgggtcacatatcctagggcgcttagatctaatcgtgacttttggtttgcgatcgaacgactgatatcaacctataccccttcgatcggtggttttgcaaagtagaccttgcgaaaaatagaaataaacccgtagtcctggcaactgaggatctgagtcttgggacttttatggagtagaccctgaacatcctgttaatagcgcgcgcagactagacatgtaataaaactaagaaatccatttagaaaaatgattttcagtacaaaattaattgcag

SEQ ID NO: 156675 - DNA, 568 bp, Zea Mays
gggcgcttaacaatggtggctgctagtagtcaaactgtcatttttggtcacagtctttcctcattggcaaaactgtccttgctctccaaggattgacggtggctatcaaggttcagcaaaagaaaagaaaaaaatggcaaaactcagtaatcttctgaataagaaaaaacaaggctgtttggattgctatagtcgtaatccatggagacaaaaacaatgtagaaataatagaagccggtacagattaaagttaagtgaacaagctgctagtagtatcgttgatagcggggtgaacgaagtttctagagccctcatggttttggtatggctctagaaaatatatcagtgcatgaagcattgaagcactgttgtttttgtatttagtactagtatgtattgtactagaactatgtgccttatagctggtcatctggcctggacgcctggacagaagttcgctggtcatctggcctggtcgttgtttactttggcgaactggattccactcatgttgaaaaaagatgggtgaggtggtgcaaaagtcgtcgcatgtacatgaggtggtagc

SEQ ID NO: 156676 - DNA, 617 bp, Zea Mays
ctcgcactgattcggatgaagcccaatggccggtacagccctggcccaactttgagcactagaccgagatccagcagctgaggaattcccgttttgtaaaaagattttgattggccaatgcagcagcagtggttgctgactccaagcgtctgcggtctctgaagcagtgaactagtgaagcgggcaggctcgcgtgcaggcaacgtgccgctgctccctcacatcacagtcaccggattggcatcttctccgtggccaacgctgacgcacgtggacgccaccacaagtcccctacagcagtacaccctcgctctcgccgatcgtcggatccaggtcgcgggacgccgggagcaggaagcaggcagcttcgtcgccaaattatttcctgttgcggggttcaggtcaggttcgcgcgcgcgggcgcgtcctggggcacaccaccgagattctgccaaagtgccaaccctgtgactgtgatggctcactttgccgtcttcaccagacgtcctggcccaaatggctcgctcattctgcccggtctaatcggcttccaaatctaggtgagctgttcagtcgattgatgagggactttcagatgaacataatttgggtttaag

SEQ ID NO: 156677 - DNA, 774 bp, Zea Mays
gtcaccctgagttaagtaagcgtgagcatgtcacactgtcttaagtcgttgccgacttaagtcgattgctctgttagtagggtatagtggtcaccctgagttaagtaagcgtgagcatgtcacaccgtcttaatttgttgccgacttaagtcgattgctccgttagtagggtatagtggtcaccctgagttaagtaagcatgcaggttgacagtaaacaatttgagtgcctttgaagtctttttattgatgatatatttcccagtttacagaatacaatgtcgtcccaatagcttttgaaatatagctaggggtaaaacttcctgagatgttctatgttccatgagttcccaatttccgtgccatccatttgagtgaggcgatatgatccaggccgagtgacttttgctactatgaatggtccttcccatagtggtgataatttgtgtcgtccctcccccgttagaattcggcggaggacgaggtctcccactgcgaaggatcgatgtcgtatggctttgtcatgatagcgcctcagagtttgctgatactaggccgactgaatcactgtattcaatcgttcctcttctagtacatcaacatcctccagtctagtagcctcagcttctgctatgttttcaaagattaaccttggtgccccaaacttgagaccagcgggtagcactgcttccgaaccatagaccatatagaaaggagtgtttccatgcaaagcccgtctaggttgagttctcaggctccaaacaacatagggcag

SEQ ID NO: 156678 - DNA, 277 bp, Zea Mays
gagatctcaggttgagcaccggtcgggaccgtggctcttcggaccataaataccaaccctcggggcctccccctcgtctcatccgcctgcgcacacaaccagtgcatagcaccttaatccaccatcggcgccagctcagagagaagctgggagccgccaccgtagattcgcgcccccgtcgtcgcttttggctcgactcatggtcgaagatcttcgtcttggtgctctggtgctcgtggctccctcgaccagctcaattgattgatagggagggagg

SEQ ID NO: 156679 - DNA, 1075 bp, Zea Mays
agcacgggcacactactagttgtttattgagatggtattgtaggtgggagatgcatttgcatatgcgtgatctggtgaagaaacaaaattttgcatgccatacacataaactgttcactatgcaaatagctatatgactctccaaaaatgcatttccttgttggagatagccttatgctatgctttgtgctcacttcacttgcgttgtattctgtcagtattttaagtcatatcttgtgttcaatacttttttagtcatcccctttgcgtgcaatgcgattgacctatctcaaacagtaacaaatatcgtacccatgttgtagcacatctagtttgtcatgtttgttcacctgatgctctaatgcaatctctttttgtctgggtatttttttatagttgtcagggaagaagagggacactattattatgttccctccttctgatcagcaatcactggaacttcatatgcttacaatgatccaagatcttgctgcttctttgttgatggagtttgagaagtgggtcttgcgtgcagaatccacaggaactattttgaagaccccattggattcacaatccagtcttggctcagaggaggttcatactttaggtgttccaagtatttttttagcagtgttatgttgatgatgcaaattgcccaggattgtattacttatacacgacaacatacttctgtatttttattaggtaattaaggctaaaaaaagaaggctgggtcgtgcgcaaaagataataggagattattgcctcttgcctggatcacctgtggacgccaatgcacattataccactgctatagagcttgcaagattgactggtgatgttttctggcacgctggagcccttgagggtagtgtctgtgcattagtggtaagcttttacataaagtcattctggttgttaaagttcaactatattcatcttgataagccacattccacatatcaatacttcatttgaaaatgtctccatttatatctaaatttcacttggcatgatattcatggcaactgtaacactcaaaatcatttttgtgaggtataaaaatttctcc

SEQ ID NO: 156680 - DNA, 318 bp, Zea Mays
caccaatacagctactttgccttctaattcgcaccgacggatgggtaggctattagtgggattctaccttggcatcacagcaccatctgcccttgctatctcacaagggtcccgtcgcgccgtcgcaacgcgacaatggctgttgcttgctgccaccgccttttgccttgtcgtcgccatctaccgtcgcatcgtcgcctgccctcgctatcccacgcctattgtcgcctcactttcgtcattttgcggtggagtcactgactctccacactaacgtgttgatgcgcccgcttcgccctaacgtccagtccccgccag

SEQ ID NO: 156681 - DNA, 2607 bp, Zea Mays
gactagtgatacataatatataagctacaacttttaattctaggttttcttattctgggtaaggcactagggtcgatattatcttagttgacctattcgtttccttagcgctgagtaggacagggtggagtttgactaggttctaagttctatgggttaagacttttcttcactcgccgatatatatgttcaaaggccttacactacatttatcaagtccccctaactagattttactgtggaatacttaaaatattgggtaacttattagtttgactatattccagtggtttctattgggatctatttatacaatgcatacttaggtctcctagattgaactcatgacaatttggattaggaatggggacatgagtgttgtggttggctatattattgcctttgactatgatagtctaggtcactatgccaatgaagaatcatccgttcattggtaagattgtttggcattctagtcggtgaaatgcaagattcatatcaagacttaaaagaaaagttggcaaggatggagaggacttataatttttaattcaacttggttaactagattttagagtataatacttagtgaattgcttaccttaagggttcaactacctcatgttggtcagacaagatgtatatgattaaaaactgatggcagtctagttagggtgatcagtatgactcatatagtaggttgctcgatacttcagttgacaagcagagaggataacacctattcttcaatgtttaatctcgttaagaggacaaaagcttataatatctatttataaggcatggtagtcgacaaggctggttgcaatgtacttgatctttcagtggttgcagtagttctctagtgaacgtgcaagcacattagttccactaaggattcttggtgaagctagatctaaggtgtccgaaaaacgggcagggtatgaatagggttggtagcatatgtacacaacaaaatgacacataagcataagttgcttacctatgtcttggttatggtgaagctaaatagtaactccaagatccgatagtcctagaatggatccttcaacttgtgtagcttgcggtcatgtactattatagagagaatgaccctaagactctaacaaaggtcacaaccaccaccaagattatgcaagtttaagcgaccaaggattatgatggaacaagcaagattgtaaagggaaaagcataggacgacggagctatactagatggactcaagcactaacactaatggtggccaaccattcaagggtccactagggaaggtcttcactcatggaaaattctaatgtggtttggttggttgtgaaacacaatgctaggtgaaacaatggctatgagggcttgaactacgatagagaaattggcatgcgttctctctatgaatgatagcaagaagaatggaggaagaagacaagttctaggaggaaataatggtgtggtacaattacataactaaagcagtggggtgtcatacacgacgacaacacatgatatgaagcatttccttgtgcacatgggcacaacatggcaaagaggaaggatatgtgacaacatgtggcactaaagttccgagtatgtcgagcatctagttgggtgaacaactaacctagttaaatgaccaaatgattgaatcatttttattatggttccagacttcacaacttctctattcttctcatgatcaagaataaaattttatcgatatgtctaaacgaaagttttaaatttgaacaactccaactaaattaagttgggatacctttgtatgccatttgtacctaaagctctataaatcttggttcaacttcttactaagtttccacatggaatcaaaatgtgtttgctcatatatttatgcatttatatctcctgtcacaaaattagagttccatacaatctgagtataccactcatatagactttgggatcacttggattaccaacgagatctatgtcaaactaaagctagagtttagtgctacaacttttatctttgaactttggtaagcgtttaattgaaataagcggttacttgcccttaaaatgacatattaataaccattcatgttagatatttttgcactaaccttatgttgttagagaatatgatatactagcttcttagtgaggttaactgaagggtcttttaagtctgttggtgaaacaatatgcatttgatgtgtgcaacttgttttggagcttgttcttaatcatttttaaaatttactagactagatatagtggggattaaaatgcatgaacattctcactcatgcatggtgattgatgttgttcatgaaacacatacacttaacatcgaggttgatatattatactagcatacaacacgtgctaacgctatgattccggggagaggagggaagggttcgacggtggcggcggcacgagtgaaggggggtggcagggacgatggggagggacgaaggataggggacgatctaaataatattgttcattggatttaagtaaggaagagagggtacatcgatctgaactgttggttttgattgtctattaagtctgggtgtaatttgtttggtggatttagtggaggttatg

SEQ ID NO: 156682 - DNA, 498 bp, Zea Mays
gtggatttttccaaacacatcatattcttgtatgggtgttgtatctaatgcacacctgcatgtctaaagtattctatttcattcacacttttcagtacagtaacactcgtatctttagtttaattatcctgtgcctctttagacatatctggtgctgttaagttgtttttttctgtctccatatgtcttcgtcttatcttgtacccttgcataattgtttagatttttaataagtcttctagtgtctttcttgagccgttgatcttctagatcacctctttgccttcatctaagttcacacccgagcatcctttgaactatatctaaaacattaggaaataatgttagctcaaatggtcacattgatcatcaaacatcaaaactcgactatcaatggcccgagtctatttttcctataatatctcctttttagtgaatgacaacacaatcaaagcaagcaaataattttgtgaacctaaaaacttctccccttttgat

SEQ ID NO: 156683 - DNA, 651 bp, Zea Mays
gggtattatggctcataggtgtgggctatagctcaggggttgttgtctggggccactccagccttgcgttctttggcttccttcatgattggatagtctcttgtggagtgactagtgtcttcaccatggaaaacacagtagagcctacattgctgcagagaccctatgccttgtcctcttactgtgtcgcccccagccttgttgcagagggtagtcacgatgaggggtgggggacttgaccttgttgctgttgatttgctatgttgtgaacttggagctgttgcttgttattctcctggcgtgtgtggtcagactgttgtcctctcgtccatgatccgctggactgtgatatctctttcgatttgctttgggacttcactttcctaaaatgtagctcattggatcaggcgtttttttcaaagtgctagtataactcttggaccatggatgggggggtcagttataccagtagagggatagctcagctagcgcatcagttttgggtatataaccctcgaagttgagcaagaacttgtctctaagggtcttccatgaatcgattgatagtgggggcagccttgcgtaccatgtgaggggcgggccttccaaggtgatgataaatgacttggccattatatggttatcaccccc

SEQ ID NO: 156684 - DNA, 1327 bp, Zea Mays
gggcagtctagctcaatcaaatgggtcgaggagcataaggagaacctaaggatgctgaaacgggagagcagagagcacgaacagacctagaacaagctagccacggtgagtgctctttcacggtggtggaaaacagatttggggagaaagagaaattagagagctatggtggctaatcggaggcaggagcgggtgctctggcttcgtgattatctaacggagctagcggtgtgcttaatttatagtgttcaagaacggtggcctccaattttggaatggcacgctggcgatcggagaggaagaagatcactggtggcgcgatcgtgccgttcaccggtgcagtggttcagagagggtaagcctaagtgtgccacggttactaccgcgtagtgaagagtcacggtgtggcataattgagattgccggagtgtccacgatgacaccgacggtccggccaggtagcaacggctacaggcatggtgataagcttcccctgcaaccacatctgcttccccgcaagatcttttacctccccgtggatatccacttcgtgcccagcacgaatcacggcgaccggtgcaaattcggacgtgcggatcacctgcggtgagggggactgaaccctgcgatatttcaatgcactgtaccattgcgaggtcattcagttggtttgacaggggatctttagaggcattgttcttgaatttttgcatgacaacttgctaatcggtttgtagcaaacttgtagccctatatataaactacaattctgctgtagagatcatgctcagttgcttacttcttggagcatgaatcaagcctaaagttcttcaaaattcactagcagtccatattcagtttttatattatctgacagctaaactttagggccaattatctccatctttttgtataacacaatgcttaatcccttaagcaaagttgtactcctatagtagctctagacttttgatgtgttgaccctaggcaaattcctattatttttagaactccagagctccaaagtcaaccttgtgcactgaatttcagacttagccatatgagcactagagtggcctttttgcaattaggcccaaatctcatggtttgtcttgcaaatcttcaaatatgtgaaccatatgacttaaggtaccctaattccttggtttttgcacttaggtccaaaagtgtacaacatttacataaaaccccctagggtttcaatccagggttttccatgggtctatttagggtttctggcacttctagggtttgggtgctatcaaatctcattaaaggtgatatcttatgattatttctcatgagt

SEQ ID NO: 156685 - DNA, 492 bp, Zea Mays
gtgaggacagtgaaggctctgagcaagaggaggtcagcaagttactgattcgtctatttgttttctcattttacatatcattactcttgcatttgtaaacaaatcgatatgcacattattgtgttatgcctacaggatttccaagttgcaaaaggtgtacgtagccacaactcaactcatgttgctgaaaaaactatgcaaggaacacgaggacataaaagggttgtggcccctggtgtaaatgaacaccaaattagaatcactaggcaaaggagtgctaccataaaccaacaatccttcctaaacctaactaccactacacatcctagttcaacagctaccacaaaccaagaatccacccagaacattacttctgcaacatgatttacttcaagtgctgccgctgaacaaaattacacccaaagcctaactgctgctgcacaagctaattctcccatacaagctgacatcagcgaccacattgcaaatgaa

SEQ ID NO: 156686 - DNA, 559 bp, Zea Mays
tttagctaaaggcatgtccagcggatggtgtcatcttcagacttatcaaatgagaatgatgaaatcttcctttcacagctcaaattgttcgaagtgtatcattttgtacatgagtgtgaactcggtggtagataagtgattttatggtgttattattgacttatgaaataggctattgggacgacaaaacaactccctaggtctagtggataaattgatagtttaggaagttgctacatatgagaacctcgtttaaggaattgttgtagcatgatttttggttaataacattctaaattaattgtagggactttttgatttttgtgaagagattttttttttgatggagtgggccgtgggcgggattgcgggaagcagtacagagagatttgttcgcgagaaagtagatctaggccgttcgccattgttgggctaaagtctgttggcgcatagtgaagctgggtttagaagaaaaaaaaggtgacgatggtgatggtggagtactacgtggctggcgtgtatgtcgatatgatccccccgagatggatcgaatttaacg

SEQ ID NO: 156687 - DNA, 532 bp, Zea Mays
ctcggtgttgtgtaacaaggggtaacgagcgggaggcaggacagtttcttaccggcaatggcgcggcacagagctccaattgcggaacaatggtgtcagtggcggaatcgcacggtggcagatgagatccacgcggaatttcgcccagtcctcactgcaacgaacgctcccgcgccacgcataacctccacccacgcaaattgaaccgcgaccgagagttccgtggcccgaatcgaagtctcctcgccggtcgacggtggcggctcaaacttccttcgctggcaaatccgtggctccctaggtagtctcaacgaaaggcgagagggtcgcagcaggaggttttatacccatggtccgagtgccctgtagcccaccattagcgccggtctggtagggaggtcgttgcgctcacccaggagttccgttgagctagctccgattgagaaggggggaagaggaacagcgggtctgggtcacgagcacgctgcacgcgtgtgtctgcggaacggggcccacccattcggtctcccat

SEQ ID NO: 156688 - DNA, 453 bp, Zea Mays
cgcgggtggaggagctcgacaacggtgtgtgctctggtcaatcggtagtggtagagctcaatccagttggtcggggagcttcatagggcagtgtaagtgcggtgtgtccgaggaattggagggaggtgcttcgggtggctctatccatgttcataagcgacgctcacgactctagcaagggtgatctcgctgttccggtgatgtagagctttagctcgtgctttgagaagctttactgggctctggggagactacttgtggggctggttcgggtggagagtgcctagacgggcctggccacggtgataggtgctcagtgtaagttggtggggggcggatctcactaatcccaagagatcactagtgataggtctcgggcaagggtaaggggagtgcggaggagtgagaccgagggctagggcaggctttatagacgagggcgcaggtggacga

SEQ ID NO: 156689 - DNA, 948 bp, Zea Mays
cgctgtggtgcgccgacagaaggggcccagtggccagcctcacccactatcgcccgcgctgcgacgaccccgactagtgggccaggcacgtcggtggctcccctcgctccctccctcaggtcaccacctaacccgtgcgtgcatgttacgccgccaaatgggcccgttccgtcagctcgttgtcctccccattaccacagagtgggaccttaatggaccgcacgatttttggaggagcagttccgattaacccctaaatcgactggcactatatgatggcgtgtctgaacttcgcttccccttcccatcttcgtgactcaacgataagggcgatcccatgtgagataaaggggggaagcaaggaccgtcgccgtagatactcgtcgacagtgggattcgggctccaacgaggctactcgaaggttggtctggtcgcatagaagctatgtgagggattaattggagcgaaactagctgaagccataggaattctccgtcggtcgaacaacaccaccgtagggccgcaactcgccgcattcggatgcgtaggcaataactcggttgtcttgcatcaaaacacaacctagtccagtgcccgaagcatcgcaatatacatcaaatgatttggtgttgtcaggctgtgctagcacgggtgctgtagtcatgttgcctcaatgcatgaaatgcaccttcacacttctaactccaatcaaatttcactcctttcttcaacaattcagtcattggtttagcaatcctagagaaatccggaatgaatcgccgatagtatcctgccaatcccagaaaactccaaatctgccacacggtggtaggaggcttccaatccatcacttcttgtactttttcaggatcaactgctatcccaacctgagaaatggtgtgacccaagaacttgatctcccgtagccagaaatcacatttggagag

SEQ ID NO: 156690 - DNA, 456 bp, Zea Mays
attttgggagcctgctttagtggattgagcagtcttctgaggaagatttagattactttgctgcattggatttggccgcatcggagtccccgccacaccctgatgcgtgcaaagagtctgctcccctagctggggcgatagccgaagaccaccgcaagcgaaaggtggtgtcgaagcagagtgttggtgggatgtcacaaagtgggaggcgttgccggatgagtatggagcgatctcgtcttcgattagatcagggtagctaatgcaatttactatcctcgacggccggggcgtgtattggggagagggacttgcggaatctatttgagggcaaagagttgaagatgatgttgtttaattttcaggaggcgggtcttattccgaaggctgagctgaagtagcatgtttgctggcctcgctctcatgttgcgatagtgagtgaaaacgctaccctcc

SEQ ID NO: 156691 - DNA, 453 bp, Zea Mays
ctgacggtgaggatgacgatgatgattccagtgatgttgctgctaaagatgatgccatgcttggtgctgatgctacggtgaaccttcgaagcatcatggggcagcgtgttcttagttctcagcctgaatcatcagagaagcagcaacgccataatttgttccagactttctttgccatcgagaatcggtgtgcacgtgttattattgatggtggaagctgcaataatttggtgagttcagatttggtcaagaagcttggcctgaccacacgtccacatccacatccataccacattcagtggatcaatgactcaggcaaggttaaggtaacacacatggtacgagtgcatttctccattggtatgtattctgattatgcggattgcgatgtagtacctatggaagcttgttctcttttgttgggtagaccttgggaatatgatactgatgcac

SEQ ID NO: 156692 - DNA, 593 bp, Zea Mays
gtcggcgcagtcgcatataaacttggcctccctgaatacacctcaatacacccagtttttcatgtgtcccttttgaaaaaaactgtgggttctcagtgcaggaaggtggctactgacaatggagaagtaacacaggtcctggtcaaatggtcggagtggccagaagaacttgcaacatgggaaatggaagatcacctcaaacgtcgttttcctaaagcgtcggcttggggtcaagcctcttttcaagggggaggaatgtcacaggactggacacaaacctgaagccggagaaaccaagacgggagagaaggcccaacaggaaatgggctggaccggaatgggccaaatgacgcgtgaagcggtgcccggggagcagtcctggtttttagccagccacgggaagcgtaggatttttgggttggaactgaagtctgaataccggctgcgtccggcgatatggtgagagagagctaggctcgatctctgtaatagcgaattcccacctgtactctggaaaccccagttaaatttgatcttcgtgagaggaggagagtaccgggaacggtgctcgttatctcagatttggttcctgg

SEQ ID NO: 156693 - DNA, 378 bp, Zea Mays
gatatcatctttacctttgtcatctctacatatcaccttgttgcttattgtatacctgccctataaaattttcccttttccatctcaaattgagagttgtattttacccattttcccttagatgtatcctattctttgccacttgaactttcaactccatcatttaatgtgttttgtttgatatcgtctttacccttgtgatcctaccttgatgttgtcgtatgtgtgccacttaaaacctcccttcacccctctcaattcgagagtggtgttttacttaccctacgcttggtcataacctcatctttgccacgtgcaaatcttgccttaacgccattctttgttgtactcgtacccttggttcttctatacctttac

SEQ ID NO: 156694 - DNA, 539 bp, Zea Mays
ggctcctggatgcaggaatggttttacgtgaagaatgacctaagtcaaagggaggatgtgagagggattattcaacgccctatatggtctcgcttcggcattaagaggccagccgctgcccttaggaatgatatacaaacatgacaggcatctttcaatacggtatgtacttacataggcacaagagacttggtccaggagcacactacttacagagtgtggtcacttgcaaatgggtgggaaatgtcgaaggaggctgttgctggctctagccaaggtggtttagtctacctgaagtataccttcaggtacaggagccaattgatgaaccgaatgatgactagctaaatgccatagaagcgactagtgacgagctgcttggagcatattcaaaggccaaagatgaagccatgacaactgccttcggggcttgtggcaaaaagagattaaatagagtgttcgaagttatcgggtttgtgtactcggactactgttatccttcacagaaacaagggaaaaagaggaaagctgctacctcg

SEQ ID NO: 156695 - DNA, 659 bp, Zea Mays
ggtccatctctcaacttgatgtcaaaaatgcctttcttatggtgagttgcttgaggaggtttatatgcagccaccacctgagtatcctattcctgagggcatggtttgtcgcctttgtccctccctttatggtctcaagctggctcctcgggcttggtttcagcgtttcgcttctatggtcactattgctggtttttctgttagtagtcttgatcctgctttgcttgtgcacacatcatctcgtggtaggactcttctcctttgtgttgatgccatgcttattacaggaaatgatccttaatacattgcctttgtgaaggcatgtctaagtgagcagtttcttatgtctagtctgggtcctcttcgttattttcttgggattgaggttttctctactccagagggcttctatctctctcagttgaaatatattccggggcttcttgatcgggttatcttactgatcaccacactgttgagactcccatggagctcaacatttgtcttcgtgccactaatgatgtgcctcttttggatcctactcgataccatcacgttgttggtagcctggtctaccttggtgttactctcctagatattttatatcatgtgcatattctgagtcattttgtatctactccaactcaatttcattacgg

SEQ ID NO: 156696 - DNA, 358 bp, Zea Mays
aaaatctgaaaaatgtcaggcaacaccaatgctttagacttttgcctttgctctcacaacacaaaaatcacttacctcattcccttttaccatcttctctacttggagagttgttaccattgtcacttcattcaatgtaagattatcaccctccaactaaaccttgtgaccttgatccacaaatgttagcaccttattcacctagtcacactccatagggttgtgatccctcaactagtcatagcccaagattgcatcataaacacccaagtccaacactcccatacatgtgataaaaatatgaccagcaaccctccactccacagctgatactatctggttagggaccatcatctcc

SEQ ID NO: 156697 - DNA, 661 bp, Zea Mays
cgggcacggtcctccttcggtgtcatcctccgtagtttcgggctcactttgtattctccgtaaccaaggcccatctggctaaatacacgattcaaacgaacatggcctcctcgtaactctatacctttctcaatctcatgctccattactggaccaacactctcctctgcttccttttgtctccgcaacaaaagtatccttggaacggtcacccagctccacaacgtatgtaggactcaatatcggtttatcaaaacccgaagcctctatgggtgaccggccaaatagaccacccacacccaagaggctagattccgcacgccacatattcttcgactaggtcccggtcattgcagggaaccacatcaaaaccaaaggcacaatcattatggtctttcccaccgaccgagaaatgcgggaaggcatcaaacagaaacgaagacataatgctatgcctaggccaacctttgtcgtcgaggcaacccacataaaaccagttctcagtccactccccatttgttctttgcacaaggaaccaactctataaccttatctttcgttttccctatcttccaagtgaacatacaactctcaaactgatcaacaagccctcgagcggcccttttctggcaatgcaaatagtagtgtttcgaagacctca

SEQ ID NO: 156698 - DNA, 365 bp, Zea Mays
atttggcgtctgccccgatgagtataaatcataggtacggtgattggctacatggtctcaatagccgagccaaatcacggttaatggtaggggttgctgcattatgctgggcgatatgacttagtataaatgatatagtctttgaaaaatgttcgcctaaaacatatatgcaggtgctttgtaggggggacacactggtgccggttctgggtgcagttgaagaggcgttacaaggacaaaaaggccctgagagacgcatgccgaaacttggagacgacaattgtgcagatcttcacttcctcgggatggcgtttctgttataggattgcatcgtcctaattttgtttcaagtattagcattcttt

SEQ ID NO: 156699 - DNA, 365 bp, Zea Mays
ggccagtcagtcaatcctacatccacctggaaggcatttgtgctcttagcaatgagtgcatgataggtaataccattgatgagacacgatgcttcgatgggaaatatgagggacaagtgatgatgctttagtaggagacatgaggggagagcgatgttgcttcattgattgggaagaggcaacactttggcctctagcggaggcggtgcttggattgttgggggagctatggactcccaacttgaaggtggtgcataggccaatgggtcttgacttaggattggcgagggatggactatgaaaattctcttggggttgagggaatggatgaacgaatggatttctataatagttggacaaccaaa

SEQ ID NO: 156700 - DNA, 403 bp, Zea Mays
cctaccatccccagactgatggacagacagagaggacaaatcaagtactggaggacatgttaagagcttgtgctctcaagcatggtggaagttgggagaagagcttaccctatgctgagttttcttataataatagctatcaggccagtttgaagatgtcaccattcgaggctttgtatggcagaaaatgcaggactcccctatattgggatcaaactggagaaagacagttctttgggcctgaacttatacaagaggcagaagaacaagttcgaatgataagagaaaatttgagaatcgcacaatcaaggcagaagagctatgctgataataggagaagactactggagtttagggagggtgatcatgtctatttgaaggtgtcaccactccggggtatgag

SEQ ID NO: 156701 - DNA, 428 bp, Zea Mays
caagtcctcaacagatggtaagccgaactaaaattcaatctggtatccaaggactcgtgcaacttcttccaataccgagaagtaaactgtgacccccggtctgacacaatcttcttaggcacaccatgcaggcatacaatccgtgccatgtacaactctgccaacttggctcctgaatatgtggtcttcactggaataaagtgggctactttagttagcctgtccacaatcacccatatagaatcatatccagcagacgtgcggggtaatccaacaattaagtccatgccaatctcttcccatttccactcaggtatcttcagtggatgcagtagtccggctggcctctggtgttcagccttaactctttgacacacatcgcacataaccacgtgtgcagccacatctctcttcaatccataccacca

SEQ ID NO: 156702 - DNA, 419 bp, Zea Mays
ggcctgccaagtcgggtggatcatcgatcgtcggaggaatggaacaaaaccggccggggcttaacaacgaactgcaccaatcaggaacacacacacccacgtagctggataggacagctaaggtacttgcttcgaaggatatatataagatgttggccgtgttttgctacggttattatatacttaaatataactattgtttattttctaaacactaagatacgtagatacgtggtctggtagttaacctaaatttctaaagcaaagaaggagtgggttcgagtgctcgctcgcactattttttacacggtaagtataggcacggaggtcaggtgctacactaaccatgcttacctcgtacgtgttgtgcccccctgttgccaattatgagcagcctttacaccttacttaccaaaaag

SEQ ID NO: 156703 - DNA, 841 bp, Zea Mays
cgagccaccaacgctgcctcaaattcagctccttctgagtgaaaatatacttgagacttttatgatcggtgtaaatgtcacaagcctcgccataaagataatgcctccacgactttagagcaaaaaccaccgcggccaattcgagatcatgagttggataattcccctcatgcttcctcaactgccttgagccataagcaatcactctgccttcctgcatcaacacacagccaagaccaattcacgaagcatccgtataaactgtgaaacgcttaccgctctcaggcaaagctaggataggggcgtccaccaacttgctcttcaatgtctgataactgacctcgcaatcactggaccagacgaagagaacacccttctccaagagtctagtcaaaggcttagcaatgctggaaaaatttggtacgaagcaccgataatatccagtgagccccaagaaacttcggatttcagagacactagagggtctcttccactccaccacagttgcaacattcttgggatcaactgcaatgccctgctgattaatcacatgccccaggaaagccacttcggacagccaaaaggcacacttcttcaacttgccataaaactgattcttccttagggcacccagaacgagacggagatgatgctcatgctcagcctcagtctttgaataaatcagaatatcatccaggaacacgaccacaaagtcatccaataactcatgcaacatcctattcattgcttccataaaagcagcagaggcattagttaagccaaaagacatgactatgaactcataatgcccatacctggtgcaaaaagcggtcttctcaat

SEQ ID NO: 156704 - DNA, 2444 bp, Zea Mays
ctccaagagaattccaatatttattaatcaacaaacaacatgaagcattaacattacaggaagatatataccagttcttttctcatctgtttcttcagcagactcataattaggatccatatgtgagtcaacatgcacttccagaacttcattaatcctgcgggttctttcctcagaatcgttgagaagctgcagcttttctacatattctctaagtgtatgatacagtcaaggatcacaaaataatgaaacatgcagtacaagtaatagcctatagttctataatacaaataaagctgtacttgattattatgaatattcgcaattcctgagcagaggattatgagctattggaagcatgcctctagcattaaaagacctttggcgaagctatgacaagaaaatggagctgacctaagttaaataaattataagtgaagcataaccaatcttgggaaggggtgaataatggtccagaaattaagaaatgacaattgagcaaatgaaaaacataaaggcatcaccacatcatagtatggtctaataggatattcctttctgcgtccagtttcacttgcacggtcacgaagatgcccaagcctctgcttttcattttcaaaccactgtaaaaattaggataccagtaagtcacgtttgagatcttttcaagaaaaactgatcattgtatacatattgagttgtccttacatcattcacttttacagattgcaatatctttgctttctctaggatatccccctgcattaataatacaaaacaaacacaaatcaaacttacacaaatctgatgggccaaaacgaaattagatcataagtgttcagtcccatgtagcagtaccacttttagtctgctaatcacgccacacttcatgctctgccttaaacgtttgcactcttcctacagaagcaaatgtaaatatcaaaaagaggtaaaaatgaatagccaatgtagttcaactaagagttccgcctctaacttgtaaggaagaactacaatttgatcatactctcccttgggttaaaaagtatgtgatcatagataccaagcattcaacaatccaaactagacaataaaatcagataaggactttaaaaatgcaaccactgactctgggaattaaacatcagacaggacactgagcaaaagatgttaacctctgtaaaatcatgattagatattgtatccattgtaataatctcctttttgtttaaattcaatatctcgagtgcaaaatttgtcatcttctttccaatgctatacttttctggaaccttgtgcgttcctgaagaaagaaaatgaaaaaaatgctcaccatcaaaacaaactataagaataaatttgaagtaaattatcttaccagtaacttttactagacggtatatgtcttgtttctgatacacatcagaaattttaatcctcacaaaaccaccatgaattttgtctgagaatttggcatcatcaactaaatcctccatcaggctgcgcctcataaaaatcaaatttatattatgcatgtcaattgctgcatagtcctcaagattaacttgggtatctctttccatctttctatggatctttctcctcttatcaggagaaaattttgcagccatgtcattgtatccattggtatctacataagctgaattgagatcgatagtcacttgtctactatcagttactgttgaagtctcattcataagaaaatgcatttccaaaagctttaacatctcaaagtgagcaacccgtgctttcctgaacaagcgatgaagtctcaagtcacaaataatttggcttttcctctgaggatcgcgaaggttattcttcttgatataatcaagcagaagagtctgaacatcaaactgagaaatgaaagattgatcgccatctctcatatgtcctacaaactccagtagctctggtgatgcccattttgtgtttgctggcaagggcactgattcatttggtacttttgtgtctactggcaagggtacccatccatttggtacttttgtgtctactggcaatggcactcgttcatttgtcacttctgtgggaacgctctcagtatttgtaattggaagctcgaccttttttgcaggaacactacaatctttatttaccttccggcatttttgaccctttttccttgaattagttcgccttcgttttcctgaggagcagtcagtaccagcatcatcatcattattagcgtcatacaggtcatcagacgactcatctttttctttcctagcagaagtgctaggaacattccatctagtcttggcaatagtaagttcttccaatgttaatgaaagcttccctttcagatctaaccaatatagcttgaacaggtactcccagctgagtatgtcatcaaaatcaacctgcaatagacacataacatgaaaacgaaagggtcaatt

SEQ ID NO: 156705 - DNA, 706 bp, Zea Mays
ttgtttaaacaagaaggcaggggctcatatgcaatttgtatcggccgaaggggtatctgatgactggatccgtcggatccatgatgtacgacgatgattaaaagcaaactggactccatcggcggtcgttagatttaggatctagggtcgataagaaccgagtgtaatggaccatcaatccgttgatcggcgacccgcgctaaacacatcgaatggttaccccaccatctaatcacacgcgtcggtagcagatccaacggtggagataggatctggcccccaacttctaatcctcgcgctcctcctaacatcaacggccctgcgcacgccaaccctttccccggtcggacgcggcgccgccgcccaaatctacggtggagcgccgacgacgcatgccgcactttgctcgttgaggtttgattactaaaattgacaagtgcaacttgaagtgtatatcattgcgagtgttgaggaggtattattaccggcaatgaagtcacgtagccccctgacgacggtggacggtggagtggcaagagagacggagagagtacagagagggcgaggcccaggaggacgtcagtgcatcatcggccaagtcaacagaaggaaaggggtgagtacgtggttggatccttgaggatgtcctcaccggagaacaccagaacagattgacgcactacaacggctgggcgaaggagagaac

SEQ ID NO: 156706 - DNA, 397 bp, Zea Mays
ttcaagtcttggtacatcttagtgcttccgggatgaatagaataacgactaagatgtgcctcctcaagaatttgctggcggagttcttcattctttggcactactatgcggtttttaaaccatatcacaccttgatcgtcttccttgaaacatttggctgttccagcccctatcttctctcgtaggtgcttcatacccagattatccttttgagcatcaattatcctttgcaaaatgattgactcaagctttagctgattcagagtcccttgttggattatccccaggtttaacttttccatctcttgacacaaagtgttgtcagaggtcttcaccataagacagtggcaggaagccttacggctcaatgcatctgccacaacattggctttgcctg

SEQ ID NO: 156707 - DNA, 893 bp, Zea Mays
gtcttttaggcgctctgaacaacttcccaatggtacagtatccggatcagaacgctaggttcagatgtctcaccgccggcgaccgtgcgcccggattcatgcccgccacggtgattcgtgcccagcgcagatggataacggcgaaggggtaagaaatatcgcaccgtggatgaactccggccactattctactccggccgccgtacccgcctgagtcacggccgcttcggatagactcaccggagttagccacctcacgaccttgcgccacgtgcctgggtgctttaacgatgccaccgtgagtcaccttagcccatccagtgatcgccggtgagctttccacggtaaacgccaccaattgcttgcgccagtgcacccccttctctccgaccgccaccgcgcgatctcaaattcacgggccaccgctgaagggccctataaattgagcacaccctcggctccgctatgtaattgtgcactcaacacacccacccgtgcctccaattactcaccagagcccccgaattgctcagttcccccaaatcagttttccgccaccgtgaacaagctctcaccgtggcccgtgcactccaggtccgatcttgtcctctgctctcttgtttcagcacccttacatgcccctgatgcttctcgaaccgaccgattaggctagaaccccttagatccccggaaacacttcatgatgtccattgtgcccgccgtcaccgtggacagggtgatgtagagctcaaatctagcaattaagtgaggggaaatagtcgcgtagggttgaattcggtgtccagcaaagtggagggctagccgttgcttagtttggccagtacaagcttgccggagctcggcctagcgccgttcgccgtcgaggactgcag

SEQ ID NO: 156708 - DNA, 1085 bp, Zea Mays
gccacgcccttttgtgaaataatatggcccaagtaattcagagaggtttgtccaaaagaacacttgctcaatttcataaataacttatgagctcggagttggtagaaaacttgctgcaaatgtgaggtatgttgctcaagtgatggactgtaaatgagaatatcatcaagaaagactaggacaaacttgcgaagaaaaggttccaaaattgtgttcatgaggcactgaaaagttgccggagcattggttaatccaaagggcatcactcgaaactgaaaatggttgtggtgggttttaaaagttgttttgtgttcatcagtcgaatgcattcgaacctggtgatatccagacctcatatccagtttagtaaaatattgggtacccgctaattcatccaatatctcatcgataaccggcatgggaaagcagttcttcactgtgatggcattcagcttcctgtaatccacacagaaacgccaggatccgtcttttttggactaggagcactggggaggcgaaaggactagagctatgaacaattaatccagcctgcaacagctctttgacttgtttctctatttcatccttgtggagtggggaataccgatagggtctggaattcacaggagcggcattgggtaataaagggatgtggtggtcatgtattctagacggtggtaggactttgggatcttcaaagacatcctgaaactcgagcagaacttgctgtacagctgctggaatagagggatcgtgtgtatttggcaacacctccaccactgccatagccccaatgtcatttccagctgctcatttcagtatttttttagaagtggcaccttccaataccgaaggaggaggaagcagaccttgtaaatgcacttgcttacccttataagaaaaatccagggttcgctgctcccagtgacaagtcatggggcttaggggagcaagccaatcgtacccaagaattgcatcaaaagagcccagatcaaggaccatcatgtcagtgtgaaaagtatgtccctggatccaccattccagctgagacactgagtggtcagtaattagagtctcaccatttg

SEQ ID NO: 156709 - DNA, 1220 bp, Zea Mays
taaataccggacactcctcaggcacatgattgtcttcacaaatttcgcaacaaagctcttcacggcgtttcttccccatgtccgataccccagatgcaacgtcggccaccctttttttagctgcctcggactgaacaccactactgcgctcaacagccaccctggcatcaaggcccagcgatgaaccagacgcgacgaaccgaccgccacggccacgccaggtaccacggccacgggcttcccagtttgcacgaccgcgaagcgaccagatgccagcacccgaggaacgacctcgtacctgttgacgacggcgatccatcactctccagccatccccctcggcgccttccttagccatttccccagagagagcagtcgacttgagaacctcggcgtacgtcctacgaagcggacctggcggctgaactggcgactgacgagaaccaggcgagtggacagaacgcttaggttttgacgagctggcaaccctttgccgaagcaaatgcaatcctgggtagcggctagcccagcttctgctggtcggggctaacaagttgcaaacctgaccggtcgagtggcccacagagtaaaaaggcccaaccaaaacatccccgccagacagcttagccaaaccgagtgactggccggcggaggagaccggccgagtcaaaaaaccatcgcatgcctgtgcagaacgaccataacgaccatccggatcaccaggcgaaaatatcggtacctgacgcattctttccatagatagagaaactgaatttgaatttgaaatgcccttagaagacggatcaatatggatgtaattcttcctcaatgccggcgagcaattgcgactagaggctaccttccttgccgaagccatcacatggccgagagtaacgactgatggcttactttgctttggcaagggaccttcccagggattaaacgcatccgcaagatctaatgtacgtacctgagtttttgattttgacgctgagcccagacgacgcttctcttcgtccgccgaaaaccccatcctcatgtacgttcgccgcagatcatcgtgagctgcaagatcgtgagctgcaagagaacaaggagcacttacctcggacacagcatggcgccctgcaaccctgtgataaaaatcaacgcatcgctccgacagcaactgcctagcagcctgatcctcctcaagacggattgccgatcgcctaatcctt

SEQ ID NO: 156710 - DNA, 769 bp, Zea Mays
gagtggatccaatgcccgactaggactgactcattgtgccacattaattgcgtctggtgccaagccacatatggtgagtcagtccaccttccactcatgacctacggactcttaggcttgcggcccactcatgacctatcgagcctaggcctgagcgtgttgggcgcctataggccccacaatacgatgatccacgtcgagacccagactacgacaactagggacgacaatgatggtgccgaggctcttcgccgcccacgccgctcgccataaagagaacgatcagggacacctggacgaccgaggcaaatatggacaaacacaaccttataaggggtccaaggtagaacacctagttttatcatggcacaataactccttctcaaggaagctactggtagccgacccccgccttggcctataaaaggaggagatcagccacgaaatgaaaggagggccatgagaggacactcgacaaaagacgaccactcacgtatatctttacttctctactaataattaagagtgcagtgtagactgcccctgccatccccttcctccgcggatcccgcgcgcgcccagccgcatgccgctcccgatccgctgcacccgccatcccctacctcctgtccctgccccccgcgggtcccgtgccgccatcgcctacctccgcggatcccgcgcgtgcccagccgccatcccctacctccatggatcccgcgcgtgcccagccgccatgctgctcccgatcccttgcacccgccatccc

SEQ ID NO: 156711 - DNA, 1150 bp, Zea Mays
caaacacttaccagctagttagtcaaataagttgtgatggtcatcaaacaccaaaccaatatagaaatggtccaaagctcatttccctttcacaaaggtgggttacaactatatgagtacattagaatcatcagtttatggagcatccttttcagagctccacaaaaaactagagttaaacatagatccacatttttctggaattggagaggtgtttcgttggaaaggaattagattagagctagattttttggatcagaacaccccttagtatgtaaacatgcaacctctacactggatgggtgttcaagtttaagtctttaccactataaagcatcggtttctaccatttccactgtcatcatatgtcacgtgtgaagcacattttcatttcttctcatcctcacatgcaccttccacctcctctattgctcgatgagcatgacatatgggtcccacagccatgtctttcgcatgagtgtcctctacttcgatccgctctacgagtactggatccatggttaatacacttctatctctgtgatctacgctgctagattccagttgctagttttgttgttctagggttaaaatgttgttgtgtcaccgcttcctccatgcgatcgtgctccccgatgttgttgcctcatgggtagcagcaagaagccacaccctttgccaaagagaaccatgctttgttgcctcccttgagcaccatcgtgcatcgatggaccgtctagaaactttttgagaaatcgacgctaataccacgcgcacctcgatgggatccaactcctcagttgtgcctgtagctactctgtggcagcttcggtgctccaccaatgggccgatgaaagttgcctagaggggaagtgaataggcgaaacctgaaattttatagcttaaaacacaaacttcaatcctgattaggcgttagaacaagaataataacaatcagagtgagggagagagagttcttgctagagttgctcaaacgattgcagaattactttggaagcaactcaaatgatataaaatcaagtgcaagcaagaaaattagagagagggaaaaggaagaaacaaatcacaacaaagaatcaaacacaaagaacatagatgatttgtttcccgaggttcggctacgaagaac

SEQ ID NO: 156712 - DNA, 987 bp, Zea Mays
gtgcgatggttctctcgctaagagttttgtatcttctttttttccactactatactgttgatgtaatattaagtattgttaggaataaaagataaggcatgcagggttgtttatctctcctagaatctcggcactattgttgccttcggttgtatcccatgcatgtaatctttttctatataaagagacctgggcgtacctgagatggtgcagcctttcattatcctaacatggtatcagagccaaggaaatcctaattaatctccacaattttctccaccgcctcctctcctcctccatctctcttgctgcatctcttcctgtacgttgccatgaccaccacgccaacatcctcctctccaccaattcccatccaccaagttgtcaccatcaagctcacaaaaacaaactatctcctttggcgtgcacagctgctgccatatcttcgcagttcgaagcttcttggtttcctcaatggatccaatactgctcctctcaagaccaagccgattatcacgtcagccggcacgacggatgcccccaatcccgactacgagcgctggtatggccaagagcaacagctgctcagcggtttgctttcgtccatgactcctgaggttctccaggatgtctgggacgccacatctgctaaggctgtgtgggattcccttcagaagaagtatgcctcctcctccaaagcgcgggtcattcagatccgccaggaactcgccacggcgcgtaagcgcgacctctctgctgctgatttttaccgcaagatcacgggtctcgcctccgaattagcggtggctggggctcctcttagagatgatgagattctctcctatctctttgcggggctaccggctgattatgaccccttcgttacgtcgatgactaccaagaatgaagagctctccctcgacgacgtcttctcacatctcttggtttttgaagcccggcgcctccaacatgaagctgatctgcaag

SEQ ID NO: 156713 - DNA, 735 bp, Zea Mays
ttaaaaaccaaggctccctttggatatttcaactttcgcgcatagtgcctggcttccagaatttcttctttggacagcttctttcccgaagcgtgtcgaatgatgtagtcaatattttcgattaaagcttcgggagaaggagtctcgatcttttcaggagcaatttgctttgccgctttttcttcagacgtggtaggttttgtctcgatgagcactgaaggcccagtttcgacttcagcttgagcttgcgtagcttcggcttctgcttgcccggtttcggttccggcctatgatttggctttagtttgagcaattttctttataggagtagggcttaacgcctttgtagtctccagcacagcatccagtacgttggccatccttctcctcttgggagttgcggcaaaagccttttgcatcttcggcagatttgccttcgtcggagggctcagaatttttggcttcaacctttggctcttcggccttatcaaccttatcttcgactgccttgactgtatgcgtcttcggcattacggtcggctcttcggcgctctatgtaatcgaagcagtctgtgttgcttcggctgctgaagtggaccctgcgccaaattcaggcaccacagccggttcaatgaaacgcgaccggtgggtcagaaccttcacctttttgctcttcggcacaggctcagctggggtgaccgaagcagcaatcttcctctttttctcttgtcctcg

SEQ ID NO: 156714 - DNA, 549 bp, Zea Mays
gtaaaacggctaggccacgcggcgcacggccgggagacggcggtcgacggtgagcttatcgtgccagccgcaaagcagagagaagggggggaggtcgtcggagtggtgaccagctcacgacggtgaagatctttactggggaatgcttatctgatgtccacggtgcacgaatcacggcgagtggtaatcgacggcgacggtcaccggcgatgggcagagggataggatcttcttcagttaacctttactgtaccatcagcagtctcattcagacagcctgaccgagcaagtttaagccgccatttctttgattttcaagtggtaacacaaccagtgatctatagcaaagttgtagtgctacaatccatctatatctttgctataacgtgtactcacaaaatgtcactggatccccttcaaaattgagctcaaagttcatgtcataacaccgttaatctgtatctcagacttcaggcagcctgacagtccatcttagattgggtttttctccaatattttcttaacaactctgctgacactcttaagcaa

SEQ ID NO: 156715 - DNA, 1379 bp, Zea Mays
aaagaatattatgtgcaacatgattctcttaaattgaggaggatttaccacagagcaaaattgaattttgaactttgaatttcaaactcaaagaaaaagaaaaaaaacagaaaatataacataaaagaaaaaggaaaggagatacctgcgcatgggctggatcctcacaccttcggcccacttcgcctgcactcgcgcacggcccaacctcacctcgcgtggcccgttcccccttgcgctgactggtgggaccctgcgggcagtcctccactctcgcacacgacgcggcctgccatcgctggctcacgggcctgctactcagcgttcggcttcgccttgttcacaagcacccaccgaaatctcaactaaccgcactcgcgagctaatcccgcgctgccagacgccgttttcttcgccgcaactcagggaggaatcagtctgctagctcaaacggccctagccagtgcctctgtgcatctattcgttgcacgggtgggctagcgggacccactgcctcgccttcgacgggagctgaaaccgaactgaagttcgttgcaacggctcctgaaaactcgcctcgttccttgctaatcctcctgccgccctcgcctttcgctcggatttggtccctcctgccgttctacaaagcctgggcgccatgccctctgaccctcgcgtgctcgctgagatggttggtagccgcgaccatggtcgagcgcagtgatgagagagagaggttcgccgtcgcacgcaaagctgttcttccgtgcacgcatggatgctcgtcacggcttcgcctgggtggaattaagctccggttcacagtaattcttcgcctgtgtggaagctccgccgcacaccgtggctagtgcgttacccgcaaaatctctggtatgttcttcctccatgagattcgacttcgtttgcacatcgcgttgcaccagggagcactgggtcggtgaatcgggtccctgggcatgctgctcgccggagggcgccgccggggcatcacccttcgccgtcgcgcttgggtaccggggggaagacgcggatgcgccgtccgatcaggatcgcgtggcggggattggtcagagagtatacctcttcggtcattacatcctagccactgaatctttggtcaatggccaagatttgatcaccacggaatgagttggtaccgttagatttagatcctgcggtctcagtggcgtaacggttcatagagtgacagaattaatcaaggccgtccgttttagatcttacgtcctagaatagccgataccccttcggttgttctgatttgcacatgagccccttcccttttcacaaatgaacccgccatccatgcggggtgaatttgagtcttgggaacacttgcg

SEQ ID NO: 156716 - DNA, 686 bp, Zea Mays
tgccgatggttatatagccgaccaaacttgacacacaagttacagatcattacagatatggacttggttacaatacaaggaaatctaaattaattctatctataattatacatgccatagaaatatagcttaacattccccctcaatcacaactttaccaagttgagattggaacgaaaccattcaagcttgttaacgggcaacgcctttgtgaagccatcagctaattcatcagcaaaagagataatgcgaacttgaagttgcttgcttgccactcattcccgaacaaaatgaaaatcaacttcaatatgcttagtacgaccatgaaaacgagggttagctgtgagataggtagcccctaaattatcacaccataaacagggtacccgagactgaggaataccgagttcaccaagaacactctgaatccaaataatttccgcagttgcattagccacggccttgtactcagcttcagtactagagcgagatattgttggttgttttgagcactccatgatacaagatttggtccaaagaagattgcaaaacccccagtggagcggcgatcatcagaattaccggcccagtcagcatcagaaaaggcactcaaaaatagagaaggacttctacggaaataaagaccataccccaatgtgccacataagtacctcaaaattcgtttg

SEQ ID NO: 156717 - DNA, 409 bp, Zea Mays
tcccactacttcgacctctgccccacatgttcttgcagcggtcgcctcttctgcgatttggcatcgtcgtctcggccaccccgggtgtgatgtgatgtccaagctctccagtagtacttctgtttctggttgtaggggatcttttgagcacctctgtcatgcttgtcagttaggtcgccatgttaggctcccattccccacctcctctagagcaacagacatttttgatctgatacactgtgatgtatggacatcccctgtaatcagtatttctggctataagtattatttactcattctcgatgacttctcgcattatttgtggacttttcctttacgtcagaagtcggacacttttcccaccctgtctcacttcttcgcctgggtctctactcagttcggtcgcacc

SEQ ID NO: 156718 - DNA, 411 bp, Zea Mays
cttgagtcggggggcggagccctcgagaaatcgggtgctaccaagaaaaaggtaagtagccttgcgagtcctaggcgcaaatggtccagccaatcggatgccccgacggatgctccaaaggtcaagcagaagaagagaaagcttcgtcgcacgtcggatatgctgccggtgcttgcacaagccgagctagcacttggcgatgatgtggtggatgccgatctagttgatgatgtggaaggtggtggtgttgccagaccagccagatatgttgtagaggaggcggaggaggatgaagatgaagaggaggagctcccgctggtgcgtcgtgaggtgcgctctaaagctcggagtgatgcttcatcccttgcttcttcagtgaggatgacgaggatccaaggcttgagcatgtca

SEQ ID NO: 156719 - DNA, 1131 bp, Zea Mays
ctagcttaattgaatgggtggaggagcatcagtggcatgtaagagtgctgaaacaagagagcataggacaagattggacctgaatcgagctggccatggcgaggaccttttcacggtggcggaaacccgatttgggggagatgagcaatccgtggtctctggtgaacaattggaggcaagtgctggtgctttggatgggtacttaccctacggagctcatggcgtgctcaatttataggtcccctgagcggtggccagtgaatttgaaggagacgcgcggcggccggagaggaggggcactagcgcacgcgattggtggcaattaccgtggcaagctcaccggcgatcaccggatgggctaacgtgagtcacggcggtgtggttaaagtgccgtggcacgtggcgcaaagctgcgaggtgtctaactccggcgagggtagatccgaaacggtcggggctaagcgaacacgacagccggagtgaacaatggacggagttcatccactgggtgatatttcacactccctctgcgttatccaactacgccgagcacgaatccccgtggcgatcgcgaatctgggcagacagtcgccgacggtgcgtagctgaactggcgatctgatctggttactgtaccatcggagacctgattcagagcacctgacagccagatttgtagtgcccggatcatagatttttgcataagaacttgctaatttgtctgtagcaaacatgtagcccttcataccaactacaattctgctatagcaacaaccgccaatcgagcaatagatcctactcaaatctgacccaaaagtctagccaatgccactggtgacacaatttcagtcagcaaagtgactgacaacacaactttgggcttatttttctcccaactttgtataataacaatgcttaatcccttaatcaaagttgtacttctataatatctctagacttttgatgtgttgaccttaggcaaaatctttgcaattttagatctacagagcttcaaagtcagccttgtgcactgaatttcagacttagccacatgaggggtgttgagtggctttttgcaaataagctccttttcacatcttttgtcttgaaaatcctcacatgtgtgaacca

SEQ ID NO: 156720 - DNA, 1004 bp, Zea Mays
tcgggaattaatcttttgtcaaggcaaagcatttgagaacaagtctccaacaattgcggttgacggagtgcttaatattggtcatccaccaaatgtcataagacgagtcatcccaattgattgtcaactggattgggataattatgttacttcggctatgaagacccatttgcaactcatggaggttgtggtgcgtctggttgtagtagaccgtcccctgaagactttggtcttgctatcgatgacgtgccaagtgttcctgatgctcaatctggccccaatttgatcccattaagtcagcgaggagatggtctgcagacagatttagctgcgtgtatccctttggcacaaaccaattgcagtaagttttattggcattacatcttcattttggaccatgagcactttgctcattccatttgacgtgggactgatcatcttgtacatgttgcaggagagacccctactcttgtggttgatcctcagaccgaggcagtggctgcttcggtgatggttttattgcctccaacagtcctgagtttaggaatgaagaggagccatatgcctttgctatggctgccgattcagatgatgatcgcccggttggtgaactcacagagagtgacattgagatgttgcaacgtgtttttccagacggtcgggatcctagagtgcatgagttcagcgatcttagtctttctcatcaggcaaatgcagaaggaagggatgatgagctgctagatgctcctgaggccggtcctagcatgatgattgaaaagggtagggtctttaaggacctaactgccttgaagaggtggttgcagcattacgcggtcttacgtaagagaccgtatagagtacttcattcgtacgagaaacgtcgttacacggttgtatgcgataaggacaactgtgcatggagggtttatgctaggatacaaaagatcaccgcaaagtggaagataacaaaagtattggggccacacacatgtgctgaacatgag

SEQ ID NO: 156721 - DNA, 782 bp, Zea Mays
ccctgtcagtctatgggttcatatttcagttcagttaactgaaactatggtaactgagggatgtgcttcactttggggtactataactcgagacctatgcaatagtgaccctagaaatttgtagcaaagtgaaagaccaatgttttgtgaacaagtttgatgtggagaagtagctttttccttgtggagaaaatggagaaaagaagtgatgaagttggtaccgcattagaactgaagcagatcagaaggagccaaaaatatccctgaccactactctctctaggtgattctggacaggctgtagataagaacaacttgaacttagagaggggggggggtaacgtgggatgtatttctccatcctgaagctgaggttggactatttgagcctcatccaaattggtgactcggctgcttcactgctcaccttgctatcaaacatgcagccagggggtgtaaagtttttcactgtgtgtgggcttgcgtggtgaccatgcagagatgttggaggaaatattagtgtaattagccatcgcttagtctgaaccaaagggtccagaaactctagtttgtggtgactgctcaaaatcaaccaaagaaccaaagaactacacttcgccatgccctggtgatcccatagcagtttcaccatgtccttgttatttccctaagactagactacgtcatccatttttccccactcctttggttcactgagaaagtttgaactcgaaggaaagattggttgcggtgaccaccaccaccagatcccccatctcctc

SEQ ID NO: 156722 - DNA, 454 bp, Zea Mays
gataagtcaggaatagtttatgtttaatcggttcctaaataatgggttagttcctttttatgtggctaaatagtagcagtagatatgtctatcctaagatgatccagaccgcctatggctataaaggcagcttggcattagctgtaatgatcaaccaggaataagatctcccttttgtttggatgagatcacctcgaatcatcctagccaggcatgacatcggcgtaggagatctgggtgaccggcgccctcttcttccatacaccttgcgccactccaatctccctctccactccccattgaaggaaaccaggaaaccaagattacggactcaccagctaggagtcggtaacaatttggtatcagattcagaagacacaacaacagtcatgtctggcgtcatgcccgatcctgaagacaagagcacgaaacagaagctggacttcctcatgga

SEQ ID NO: 156723 - DNA, 797 bp, Zea Mays
gtgggaggtcactggcgcaaggaattcgtggcatctaccgtggcagccctcaccggcgatgatcagacggccaaagtgagtcacggcgatgcggtgaatgtgcctaggttcgtggcgcaaggccgtgaagcggctgtcaccagcgagctcatctgaaacgaccgtggccaactcggtatggtggccggagtagtttaatggccagaaaatatccacggcgatgatacttactcaaccccgagcgttatccaatcgatccgatcgcgaatcacggcggcgagggcacgactctatgcacggctcggcggcggcgagctgaccgagctggcagtctgatccaggcactgtaccatggaattcatcttcagtgcgcctgacagccaaggtttagggcaggttttctccaaattttccatggcaacatcatcatccttctgcaccaaagttgtagacctatagatcatcttcatctttgttatagcagtcctagtcgaattcctactggatttagctcaaatccgatctcaagttcgaccaataacactgatgaccatttctgctatcagattcagattcagttattcaatataagtgtgacagagcaaccctgggcagctatctctttaatttttgcataacaactcaagagactgtctgcatcaaagttattctcctataatagctctacaaaattgatgtggtgacctagggcaaaaacttcataatttgaaagttacaaggccccaaagttgaacccactatactgaaattcagacttagtcaaaagagcacaagtg

SEQ ID NO: 156724 - DNA, 533 bp, Zea Mays
tcgtttggctctgtgtctaagtgttttgagtctgatgattctgggagttcgattgcgtggacggaggagtcttcagatgaggacttggattattttgcagcgttagatgtggctggagcggagccttcgccgcgcgtggagggttccgaggggctcccgggtgcgagtactgggtataggcgccgaagggcggtggcgaaacagagagtgagtgaattgttgcgaagtggtaggcgtcattgtagtgaaatggagagtggtcgtcttcgcgtggacgggactggtaagcgagaattgttgtcctcgccgattggggcgagtgtatgtgagggggagctgcgaaatctttttgagggtgagtaattgaggataatgttgttcaactacagggagatgggtatcatcccgaaggttgagccaatataatatatgatgccctcgctatgtgtatgtgactgtaatttgtatgataaggctgcgcaccttcgttgatccggccgcgcccgtaggcgacttttgcacggagtcttttg

SEQ ID NO: 156725 - DNA, 866 bp, Zea Mays
gaaagatacaagccacaaagtggccaagcaataaaaactactagaccctgcttcctgcttaaaactaactacccttacatccttagatcttctcccccttttttgcaacaagtaccaaaaacagagagaggcacaggactcaataccaccatagtgactcgaaggaggaggataggaatgatagcccgaaaagaaagtatgcatcaactcttcctcgtatgtcgagtcctgtggaggctcgttagatggaggaaaacctgatgaagatgatggaccctggaacagaggaggaggaggcggagggtgaccagagccggaaggcctagggtcaccaggaataggtccaggggcggcaacaggaggagactggaaggagtcgtcaaactcttcggcttcatcctcaggagtaacgaatggcacaccatactcctattggtgccattcattaagaggcggaggagggcgctttggcatgtgatggcccatggaggccatgaagcctctcatgtcatcgtgcaacgcctgagtctcgcgcctgtgcacagcctcctcgatagcatgactatggcacattgcgaagaccacgacgatccccttatccaggcgcacaaacaggcctcgactgtgaccccttccccggccctgacctccacctctaccgctatggtccaacgaacgtgaggcaacggtagcacgagatgaggtctcatgaagtggaggctgaggagatggctcatcggaagaagcagggcctcctaaccctactggagctcgcttggaacgtgcagctagttatttgagtcaacgtagtatggcacatagcgggagtgcttgacgggcttgtcaaagcgaatctaggtaacaac

SEQ ID NO: 156726 - DNA, 1059 bp, Zea Mays
caaaatcgtgccaaattaactaacctagcctgccacaaaaaatggtatcaggactccacgcttggacaaggcaaaacacaggcaatgcctcagttctgccccctccgacaaaataaacttaagccaagaataactcagtgtttctgacacgaaacctatggggttctacacctagcgacagagtgaatagaggaaaggagatcatatgaagggatttcgcctaaattcacccggattcacgacctatgggcgtttgaatgtgacaaaacaccacggagccaaccattcggtcgcaggcctgaaccgcagagcatgccattggctgcttcgcgcgtgccaacccgcacgcgtgttcatgctccgcgtcatggccagagaaccgcagcgttcacgcaactataagtagcagcgcgccctcggcctctccctccctaaccactaccaagccttttttgtcggagttcacagcagccgagcacgccactgccctcactgccaaccaagcgccgcccacgtggcccgaccgacgcaaccaccttacaaccgagcaaccgccaccaagagcttccctgaacaccagtgaatctcctcggtcagcccaattcacctctactacccaccattgtagagccaccgctcgctagacctcaacagagcaccggtgaacactgccagcccccacccgtacacctccacaaaattccttgcaccggtagcaccctcgtcctcctgtgaagcttcctcaccagtgaaatcaagcgctaccgccaccattgatcgggaatcggagtcgccgccgatcactgtcgccagtgcgcgtgggccaagcaactctgaccaccaccggctacaatctgaccctcgatgtgttcgtcgaagcctccccaacctcaccgaccacctcgccggagctctaccactgctggtaagccccgccgcccctttatccgcctctgtcactattccgatgaagtagggagcgcgggttagatagttcataaacctagggggttttcgcaatgtcagtgacacatgtcaatagcgccccgaggactagcc

SEQ ID NO: 156727 - DNA, 454 bp, Zea Mays
gctcgttgccttcctccaagcaaatgccgacgtgttcgcttgggagccatcgcagaagcctgggatccccagggaggtgattgagcaccatctaaagatctagccggacgccaagctggtaggccagaagccacggagacagtccgtggagcggcaggacttcatccatgaggaggtccggaagctgttgcatgccagcttcatcgaagaggttcatcaccccgtgtggctggccaacccagtcatcgtgccaaaggcaaacaggaagcttcggatgtgcattgactacaccagcctgaataaggcatgtcccaaggactcgtatccactgccacgtatagatcagatcatggactctacctcggggtgcaaccttttgtccttcttggatgcctactccggcttccatcaaatccgggtgtctagggaggataggaagcataccgcttttgtg

SEQ ID NO: 156728 - DNA, 543 bp, Zea Mays
ggtcgcctcactggccccgctgcggattggtgggatgcatactgccctgcacacactgctgttgacaccatttcatgtgcagaattctccacccgcttcatgaattaatacattcttgctggtctcatgaagattaagaagaatgagttcctgtctctcaaatagggatgcatgtcagtaagtgaatacagagacaaatttatctagctatctcgatatgctcctagggaagttaatgatgatgagaaaaagcaatttctggaaggattgaccgggccacttcaataccaactaatgtcccacacattcctgtccttctagaaactgctagacaaggccatagctatggaacacaagagagttgagctaggagagaaaagaaaggctactaaccatggacaggctggaagtagtacccatccccgttatgctacacctcaaggcacaccagctcgtggtagttccgggcaacagactcaacagacccaagctactcctcaagcaagcaccctagtgggacctgttgctcctaatgcatccaca

SEQ ID NO: 156729 - DNA, 271 bp, Zea Mays
gctgctcctcctcctccatgtctctgaactgaacctcggaatgtgcaaatttgtagaggggatgcacgacatcacgacgtacatcaaggacgtgctcaggacgctgagggagctgaagaaatcgtccggcctcgcgttcgagatgctcaagctgctatcagacggccaggaatccagcgtcgtaatggctctcagatacctgcaaattccaggctctgtatatacatacaatgcagccgtcagatgatccctctggatttttcccattgca

SEQ ID NO: 156730 - DNA, 479 bp, Zea Mays
accccttgagttgatcccctctcatcattttgtgcattgtgtccagtggcccgtctactttgctagtgaagtcaccataatgccaaggcaaggtacccagagatataaaagctagtctacgtggtccttatcgtgtcctaaaagctccatcattatttccaagcacacttgatctcagtaattaaatccattccactaggagtgaccattcgtgatgtgcatgcaatcagacgcatcacaaagtggtcgatagagatgatagagttcgaccatgacttcaatagtgccatgcagtcaagggctagactcttgctaacttcaaggctgaatggaccctggccaacccttggatcaatctcaaattcccacctaggctagaaccgaacctgatttcaactagcacccctaggtgatgtactttgacagctccagtcggtcagatagggctatttctatatccgtccttgtgtccccaacca

SEQ ID NO: 156731 - DNA, 443 bp, Zea Mays
cgggagtgtgctgaaaatggagaagtgcagcttcagtttgtaagatcagaggagcagtgtgcagacatccttaccaaggcgttggggaaaacaaagttccaagaatttcgaaagaagataggagtggtcaggcatgacggcgactgatctcagggggagaattgacagtgagatgcagacgccagtatgctgcattcagagtttcagtttcagagtctttaatcgttctttgtttcagtttcgtcaggtttcttcaatatctagtcagcttggttgagtcgtagttagtcagtgactaagcttgtaattagggagtctgttagcatcatggacgtggtcaaggatgatccatgcgtcacgttcgccgtgggatggcacggagctcacgaacgtggagcggtcatgcgtcgtgcgcgaggaaatctcgcagcactctttctgtt

SEQ ID NO: 156732 - DNA, 432 bp, Zea Mays
tctgagcagtgtgaatcgtgacatcctcgcgctcgaagcgaaacctcatccactgatggtcggggtcaatccagacggtagcatagaaaactctaacccactcctcaatgtagcgaccaccaaaagtcagcagagagtacaagcctgatagatatgtgatgtggccctcaacctcagaactggctactgaacgaaaagctgtcaaatcgagaggagagacaaatttgttgatatcaacgttgtactaaacatttttggaacttaaaaagtcatatttgataaatcaagcatctaaattaaattttaattacactactatgtttattacaatatgtcggtgacacggaacctagatacctcatcacctccataaccacataatatactcctgaatggctgaatacaacaagcatgcaacccactataacatgg

SEQ ID NO: 156733 - DNA, 501 bp, Zea Mays
ggacgacggcggctaggagcccagcatgacgaccttcatcgtggctacgtcagactacaacgtcatcatctgggcttgtatggctcccagactgtttgagaagtggagaagggacgccgccagctgctcttttatcattgtgggaaggttcatggagataccggcggtggaattggcgagcacggtggaggtgggcagcgcggcggtagatgcaagcggcagcgtgcgtgactgggaggtgggcggcagggtgacagattgtgctagtggagaggagctcatggtggtcggaggatcgtaggcctacgatactaaattggtagttttctagtcctaccagggatctgctgaagggagtatgggtgaggggaggacagactacaacctggaggtagtggctacctcttgggcgccgtagtcgcaaaaaacggcacacagggatgtggattccagctcccgtgaggaagctggcagaagatatctgctattgcttgccttctc

SEQ ID NO: 156734 - DNA, 546 bp, Zea Mays
ttgaaattcaactgagttgacacttctcttgtagatggttcgcactcttcaaactacccgcatcaacaccagctacgcccctcagccccggcagatcccggtctacccagtggtagtcgaggaagctccagcgaatctccctcccgtccgagtggagaacataataaacctggaggacagctcggaggagcagctgccgacccccaccccgttggccgagtctctggccttcgcagctgggtcatcgacgtcagcatcgtcggcaccaacctttcaagcacctgcacctggaggcgacgaccccgacgactccggagacagcgatgacgaggatgacgacgacgacgatggagaggatgagcacgtcaaccaggaagctgattacgcccagcaggaccacttcatggggattggtccagttgtcgaacattacacatcaatgttcgagacaggacacttccccaacctgctgcaagcagtgctgcacgagctaggagcctacgtccgccccctgtacgagacgaggcgagtgagcgagcctccccg

SEQ ID NO: 156735 - DNA, 660 bp, Zea Mays
cccgccggtgcgcgccgacatgtgagcccctctagccattcacccagtcggattccgcgcgccaaccccctagcactcgctgtccccatgaccccacctgtcatccacttaacgcgagcgactcaattcctctcaccgctgggtgggccctccccatcagtttcgtcccctcaaccaccctcgcgaaggttacagccgagcttgcggcaccacgatctccacgggcctggcgcaagtccgattattcctgggtatacgaccttgtgtctgacgttcctcactccgtcctctcatcccctttttaccaaaccctaagttgcgccaccgttgtcaagagaaaaccggttgccaacgtgcggcggaagctgctccgctggtcatcaccatctcatcgctgtccggatccctgtggatgcgcgcaagacgtctaccacccatcactgaaggtggtgtgagacttgcccacacctagaacggattgtgtcgcagatccgtccctcgttgcggctaggactcaccactgctcggacttcggtaatgatccctccatgttgtgtgtgatgttctgtactctgagtgggtgtttgtgatctagctgggagggctcggattgtcggatgtgaccaccgatgtgctcgccgggtagcgctagcacgtgag

SEQ ID NO: 156736 - DNA, 497 bp, Zea Mays
atgtatgtagtggctgataacataccatcccttggtctctttactgatagggtttacaacatgttttatcagtggcggcttaaattactcatatatatgttatttcttctcttacaacactcattatacttgccattctgcttttcagatttgcttcagccttctcaagttatagttttctttttcaataagttaggcaaaggcccatgctgatctgattcagctctttgtctgattgcctgagatcctcttcccatgcaagacgatcctcatcacgtaccatcaacgtgttcttgcgttcttccacatcctggaatttggcgttagccaaatcaaacatttcctttagtctttggagctctatggtgagctcctctacttatttctctgcacctttggacattgtgaaggctgcttgagctttgttaatggaaatatcagttccgatcaacaaagaatcataatcctcctgcacttttcccaacacatatttcact

SEQ ID NO: 156737 - DNA, 324 bp, Zea Mays
ataattattgaaatgctctgttcacatgacaaatatatatgtttagaaaaacgttgtagtgtatgttgtgtctcggagtgcgataataatgggttagcagacatgttagatggttttgggttaagctcgtggtcacgatgaattggttgtggtcgtataaatgcatatggttatggtcgcagatgaaaagtattagtgctcatgtgatgtctaagtgaaatgcaaattattgggtgaaaagcgtttcgatattgattatcgtagagaatgcgttgttaattaagtatagtaattctagtgctcaaaatgacacggataaatttt

SEQ ID NO: 156738 - DNA, 408 bp, Zea Mays
ctttgagagatggcgggatgcctcgccaaggacggcggactcctgttcttctcccaggcgcgcggccagcccccgtccctttcgcgaggaggtcgccaccaagacgaagacggcgaagacgatggctgctcccggtgcacgagttgcttcagctttggtaggtccggcgacgcatgcctggcaaatcgtggaatccaggaaatcgaagcgacgacgtctgaagttggaacgacagtggagatagctccctcggcacctgcttggtagatgcttcaactgcctttcccaagaccacttcgtctcccaatgtgctcagaagacgaggtgcttccgttgccgtgagcaggggcatcggtcttttgactgcccactgattaaagagtcggtctggcataggatttctcctac

SEQ ID NO: 156739 - DNA, 385 bp, Zea Mays
tgtgaaatgcgacggtgaaggggtatcgcggattctaaaccatccgatctaaaccaagggcccagattaaatagatctcacccgaatcggtaaggcatagcagtcgccggatctaatttcaaccgtcgagatttaatgaaccgggatcaccctacgtccgcacgatctgagatcgacgtctgtcattactcccggcaagggttacgcgataaccgatccgatccgcacgatcgtgatccaacgactgtcacttgcactactctccgtctaatcacgaccgatcatcacgacatccacggtcccgacaccttcttcctcctaggaacgtactcaccacggccaggaatgcccatggtgcgcaacggcaggtgccgcacgacacccg

SEQ ID NO: 156740 - DNA, 531 bp, Zea Mays
atgttggttccactgtatcttgtagaacttgagagtttttctccaggtaaccctatcctttttatccaagactcgaataggttgctcagaatatgtcaagtccggttcagggacaacatctgtcacttcaatgattcgatcgggaacccaaagacacttcttcaattgggacacgtggaacacattatgtacagcagacaaggtttcaagtaattggagtcggtatgccactggtccacattgctcaagtatagggaaaggaccaatgtaccggggtgcaagctttcctttaaccccgaaacgtgatacccccttcattggtgaaacctttaggtagacatagtctcccacaaggaagtataagggcattcaccgtttgtctgcataactcttttgacgagcttgagctttcttcaaattatgaattattctttgaactctttcttcggtctctttcaccatatcaggcctgaagaagtacctttcaccaggttcagaccaattttagcggagtacgacatcgtcgttcat

SEQ ID NO: 156741 - DNA, 1132 bp, Zea Mays
tgaattttctatgaattattcaaattctagcactcatttatataataaaaacctattttctaatccatttattcaatttatcacatcactggactgggcctcaatttccagagaaggcagggggctatgcgcaagatatcccagacacagagaacagggtccctggacggcgggttgttttctgataagcgtagtggttcttttgtgaaatgagcgggcgaaggggtatcttgagttctcggccgcacgatatagtatggatggcacggattagacttagggttgcccgaactggtatgctgagatggtccttggattcagaatcaaaggctcggatttaattaaccctagatctagttcctgccgcacgatgcaagatcaacggtgtggatttatccgagcgaaggggtacgctggacctaatctcagccgttcactacgaaaccaacggtcagggtgcgttcttccaccctgccgcactgccacggcggagagaaaccccgcgcggcggcgcccgtgaccggagatccaatcctcgcactcgaacgtccattttctaatttggtctagctacatattgcagatggtacactgagcacggggatgagtttattaccaaggattgtgcggtgttgtgtattcctgacgaggagttgcggccgcaagatgaaactcacccgccggtgagaaattccactccaattcctggcacacggcctctgcttccttcacagaatcgcccgcaacgcaccgaggattgcccaggtcacagtcatggccgagttcctccacaccgggacttagttcgccgcagcggtggcgctcggttggttctaagctctggtggcgagaaactggggcgcggccaaaaggagatgggggcacgagcggcgaggtcgtggggtccattatttgtaggcgtggcaaggtgcggaacagctgcaacggtctccgaagtctacggcgaagctccgccaagcacgcgtgttcgttacggaaggggaagctgacaggggagggcccacctgacagtgagtacctgagacgcacgcgcgaaccagcgagactgcaggcgggacccacatggtagtgtcacacgcacagatggcgggagtgaagtgctgggctgtgc

SEQ ID NO: 156742 - DNA, 403 bp, Zea Mays
tacgccttcttcttcctcccgaggtcggatgcagtggcactggatgcaacagagcggggaggcgtttacacatgttgtcccaccttacaacgaagctcgacggaggtggtcgtgagcgcggttcggtgaagcgaagctcctgcgtgttcgtcgacgtgggacggcgccctagtgtgcggtggtcggccaccgttcatcttccagcactgtggatccgtgaggacgaagaggcccgacaacaaattccaatctccctgatgctccaaatcgcccgctaacgacgcgccaataccccacaaagtccggcgatcaccgacgatgcccctccccagagcccagcgacggcgacatcatcttctctctctccctctccattttcttcgctcgacaccgcgcacacgat

SEQ ID NO: 156743 - DNA, 637 bp, Zea Mays
caccgtctccctgtagtcccagcctcgtccccagcttccttgcctcactgcagcccagctccctcgcctccctgtcgctcccagcacgcgaggaggatctgggaaggaagacaaggctggtatattcactatattctctcttatttctagctagggttacatatttgcatagtttagcacttctctggtgatccctgtttggttcatgtcatttgaattttgtttgttctagggaaaattgagattagagcggaaaatatgagggttacatatttccagcatgtcgtaagttgaacaactcttttgcattgcttggccttagattacttctagcttgctcttgcaaatgatatcgaacattacggtatggagctataaaattaggagtatttgcatatcctgcatcaactaaataaaatttgccaataggaacatagaaaccatgagccattgcatcctgtaacactcgggcatctgcagctgatccttcccatccagcactgacatgcacaaatttactattgaagtcacatgccaccattacattttgtgatagaccaccctttctatttcgatatgggtcttgcaagctaggagatatagtaataggaacatgagtaccgtcgatcgctccaat

SEQ ID NO: 156744 - DNA, 791 bp, Zea Mays
ctgtgttttcagctgtccgatcatccatcgagggctgagattaaattgcggatggttatgaagtcgtcttctcccgaccaaatcccagccgcctgcacacgatccgacggccacggttagatatatacctcgtgcgatcaaagccaccagatcccgatcctaaggctcatatcaatcacgatttggcacccgcttgatctattctgtgccgcccaatccccatctaacggccatccttgctcttctacctctgaccgcgcgacgcagcaaaccatggtggcacggcagtggacctcaccggagagggcgaaatcgcgcccaagcacacaaggccttaacgtagagggtgctacacgtagtaatggatgcggcgagtagggtagaagaggttttaccggcgattgtgcagaggcgagatccaatttctatgcccagcggcgcagatggtccccgacaagaaattccggtcgttcggcggcagttctcctggtccgagagcacccagagctccccagtggttcggccaacaccactgacccgcctgtgcgcccccaacgatggcgtggatgaatactgacgccggtggtggagaactggagcttggttctggtggcagctaaaaggaggggaaaagagtctatgcgagaggaaaacagatggagagaaggatgcggcccgatcctttttataggcgcacggagacgagtatcgggtcaatgcgtacggacgcgaggatcgcgatagcgtccgcggagtgcgacatggtggttgaggacggatctaacgtgttg

SEQ ID NO: 156745 - DNA, 1024 bp, Zea Mays
attaaatacggattaaacaagtttatggatttatttctaaactaaaaatcatttttatgaaatgttttatcctttttattctctgattgaactagggttactattatgcgaaagaccaggggctaattcctatatttctccaagactcatattcaccccgcgtggatggcgggttgaaactctaaatctgcaggggttctttagataaaaatcacggcgaaggggtatcgacgatagtgggccgttggattacgatcgagcggatcaaattagattcaaaccccaccaaaccggtatgcagctccagccgtccaattttgatcaaacggccaggaacaccccacaccatgatctcatctgattcatccgtgggtcgatcgacggcacgaattaatctcaggaaaggggtacgtgcacatcaaccgcaaccgcggatttcaagatccatggccacagtacttcttctccacgcgaataccaggtgtggcagcgccgttcccccccccccctacggcggacgccatagccagaccacccattcaccactcccgggcccgaaattttaatctgaggtacgctacgcgcagataagacgtaggggaacaggaagaaggctccataccggggtattatcgacggtgaatcgcggatcacactggcaacagccactctggatgccgacgctgagctccgagtgctctgtcgcggttgcagaggggaaagaggaagcggtggacgtagggagagggaaggggtttgtattttatactcccaggtgaccgaaacttccccttgaaacaaccggatcgctcaaacggatctgcgcgattcatggctctcggcaattgtttttcttcctcggtctctctctaccctcgagttcttggcctcaagattctaggcgacagatagtggagcggggcccgatggcgcacacatatatacgcgggcgaagttgggtgtccatccaatatatccgccagaatctcaactaaccccagccgacgcagatcacggagccccg

SEQ ID NO: 156746 - DNA, 350 bp, Zea Mays
atgacattattttctttattttaaaattgttttctctctactagttttagcaactaatgtttaatttcttttaagttttaattgatggatttgaggtgttacatattctatatatcggggagaatgcatgtaacttgtattatccattggtaggtcctcaatttgcttccaccatttgattcacctaaaaggccaccacccaccagtagccgagcctcagctttttctggagctggcaagcagccctcatggacctcatgtgatttatattcacccaaaaaaagtttttcagaaaagaatttgtatatattttcgtcaactctattttatctctcttgccattaacatcg

SEQ ID NO: 156747 - DNA, 483 bp, Zea Mays
attttcagcaacattacttatacagatatacctgctctaatttcaaacttcaacatttaaagagtgtgcattatactatctggccatatcctaaagcccctctgcctctctctctctcacctcctgtcccctctcctctccgtgtccggtggagcttctccacctccggccaagatctggaaccagcgagggtgcccggcggttctcatcccggaccccgactctttcctcatctctgcaacctctggatcctccatctgcccccctgcaggatctggaagctgcacccgtcggggggagaagcaagcagcacatccagcccgctcgagctcgctcatctgacctcaccactgagcttccgcaggatcttcacatccccattccattgacaacgtgaaagagaacatgtgacggggctgccaagctacatgacaacgacgccgattgccgaatgccgagacaccgcgcacgctcttgcaggca

SEQ ID NO: 156748 - DNA, 346 bp, Zea Mays
aaacgcagataaccatcctcggatgaaaaatctggtgctggggatgagctcgggacactgtttcgccctgggcgccgtacccccctgccttatggccggtctagataacctcgccagagttggtcgcatgccgctcgggtgccatgtgccttggtgctctaccacgtcgcagtgaatcgccttagcaagtccgctcatcgctggtggtcatgctaaggtgaaagccacacatctcttgcaccagtgatctcccctccctccggccaccagcgcgccatctcaaaattagccaccaccaccgatggaacctataaattgccgccccagtgagcttcgctaagtaatc

SEQ ID NO: 156749 - DNA, 995 bp, Zea Mays
cattctcactcatgaaaaagattctaaaaccctaagttccctcttaagccattaaaccctaaacattggataaaagggaaaagattaagcaaatggctaaatcatgaaatgaaacctttaccaaaaatgaagtacattaataaagttaaaaaatgtagtaagggatgttttacaataaggcccaacaaaaaccccaaaacaattcactaagtcgaaaacacactagagccatcaaaatttctctaagtcccaaatcagccctagcctaaagatcagatgtgttcacccttgtgctggcaccaaaagcacttggtccaaataacaaaaagtggccaaactacccaaggcacacccctgaaaaatttgaaaccaaactagagtcagttgacacggtttggcatcctttttgtcgcgggtgaacagtgcagacaaacaagacttggtgccaccatatcttctaagctacgctagatcttcccttggaactcagatgaactagctagctctaggtgccaggaagaaatcttgcacaagacattgggtgagattcgcatgtttgggagctctgcaggcgcaagaactcgggcagatgaacacgaccacgtgttcgacatgccttggcaacgtcaaagcacgccctcggcgctcatcccgcgcgcgcagccccatgtcgtgtcaacccctcgcccacacccatgcccgcagctataaaacccacatcggtctcgaccgtacgcccccgctcactcctaacctcgcccgagcacgagttcgccggcgtttgcccagagaacagcgtgccaacggccgcgcaagccacgaccaccgtagaccagccaagccagccatcctccaccccgtacaacccttgggctagcttctccggaccttagtgaagctccccgagccgcggattgaacatcacctcaccggagacgccggatcgacgtcgccggacttcaactggccgccgtcgcacgtagatcgagccccac

SEQ ID NO: 156750 - DNA, 702 bp, Zea Mays
caagaataccacctccctacccgacagcgcctgcaataacactatcttccaaaaacaggatataactgcgcgatactgagataaccaatccatacccaagataacatcaaatgcccccaaggaaatcagaacaagattagctgaaaagacttcatcagcaagaatgacggaacaaccctgacaaactgaacagctactattggagccattagcagaactaaccataattgggtgacccaacctctgcaccgaaagaccagcctgcgacacaaaattctccgaaacaaacaaatagctagcgctagagtcaaaaagagcatgggccacaaatgaatccactgaaatcgtacctgtcaccacgtctccctgctccctgccatccacagaggatagcacatatgctccagaaatacccgcagaagaggaagctcccagagtgaagttaacagaagaaccccactgagtcgtcgggtgaggcaaacgcggagctccaaactgagacggtatagaagtagtcggtgcaggagtaggcgcggccagatactgaggaaaaccctgcatcgacacgaactgagaagtcctgggcacatagaactgctgcggagggagtggaactaaaaattgctgctcagcgcttgacatcaagttgaccgtgccctaagaagaggaggaagtcactgactcccatctgagcttcccatt

SEQ ID NO: 156751 - DNA, 612 bp, Zea Mays
gcagggcgctcatgggtgggagcagccggggtcaggcgggggcttcgcagcagggggcgccgcgctggccgggcacctgggcgggcaaggccgcgagaggagaggggctggacgcactctggggtgctgcggagcggcgacaacgtaacagcgaggtcagttcagcctggagcgcgcgcgcagctttgcaggggctcggacgaggaacgagcgggggctttgggcgccagcactcggcaccaggggctgccatggctgaagtgtagaggaagaagaaaagcctgtagaagaggggagaaggagatgatttgtcacctgcgcatgaagaacaacggagcaggcacgcaaggaagagggtgacgacggggctgctcctctagcgacacgaggaagatgacgaggcggctcctccaaccatggcgacacaacacatagaggagaaagggcgtaggttgctgctgtgcgagaaggaagagggagggggtgaggttgctgtgcgcagacggttttgcgcgaatccgagaaaaatgggatgaggcgcgtgcatcgtgtgggagcagagggaaagttggggaagagagagatggcagttgggtccacagctgacgcgtg

SEQ ID NO: 156752 - DNA, 1054 bp, Zea Mays
caagtttggggcaccaaggttaatctttgaaaacatagcagaagctgaggctactaggctggaggatgttgatgtactagaagaagaacggttgaatacgatgattcagtcagcccgatatcagcaaactctgaggcgctatcatgacaaggccatacggcatcgatcctttgcagtgggagacctcatcctccgtcgaattcttacgggggtgagacggcacaaattgtcgccactatgggaaggaccgttcatagtagcagaagtcactcggcctgggtcgtatcgccttactcaaatggatggcacggaaattgggaactcatggaacatagaacatctcaggaagttttacccctagctatatttcaaaagctactgagacggcattgtactctgtaagctgggaaatatgtcatcaataaaaagacttcaaaggccctcaaattgttcactatcaacctgcgtgcttacttaactcggggtgaccactataccctactaatggagcaatcggcttaagtcggcaatgacttaaggcggtgcgacatgctcacgcttacttaactcggggtgaccactataccctactaacggagcaatcggcttaagtcggcaatggcttaaggcggtgcgacatgctcacgcttacttaactcggggtgaccactataccctactaacggagcaatcggcttaagtcggcaatgacttaaggaggtgcgacatgctcacgcttacttaactcggggtgaccactataccctactaacggagcaatcggcttaagtcggcaatggcttaaggcggtgcgacatgctcacgcttacttaactcggggtgaccactatactctactaacggagcagtcggtttaagtcggtaatgacttaaatcggcacggtacactcgcgtctacttaatccaacacgagcacgtttgcaattactcatcttagggtgacctctatgccccgcaaaatacgaagaaatttcaaaaccatcatactgcatttacttctgcggttatagatacggttgaattctaacaacgg

SEQ ID NO: 156753 - DNA, 866 bp, Zea Mays
cagagtggcggagaggcgaagctcctcgagaaggaggtcgttcttcacctccgcaaaggtggcaaacggcttcatgcgggtgaggatgggcgtcacacgatcgaagcggggctcaaaccacgtaggaggttgagcacgaggctctcatcggtgatggaggccccgagggtgcggagagtgtccgccatcgtcttcatctggcggcaggactcgtccacagagagatcgccctgagcaagctggcgaaaggcggtctcgagatacagaatctgggtctggcggttgccgaaaaactgggcctcaagggcaccctagatccggtgagccgtatcgtccgacacacgaacgatgtcctgaagttcgcccgtgagggtgccatggatccaagaaagcaccacctcatccatcaggagccaatcctccgtcgggtcaggaaccggggagagaacgtggtcggcgagggcgtagcgacggagggtctgtaggacctggtcgcaccaccgagggtactaagtggaatccggcgcgagaacgtcggtaacggtggcccggatactggtgagggcggccgcctgagcgtgaagagaagcgcgaagagtggaggcaggagcgggcgcaaactcgaaggtgtcggcgcagtgacgagcagacgtgggagaaccatccgacacgcccttgtcggcgagacggcggtaggtctcggcgtactgacgctcgatggcgtcaacaaccgcctgctcctactcaagagcacgggcagcgtcctaggcccgctggcgagccgtcgcaacgacggcccgggtggcggcgaggatggcggcagcgtcatccgacggggcgcgcagggaggtgacggcggagggctg

SEQ ID NO: 156754 - DNA, 512 bp, Zea Mays
acgaccacctttcgagcttggagacgactgagaagctttaggaggagtggaggcatgagggcatgaaggagcccccttagcgatagagggcgagggggttggttggtggaggacgtgccatagagagtcgaggtagacgtgctggacttagtgtctaaggtgagctccttaagaagtagcttgttgcggaagtcatggaagtacggaaagggcatggagcacttgatgaaggccttcagatggtcataacaccaactcagaccacacaggaggttgaggataagcatgcgatcggagacatgcttgccaagatctcggagagagtcagacatgtccttcattttgcgatagtactcgatgacagagaggtctccctacgagaaagccaaaaggagacatcgagatggagggtgtggtcctcctagttgccatggaactgggcctcatggtaggcctggtgagtagttcccatcgctcgcggacagcgtcttagagcttggtgaagagggagc

SEQ ID NO: 156755 - DNA, 1395 bp, Zea Mays
taaataaccctaagtaggccatttaagtgcaaagagggaaaacttgtaaaaaagattttgaaaaacccaaaatcacgatgagaaccaaataacaaagttaaagtgcactaaataaactacaaaatatagtaagaaagtttgatcagcaaagctttgcaaaattctcaaaaagacccctcaagctaaacttcaaaaaggaaattcggaaaattttagaactgaattttcagccctttgtaaagatcagtcatgttctctgttttccaaaactcaaatctacaaaacccaaatatgaaagtggcaccaaattaccttgaacttactctggtaaagtttgaaatcaaacaaaaatagtttgacacaagttgactcgacttcagtctcggttttcagccgagcgacaaacccaacttcgccgcctcgtatctcgcgattccgagatcaaatccactcgagtgttgtaagagaaacaaagagtaaacaacaaagaacaaatcatgtgcagggatttgggagagttaagagaagatcgcttgccaattagcatttgaaaatgaccagactaagtgaggccacgtgttcgatcgcttgcctgaccgggcgagcgcggactggccgtggcagcgcgcgccccacgagtggtcgccctgcctcgcgcgtctataccttcccctcgcctataagtgcccccagaagccttagccatttgcactcgcgcacctagagccccgcccgagccagggatcaccggagttcgccatggacagcgagcgccaccgcccgccatcactgcccaagcacgaccgttgtggccagtcttttctgtcaacccccagcctcgccctagcccctagatagcttcctcgagagcctgtggagcttccccaagcttgagtcgaggtattgcctcaccggagaagcggattcaccctcgccggagttgtaatccccgccggcgtgcgtggccacgactaaccggtaagccattttccaattcctcgtacctaagtcttccgtgacctctgctgaagctctctgaccacttcaattgaactctaccaccctggttaggctggagtcctcaacgccgacgagctcgcccgccggctcgcgtggaccgacctactctgaccatcaccggagacgatccgcacatcgacgtgaccgtcaagacctcccctacgccctcgaccacctccccggagcaatctcaccgccggtaagcccctccgcctcggttactgtttatttgggcgaaggatcgcgggttggatttagcagaactctagggtgttttctgcgcagtcatagactcatgtgaatagtaacccgaggacccgtctgcaatgaaacttagaactttcgccagggaccccaatgtaaaaccctttttcc

SEQ ID NO: 156756 - DNA, 912 bp, Zea Mays
gccattttagcactatagttgagggaaattagtgttgtcgaagtgaggtggcctcaaggtatctatccgtcccgatcttaatagtgttggctcaacgatggttaagccaaaaggtttagctatgatacaaattgaaaggaacgttgacgcttaagaggtaatggtgaattaggataactatttttacactaatcaaggcctctagttttagctcttaaacaaaacctatacagataaccaaggaagctagggtatctaatgttttgtctaagtgtttctacctctaccacaaaacaacttttgtagcctaggttgaccaatcaactagcctatcaactaggctaatatgataaagcacacaaccaaaagcaacaagtaaatgtggaagcttaaatgagatagatatacaaacttttgtagacgtgtcgttatttttatcgaggtattaagaacttcgcaaggttctttctaatcctcattggagcccctatgcaaagaaagcaaatgtgagggccaagctcccggtccggtaactacgtagatagccatgagccttttccatgcgcaagtgctgcttcgctacgaaccttgtccacactcaagtcgtggtccactttcgacctatctcgaacgctccccgccatctctaccatcgagcttctagttgaaacgtcgtgggtctcgttctctctagtacacgatggcgaccacaccacaaacgtggttggtgtgatttcataagactctcgcaccactcggtacaattagaacgacacgcacaagcaccgaggatacaatggtgcgcacaagcactaaggatttggaggtgtctattccttctctcaattaggggttaacctaaagcaagcgctatagccacaacctaactaacctaagtacttcacaaagcac

SEQ ID NO: 156757 - DNA, 609 bp, Zea Mays
gtccctaacggtgggcggtgtcgcgcagagctccgacgagcttgtgtaccggccaattcactcaaagaccggcgccctaccttagccgagacagaaatcaagatctaatgagcatttcccctcactcaatttcacgaacggatacccaatttgtcctggcaacggtgacagtgggcatcgcggacagacaatcgcgttcctggtgatctaagggatcctagttcaatcaagttggttggggagcatcaggggcacacaagaacactaaaatgagagggcagagggcatgagcagacctgaatcgagctggccgcggtgaggattctttcacggtggcggaaactcagtttgggggaagtgagcaattcgtggtctcgggtggacaattggaggcaagtgtgggtgtgttggcttcgtgataacgtggcgcaacagacccgaccatcaatttataggatcgctaagcggtggccggtgaatttgggtttgagacacgcggcggtcggaggggtgggaggtcactggtgcttgggttagtggctttcactgtggtagctccccggcgatcaccgggcatgcacgatgtggttcattgcaacgtggtcaagc

SEQ ID NO: 156758 - DNA, 426 bp, Zea Mays
tctcacccctcgccgtccctctcctcttctgccctgcaccatgggccgcacaagctcactgaatgccgcaatctacgccgcttgactcctcgcttcctctcgttaacctcccctccctcagatccaccccgtgccaccccccgactcctcgtcgacgccacgccattcccgcctggtcccctcgacacaaccacctccatcgtcgtcacctgcctcggagaagagagggaggcgtctgctgcaccgaccccacgccatccctgcctggtgcctggtcccccggcacatccaccttcgttgctgacgcccacctcagagaagagtgggaggcggccgctgcaccgaccccacgctatctttgcccgatcaacattctgtcaccgtcacccacctcggagaagagagggaggcaaccgttgcatcgac

SEQ ID NO: 156759 - DNA, 561 bp, Zea Mays
aagtaagcgtgagcatgttgcaccgccttaagtcgttgccgacttaagccgattgctccgttagcagggcatagcggtcaccccgagttaagtaagtgtgcaagtcaattgtgaacaaactgagtatctttgaaaccccttttttattgatgacatatttccattttacagagtacatcgtcgtcccgatagcttttgaaatacaactagggataaaacttcctgaggtgttctatgttccaggagttcccgacttctgtgccatccatctgagtgagacgatatgatccggttcgagtgacttctgctactatgaagggtccttcccataagggcgataacttgtgccgtccctcccccgttagagttcggcggaggacgagatctcctactgagaaggatcgctgtcgcacagccttgtcatgatagcgccttagagtctgctggtaccgtgctgattggattaccgcattcagccgttcttcttcgagtatatcaatgtcctccagcctggtggcctcgacttctgctatgttttcgaagatcaaccttggtgccccg

SEQ ID NO: 156760 - DNA, 767 bp, Zea Mays
tgggcgatgaggagccaagggctggacccagacgtctactgcttctgcaatatatagaattatcctaccagacgaaggcgattgggaaggaacaatatcataacaactttggttgttactccttcgtatatcgctctgatgcgagacgccctgtaccaacatttcggaagaagtggccaggatcctagatgaggcaatggttctatgttaagaatgatttggttgagagggaggacgtgaaggatataattcagcgtcccatacaatcacgctttggcatcagaaggccttcgatcgtgaacagtgataaggctcaagcatgcctggtggccttcaacactgtgtgtagctatattggtaccaaatacttggtccaagagcacatagccttcaaagtgtggccccttgttaatgaatgggaaatgccgaaggaaaccgctgctagttcaagcgaaggtggcctggtttatctgaaatatacctaccgctacagaagtcagttcggcgagctagatgatgaatggcttgaagccattgaggcgactagtgaggagttgctgggggcttatacgaaggctgaagatgaagccatgaatacttccttttctgcccgtggaaagagaaggctgaacaaagtatttgatgttattggatttgtctatcatgactactgcttttcgtcacggaaacaagggatgaaaaggaaaattgcaacgacgacctcctctgccgcgccgaagccaaagaggacaaaagttgtaactcac

SEQ ID NO: 156761 - DNA, 774 bp, Zea Mays
cgtgagcatgttgcaccgtcttaagtcactgccgacttaagtcgattgctccgttagtagggtatagtggtcaccctaagccgagtaagcgtgagcatgttgcaccatcttaagtcactgccgacttaagccgattgctccgttagtagggtatagtggtcaccctaagtcgagtaagcgtgagcatgttgcaccgtcttaagtcactgctgacttaagccgattgctccgttagtagggtatagtggtcaccctaagtcgagtaaacgtgagcatgttgcaccgtcttaagtcactgccgacttaagccgattgctctgttagtagggtatagtggtcaccctaagtcgagtaagcgtgagcatgttgcattgtcttaagtcactgccgacttaagccgattgctctgttagtagggtatagtggtcacccctagtcgagtaagcgtgctaactgataataaaacagttcgagtgcccttgagaatgaaatctttttattaatgatgtattatcccattacagaatacaatgctgccccgatagcttttgaaatctcgctaagggtaaaacttcctgagatgctctatattccatgaattccctattttcgtgccatccatttgagtaagccgatatgatcccggccgagtgacctccgctactacaaatggcccttcccatagtagtgacaatttgtgccgtccttcccccgttagaattcggcgaaggaccaagtctcccactacaaaggatcgatgtcgtacagccttat

SEQ ID NO: 156762 - DNA, 722 bp, Zea Mays
gggtagaacctcctttcaaactgcctgatgaacacatcccaagtcaggactcctggtgaggaggagtgcgctgcctgcacgcctctccaccaaatttgagcctctcccttcagcagctgtgtgccaaagcgaacacgatcaccatacataatctcaaagacattcatcttatcctccacgtaagttagccaatatgccgcctcgacctgagtaccactgccatcaaaagcatccagcttcatgcccatccactgcatcagagaaagaccactgactggaagaggcgcctcagcctcgccacctggagcagcacccgtagggacaatgcccctgggcactcctcctccaccagcaccctgagcagcacccgcaggggcaacaggaatggccaactcctgctgcatggcctgcatcgcggctaacattgtcgtcggactcatcgagtccccactaggaacttgcggactaccccgagccctacgaggcggcatagctgctgccacaggggtgagaataataagtaaataagattggcatagcatcacttcagataatgtcaaactagcacagacaataacataacatatcaatagttaagcagaaaatccatcctacatgtgcagtgtgtcaatttattgttattccacttgctaggacctacagcctattcctctgataccaactgtaacacccccactgatcccacaaaatggatgttacca

SEQ ID NO: 156763 - DNA, 720 bp, Zea Mays
tagccgcagcacgcggcggaagtctgcgggtctatgacgacggtgagcaattcgttgctcggtgatcccaatcaacgcaccaactgtggcgggaaacgcgtgtcgagtcaaccacggcgaccggtcaccattgccctcaatgcccgcgacgaagggccagagggtggggtggttggcggcgcacgcgaaattgaggaggagagagaagagaggagattcttatagtgcctagggacgaggccgaggtgaggatttcggtcaatggctccgaggttcgcggcaagctccgccacggccgggattccgttgagggcgaatacaccgagcggatgggcagctgacctacgcggctgacaggtgggtccctgatgtcggtgctcctctcttagtggctgctagtggggccagcggatcagtaacaggcagccacgcgcgggcggagtgggtgaagggccgcgcggcgtggtttgctgatgggccaaattcgtagctgccggcccaaacagggtttcttcttctttttatattatttccttttctctctcttttcaaattcaagttgtatccaatttaattcaaactcttgtgaccaaatattctcagatgatattgcgccataaacattactattttgaagatatattatttttatatattttctcttttttgttttaattctagaatttcttttcttttgtcttttcccttctttcctaattc

SEQ ID NO: 156764 - DNA, 332 bp, Zea Mays
cgctgagcccggggtcaggcatggcggagcctgacaagggaggatgagcgtgttggaagggaatcacttgagtgatcccgcgctcgaccccagactgacctaccataaatgacttaccgcattaaccacgcctggcactgagccacaacataggtgtcggtctgcttcccactcatgatctacggacccctcgggctgcacaacgctcatgacctacgagcccttggactacggtacattaatggcccacgcgcccctcgtcccgcgacacacttatggcctatgagactaggcttgagtgtgcatatacctcccacagggcactacatgac

SEQ ID NO: 156765 - DNA, 980 bp, Zea Mays
gacaagaattgaagtttaatataattaatcatgtctgctaatatgattgattattgtatggtgtcgcttgtggacgccctctcttgcctcttaataggtagtagagatgcatgattgaagcacaagacacaactatctcaagacatgagaaagaaaactaatgcaaccacacagtgatcagtcatgttacagaacaacatcagatctaaaagatcgatgagtttaatagaatttcgcattactgaaagggagaaggcaattcaaatttcacttacttacctgactgacaaaactgaattttctagtattggatctgaaagaaatcccgctaggaaccaccatctcaaatgcccaatactccaagctgagttatcttgaaaatcaaattaccagttccatgcagaaagtaggaaaaggtagacattactactttgccaaaccataaagttcgaattcaagacttattgaaatacatgtttttcacatggtgccccacatcaagcttaccaggtcataactgtagatgatattgctagctttagataaactttagcaccatttaactttagtgtctcccctaaccatccatgccaacttcttcttccatctttaaagactttcacatacatagctagcagtgccacattgaaccagtaagataccaaggccaaaactttgaaccagcacattctagtcccattagtcactatttttcctaaagatcacataaaacatcaagatggcagacaataataatcctagaatttttcagtctaaaagaggaggatgaaatggctaaaatagggaggtttttttccaaatacatggtactgttttcgtgcacgcaaaacagtttcattaagataataaaaatgatcttttccactggtccttcaagctgttcgcaagcatggcttcacgccaccgacccgcaacaataagataggcatccccaccagcacccatcatttatgtaaaac

SEQ ID NO: 156766 - DNA, 281 bp, Zea Mays
gttttaaattgttcgccgtacgtgctccatttcacttctcaacagcactcttctcttatttgtcccatgagccttgcctacgggatctgaatcctccgtcgtgcggccgtctcctcctttctccatcgtaacactgcttcgtggtcgtggcattatcctgacaccggcaaccgccatgcggccctctcccttctccagcaggacgccatcttctagtcgcatgtatagaaataggagagacaacataattcaggcaaaatggttgaataacttcaaaaaag

SEQ ID NO: 156767 - DNA, 680 bp, Zea Mays
accacctacttaatcacctagatagattggtctacttcataaccatgcacacaatcacttcgtatgaacttgtatttctaacatcaacttcaccaattaaacacaagcagcatagacaacacttgtagaatttatcggccagtcatttgaaacattaacctactttcgtattactaattcaccacataccgcgactgtttcacaatcacaaacaccagcacctcgcaaacatcaaaccaattcaaaatactagatatatgcatcaccacctaaacctcgccatacatataagctacatctattttacaatcgtgaacactctcacatcgccactatcgcgcatgcaacaaacaagatcatcatcgactaatgtattgaaccaatctaagtatccaaccaataaaatgaatagtgaatcggctcaccacaactaaattgaactcgaatctcgcaggactgacgacgttcaccggttcatccaattgattgaatatccgggaagcattgtgttggagtcatcctcactataaaatgaaggattcctcacctcacaacatcacatatacgcacatggttaaagacaaaataccgatgccgagtgaggaaacaagtatagaagaaacaacatggtcttaccacaacaaggacgatgacgtgtcacagctgcgagatcaaggcag

SEQ ID NO: 156768 - DNA, 783 bp, Zea Mays
agagaggagatgatggagaactcaatagaggggttcataccggcgctggtgcggtgacgaggccggtcgacggacctaggcggagggatgattaccggcgcatgattccagcagcgcagagcgcaattccggataggcaaagctacaatagtattccctgtggcatggcgagcttcaccggcccgattctgaccacacgacaacgccgtaggcttcaaatccaccacgacagcacctctctcatttctttgtccttggcggggcgcagcgaaagctcagttcaccacggtgcacggtcgggcagagggcggaagcaggggcgcgatagatttatagtgtcgtgggttccgcaagggctggcgggcgaaccgcgcccttcctggctgagttcgttcgatccgcgcggattctgcgctgccggtaccgaggtagacagagatatgtgcggttctgttgcggtaaagaagagggaaagtgatgacatgcgggtcccatggatgggcgagacgagcaagcaccagcaggcatcgcgcggctcacggcgagatcatcgcgcggattccggcggtgcccacgacattctgttgagcaccacaggaggtgggagaagacccgagaggcgggccccacaagtcagagacgtggcgcggggatgggctacagtgggtcgactggccgagatgggccgagggagggggagaagtcaggccaggaacagagaaccttttttctttttgttttcttttgttcattcatatttcttgttttcaaatttgcaatttc

SEQ ID NO: 156769 - DNA, 882 bp, Zea Mays
ctctttatgggcttcgtcaggctccacgagcatggaactcaaagttggatacaagcctactgcaattgggatttgcaagaagcaggaatgaacatggcttgtacacaagagacactcaacagtccagattggtggtggggatttatgttgatgatctcatcattacgggggagtcaactgaagcaattgatgtcttcaagcaagaaatgaaatcactattcagaatgagtgatttgggtggactcacctattatcttggtatagaagtgagacaggaaccaaactgcatcaggctatcccagacatcctatgctgtgaaagtattggagaatgcaggactgagcacctgtaacccaagtgaaacaccaatggaaccaaggctcaagctgctgaaggacagtgattcacctcaggttgatgcaaccaagtacagaagcctgattggaagtctgcgctatctgatgaacacaaggccagatctcgccttctcagttggatatttgagtcgtttcatgcaggatcccagacaagaacacttggtggctatgaagcgagttctcagatacattgcagggacagtgaaccatggacttgtgtacaacaagatgggtgaagaactaagtctgactgggtacagtgacagcgaccatggtggagatgcaaatgacgggaagagcactacaggtgtgatatttttcctcaacgaatgtcctgtcacttggcaatcacaaaagcagcgagtagttgctctatcatcttgtgaggcagagtatatagcaggagcagtcggtgcttgccagggagtttggcttaaacgtttgttggccgacatcctgggcaccaacttggcttcaccagtcttgatgatggataatatgtcag

SEQ ID NO: 156770 - DNA, 1123 bp, Zea Mays
agcgagccccaagaaacttcggatttcagagacactagagggtctcttccactccaccacagccacaacattcttgggatcaaccgcaatgccctgttgattaatcacgtgccccaggaaagccacttcagacagccaaaaggcacacttcttcaacttgccatagaactgattcttccttagggcacccagaacgagacagagatgctgctcatgctcggcctcggtctttgaataaatcagaatatcatccaggaacatgaccacaaagtcgtccaggaattcatgcaacatcctattcattgcttccataaaagcagcaggggcattagttaagccaaaagacatgactatgaactcataatgcccatacctggtgcaaaaagtggtcttctcaatatcctcctcacgaatcctcaattgatgataacccgagttcaaatcaattttggagaacacctgggcacccctcaactgttcaaagaggacctcaatacagggaagcggatatttattcttgattgtcacttgattcaaagcgcgataatccacacacagccgcttgcttttatccttcttctcaacaaacaatactggggaagcccatggagacctgctaggcctaatgaaacccttagccagtagatcatctaattgtcgcttcaattcaacctgctcctttagggccattcgatacggggccttatgaataagctgcgtacccggaatcaacttaatctcaaaagcaacatcgcgctccagaggaatgcctggaagctctgccggaaacacgtcagcaaagtcacacaccacccggatgtcctgtacccgcaaggcagcctcaccctccaccaccatggagaaaaagatccccgacttccttgaccggtaatctggaagcaattgcgccaacaaggataacgtgaactttagggaacttcccaagaataccacctccttacccgacggcgcctgcaataacactgtcttccaaaaacaggatataactgcgcgatactgggataaccaatccatacccaagataacatcgaatgcccccaaggaaatcaccaccagattggccgaaaagacctcttcagcaagaatgatggaacacccctga

SEQ ID NO: 156771 - DNA, 989 bp, Zea Mays
gagggaggcgaggaaggcacgctccttcatctttgccttctgaaggtacttcttcttaagcgcctccttgttgaatcctcccttggacttgtacttgccagaggagtacttgcccttcgccgaccagagtgatggtcgcgcgggccagactccgatttgcccttcttggggtagctggcaacgaaggggtcagggtcgccatagttgtagcatctgtccttggacccaccacgccgccggcacatacagttgttgtggaaccgcgtgaaccgactggccacaagtgccagttcctcatccccaaggctctccacttgctcctctataatagacaacaaagaagatagagcaaacatagcaggtgatgagttagaagcagaaccacctccagagactagggccatggtgggtgcactagggttctcaatcttggcccgagtctggtggtcaatctctatggacttgagcttgctgaagagctcgtccactatgagattttcgtagttgggcgattcaacgatcgtcgagaccttcacctcccaaaccttctgatctagagcatgtagtaatttcagcgctctctcatgatcactatagggtagctgtgccttgttggcatgcatcttgttcacaattgactggaacctggagaacatagaatcaatggtctctctagccaactgtgtgaagttctcgtactctcgcctgtacgtctcaaacagtctggtctacacatgatcgttgccctcatggaatctctcgagggtagaccagatctgatgagccgtagtcagatgtccaactcactcaaactcaccagcgagagacacaagaacaaagcattttgagctttgttgatcgaatcatggagcattgaaattcacatcaaggcaaatttcccaaacccggtaactgatgctctgaagatacacagacatgcgaatcttctagtacgggtaattggtcccatcgaagaacggaggtttgcc

SEQ ID NO: 156772 - DNA, 458 bp, Zea Mays
gttgagtacgacatatttggtagatgattcactgagcgcatgtgagaactctagcttcattcgctacatgtgtggggagggggatgacgcatgacgaaattcccactttatttcactaagcatgtggggaattctggggacgctctctatgcgtgtggggagggggatgacacacggcgaaacacctaatttaaaggtgtagtgaagttacatgaagagatcacagagaaacataaaacaacgccggactctagtaatgcatgctaaggaagttgggaggaactatttggaaggaagtagcagacgacactgttcaacgatagatatgatctaagcaaaactcaatcctaatgtggtgacttcttctgataaaatagagggtcggggcatgctcaacccatgaaggtatccctaataagctccaacacgatacatgggccaacaacccaacatacgtt

SEQ ID NO: 156773 - DNA, 625 bp, Zea Mays
cttgagacgggaacaaccgtggcatgcactaaatcccttgaagaaaatgtcaaggacttgaggattaccaagaggagaaaggaaaagaagaaaatcaatacctcttccaaaagcctcaaccatgcctccataaaaggtaacatccaaagtaataatcaagttacatttcatacaaatagaatcaagaagtgtagtgaatgctttgaagaggggcacttgattagatcatgtccctatattaaaaatggcttgattattaacaaggatgataaactctgttttaaatgttcaaagaagggacactttattaaatcttgtccccatttaaaacaaaagggcatagggttagaaaagaaaatttgtactaaccatgtagcaagcaacaaacaaggaaagaagaaatcttctaaacttggaaaacgcatatgctacacatgccgggaaaagggacatcaatgcaatgattgtcccattggtaactcctccactcatagcctgtcatttgattcatatataactaggcaacccaaaattgcaacttgtgctagaaaggcaataaatttgccaaacgctagagcaaaggacatttgggttcctagatctttgttaactaaccataatggac

SEQ ID NO: 156774 - DNA, 447 bp, Zea Mays
cccttcgaagctttatatggacgacgatgtcgtactccgctaaattggtctgaacctggtgaaaggtacttcttcaggcctgatatggtgaaagagaccgaagaaaaggttcagaaaataattcataatttgaagaaatctcaagctcgtcagaaaagttatgcggacaaacggcgaatgcctttgtattttctgattggagattatgtttatctgaaggtctccccgatgaagggggtatcacgtttcaggattaaagggaagcttgcaccccggtacattggtcctttccctatacttgagcaatgtggaccagtggcataccgactccaactacccgaaaccttgtctgttgtacataatgtgttccacgtgtctcaactaaagaagtgtcttcgggttccagatcgaaccattgaagtgacagatgttgtccttgaaccagac

SEQ ID NO: 156775 - DNA, 665 bp, Zea Mays
cgaagagtgatggtgacgagggctaaaacgaagacacctaacctttgcatatctgtggccaatggacaaagagcactgatatggtggcgggggtggaggaggaggtcgacgatgagcctccaacaaagaggcaaaagaaggatcctggctccaacaatgaggattcttattagcttggtttatttgaattgcatgtagtcaatataatgtttattaagagatgtatatgtattagttttaaatcacatgacataatcggttagaatttttttgcctctcttggtttatcatgtgtacgctagtagtgtactcattgctaagaatcatcatattgtatgatgttgttctcacaaactcggtgcttcatattatgactgtcttgcttcatttggaacagtattagcctcctatataactcatatcaacaattgacatggtttctcaatttgtatgccctcctctcccttcccctcccctccaaacagtggttctatctagtatccccgctaagcgttgcttgatccaccccaactggtgcgtccaaacttatagtaatgacatttgtaaggtatccaaactgctcggccgactagcattcatctcattgtgatacccggttagcaaagagaagtggaggttattcttttggttctttttcctcattc

SEQ ID NO: 156776 - DNA, 445 bp, Zea Mays
gcaggtgtaattgataacgctggtagagcggtggtaacgatgttgtgaaggcttgtatccgatcccgtgggaggcgataacattttggccgaaccaaacaacaactaacgttatttgatagcggtgtaaacccatcacgaaacaatttacccgaaccaaacaacatcaaagtgttgcagcaatgcacaaatgaaacaaagctctacacctgaaccaaaaggttgtcagcaaagaaattaaagctcaagcaaatgggcaagtatgttactataactatcaaaaagcatgaggtggctattgctgaaacatgctcaggataaaatattacaagatgtttgatgatgctctaggagagaattcaataggaaacgtcagggcactgtacgctaccaaagcacaatggagtcattgcagatttctcactctaaaatgaagatacaatact

SEQ ID NO: 156777 - DNA, 678 bp, Zea Mays
gccgttgcgcgcgacgtgcctcagcgcgggacttcatcgcggtgactcactggttgcatgtccggcgatcaccggagccactgccacggtgaaagccacttttcccccgtactgagctcgcctcccctctccggccgccagcacccctcagccgaattcttcaccgtcgctcgatgcgcctataaattgagtgcgccacaagcttcgtagggcagtaagctatccagccaccacgaatcagcctcgaccattcgctagaatccacgaattttgaattcgccccaaatcagtctccgccgccgtgaagaacagctcgctgtggccagctcgattccggttagctcgcgtccctctgttgcttattctagcatccgtaggcaccctgcgatcccatcgacccgttcaattgaactggaccaccacccatcgccgggaacatcttcatccatccgcaaccttcacggtcaccgtggccagcacaaccctattgatcattagagaaattaagttgggggaaaggtttgggatgagtccaattccgtgtgcgtcgctcgggaaccctagtcatggccccattcggccggtccagacagctcgccggagcttccccgcgctcgacgccgtcgtggacttcaccctgtgaagaattagaacttgagggacctctgtgcaaatcgt

SEQ ID NO: 156778 - DNA, 399 bp, Zea Mays
tagagaggcgggattcatccgtggcaagggaaaaggaaagaaagctgatgggagagagagagagaggaagctaggtcacgaggataaggaccagacgacggcagccatggatggagctctggccaccggctgctggtggctagaaaggtacgtacgggagctgggagatgcgtagtagacgaggtcgggcctaatgatttgagcgatttcggtgcgccaatggaaagcggcgaaggtggcgagcgctttggaaaagtgagcaaaagctgatgcctctcatccagctcagtgagcttagttggagggacgctttaaacttccccgtccgggtacgtctggtaaagtaaaatgctgggttgcattgcatgatccaccgctgtgccattggtggaggaaaat

SEQ ID NO: 156779 - DNA, 402 bp, Zea Mays
gacagaggagctcggccgttggagggagctcgccctggggaacagggagagctggtcgtgcagccctggcagggagcccccaccgtggatgaacgacacccgcccagccatgggagagtctgttgggggaagctctgggattatatagcatggagaaaagggcaggcaaagtccgatcgatagcaaccggaaacccacgacttcggcacaagatccgcccgcaatggtcggagatcgatgaggggttgttggcaggttctacggtgctcgcaaggatctccacggacatgatgaatccgacatagcgggcccacccatcagcggttcaggccatgccagcccaatgccatgcggcttcctggcgggacccacatgtaagtgagaacaggcgcggcaatgggg

SEQ ID NO: 156780 - DNA, 767 bp, Zea Mays
cggtcgctcgacattggcggcaaggcagacccctactcgaggcggatgcaaggagggcccagatgtggcgccgacgggatgagggagaagaggagtgtttctcacctacgcatgatgacccgccatggctggttgtgtgagtagagagagagaggctgggccatgttggaaccgccatctccatgagcaaggaagggatcgtactggaggtagacgtggcgccgagtgcttgactaggagcatgagcggctactgccgaaatcgcacggcgtgggtgagatttccccggcgtatacacggaggtggttgtggggagaagagaacaaagcttgtcggtggggcccaaggccagggatgagcgcggctgggcgggtactaggtacactctagttccttgtgtaaatatactaaacggcctcgtacgttggagcagttttagcatttctattgggagaaagagagacattcagccagctggttcacttgcacgcaaaagaaaaacaagaagctacagtacaagctagcaagcaatcctagatagacttttggagtaaaatgacgtcaacttttgtgaattagattggagaagatatagaggtttgataaaaaatttgagaagtctgatgtatgcctgatgaagataagaatatgataggattcaaccagattagattaggaaaaagcttaattcgaatattacgaattacagaattataatagttctatattctagattgtttttgtttttcggacaaacggaaaaatac

SEQ ID NO: 156781 - DNA, 575 bp, Zea Mays
ccaccgtgcaccgtggtcagcgaattccatgcctcggattgaggtatgatacccctactcgtaatcaataggaaagcaggatcgtgttgcaaacttcggggaaacatttgggggaccatagggctatagcgcgctggccggtcatggccgccgccgcgggctgcgccaccgcgtcgggtcatgaggcaatggggtgaagacgactcgatggccgttgatttccatgtggacggctaggaatagatctcgtgcgtttgaagcctaagtcgttgattcgtagatggtcggttagatttgatcccgacgtgaatcactgttgttcgttgatccctgatcgtgtgggtgatatcgcaacaggcttaagtaaatggaggtcgtagatctgtgatcctgcagtcctggtgccatgccggttcgattagatttcgatctagtctgggccatccgtggccgatctggcggcctcgatttgagaataccccttcgtcgtgcgcttctttcaaaagagaccttatgttttactggaataaacccgccgtcccctcggggtgtttactgagtcataggaattcttg

SEQ ID NO: 156782 - DNA, 681 bp, Zea Mays
cctggattgtgcgctaaataatggaaagcacagggacctcggcgcaaaaattctcaagactcagactattctaagttggatggcgggttattttcaagcttcctcgaggactctttagcaaaaagacccagccgaaggggtatctttgattttcagccgcccgatcacaatctgaccgaccagattagattagctctgatatgaaccggtacgtgtacgctatccctcgaatcaaaatcctacggtcatggtttaatgaatcacagatctattctgggccaagggatcagagatccacggctcagctcagtttcatccaaacgctgccgaacttttaatcgtggtcgttggctgggatccgacggtgagcaccaatctcctagctacagccgaaccccaactacggcggcgcacacaccacggcggaggcatcaccggagttcccaatccatgcctacaagcatttagttctcgattccctagcgctacgcgtagtagagatctcagcgaactcgacgaaggtcttcttaccgcgcttgaggcagggttgaatgctagctacgacgagcgatgctccgcggctgtgcgatgcggaatttctcatggttctggttgctcccacgccctcggatgtccaccgaagcttcgttgtgatctcgcagacccatctcgacttaatcc

SEQ ID NO: 156783 - DNA, 576 bp, Zea Mays
cagggatgaacgtcgacgagctgggttcgacaggcagggaacgacatgattgttggtgagcgttcgggcggagctccggctgggggacacgaacggtgagtatgaactccggcgagtctccacggactctagcgacaacggtgatagcgtagacgaactccggcaacgaacggcgtacggatgcgtccggcgagcggtggcgcgatgcagtggcagtgagcgcgagtgaggtgcgagagcagggatgagtggcacgggttgttgctggacttgatttataggcaagaaaggagagagaatcacgctagagtttatgccgattgaatgcgtatgcggctgtaaacgtaccattaatggtgccgagaaacagcagccgcactgctgagtgggaaagaagggaaagaggcaaggagaaatggaacatccggcatgacactccactgctgagcacgagcgggcaagcgatccgacgcgagagaatgcaagcagcatcgtggtcaaaggaatcagcaacggtattcactatccaaagaatagaacggctagagcttaaaacactattatggcaaatagggc

SEQ ID NO: 156784 - DNA, 569 bp, Zea Mays
cgtcccagcagtttttgaaatacagctagggataaaactttctgaggtgttctatgttccaggagttcccgacttctgtgccatccatctgagtgagacgatacgatccgggccgagtgacttctgctaccatgaagggtccttgccataagggcgataacttgtgccgtccctcccccgttagaattcggcggaggacgagatctcctattgagaaggatcgttgtcgcacagccttgtcgtgatagcgccttagagtctgctgataccgtgctgattggattaccgcatttagccgttcttcttcaagtacatcaatgtcctctagcctggtggcttcagcttctgctatgttttcgaagatcaaccttggcgccccgaacttaagatcggcgggtagcactgcctctgacccatagaccatgaagaaaggagtgtttccatgcaaagctcggttgggttgggttcttagactccaaacgacatagggcaattcccttatccactttcctgcgaacttttcattcttgacgaagacctttttcctgagtgcttccagtatcatcccg

SEQ ID NO: 156785 - DNA, 605 bp, Zea Mays
cccggctagagttttttctaaaacggctgtaatgggcttaggcctactttactctattattaataaaactcgctatcatttctagcgttagtgttttacttctataatggtatcaaagctaggttaaggtttttcttctcccactcccagccgctagtcgctcgctccttctccgcggtcgtcggccttcccctgtccttgccactagggccctcacctcccttgttggtgtggtatggagtgtggccgcctcctcccggttcctcccctcccacgacgacgcctctactcgcacccatgaatgtggcaatcgcgcccgctctcgaccgacgtgcggactttgccaccctcatctcccatggttgtggagtacgtgcctcccgcccaccccacagtcgtgccagcgacacttctcacatcccacctcgtgatgccatcccccttgcccccctcaacggcgacgtgactcctgcccctgtccccaccgtcctcccctatgacggcgcgcccaccacccttgccagtagcaagtgcacagtccccgcgcacggccaggctgcctgcatcacgagcagtggcagaactacctcatctagacgctctcc

SEQ ID NO: 156786 - DNA, 420 bp, Zea Mays
cacgacggcggtgagcccctttatccacgggcggtgagcaaggagaggggtaccgcggctggccggggtggcatccagctcaccggcggcgaggatttttactgggctatgcttatatgatggccacggcgcacgaatcacggcgagcaacaatcaacggcgacgggccactggcgacgagcgagcagcgctggcagtctgatctttatcaggctactgtaccatggcgactactcattcagacagcctgacaaccatagtttagggccagttttcttccaaatttctgtggcaacacaacccaaactctgcagcaaagttggagagctatataccacctatatttcgactatagtgactgagctcatttgatcactagatcatggttgaattcacactcaaagctgcctctgttacact

SEQ ID NO: 156787 - DNA, 408 bp, Zea Mays
cccgcaagatcatcgcctcagtctcttggagggcctaatggccgcgagatagcactcgggggaggggaactagcaccgcttctggctcggcaccggaccggagccgccgcccaaaaatcacctccgccgacatgataaaaagactaatcaaaagaaaaggaaagaccttaggagcagagggggaggaagccctgacaaataatggatgggttaagacccgccgacatgataaaaagactaatcaaaaggaaaggggcttcactcacttggggccaggaccttccaacggccttggaagcggggcggccattgcttttgctactgctgctgttgttgttgctgctgctggcggccctgagggagatcgcccccgggtgttggtcgcggcggcgaacccgacagtggcgg

SEQ ID NO: 156788 - DNA, 445 bp, Zea Mays
ttatccgaagtgaccgtggcaagctcggtacggtggtcagagtagtttaatggccagagtttatccacggcaaggattcttactcgatcccaggcgctatccacacgatccgagcacgaatcacggcggcatgagcgtgaatccgtgcatggctcgtcggcggcgagtttctgaacttgttttccctggtgcactgtaccatggcgaggtgggttcagttggcctgacagatcaaattcagggcaaattttctctaaattttgtatggcaacacatccaaggctctgcagcaaaattgtagcccaacataccatcttcatctttgttatagtattccaaaacaaatttttactggatcatgcttagaatcgagctcaaagtttgctcaaacccacagccagtccaaattcagacttcaaacagcctgaaaggctaactttggggg

SEQ ID NO: 156789 - DNA, 740 bp, Zea Mays
agtgaccgtcgtagctcctcaaccagtgaatgccacggtagaacaccgcggtgactcagtccctctctccggccgccagcacacttctttcaaattgggcgccaccgccgttgaactctataaattgaagcctcagagaactccgccaggtcgtcacgaagccagagccccctacctccgattagccaccatagtgccctaatttctttcttcccccaaatctgctttccgcgccaccgtgaacgcctcgccatggccagccttctgcaggtcagttgaagcttccttaattggtgttctagcctccctcatgtcccctgtagctcacagacccattcgattgaactagaccgcactggattgccctgaacaccatagtttcctctcgatttttgccgtcgtcgtgagcaggcgtgctttgggtcggtttagtgcaattggttgagggattagtgtcgtcgagggtggaattaggtgttgagcaacagaggggcctagtcgttgcgttttcaggcggcacaagctcgccgaagccactgcttcgccgttcctagttggggacctaaccttgcgaagaaacaaaaagggaggggcctcgatgtaaatgtcagagacacatgtaaatagtgcgcaggattcttaattagttattcaaacagtcagggtcctctgtggaaagcgaacaccacgggcacgacccaacggaccacgccgggagataaaactccagccgctctggc

SEQ ID NO: 156790 - DNA, 606 bp, Zea Mays
ctcgagactaatcttaaatgagaaaagaggaatatgaagctgaaacgacgaatataatgcaagcatatgcaaaaacaaccgttaaccttagtgattcttaagtgaagatagatgatctcaaagatgaagtaaaccatgtaaggcaacttaatgagaactatcggattttagcaatgaactgctacaccctcggcaacaggtgctacaacgaattgataaagacctttgcttctgccagagctatctcttgagaaaacagttttgtgaatggcaatctagaagggttgatgcggtgggtactgagtgaaactcgagcttacaaaagcattatttcggcatgtgaggactactatgcatggatatgtgcccgaagcactgctttggttttactaaaagtcgggtgcaatcacttgaggacttgcattgaccctgacttcagagtttctgctaaccacgtctaaaggtcaactattaaggcttcgaaatggtctaaaaattcttatctaatatatggaagaaaagcgaaaaagagattagtattgatgaatctataaaaataggaagaaggtttgtatcctcttactttcgtctgtacctacacggggc

SEQ ID NO: 156791 - DNA, 1084 bp, Zea Mays
ttgtatgcttagtcctagtaaatattacattctatgtgattgatttagactaataatcatgttctcgctgctagcggggcaccacttgttctcttgttaatgctcaactatttaataaatgtagataaatcagtttagaatttgtcaacacttgattgataagtgttgttagtatttgtcggtacctagaaacaggggtaatccttgttacaaggtgaagacgctgggccagcagagaagtctctggttgcgtggagaacagttctccgtcgtgcctcatcagccgccctggggtcgccacgtggtgaagggaagggacgtgctccagatacacgcagtgggtctggacctactgcgtggaaggcaccgaaccccgcgcatgacgggcggacctccgagatgggtctcggaccctttcgagtggggtccagactaatcaccgctgggtcccgggattctggggcagggaatacccagaccatgccctggatggggtccagggacaacatgtgtccagacctagcttggtgcgaactcgaccacgcaacgtccctattccctagtcaggcggaggcctggtgcagtcaagcggcctactatgcatgacgtaagcatatgggatgggcctgacgtaaagccgttgggccatgctgcccctgcatttattgtggaaaggacgcgccgtctgactacctcgctgacaggagatgtgccccttcagcattaaatgtgccctgtccacccaactggcagggcggcgcccaagccatcctacaggcggcatgtctggctattcccgttggccaacagtacagctacgtcgtggcatgcgccgcacccatcataactcgcacgttaccgagggtgctacagcaagatatcaatactgaacgcactgcggatatcatgacgcacggagaatacacaggctgggcaagcagtagttccatccttccatttgtcattgggcccacgtatcggggctcggtacctttgtgcatgccccccttcggctataaaaggggaggcatgcggtgttacaaggagatcaaatcttaggctcactcagacactcacaagttca

SEQ ID NO: 156792 - DNA, 557 bp, Zea Mays
aaaattcgccctaaactttgactgtcaggtgcactgaatgaggaatggccatggtacagtactgaagaagatcgactgccagccgttcaccgtcgacgacctctccgccgcgattcatgccgccgccgtctcgattcgtgctcagggaggaatggataataccggggatgggtaaaaagatcgggcgcgggatggattgcgattgctagctggtccggccatcctgtccacttgccgcgtggtcgaccgagtttatcctcaccggagctcgccgtttcactcaaccgtgccacgccgcaaagcattctccacgtcgtagggatcgtggaggatagccagttacccctcctgcaccgttttctccacgcacgccacaatacgcagagcacggtgaaatatccaagtcgccgtgagctgatctccaacccaaattcactggccgccgctcacgatcactataaattgagtgcacccatggctccatagggtaatcacgcatctattgcaccaatccttgccccggattatccaccagggaccgagaattgctcacttcc

SEQ ID NO: 156793 - DNA, 503 bp, Zea Mays
ctggggcactccgagacaaactcgaagttaacatgtcccatggaggcagtgttattggaggccatacgatagccgatttgactatgacccatacctacaagggacaagaatacccgaatttacaaaaaatttgggtgaccagggcaaaaagcacacaggtcaattcttagtccaattaggggaactgaccgataaggagggcattctgtgtacgtttattttcattatccctaaccggcactgctttcgcacggtatgccacctaactctatttactattagggagacttagagcagaaatgtcatgaccagtttttctccagagattatgagttagacctggtcaatttagcagccctatgacaaggaaaggacgaatctgttaataattataaccagaggttatgggatactagaaactgatgtttccaaatccacattgcagaaaagcaagcagtagggctagcccttaatgggatgcattattaactaaaggaaacatt

SEQ ID NO: 156794 - DNA, 721 bp, Zea Mays
cctatctcgatacgtgatcaaagtatcctataatactctagtatcatgcactgatctaggccaacctgtgacgacaaatgtgaacctcatatcgaagtcataagcgaccatgacattttgcgatgcataaccgtgtcgaccaatatacttcggttgcttagaggccaggatagaagcgggaaagtggcttccatttattgcacctatgcaatccttgaagtgtggccaaaatctactctctcgcagcctaggatgaatctcattgaaatgtgtgtccttaggcttgatgacgtcctaagacatcctataaattgcattaaggacttcactaaatttgcggctaattgtttccaacgagtgaccaaacttgttcctaatctgtctaaaagattgtggacccccacatgcccataagaaaattgcaaccgcttcctttgtacttactccccgacttggttgcagaccataactatgcaccaacgtattatgcaaacgacgaaacacagtgcggcacatgcgaaacatgtcatagcaatcatcactattctccaatgtacgctcaacccattggatacctgtttcgaccatgcttcttctgggtaccctacttgatgagctaccccaaatatccaaagtcaatgctgccactaataattcctcatgatccctatcatcataactatggtcggcatcaggctgaaacatctgcacagatacaaac

SEQ ID NO: 156795 - DNA, 628 bp, Zea Mays
taggaagtcatcttcgtcagtgccattgaacactaaggctcccttcggatattttagtttctgggtgtagtgtctggcttctaagatttcttctttggataatttttccccaaagcatgtcgaataatgcaatcaacatcttcggccggagcttcgggggcaggagattttgctttttctatcataccttgccccgccgccatgccggtatctgaagtttgttgcccagctttatcctcaagcgcggcagccttcgtctcaatgggcactgaaggaccagcttcggctccggcctggactttaacagcttcggcaactttcttagtaggagcagggctaaaggcctttgtggtctccatgacagcgtctagcatgctggccatcctccttctcttgggagttgaggcaggagccttttgcactttcggcaattctgcctttgctggtgggctcagaatttctggcattatcactatttttcccaattttggctcttcgaccgcatcatctttggtttcggctagcccgactgtaggcaccttcagcactacaatcgatttttcagcgctctgcatggtgggagcagcttgttttgcttcagtagttgaagaggtcccttcaccaaatt

SEQ ID NO: 156796 - DNA, 571 bp, Zea Mays
gacgaactgaaggtaacacacttggtcattggaagacttactagaagttctgagcttgaagatatgtggaatgcactacctggtgaattggagactgaggatgctagtgctatggccggggctcccgagcaataatgtgttgctaaggatgggttaggaggccaggtgatctcaaagcaaaggcatgtcaataaaacatcaaaggttatgagggaggtgccaaagaagcgaaggctccgaaaatttttagggacggatgtactatatgctgagccgactgatagtgtagaagttgttgtgtagaaactggctatttaagttgattgcatggatgacgtggtggaaggggaaaagatggaggagaagtagagattgccctcgtgcctcgtcggaggtgctctaatattcaagaagactcggttgatcttgctctgtcagatggtgtgatgaaactgcaagtgcaaggcattgatgtttctccttttgattttcttttcgaagaggctatcctagaagacgcgatgagtgaaataccagaagtacatgtcattgatgttgacgtacatcaggc

SEQ ID NO: 156797 - DNA, 539 bp, Zea Mays
ggcgactgttggctggcgatgatttcatgatgatggatgcatggggagccttcaattctccgtgcgtggcgtgccgggccttgttagcggtactacatcttctgctactgggaccattgtggcgcaacgggttagcaggccgactaagaaatctacaaaggtgtatgagccggattgggtgaatgggctgcagctgtgctcgctttgcgaataagtagaacgagagttgcctggtgaagggcatgtaagaattattcactacaacttcttctccaagttctgctgctcgtccgccgccactcttcttcctccttaccttctgctactcctaatcgtcctctgctactcttaattgatgttctcttctactgctaccttgtatccataccgagttgttaacagtggtatcagattcaacgatccttggccgatcctcgcgttctcgcgctggatccttctggtattcattcccatttcactcgttttcgccgtcagcaagttctcatgaatccagatactcagatcatcttggacgagat

SEQ ID NO: 156798 - DNA, 479 bp, Zea Mays
aaaacttactgcaattggtttgtgccaaagggatacacgcagctaaatctgtctgcagaccatctcctcgctgacttaatgggatcaaattggggccatattgagcatcaggaacacttggcacgtcatcgatagcacaaccaaagtcttcagggggacggtctactacaactagacgcaccacaacctgcatgagttgcaaatgggtcttcatagccgaagtaacataattatcccaatccagttgacaatcaattgggatgactcgtcttatgatatttggtggatgaccaatattaagcactccgtcaaccgcaatgtcatcatcttcatggtaacctagcttttgtttagcctttgtaaacacatcactcaacgagggtctaccatcgaatagtaccggcacgtgtcgcatgtcaatgaacttggcatttccatacggatcttgttccacattgcctccatgatataagctcaaa

SEQ ID NO: 156799 - DNA, 618 bp, Zea Mays
taatttaatttctcgggttaaataccaatctggactgggcctcaaaatcatagaaacccaggggctaatacagaagaattcctaagactcagtgcactgtgcaatggacggcgggtttatttctattttccaggagggcccttttgtaagttggcgcggctgaaagggtacatgtgaacgtggaccgcccagattagatcctatggtgcagattagatctggacgctttataaaccggtacgcgacgtcaaccgtacgatcagagatccacgatccacgaatgccaacgatctaatctaccccgagccacacgattagaatccgatggctcagattaaaatgatgaaggggggggtatctctcttctaatcagagccgttcaacaaaagatcaatggctcacaaactctctcttacctcccgacccactccggcggctcaccgcgccacgccgcggcaaagccatggccggaacgaccctattcgcccacatgatgagtcgattgccaaatcagttggtgcaaaatgaaattaggaaggtggcgaacacagaggtgggaattttaccgaggattaggtcactggtaggcctgcccacggcgcacggcggaggtctgcg

SEQ ID NO: 156800 - DNA, 694 bp, Zea Mays
catatattgacatagttcacaaaaacatcacattacaaccacataatcaattcacacatcacaaacttcacatgagcaacatagctcacataaccattttaaatagcaacaacgagataagttaaagtgtttagttcacgaaaacacatagcgtacaaagtttggtttaacctactgagagaaactgtgcacgagttaagaaacaaagacgatcaagcaccatactcagggataaccactacttggatggttagagctttggccctaccgccaccaggaggagggtacgcgaagtgggactcaacaaatctagttcctatgggttttgacccactcccacccgcttcaggcgtaacctatgcaaggatgcaaatatgaacaagttaaatgcaaatatcaacaagttaagtatacaagtgtataatatcatcgatagttatccaacataccctatctctaggtgcaggtatatgtgtcatagaggtgttgaaatgttgagtcctttgtccctatttaatgaatatttgactaagtttagatacgattcatgttttgctactacactaactagatgaaatgctagtttagagaatgttattaagagaatttgctaagattaacgtaccggagctggtgtggatgcaaactggctccattgtggttgttgtcaaatgtttggtgtcatgccctgttg

SEQ ID NO: 156801 - DNA, 398 bp, Zea Mays
ccgagctaaggagtctggtcgtcctcgacctcgcggagaacgaactcatcacgggcggcatcccggactctatcgggcggctcgagaggctggaggagcttctcctagagcacaacagcatgtccggcgagctgtcaccgggtctgagcaggtgctcgagtctcagaaccgtcattctccagagcaatggtttccatggagacctgaacagcgtcgacttctcctcctttcccaggcaaaaagttctagatttcatggacaacaacttcaccggcacagtccctgagagcctgtactcgtacaacgacctcgtcgcgctccgactgtcctccaacggcttccacggctagctctcgccgaggatcggcaggctcaagtcgctcaggttcctgtccctg

SEQ ID NO: 156802 - DNA, 1025 bp, Zea Mays
atcatatatcgatcgttttcgacatatcttcgtttcgaatttttcgttttcgaatgaccggtaattttgataccgtataccgaccctaacattttcgttttcattttcgtactgttgttataaaacaaaatcaaaactagtatcagtgttttttcgatcgtttttgaccgttttcatccctactctcctgaattcatggcaccctcacggccaaacttcaggacatcgttcgcgtaccggacgccactgctcaccggatctggagtgtccttgaggcttagttcttcggccaccgccagactcggattctgtacctcgagaccgccttccgtcagcttacttagggcaatctctctgtggacgagtactgccgtcagatgaagacgatggcagacactcttcgcaccctcggggcccccatcaccgacgagtgcctcgtgctcaacctcctccacggcttgagcccttgcttcgatcgtgtgatgcccatcatcacccgcatgaagccttttcccacctttgcggagaccaaggacgatctacttctcgaggagcttcgcctctccgccactgcgaccgccgctcccgccacaacgctctacagcgctcctcaggctccccctctgcctccgggggggatcctcttcaccgcactccggtctcccgccgtctggagctcttcggcagcctactggctccggggggtcgcggtcgtggtcgcaagagtggacgtggtggccggggccattcaccgggtggctcccagtggccatccttctacaacccatggactggcaccatccagatgtggcacgggccgtccgcgggcacctcggcccctcgcccgccgcccctcagcaggttttctttgccgctccacctccggcggcgccctcggcacctccccagcctcagcaggggctccttcccctcctagggcctctggccccacccgtgtggggaccctggaccaatgggtgggacacgcagtctctcgccaactccttctccacaatgacgctggc

SEQ ID NO: 156803 - DNA, 1319 bp, Zea Mays
tttcattcatgtcagctatgatggaacgcgtcaccatcaagtcatgtccggatatgtgcacatcacaccaaatgggcacaggggtctctacaatgacttgtacatcagaaggacaaagcagcgcgccacaccaagcgtgctcgtgctcacgctggcaggtgacgaagggcccatgacgaccggagaagccacaccacgcacgaccacactttgagtccgtggaactaattacaaagacgtcagcgttagacttgttataagagccagagcaacgagaaaggacgacgccatgccaagagtacgtctacgcacgaccctacgaaggaccaaccacgccaacccgacgagcagatctatctctctctccaatagaatacaagtcccactataaggtcctacccttgagatataaaaggaaggtccccctccttctcctagacacgaagacaccaattgtaacaggccctcaacaatactacaatcagcactacactgaactaggatgcaaacctgaaccaatataacccaccatatcaaacccattgcttgagtccaagtgactcactattagagtgagtctgcgctagcatccccaccaaacacaaatcttattgtcccctggtttcggaatccacgacacatggcctcctcatttctttggctaatcttgtctcgctgcctgcataggcgcatggcaacagagagttgtggtagtggttcgagacatttgtcgataggggaaggtaaaggtcgcaccactggtggggtgtggcggcgaccgttggtgagtcggaggccagtatgattttctgatgtactattcagagtgagggaggtagaggtgggaaagagatgggaagttgggagttagcgctcgtggtggttaaatggttggtcgcgcatataagagataagtcttattttatctgttgttaggcgagacgtggggaaaaacatatctatgcgcttcacacgagctcatggtggttggttggtggcatatggaagagataagtcttatcttatttcgttgtaagcaagacatgggggagaaaaatagattaacttacctggttgttagacgagatgtgggtgagaaaaatagatctatgtgcttcgtgcgagctcatggtggttggttgattgtgcatgaaagagataagacttatcttaagccaaaagttacaaattgagcaagtgtctttgataccacttgatcggaatgatgacacataagagggagggcaaattagacaatctattttctatctaaattaaggcctctaatttcttgcctactcaaaacctatgcaataaat

SEQ ID NO: 156804 - DNA, 620 bp, Zea Mays
cgagccactatcacagacacacagctccaattgccacgatgcctcagcggcggcgcaatttcacatgacggtggggcgacggaccataagacaatggcgaaatattccgccaacgagcctatatatgagggcaagactcggactgcgggcgtcgacaactcccaacaaccaaccaagcgcgacctacggccactgacgatctcggcgttcggttctaccagatccgttcgccgcggggaggaagctgcagatcgcccggtcgaatcggtcttcagttgaagacacagctgaccagagcggcccacaagcagtgacaacgcgcatggggacaacaggccaagcaggcccacccgtcatcccccacgggcagcagtggggcgcggacgcaagtgggccgagacccctggcggtccacgagtgaggggctgggtttggcggggaaggagttggtggggatgggccgaccaggccgtatttcggcccaaacggcaacatgtgggttttccttttatttcattttttcattctcttttccattcaactttgaattcaaatctgttccaaatttgagttcaagtctaatgcacaaatggaaccccaacataatgtgggatagtttt

SEQ ID NO: 156805 - DNA, 413 bp, Zea Mays
ggcggtagcacgctccttgtgcggcggttcgccttcatgaccgttggtcgtggcaaagatgaaggggcgcactactgtggggcggtgatatgctccttgtgcggcggttcgccttcttcgcactcgaagaccaacgcgccagctgtatgacttgtgggaccgggtccccgtgtcataggatggataccccggtgtgcatcaggggagacttctcgcgacgtttcgaggcgggagcaggggagactacctttaaaggggggttcatccctcgagtagcagccatgccttgcttctctcccactcgcagcgtcctctcgcctccgagctctctgcgcccctttgccttcaaggtctctgctttgcgttgccgtagtttgccatggccttgtaagttcatcccgagcgtgcccaga

SEQ ID NO: 156806 - DNA, 560 bp, Zea Mays
attcgtcgtccgctgcagcatgccactgtttggttctccaagagccatgcggcatcaacctcttcctcaaattcctcacctggtccgtctcagtgttccagattctcctcccctgctcatgcaaaccctgcaactgcaactgcagctgcagctgcaaccaaggctctgccgagaaggtgatacagacaccggttattaccacggcagacaaagaagtaacagagacaaggaacaaagatcaagatgatgagacggcgctggcacaagaagatatcaaaacggtaatgagaaacatagggtttaatttggaccaaccagagaacggcatggccattggcgatgattctgtagctcgggttttcgacgaggacgagccgagcctgcaggaggtatggcaggcattctcggtgttcgatcacaacaatgatgggtacttcgacgcatcagatttgcagcgggtgctcgggagtctaggattaagagaaggtctagggatggatgagtgcgagcagatgatcgccaagtatgacacgaacaaggacgggaggatagatgttgcg

SEQ ID NO: 156807 - DNA, 424 bp, Zea Mays
gtggaagtcgagcggtttggggcagtgtacagagagttgtcgtgtcacaaaggtggcagtgtcacaaggttgagtcccgaggtaaaaccatgtcaagagcgtgtcaaacggtggagagaggtttccaaactttgccacggtgtgttcaagggaatttggcgccagtttgatatttggactcgtttgatttgagttttgaaaacagagaacgcgattgatctttggaaaggggctgaaattcagatttctgaatttctgaatttcccccaagtgtattagtttaggggctgttttggggattttgaaaagttcaaatggcaaaccttccttactatgctttgttggttaattagtgaactaaaactttgtaatttggtttttaccaaaatttgtatttttctcccaagatttctcccaaataccc

SEQ ID NO: 156808 - DNA, 1003 bp, Zea Mays
caggcaaggggcgagcagtcttgaaccacagctgcggggggaattcccaagcgacgtccgcaaacttactggggaaggtaagaaaatctcttttacaattttgtctaggaaatccgaatatttggcagttattgcctaaaaaagagttggtcctgttgaaataagaatcatccgacacagtagcagaggcagcattaatgctgagggcagatttattcttaacgatctcctggtgacggttcagtatcttcttgggccgccaaattaatttccgcgaggcccaaggacgcgctcgaatgctcctcagagaataccaaaggttaggcctcacaaggtgaccggaactaagatttgaatgattttgaaaagaagaacatctagcaatctgctcatgagagtatgaacgagtggccagctgatcaacacgacgacgagcacggaaagaaatccgattgaacaccgaggaacgtggctgcaaacgcccagccccgacaagaccacacagagggaccaaattcgcaccagacagaactggcgaacgaacaatatcaacaaatgaagctttctgattgcgaccacgggaaaccagagtccaagagcttgattcttcatccgagaagagctgccattccttgatccaattagggccaccagaattccaaagatggagataagctttgaaagatgaacagttaaatgaatggcgcctgtaaactgtgaagcccacttctttgcaggaaagcgaaaatcgaaaaacccggtctgacagctgaagagtcctgaaaagcttcgcagaaccaccaatgaaggattgaagcagaagacccaccgactcttcacacaaacgcgaagagcacctgccgaaagaaacgacaagaaagaactcatggcggtcgaatttgcccggaagcaagttaaccgggcgattaaatctgtgaagaatccaatcctaaaaacggaggccgacagaaaaatccagagaagcggtagacagaggaccccc

SEQ ID NO: 156809 - DNA, 511 bp, Zea Mays
tttgtaatgttgtacctatattacgttaggattagtcgctattgaatcgtaaatgttaaatttctgtgcacagccggacaatattgatataagattgatacctaaagtcggtatgacatttagtaacgtggacgaggcgtataatttttatagtcaatatgcatacgaggttggatttccgttgaagaaatatagggagcggaagaattgtaaatggttgaattgttcaatggaaggaaagaatgctgaaagggtagctggaaatccaatgatacgtaacacatgttcaaagcgaacacaatgcaaggctgggatgaaacttaaaaaaatctacgatgatgctaaagacaatgttattttcgtccgaattgatctggtaaactatgagcataatcatgaattcttgaagaaagatacagaaaaagggcaattgcaatgcaacaaaactcatgatcgtgaatatatggagttccttagtgcaatgcgagaaagcaggattccacaacattgc

SEQ ID NO: 156810 - DNA, 516 bp, Zea Mays
acaatgggtaggcgatgatgtagaacaagtacatgctgatgtatcgtcctgtatcgctgtggccgatgcccctgtactttggacttatgagactgctacatgtctcacaggagtagatttttctgattaccagttcataagtatagataagaagggtttcgttcctgtaatgctagagctgatggagaatcagctaaatcctaaagaaagtttaaatgatgagtacacaaaaaattcatgagtccttggtcacggacagttcggcttctaaggccagatggtccggtctttcacaaaacagttcggtctttaagaccgaacatctaccacagcgtaaagacagtattacggacgatccagcccccgagactagagagtctgccatcacacaaagatcatctgattcctctgtaagagacatgatagaggaattcagagatctcgataaactaggacaggggtttacatcggccgatcctttggaggagatcgacataggagatggtaaaactccaa

SEQ ID NO: 156811 - DNA, 421 bp, Zea Mays
gtcaatctgactttgtttaatggttgactttccgaagatggtatggcttggccgccagagccaatctttggaatcttcatctccactttccacatcaaagtcatcactgtcattagagtcttcagataaatccgtcattatcacctttgtgatcttctctgtattcgttttgccatagattcataaaacccagcaataaaagggtccacaaccttcttctcctcggccacctatgtcacctcagactccttcttctcctcagacatttcttcaaaacttcagtatttcacgaagctcgaaaatcaagcaagagctgaccgcaggagaattaaaatttgagaaaacagtgcaagcaacagaaatggcgtagcaaatgccgctgctgtgggtttctatttatacgcttagtgcattgcaactt

SEQ ID NO: 156812 - DNA, 819 bp, Zea Mays
ttccgcggcgaaaccagacgggattgacgtcgaaggcagcacagaatctgatgcccagatttgatctcagtaggtggagtcgacgaattaatcggacaaaaaaatgtgtagtaattaggcggtggaaacagctgaaatcaaatctgcagattacacgaattcaatgccgaaagtgagctcggtgcgatcaagcaggaggaatttggtggggagggcgaggagaaagctgggaaatggggaaacctgttttccctcgcgaattaaattaggttgcgtccagtctgctactgcgtgtgcgtgaagagaacgaatttgggaccctccgcgctaattatgggaaagcggctggcatccaatatctcgaaaccgcccggaatcttctatcgtgttgccggagttttggccgttaactagttttgtttttgctggtcctgtcagctttagcgaaagattcaagtattggtggtgagagtgttgtatggaaacgaagaatcctaatcttaatcatttatactcttattaaattctaagcccgtgaaagctctatatatcataatcttagacttctatcttatatgtgtatatatatgttctactgtttttatctattgtattagcaataacagacgggatatcgtaacggctgatgacgcgttttattctatagaagattataaactttagcaccgaaaagatccaaacgagagtgctaaaagtgaagtggtagttattaatggtttagctccatcaagatgtgttaaagcgagccaaggtaagaaaaaacatctcctaccatcctcaccccacactctctctttc

SEQ ID NO: 156813 - DNA, 542 bp, Zea Mays
gacgccactccggtgacccccccaccgtacttcccctctgccttgcggcttgagcatataagctcgccggtgaacagccgtcttccggtcgtgtgccacgtgcttgagcccctccatcgcatcgccgtgaacccttgtgcctctacgtggctcgtcggagtgactgccacggtagatgccacagatccacgcacgccagtgcccttcctttcctccgaccgccgcgcatcgtcatccaaattcccggccaccaccgttgagccctataaattgaagtcccaaccagccccgcaagatcgtcacccacccagccaccgagaatcgttagcaatcgttcgccagagctcgtgaatttcgaattctccccaaactggtctccgccaccgcatgatcaagctcgccgtggccagctcgattcaggttagcccaagttcctctgctgcttgttctagcatccttaggtaccccgcaaacccctcgacccctttaattgaaccggatcgctagggattaccgggaacgcgtaccattgtcctcatcgt

SEQ ID NO: 156814 - DNA, 597 bp, Zea Mays
tatcacccaagaaaagccaatgtcgtagcagatgccttgagtcggaagttgcagtgcaattgtattctgatggattctcgcatcaacaccttgtgtgatgagttgagcaagatgcaaatagaagtgattccttctggtgctctatctcacttttttgtcgagccatctttgcaagaccagatcatcatggcccagctcagtgacaagggagtgcagattatcaaggagaatctccatcagaaggttgaaaagtataaatgtttccgccaagatgaaaagggtgtattatggttcaaaagcagattggtgattcctaaaaacaaggacctcaagaggaaaatcttggacgaggctcatctctccaaattctctatgcatcccggaagcaccaaaatgtaccatgatctgaagcctttgtattggtggaccagaatgaagagggagatagcccagtatgtatcggaatgtgacacctgtcagaggataaaggcaagccacttgaaatcagctagagctttgcaacccctatctataccttcgtggaaatgggatgacatcagcatggatttcatcgtgggtctgcccaacacctctcgt

SEQ ID NO: 156815 - DNA, 503 bp, Zea Mays
ggtggttgtgtcgtgcagtccccaggccgcgacgaagtgcggttccatggcaattgttggcgtcggtgagaaattggggcagcaccaaaggcttcttccacccgcgagtgcctcaatgatcgctgtcgtgccccgaggaagcccactgacccgagcttgcgcctcaaacgatgacggaacacaatttccacggcggcggtgtctcttcctcacaattcgcgacggggaaggatgatggctcgactagggaatcagagaggcgaggcaagaggtcgcggcgggttttatgcctcccaaggcagagtccacctcccccaagcacacggcagaaaggatgaggatccgggtgaggtttcgccatttctgttgaaaccaacgccgaggagacgatgcggatgtcgcaacagaccgggtcgaagaccaccctgatcgtgggctccacacggcagagattcccccgggataatcgactttgggtgcgtgggactagagctcagccacag

SEQ ID NO: 156816 - DNA, 424 bp, Zea Mays
gattctatgcgcgaagggggcatggctgcttgtaatccggaacgtccatcaaagagccaacggtcagaggtcgtcttcttccccaaggcggttgagcacggcggcacccaccggcgagcagcgtgcccggccctaggtgccctattttcccacgggaagcgagctacgcgcagggaagacggaggcagacacagctgtaggtgtcttaccggctaacagaaagaagaagcggggtgaccgcgctaccagcggcgcagcagcgaagtcactcgacgacgagcaatcgctggtgctccatgatccaatcgtgtagggcgagactacgggcgactcccagagaacgagtcgaagcccccacacccaaggccgagaccccaccaagagcgtatgcccggttagacggtggcggatccccacgacggag

SEQ ID NO: 156817 - DNA, 298 bp, Zea Mays
ccaccgtctagctcggttgtgacacgccttaagtcatctcaccactcgtcgcaagccatgaagactcgacagtgaccaccgtagaccgtaaaccagtgaacgccacgttagcaaactccggtgactcctcccccttttcaccacgcgcacttccccgtccaaattcgccctcctcgcggccgtcttctttaaattgatgcctcggcctgttccaactacttgttatgaacccagtgaaccagtccttgcctccaatcgttcaccatagcctctcaatttctcttttccctcaaatctg

SEQ ID NO: 156818 - DNA, 1443 bp, Zea Mays
gggtggtcgaggggaaagctgaggcgtggttagagttggtgaaggctcggtctagtctagcaagcgtggggaagcggcgcttgttcgaccacgtgaacagactatcgagaagggggagctcacgcaggcttagcctgtcaatgcaactattgaagagatcacagagggaccgactgacagcacctttgtttttttcagacgcattgcgaatgaggttgaaatcaccaaggatcaaccaaggcccatcaatgtgcgagtggatctcctgaaggatttgtaggaagtccggagcgtcacggtgatcggagggagcatagacattggtaatgtgtatgacaacattgacagccaggagagtaaagcaacaagtaagagcatggcgcctaataatgtaagaatttagctgtagactattttcgttccaggccgtgaggatgccgccacgggtgccggcagccgggatgtgcagaaaattggaagcaagagacgaagggaggaaagaggcagccttgaacacagtaacgtcgctgagttttgtttcctggagacaggcaatagctggggaggaggagacaatggcatcacgaacaagaacacatttatccgagtcgccaagaccacgaacattccacgacattacaacaaggttcttaccacaactagccatgaccacacaaacataacaccaagggacaaggattagcaagccacccagaagagtctagcctaagcagcagaagacagaaaacaggctcacagagccgaccaacaacagagagacgaacaacacaacaggacgagcagatagcggcgacagacacaaacgcacggacgccgacctccaaagtgcgcttggaacaaaggctgaagatcttcatcccatggccggcggcaccactcccacggcgtcagccgcagagcaacccaggccagcagcgcgcaccagcttgcgcagggcagcgactgagattggggccttggtcttgttgagcagtcccatcttctgaacttctttcttgacagcagcagaacatggctggagggaattctgaatttcctttcgctgaacagccttgtcagtcatgttgacgaagttggatgaggccttctgagcgagccgggtgctatgacgttccggctgcacaaccttctcagcacgggcgcgacgcctagcaccagcacgaggggtcccggtggaggcgacaggcaacagcggcggtggcgcacaagggggagcaggagcactggggcgagcaggcaagttgggcgcgcgggagcgagcaggcgagttgggcgcagtgaagaactgcggcgagctgacggcgcgactgtaagcagcgagctgagcaaagagggctgacaaacctagtagctgtgcggtggcaggattctcaccagagacttcttccactggcatcatcgtgtcgccacctccgatctctc

SEQ ID NO: 156819 - DNA, 617 bp, Zea Mays
gcaaggttctttaaattggttctcaaatttaaaccgataaggagtcgcacaagctcaagtcccttctttgttccttttagcttcggcatgctaaattcgctcaaggttggagatgttctgttagccaaatattcttaaactagatctctggtgctgatctgttcggctaccaccctgaattctgctacagcttgttggcatggtgaccccgacgtcatgcggcacacgggcctagtcaacccgaagcttaaactcagtgggctcatccctagcgtcttcaacttctccctcttcttctcatcggccttgacatagaaccactcacttttccaaccggttggccacttggtgcgatagctaagcaccggaccttcatatccttgcaatatgcgaagttataacagctaaagttttcatgtagcccgccttctctggccttcgtctggtaatgcagcttatgcactcggcagaaagcttcagcattcgggtccattccttggcttcgaagggcccagatgaagacgctgagtctaacgataccgttagtggtcagctgatcaagatagatttcgtaattatccagaacttccccaatcatctcattcaagggaacccgc

SEQ ID NO: 156820 - DNA, 730 bp, Zea Mays
ccgagacccatccaccgctctttgtcaaggtggagaaacccttggagtctgatgaatgagtgcgggtgatggaacaaatattcgggcaaatttgatgcaccgagatacataagcccctatttgccgctcagcagttaagaggcaccaccaacacttggtgggcaaacttttctgccatccaacctgtgggacatcaagtcacttgggaagagttcaaactggcatttagggaacattatgttctggaaggagtgctacaaatgaaactagaagagttcattcgactgaaccaagggggagattctgtgatgcagtatcacaataaatttaatcacctctcccaatacgccattgatcaagtgtacacagacttgaaaaagaagaattgcttcagaggggactaaatgacagactccagcgcaagatgggaacgtgtctagacctcacatacagcagggctgttagtacaacactgtcaattgaagccaaaaatgagggacaaggaaagtcaaaaggatatgcaggtgaaatattaactcaaggacctaaaaaaggacaaggttgttaatccgaccttttaattcaaatcgttcttctcctcgtctgcccacatatcccttcagataacccgtatttattcgtcccactactgcccccgcctagaccaatcagccgagtgccctggtgcttgtttccctgcccttcccagttcctctagtggttgcttcaa

SEQ ID NO: 156821 - DNA, 286 bp, Zea Mays
tagctgaagaccaggatagtggtgttgctgagatccctcagaaggtagagatgcaaacagacatactgtggtcacaagctaacacgcaaaacgccaatgctctggcagaaccaattatttcacatcctcttgcagatagcatgtctttaaattactccagtatgtatggagcggaagatgacttcagggcacatgtttctggcatcggtgcagatatggatgagggaactccaccagatcatgaatgtctggttattggagctggattgcctattagctccccttt

SEQ ID NO: 156822 - DNA, 982 bp, Zea Mays
gttggtttgtctggtcctaaactcatttggtttgcttggttcctacttctggctgccatgtgtggcgtgccgaggcagcgtcgtgaacattggcatgtgtgccatgaactatgaccttaccacatgtgttgttggttctactatgtgccgtcatgagtaacccgaacttatgcctccctattgtgtcatggaacgttcgtggtttaggcgattcagataagtgcaccgttcctgctcaccccgttttcgtttccatctaggaatcaaaattgtgtgatctttacactttcgctaattgtgctttccttcccccaaacattcatgattttgaatatgtccctgttgatagctctcgtggtggtattatcactgcttgagactcctctcgcttctccattatctcttgcacccgaaaaacctactcactaaccacaatcctctcctcgtctatctttgacgccttgataaccattacaaatgcctatgcccctgcttaccaccctatccgccccaccttcgttgtcgagctatctgagctcttcatctcaatgcaagggccttggctccttcttggtgatatcaatcttgtttgttccccctctaaaataaacattgatcacatgaacaacagactctgctcatccttcaataccaccctcaataacatgtgtgatgaagctcccctgcttggctactcctttaccaggtccaaccatcgcgctaaccccactcttgctaggttggaccatgccttcctcaacacccagatgttagcctattttccctccatctccttgaacgctctaccacgccccacatcggatcataaacccatcttagtcgtcatctccacattaatccccaaaacaaaaaaataccgcttcaaaaatgcatggctcctcaaccacgccttcctccctactatgatcccaacttggcatccccctgtccagcttgacgttgctgccacattggttgcacg

SEQ ID NO: 156823 - DNA, 351 bp, Zea Mays
ccgtgcccggagtctccactgccatgtccggagtctccacaccgctgccactcagtgcctccacccagagccgtcgccaccctgcgtctgcacccggagccgccgccaccccacacctagttcgaggtgattacttatctgatagtttgtttgtctaacttttttattgtcatggtagcatgttagacttgttactgcatttgttaattattgctacctttattggtattgttatattttagtatttctccatttttatactttctttggcatatttacatacgtgtaggaaacacacttagtaaaacgtatgtgtcacctggtcaagaacgacacatctcacatttactt

SEQ ID NO: 156824 - DNA, 500 bp, Zea Mays
gatctatataggttcataacttgtatactagagaggtataggaggaggacgaaggaatgtaagtagccataccttggggtttgaggtggaccacgataggagtcaatctaggatatagaagttgagcgcccatgttctgtttcgattctcctcctcctcctcacatagtgggtacttggggcataatatcagtagccaactacgtcataggaacgttggtttctaagggtgccatatcttagggtttggtaatttcattcactaggcgctagaaagagtttagatctcttatgaattgtggaagctatgatttaagaaagcacatgaattggctccagtctcagcctctgcctcacctttttatagtgcctatgagtcaagggtcacaaccataggataggatcgtacccccgattttggtgcaataagttgtagattgccccatactaagtttattggcaaagttcaaagacatataatgtattctcctgttggttctt

SEQ ID NO: 156825 - DNA, 372 bp, Zea Mays
acccctaaatatggtccccgacagtagggtccaatcaaaccggtcagtaagcttcactaggtgtcagggagggcatgggcacgagtaatcgagctgcaacttaccggttaagcgtggccatgcgcgccgacggggagaacaactccggcgagggtggaacggcttctccggtgaggcagcgctcggtttcttgcttcggggagctctacggggctctagggaaactagccgaggcacgagatcgagcggaggtggactgaagtggcctggaaacggtggccgagtgctcgggtggcttggcaggcggcgcagagctcgcgggagctaaggactgggccgggacagtgagggcaagcgagcgtggagtgacgt

SEQ ID NO: 156826 - DNA, 496 bp, Zea Mays
tcatgatcttacgttaggttcacgttaactatcaatttatttgagatgtggcatacctattgcggtttcagaaatcggggaacaataagatttgtgttcgataggggtgctagcacggactcaatttaaatggagagccacgggggctcgaaaggtggatatgagacaagggttgtactggttcaggcttacgctctagtctagtgtagtgctgatcatagtattgcttggagcatgttacaattgagttcggcctgttgccttgggttgccttagccctcccggcgtaatccgtaggggcgcgcgctgccgtattcttgatgtctacctggtgtttgtgtccatgtatcttgtttgatgccaacgcagcggtacccggcgggtcccgcatagtggcctcacgacgaggttcagggttgtattcagtacaacttcatcttccgtcatgacccttgcgtcacctttcggtgcgcgttggcattcacccggtatggcg

SEQ ID NO: 156827 - DNA, 607 bp, Zea Mays
gcttcatcagaagccgcggagaagatggatcgaggaggattggagcacttgatccatagccatggtcggtgttaccacactctcatgttctgatttgaagatgctatgtaagttgttccatttcatatgaccgtgtgcctatcctgagatgtcgtgtgcttctgttagatccatttgcaaggatgaattaacttccgtctttaggatgatttaacttagctaatgttgtcatttgtcgcccagatcacaggttagtttggtcatttttcagcttgccggatggggggcaaagttatggtggcatgctacaaccatgtgtgtgggtatagacaaattctgtacataatctgaggttatgttgggctaattattaactagctaattttagctgggtctaataaacgtgctaattttggtagcaaagtgtccaaccagttgatagccggtcatattagccaaattagcaactagccatgtgcatctaaacatgtcctaatttgatttggacatgattctaccatttatagtttgccaaattagaaactagccatgtgcatccaaacatgtccaggtttggtttggtttgaacatggttctaccatttatt

SEQ ID NO: 156828 - DNA, 323 bp, Zea Mays
aatagattacatcagctgtgaaaacactttgcatcccatttcgcagggtacaaacatagctttgcgtcaatcggtgctaggcgaatgcagaacgcttggtagccggtcagcgctatgtgtagaacacatactccagagatgaaattggatcacgagcactggaataattgttgtcaggtttttctcattacctgaactccattatgtgattgggttaaccctaccaagatgtaacactgtctgtctcccgttttcttaccaagcaaagttagctccaaatgaaatgttatgttctctgaattctaatgcatataagccacaca

SEQ ID NO: 156829 - DNA, 917 bp, Zea Mays
cgccgagcaaagggtccaaaaacggaattaagtcttccaggggtctaaacatgaaattttttcgaaaaagagctaaaataaaaaaaatcggcagacacggaggtcgtacctgagcttcgtcgctgagctcgacgacctgaaggatgaccaggtccactagaccccgtacgccgacaacgtcgtgctccttacggccttttgtccctatgcttttaagacaggggctattggcaaactaggaaaccgctcgtcttcgacatcttcgtggaggagcacgttgtgtaccgggtcctccgccagttcgggctgttccaggcctcctcattgcctgtgcagcacatcattcctgcgaacgtacacaggtatctgctactagccgttgcaattcgttcaataaaaaaaaagacaaaatcatcctctgaaaggacgacaggaccatatttctacaaattttaaaatttgtacaatatttttacaaacaaaattaatttaaatataaaaataaaaaattggagagctagcattggcaagaacgacgctcaaggaaaaacgcgagcgctcgcgacctgtggaatgatggcgcggaaggcaaaagaaactacggttgagatcaagcccaagatccatccaaaggtcctgattttggagcgacgtggagtggcaaggttcgagagctcatggtgcagagatatttcgctattagtagatatgctaaaccagcaccaaacagtgcatctgtcctgtgcgcttaactactggtcgtgaagccccagacctacatcatcaaacgtggcaaaaccatcacaatttgtcaaattacagtttaacactttccctaaaaaacaaattgtgttgcaattgttttggattctggtgcaaaacactcaatcatttgtcacatcatcatgtcacacccg

SEQ ID NO: 156830 - DNA, 349 bp, Zea Mays
ccacccgcctctcgcgcccgaggagcacctcgcggaggcgaacgtacattggacgacatcctcgatgcccagtgcccgtaccacaaggacatgcgccacaccctccggaactacagagacttcaagcactccgttgggaacgaccgacccttccaacctctaccacctcccccacctcgaggaggactcgaagaaccttgatagcctcagcaacaggaagggggaggaggcggagcattcccgcgtgtcgacggagaagtcaatgtcatcttcggcggacatgggtcgcaagaaagcaacaggcaacagaagctcaacgaccgtcagatactggtggcggccaccggac

SEQ ID NO: 156831 - DNA, 569 bp, Zea Mays
ctattttgctgccaaaatattgaccaaagccgaagcttgcttactgcatcctcaaccgaagctatttattttgctcaagcttcgtaataagaaagagctttggcaaagttaaaaaaaattcaacttcattcgaaaaaacaagaaattcaatcatcagatggccagagtacgttcaacagctagggttactcacgacggagaggaagccgaaggtgccaaaaccgctccaatctctgaagtgatgaagcgttcagggctagtagtatcggaggatgcacttgccgctgaagccgagcaggatgatgctgaggaaattgaatctgaagatgattacagtgtcgtgccaactaaacccagccacctggagtttgggaaatccaacatttccgaaggtgatatgtctaagctgatgaatttgggatattttagtgaagcaaagaaggagctggttcgtttcggtggggaggagattaccccgaagccaggaaaggatgaagtagtggtcttcaaaagcttctttaaagctggattaagatttcctttaaatgggatgattgctgatgttttga

SEQ ID NO: 156832 - DNA, 716 bp, Zea Mays
cgaatatgtcaggttacatgggcacgaaagacgtggatcgtttccgcgactggagatatgggctagctgctcaaagtttcaacaaggcctgatccagaatcttgaggtgcctgtccctccagaggaggccctgaacaacatccagcccaacttagaccttcgtagctctgagatccctcgatgcatatgcctcaatgcctgggctggtgggcagttggacaactaaccaacacgccggccgaacaggtaataagataaggtagccgtgggcgcaccgcgcacgagggggtggggagggggtcctgtcctcttggcgactttggcactttgcctgcgctccctttctcagcgaatcgtcctgagattcttgcggttcgccaatccgcgctcgtcctctgcaacgtcacctctccctttcctgcgatcctactgcacgcttcactgtgggtgtggcactggcgcactgcattcgcttagcttttgctccgtccaacagcgagatttctaacagtgctcagtaagcgctggatcacaatcgtccagctgagcttcgtcaggccgcgcccgacgcttgccgcagctgatctagtttgagctcgaaagtacgctgacgacgaaggcggcgacaggacagcgacggcagcagcaggcgaggccgctcaagcctcaaggcagcttttcctttttcccgcacggcgatctcaatctactcaaag

SEQ ID NO: 156833 - DNA, 1160 bp, Zea Mays
attaaatcctaaaagaaattctagagtttggaaaagaaattctagaagtgaaaccaaaaagagaaaagatataaaaataatatatgtaataatatatcttcaaagttgtactgtttatggcacaatatcatctcagaatatttggtcacaagagtttgaattaaatttgaacacaacttgaatttgaaaagagagagaaaaagaaaaagaaaagaaaagaggaagaaatcctgtttgggccggccaaaccctattcggcccactccacctttcctctctcgcccagctcatcgccaccgcgcccggactcactggcgcgtggggcccactgcccagtcttcggtcacacgcgcgtgatggctgtctcgcccgatgacgcgtgggactcgtgatgcagttgcgcccgcgtctttcacttaggaccaccacgacagagcttccttcactgcgcggactccgcaacgaacgccggcgaagccgcgcaccgcccgaaagcttcggagccgttcaatcgcccggtaccccgcttcgcctataagcatcgaccccacgaactcatccgctcgggcccctcctgtttttctgccaccgccactccacgccagctcttgcgacgacgctacccacacggacaactcgccgccgccagtgaatcttatcaccgttggttgtctgccctcggggttgggttgtggaggagcgtctacacccgtagttgccgttcgtggcatctgggagtggaatcgatcacctggcaccaccgaatttctcgccgtcgctcctgcgccgccgcgggccccctattcgccgtggtgcgacgtcgcggccaccctaaactaaggtgaggacgaccctacgttgttcatcctcgtcccttcaacgtctagcaccggtataattagattttggggcgctaaatcccttgggctccgtgcgccggtggaacaccgccgttcggcgtgggtggcgccgcctgagtccggtgaccgatgggggtgatggggtcggcgccgtttgatccgatgcaaacggctgtgattagaacttggagataccccttcacatgatggatatgattcgttggatctggatcgaatgggcttcgttcgatccgcgctatttaaaacggtggccatcagatctagatccgaggatcagcg

SEQ ID NO: 156834 - DNA, 807 bp, Zea Mays
cagtatcatcagcagaaggcaaaactctgtcatcaggagcgctggcctctaaggcgacttcttgacccgaagcgtgaattgctgccatacaaccagaatgcggaggagaagaccctacgtgaacgtccatggaagtgtgagagggagaactgactcggacaccctcgggggctgggtcatagctcgcgctacccatccgagccgggtcatccccggcaacaccctcgggggctgggtaaatgctagtgccatccttgagggccaagctctccgtaacagccacctctaaggctgaaggaccttcacccacttccatgggagcagaacaatctagactagcctcctgacccttaagaccgcgctctaagatcgatgaggcatgggatgctgctcgagataactccagcccagcgtcaggcacatcagcacaaatatccatcatttcaccatctgtcggctccgacaacagatcttctgggaccatatcttcaagagtctgatcaaagttggctagagacaattcttgcagaccatcgagagcagacagggctggagaaggaacaccactactttccccgctggcaatgtagcgtcggctgttcttccaagttagagggatttcatcctcctcttcctcatcctcatcaacaacgcggacagtacacccattggggtcagctctggccagatcacacccattgggttcaatatcatctaggtcacacccattgggttccacagcagtcgggtactcgggtcacacccattggggtcagcttcagaaaatgcaggcaccgacacttcctc

SEQ ID NO: 156835 - DNA, 494 bp, Zea Mays
cgattcctttctctagcggctagctactcgatctactcgtggctcgatcgctccttcgatcatgactggatcggtagtgggtgaccagacccgtccgctactagtgtcaccttgtcttctcgtcactcgttagttcattgcgttgtcgggatcccacacgcagctccactactttgcctcctattccgcatcgactggtgggcaagctattggtgggatcctgccttggcaccatggttccaccatcatctgccctcactatgtcaccagggtcccaccacgtcgtcgcaatgcaacaattgttgtcgcttgccactgcctatagccgcttgccctcgctgcccctcacatgttgctgcctcatcatcgccatctcaaggcagactcaccacaatgacgcatcgatgtggccgcttcacccgcctttctgtagggtggccaaaatggttttctgatattcatatcattttagaacgctcctagtattatcacct

SEQ ID NO: 156836 - DNA, 755 bp, Zea Mays
gaccagccggccaaagcgggggctcttcaagacttcgcttgccacgactccgggtacaagtcttggcaagattcgaagacccgacgccccgagagaagactgatgctcctgttcgcgtggactgtggaatgggcccatgcggcgccctgctggcctactcaggcccatgtgtaagcccatcctagggtagggttgatggtgtgtttattcatattgtacttaactccactgtaatgacccccaatgggggaacattttggggaagacgtaggtaaccaggggcataatcgtacttaggagggcatgtccactccctttgttacctataaatacttgcgcattgtacattgacaggacacgcttaacatgatgttgttgctccctgttcgttgtattgttgagcactagagcactcctacctctcgttgcttaggcccactcgaccacgtgtcacttggtcccaacatttggggtccactgtttgtgcttcgacaaaccaatcccgcgatggctcccaagaaattgacttcgaaggccaccacctccctggacgacgcgatgaaggcaacccttatcggtgacgtccctcatgaggccctcgaggatggagcaaacaacaacaagcgacctcgcacggagaacccgcctacccctgagggcaccgttcgcatgtgtgtctctgaaggcctcccccgaaaccctccgccaggctttaccccctagaagctgacgatatcatcgaggacaactaagtc

SEQ ID NO: 156837 - DNA, 317 bp, Zea Mays
tgggcataggcggcgaagggcggtggcgaaacggagggtgagtgaggtggaaggtggtcgtcttcgtgtggacggggctagcaaacgggaattgttgtcctcgccggctggggcgagtgtaggtgagggggagttgcgaagtctttttgagggtgaggagctgaggataatgctgttcaactacagggagatgggtatcatcccgaaggttgagccaatgtaaagtgtgatgcccttgctgtatgtatgtaaccgtaatttatatgaagctgcgtgccttccttgatacggtcgtgcccgtaggcgacttgtgcgcg

SEQ ID NO: 156838 - DNA, 454 bp, Zea Mays
agtggatcagcctctttgctatcaatagccatctggtgacaacctcctttctttggctcgagtgagactagctcagtcaccacttcttctcctagtggggacaccaacttcaccgtcctcttatcacagctgataactgcttggtacttatctagccaatttatccctaggataacatctattccctgagtacccatcactatcagattagcgaggaactctatcccccttatttccacacttacattcaagcatacactataagtttggacttttccaccagcagaatcaatttgaattggtgttgtcatggtggttattgggagattatgcgcttctgcccgtgatgcagtaataaatgaatgtgttgctacagtatcaaataacacttctgcaagatgggactcgaccgagaacgtacctactatcatgcctggtgtttcctggactgcct

SEQ ID NO: 156839 - DNA, 616 bp, Zea Mays
ctcggattcattgtcagccatcaaggaattgaagcgaatccagagaagatcgaggccatcatgagaatggaagtgccgcggtcacagaaaaaggtgcaaaggcttactggatgcatggcagctctgagcaggtccatatcaaggctaggcgagaaaggaatgccattttacaaattgctcaagcaggtggacaagttctagtggaccatagaagcacaagaggctctagaggcactgaattcttgactacaccgccagtacttaagccaccgcgccgagctacgcctggtcagccggtagaagatctgctcctatatatctcctgcacgactcatgtggtaagcaccacgttagtagtcgagtgggcggaggaaggacatgcatacccggtgcagcatctagtttacttcatcagcgaagtcctcgatccctcaaaaataaggtatcctcaagtccagaatctactgtacgcgatacttctaaccgctcgcaagctccgacactactttgacgaccacaaagtcatagtagtcataggatttccgataggtgacattctccacaataaagaagctattggaaggatagccaagtgggcatgcaagctcggggctca

SEQ ID NO: 156840 - DNA, 583 bp, Zea Mays
aagagaataattgctgggtgattggccacaaggaacgtacccatcattaccagctctccttccagcgtagtggccacttgagtataataaattcgcccagtcttcttgacatttttgcccgctgaattattagccatgtttcctttgccttgattggagctcctagagttccgttgattgttgaacttattctgcttcggatatggacagtcttttataaaatgaccagacttcccatatttgaaggagccagttgaagaataagggagggcggggaaacgagcaccaggggcactcggctgatttgcagaagtggggcagtggcaggacgaatgaaaataggctgattaaacggataggagggttgacgaggcgaagaatgattctgattaaaaggtcggattaccagcctggttcacttctcaggcccctgattggacctatcacctccaaatccctttgattttccttggcctgtattcttggcttctactgccagctctgtgctgatagctctgctgtaagtaagatccaaacaggtggccattttccgatggagccggtcgttgagtcctctcttgaa

SEQ ID NO: 156841 - DNA, 698 bp, Zea Mays
agctctaccactaaaccgagaagtgaaagagtagtgccgctgctgtacgccattgtcgcggtgattcgcctcggcgaacaccccaccgtgccactgtctcgtgccgtctcgctgccaaccaggagtaccagagcgcggaaaagccgttcgtgcctcgccgaggagcgggaggccggggaatcccccatccacgtgctccgtcgtcgcggagtcatcaagcaccacgaaccgacccctccgcctcgaccattgccggtgagaacaccttctctagtctcgccagtgcctaattgagatgtagcatgagtccaattagagaatgggggcgggaatcgcgatatcggtcaactccggcgaggttcaacagttgcgccaccgtccttggctgtgcgccgccggtgttgacactgttttgggcgcgggatagaccagaggaggttgtgaccgtcgatccgatcagggacggctctaattagaaatcgcgtactggttcgttcagattgcacgacgatcgtccgatcgggatcggatggtgattactcgcactaggactcattaaatcagggccgtccatgggggatccaacgactgggatcgcataccgccttacgggcagtcagttctaatctgggccgtcagtgtgtaaacggacggccgaatcctacgataccacttcagccgcactttttgcttaagac

SEQ ID NO: 156842 - DNA, 728 bp, Zea Mays
cccgaatggaagtgggaggaaataggcatggattttgtaaccggactgccccggacgcaaaaagggaacgactctatctgggtaatcatagaccgtcttaccaaggtagcccacttcatcccagtgaaaactacctttggaggagccaccgttgcctggatatatcttaaagagatagtctgactccatggcattccaaggaagatagtgtcagacaggggaacccagttcacctccaaattttggatgagccttcagcaagctatgggcaccaagctagactttagcaccgcctatcacccccagtcagatggtcagccagaaagggtcaacaaggtacttgaagatttattaagagcatgtgtgttaacattcgacagaaactgggagtccagtttgccttatgtagagttctcgtataacaacagccatcaggccagtatcaagatgtcaccgttcgaagcattgtatggacgaaagtgccagaccgctctcatgtggtccaatgtaggggaaaagacactggaaggacctgcctttgttaaagaggctgaagagaaagttgccctcctccgcaaaagattacttgaagctcagagtcagcagaaaagttatgcggacaacaggcggagagaactcagatttgaggaaggagacttcgtctacctcaaggtctccccgatgcgtggtgtcaagaggttccaagtgaaaggaaagctagcacagcg

SEQ ID NO: 156843 - DNA, 639 bp, Zea Mays
gaagaggaagggttgcagcggcaaagccagggtggaggcggccatcggacatgggagaagaggcggtggcggccctggccggaggaggggacgaggttgcggcgctggccggacggggggcggtggtgctggctggaagaaggccgacaaggatcctgtctagcgtcggctcgctcacgaggtcgtacgacctagacaggaaggacgacggttgagggccatgtagcagcgcctccagcgggcccgactcggtcagagattgggtcgccgctcgagttgagggcggccgcgactaccgccttgccgcgctcggactttaggaatccggaggtggctggggacgccagctgctgcagcggcacctcctcatctttgcgtgtgctccaacagcattgcggcggcggtgtacggagcgtcggggttgggagcgccacttgggggaggaggtggcctgccaggggaggagcagcgctcggggaggaggtgaccaaccaggggaagggccactctagggaggagatggccggccaaaggaggagccgctcggggaggaggtggccgaccagtggaggagccggcggcggctggcagtcatgagtgggagggaaaccctaacctagcttgataccatgatagaag

SEQ ID NO: 156844 - DNA, 796 bp, Zea Mays
ccgacacaaagctcagaacattatgcaaatacaagaatgagcaaaggagctttttgtcaacaaaagtaaagcagagcaaaggtcagctcacctgaaggttagaaaggaacaagggaaatcccaaagtcggaggcaccgacatgctatcgaacagcggggtactagtagaagcaatattgagagcagactcgagtcccaaaggaggtttagagctcgcgcccaaggcaacacttagtgagacctcagctccgacagtgtgtagcagattcccagtgcctaggtcactgacctctaaagtgatcgggccaacaagagcagtaggaagacttgtcaacactggctccttagtctgaactggtggtgatccgacatgaacatccatagaagcagccgaggaggagccgagcttggcaccctcgagggctaaagcacccttaattgtacccataggagcggggtaaccctcgcatgtaacatcaggaaccgaggtgtcaccatgaattaggccgcccttaaaggttgaagaagaatgtgaaactgtccaggttatttcttgcccgactggattactagctgagggggtgtcatctgggacctctgcacggatggcagcactctcagtttcgggaagctccaataaaagttcttcaggataatctcctctagtgcatgatcaatggcagacatcgtcaacctctagagattaactagtcccgataaagcatgaattgggacatcgtcgttgtttctgctacggcaattcttgcgaagtaaaggggaaactacctcttcatcc

SEQ ID NO: 156845 - DNA, 607 bp, Zea Mays
ttgaacttgtatagcttcggcttctacttgcctagtttcgattttggcctgcgatttggtttcagttggagcgactttctttgcaggagcagggctcaacgcctttgtagtctccagtacaacatccagcacattcgccatccttctcctcttgggagtcgcagcagaagccttttgcaccttcggcagtgttgcctctgatagaggactcaggatttctggcatttttgtcactctttccacctgtggctctttggtcttattatcttcagccttggctggctcaactgtagttatcttcggtactacacttggctctacagtgctttgcataattggaacagtttcttttgctttggcagctgaagaagtaccttcgccaaattcaggtatcacggatggttcaacataacgcggccggtgagtcagaaccttcatcttcttgcccttcggctcaactgtgatggccaaagcagcaatatttcccgaagcagcaatctttctctttatcccttgccctcacagcgggtagcaatagtcagggtatacgaagccaatagcatcaaataccttgttcaatcttttcttattccgacccccgaaagct

SEQ ID NO: 156846 - DNA, 622 bp, Zea Mays
gttcttactagcctaataaaaaatggatgtaccttgtcgaatattgatctcttcgatgggcaggtgtgccgagaaaggggtgggtcaagggacgtctatagttgagagatagggctcgttggttcgacaagctcgctgacctccaagggcgggtcacatcatcgcgacgaacgagatcggacatgccgagctagctagcgtcatgaggatgacgagcgaggcggggacaccgggaaggggtggggttgtgcagtgtcgcgacataaggaatgagacatcaaagtggactggatcaggcggtgtcgataagaatgggactgggccatagtcaaaatgtttttggatcgattggattgaggagcggggtcatgggtcgttggtcgatactttaaaaagggaagtatacatctatgggacgggaatattatgaatttgatatgttgagtctaatggaccgatgatctcagattgattctatgggtcaagggtcgtgttctaaaatttcaataacaacctaacaccagtttaatatcatctcattctactattgaaactttaggccatctctatcagattccctatcttatcctccattttaaaccttacgttacaaacagtatca

SEQ ID NO: 156847 - DNA, 648 bp, Zea Mays
catcggagttccggggtacattccgtcgcccgtcgtgccctgcgcaaattacgcctctacacttggtgagataactcccccttgctttgtcctgtgttgatcttctattgcgatcgtgcggggatcgtgtagggctctggtagcttaccaatcgctcggcggaagtagaatttgttcccctcaaccctcctcgccttggctggggcgtgtccctgcacgggggcccatgtgggtacccttatcatgctcgctggaggctccgcatcgtttgggcaatagggctttgagattggtgtcgttctttcgtggattcgccttacgccggtggctgcgccgccgcaaggagtccggctggcggtgtccggtcggcgaaggaagaagaacgaccgtggaccgtcgatctgcttgtgttcggtcacgattagatgttagggtaccggttcggcgggaacaatccggtccgtccgtctctaatcgggcgcataggattcaccgtgggcagtattagatccgggcggttgatttctgatccgacagtcgtgggcgcataccgattcgtgcgggccacagatttaatctggaccgtaggaagctgattgggcgaccgatacgtaagaataccccttcggcttgtatgtttcgcaaaag

SEQ ID NO: 156848 - DNA, 549 bp, Zea Mays
gtcttgtcaaaatcagaaagttgcagcagtggtgcttgtgtgagctttgacttgagggcatcaaatgcttgttgttgtgatgatccccaacgaaacgacactcctttctttgtcaactcgtggagaggtgctgcaatggtgctgaaatcccacacaaatcgcttgtagaatcctgcaagactaagaaaacttcgaacctgcgtgaccgtggttggaagtggccagctcgtgatggcaacaatttttgcctcatccatctcaatgccctacgatgtcacaacatatccaagaaaagacacatgatcggtgttgaaggtgcacttctcaaggttaccaaataaacgtgcatcacgcaaaacatcaaaaacagcacgtaaatgttcaatatgatcatcatgagacttactatagataagagtatcatcaaaatatacctaccaatgaaagcacgtaaaacctcgttcatcaatctcatgaaagtgctaggcacattggttaacccaaaaggcatgactaaccactcataaagaccaaacttagttttaaatg

SEQ ID NO: 156849 - DNA, 854 bp, Zea Mays
gggattttggcccacccgtgcgtgggcaagccggcccggtcgacccaggaagaagataatggcatgggtgcacgtggacggcatcgtgggcatgggtccacgttccaggaagagggagggatgagagagcgttagggggtgaatggtccggccgagggggagaaccagccactggcgggttcaacggcggctctcctcctatcgtctgattctcggaggacaggaaggtgggctagcacgagtaggggcaggcgagcacggtggtgccgattttgccagtggcgatctagagggggcctaccacggcgaggtggcggagcttcgcgatgggggtgttaaccagcgaggttctagtggtggtcgggggcaggggagtggtgctctatatttgtggtgatgtagtgaagcttctatgctgactggattgccttctatgcggctagagagggatagcgagagctcaccagagagggggagagacagcggcgccgacttgattgggctcaggggagggacgagagtggccgagggctggtgcgggggatgaaggagttcggggtggcccttttataggtgcccgaggaggtgagcggtagaggcacgctgacagtgaggagcacaacggcggcggtaatggtagcacaatggcggtgacaagatgggtcggcgagggcggtgtcgtgtgggtacacgagcgcagcgggcagggaagaaacggtgctaaacttccctggtgcgagtaatggcagggaggaggagtgaggacaatggccggtggcgaacgcgctgatgctatgcatccgcgtggaggggagagactgacggacggggttgagacgttagtggtcgtgctg

SEQ ID NO: 156850 - DNA, 559 bp, Zea Mays
cagacacagagaacatggttcctggatggcgggtttattcatgcaaagggcgaggtttctttagcaaaaatgcctggtcgaaggggtattcgcaaacctcgaccgttggatcaccagccgagggctcggattagatctggagtgcgccgaaacggtacgcttggtggaccgtcggatcaacgatcgagggtatggatttaatgaagccgaggtctactcctagtcgttcatcaaaccagcaatggccacgatcctatgtaatggaacggtatccctcgattgcccatggccgtcactcagcagatcaacggttcatggcctgctcccttatttcgaccacaagggcggcggcgctctagtgccgcacggcggagggcccgccggcgatagccgtgccggtgcgcagatgccccaatccccgctcctaagggtgctacgtgaagcgcagaacatagggaatagggaggggtggttctcaccgacaacagaggtccggtcgatgctgtccacggaggatggcggcaacacgacggggatggttctccggcgagcgattcac

SEQ ID NO: 156851 - DNA, 547 bp, Zea Mays
gcagcagatctacaagaacaacatacatcatgagttccaggaaccgagacaagagaaattagcactggaagaaatgaacggacgacggcgacggagtcgagaggagaaagcgcttccgccgggtagcaggccgacggaaagacaaaggcaccagcgaaggggctccacatatgtagtagaaagcagagggatgggcgctacgacgaaggacagaagaacagcgatcctgcgctgttggaaaagcacaggcgacgagacggatttgtgggattttaaaatccgctgaacagccctcacctaatgttatgggcacagcaccgaagcacagcgacgcgcgacgagctggacagaagacctacaccagcgcactgacgtagccaacggcgattctggaaatctaagatctacaacggcgcaccggcctgtagcactatgcttgcgctgttggagaggctgaggcggcgcactcacctggctacagcggcgcaaccccgcagatccggccgcaaccccgcagacccggccgcctgtgacaccccagtgtcac

SEQ ID NO: 156852 - DNA, 450 bp, Zea Mays
taggttaagttgcaagcgatgtggaaatgttttcgtaaatatatatgtggaatgtgaatgagtcattcaatgtattcggtatgtcgtgtagtggtggtatgaaaaatgggttaggaatcgatcggctaaatgccaagttcggttagagttattttgatagttgggattgtggggtgaagtgatggcatgactacgtagccgtcacgtcgtctattgtgtgactatgcttaagtgtgccttgatataatttagaataagtcgagtctctagaacgcggcaattttttaaaagtaaatagaagctgaatttattgattgctgttttgggctgcacgcactgttttagttgtgctgtttgtttgataaaccaaatcatgttttctgtagaaaagtcatatagaagagttgtagatgacatgattatcttgcttgtgttaaaatttgacaggca

SEQ ID NO: 156853 - DNA, 1484 bp, Zea Mays
tgttttagggggataatctgggtacccttaattatcatacatgacaacagtctacccaagggctcatacaatccgcctaagggcctagacagtcaccgactaatatatagctaacctaaagacttcctagtttatgtctgccactagaatattcttgttgatagtccaccatgtccatcattcaaactttggcacaagacaaaaaactgacagaggcattttctaggtagctttgtagacaatgcaccctctaagatgaatagtccaccataaacaatttagccctttttgaaagatgtcaactcccaagtgttccaccaacttgagtatgtgagtgttgtggttttgaccccatgataagtaaattttaggttaggagagggttagaaaatcgttgtcccgatggctttgctctagcgagcctgagggaaagagtttatattggtttggagagaactcctacgtccagtatggtgctaaagtctttgttgctggcttttgtgtattacaaggcggagcgcttggatctcgtgcttgtgtgagaagtatacaaattgaagttgccaatctctacaatttggcactcgtccctttatatagctagaggaatgagtggccattgttgcatgaagatttcaacaggatgcatcattcctatccttggacatgtggcccttctggtatgtcattgcgcgtgcaaccgtttcaccatcctcggccgatcaatccatgggttggttaagtcctataggtgtctgaagccttgttactaggtatgtcctgagaggtgtgcagatggtttgccttcagtcctctcctttttgcttttgtcatgtctggctttatcgacttccttacctctggagcatgacccacaatggcctgtagggtcccgttcatatcttcgaggtgaagcagatggatagagaagtccttggagtcctatgtactacacttgtttccgcccgttgcatgccttagttaggagcgtgcactaagtgtcagatgatcataaatgtgctatcctcctcaacgggttgtactacctctaggttgtgaagtcctatcagtggtgtttggtcttagaccaacttgtctaggagtgaccaaggttagtgaatgttcaactagttttgctatggttaggtccgtcttggtcggggtaactgggtcggggatctagattggggtaacgtagatcggggtgaccatccttaccctgctataggctcaaaggttggggttaccctattcaggggtcatctcgggctatgcgaagctccagtttttagggtgtgttttctcatcttagggaaatccaagtatgggtacatgttagtagcctccgagccctagaatgatttttgtaaaaaaatgttgagtattattaaaataaaatgggctaacaatttttaacaagaacccatcgagcgtgcacaacgtgtttggtggtcagcctcgagccccaggtgattttgtaaaaa

SEQ ID NO: 156854 - DNA, 609 bp, Zea Mays
ggccctgtaccggttcatggccattgcccattacgggtatttggtcctcaagatgccatccccgactggggtcctcaccgtgcaaggtgaccatgtcgtcgcacttgcggccatagagaagctgcacgccctggcggcagagactactcgcccagacgatagagggaggaatccctcaacctccggtaccaagacgccccaaggcgccaaaggtacaaccatccggagcggacggtgtccccgtaaaagccatccggctcggtgtggattccacccagaccactcgcattgtgggtgatctggacgagaagtaggaactcgtgctcgtcgccttcctccatgcaaatgccgacgtgttcgccatgagagccgtcgcagatgcctgggattcccagggaggtgatcgagcacagcctgaagattaaccccgacgccaggccggtgagccagaagcctcgtagacagtctgttgagcgacaggacttcatccgaaaggaggtccgaaagctgctagacgctggcttcatcgaagaggttcatcacccaatatagctggccaaccgagtcatcgtccccaaagcgaatgggaagcttcggatgtgcatcgac

SEQ ID NO: 156855 - DNA, 797 bp, Zea Mays
cggtcgtggaggtgaaaaaccatgaactgttctcctccttgaatgaagccctggtctcctctatttatagcctcaaggaggactcccaggagcgccacggtttgtcacgtatgggagaggagatgtgtctgagcccctgtagctggtatgaccctcggtgtggcctttgtacttgctattgacttgagccaggaggaggatatttgatccctgtatttgcatctttgactgtgcagagagccgaggccagggtctggggttcggacgtgtacccgagcctatctaatggaggcgctatcagagtcatggttgttgaaacagtgataggtatggtgaaaagcgtatggtaatccatcatatatggcataatgcatacttgacattggcactgtagccatcccattaccggcagcctgcacggaggaattgatgacgttctttggtcgatgttatctaggccgatgccaggctcagacgagacagaggttccttctgaagccttggccgagcctgctttagggcatgcagtcgtatagggaggggttagtatagttgtcagagtggccttctgcgagattcgctgggagttgttgccgtggtagttggctgaagccgagctcgggcgaggcggagttttctcctaggctgaggtcaacttcgggcgagacagagtttcctccccaggtgagaccatgccttgaagtacacacgtcccgtacggagttgtttgagtacagccgagacggcgtggaggagcagtggtcgttattctcgggcgtgtgtcatcgtagttcgtg

SEQ ID NO: 156856 - DNA, 510 bp, Zea Mays
gaaaaacgcctgggaagactaaaaattgctgaagcgcagatgctcctccagaacatgcacgcttgtgttcgaaaaatgggttcatatcctgtcgtcgatcccagttaactacttccggtatatatttatacaactagtgtactacaatactagtatatctcaagtacctggcttatccatccttttatatatatatgcagacatagtcacacacaatgtgtcagtcagtactcagtaatctccaaaaccatatgaatatcactaaaatatctgcaggttcatctggctacggaccctcctaatgaacatgtcacaagcctcatcgatgtcatcctccacgttgaactccagaccttcaacctccctattggtccttatgatctcgatgaccgatggctcctcgggattatcaagggcatgaagctcatcgtgatcgtcctcaccgttgtaatacttgtcatcgtcaaagagggaattgatccagtctgggtagccatgacaataatcttc

SEQ ID NO: 156857 - DNA, 524 bp, Zea Mays
ccggaattggtcccgctcgctggtgacctggccaagctctagctgccgctaatgcatctcctcggcctgggaagccacctgctcccgtgccgacgaagcctccgttcgtgtcgatgccgcctctgtctgcgccgccgctgcctccgacttcagctcatcacagagctgacgaaggtccgccacctcggcgctccgttgggcaaggcgctcattggcctcggtaagcgcggcccactgggaccacagcgactcctaaacgtcgctttcgcggcggatgaacagcgacttagcggtgctcacgtccgcaagctcctgagaaaggaaaacatgatatcacaaagaatgacctgatcacatgaggtgtatgtctaaaaccttacctggaaaaccctgggaacgtccctggaaaggatttccatggtcgaccgaagcgacctcatcgccgcctcggtatattcacggaaattattccgaaactgctcctccaactcatcgttgagggagaggaggggctccgagctgtc

SEQ ID NO: 156858 - DNA, 574 bp, Zea Mays
tgtaacgccgagcgactgaaaatgacgtcaacgttttagatgtaacgccgagcgactgaagacgacgtcagcgttttagatgtaacgccgagcgacttgagggcgacgtcagcgttttagtggtaacgccgagtgacttgagggcgacgtcagcgttttagaggtaacgccgagcgactgaagatgacgtcagcgttttagatgtaacgtcgagcgacttgagggcgacgtcagcgttttagaggtaacgctgagtgacttgagggcgacgtcagcgttttagaggtaacgccgagcgacttgagggcgacatcagcgttttagaggtaacgccgagtgacttgagggtgacgtcagcgttttagaggtaacgccgagcgatttgagggcaacgtcagtgttttagaggtaacgccgagtgacttgagggcgacgtcagcgttttagaggtgacgccgagcgatagcgggctatgtgggccaccttgaggataatagccgagtgataatgtggtgcaccggtgttctggaaataaccgccgggtgatgacgtggcacgccggtgttttggaaat

SEQ ID NO: 156859 - DNA, 1171 bp, Zea Mays
gtacaagagaatttagtagaaaacaggttgccgaggtgctagaagtatggactcacactcttttatgtttgatataggaacctgaagcctgatgctaatctaactattgatccaagtatgcgggaaggttctcctgatgatcatgttacatccagtggatctcaaggggattcaaagctagaactctttggttttgattctcttgtaaatatattgggtcttaagaggtagggtcaatcattctattttcttactgttgttaacttgactaaaactttatgtttttttttaccatgaagctgagttttaccagtgtttagcatatgcaccctgaagatcgtttgaactgttgattcgacttcatgacatcatcatcttattgaacctgagcagcatgacaggagagcaggttcaggccccttcaagtcctagggatggcgaggatgttgcaattaccattggccggcccaaggttttcttccatttcaacattttctgacacctgtttgaagattcctcactctccttttagaaaaagatgaaaattaagagttagcgactatatcgatcttaaagtttgttcggtgtatgtttctgtctctcgtgaagtttaggatgagaagttgactcgtttcaatacccttacattgttttctgcatgtgaatattcacttaatcagagatagctgggttgctcattttagttttgtttggaatgtcatttggttcatgcatgtctgatcttctgtggttgttaagttttaacttcactcattcttgttggttttagtgactagaagattctattccattttgacttatgaaattgtagaagtgatatacttatatcattgatgagtttactttattttttggacagcaaagtggacctaagttcggcaccatgatgggtgtctttgttccatgcttgcagaatatcttgggaatcatttattatatccgttttacctggtaaggtattccatacacttttgttatgatctcagtacatcgtttctatttgttatttttctgaaaatgcttcactggccatacagatgctgctgcccttctgttatattcgaaccaaataaaagaatattgaagtaaaactatagataggtatcagtacatggaatttgacttattacagtattagttccttttttta

SEQ ID NO: 156860 - DNA, 535 bp, Zea Mays
tcccgcgcctcatcgaccttggagcgcggtcttgagggtcaggaagctggtctggattgcactgctcccatggaagtgactgagggaccttcagccttagaggtggctgctgcagagaactcgaccctccaggatggtgctggcgcttacccagcccccgagggtgttgccggggatgattcggctcggatgggtagcgcaagctgtgacctagccctcgagggtgttgccagagatgatccggttcggatgggtagcgcaagatgtaacccagcccccgagggtgtccgagtgggttctccctcttgcacttccatggatgttcacgtagggtcttctcctccacactctggttgcatggtgatagcccaagccttcggtcaaggagtcgctttagaggccagcgtacccgacgatagagttttgggttctgctgatgacactgaattggttcctgctgattcgttgcaagtcgctccaggtggtgatcctttgccgagccatcaattgatctctcacgatttgggggtcccct

SEQ ID NO: 156861 - DNA, 445 bp, Zea Mays
taaaaagatctcgcggggagcggatttggtcgcggagaaagcttatcaccgcgcctgtagccgtgtgtcgtggccggaccgccggtgtcgccgtggaaacttcggtgacctcggttatgccacgtcgtggctcgttattgcgtggtagtaaccgtggcacactcagaattacaatcttcgagccgttgcaccagtgaacgccacgattaagccaccactgttctcccctctctgcagccgccagcgcgccacctcaaattcacgggccaccgccctcgtgtcctataaattgagcgtgccatcagctccgctaggtagtcaagcacccaatacaccaacccgtgcctcagatcgtccaccagagcgccccaatttgagatttcccccaaatcggtcaagaacaccgcgtgtgtgagctcaccgcggtcagcccttcacaagtccg

SEQ ID NO: 156862 - DNA, 441 bp, Zea Mays
gggaaatgccaaaggagaccaccgccaattctagtgtgggtggtctggtccgactgaagtatacctttagatttatggagaagtttgatgagccaaacgacgattggctgaagtgtattgaagctactagtgatgagctacttggagcatactccaaggccgaagataatgctctgtccgcagcctttggaggtcggggcaagaaaagattaaacagggtatttgatgctattggcttcgtataccctgattaccgctacctgttgcgagggcaagagaaaaagaggaagattgccgcttcggtcacctcagctgagccgaagagcaaaaaggtgaaggttctgacccaccggtcgcgttatattgaaccggctgtagtacctaaatttggcgtagggtcctcttcagctgccgaagcaaaacaaactattccgattatgc

SEQ ID NO: 156863 - DNA, 676 bp, Zea Mays
acgactatgtcacgcatccactgagggcttgatggcggagaatacttgtttgaatctaacttcgtttggagacttgataggataaagacctccctcgcattttccttcaagaattgtgttcctcgttgctcggtccttgatgaagaaataccatggatggtattcaaaaaacacattatcatctctagatattttgtgaaccgagcaaatatttaacttagagctaggaacatagagaacattattgagtttgagtggacaaataggggaacgaatcaaagtactgccaatatggctaatttgcataccttttccgttagccgcgtgaatttgatcttgcccctgatatttgtcacgaactgtcaacttctcctgtgatgtgatctatggcaccggtatccatgtaccaattagtgtccacgtcgtaggagggagcaataacaccagcaaatttatcttcactctttggatcatcttcatcatatcggtaccaacagtccaacgcggtgtgattcgatctgccacagatctggcagattgttttgttgttgctggagttgctttgtcctaaccttccaaaactaccacgacgaccattgccttggttctgtccacgtccaggatttcgacctccacgggaaccacttctgtcgtggccacacccgcgcatagcgac

SEQ ID NO: 156864 - DNA, 891 bp, Zea Mays
ggttttgtagtttgaatttgtgaaattttataaaatttgaaatattttgatgaaaattttcttataaatactatggattattctaagactttccactgaaaccaaatttaaaaatacactaccgaattcaaactaaaaatcaaaaaagttaaaaaaaataaaaaataataaaaaacacctcctaaatgggccgacccattatggctatacttaaccctaacaccgcgcaaccagctccacagagctccccatccgcttctacgcctcgtccggtcgaaacatcgcccgtccgccgccagagcacgacgagccggccataagaaccggctagccggccggttggagcggaaagccgccggtaagtccctcttccccgacagtccgtaaaccagcggtttgaggcgatttatcggccggtttgagcggctaatcggccggctagctccggcttatcgggcgcatcggctaggacgcgtcgcgcggcttaccggccggttaggccggtttatcggtgatatgagccgattaatcggccagatgggccgattagccgagctgtcgagtaggggtagggttaggttaatttttccccttttggcttcaaatcatttgaaattattggacctccgattctagcaacgaaagacaaggttcatcttcacccctgcttccctatgtcaattatccggttggtgaggtaacacagcaaccaacgaggtgggtgtacgaatgggaggaccctgagtagcgtaggaccactcacacagggatcggacaccaaggcctacagcaagcatattggacccccgattctagcaacgaaagacaaggttcatcttcacccctgcttccctatgtcaattatccggttggtgaggtaacacagcaacc

SEQ ID NO: 156865 - DNA, 430 bp, Zea Mays
ttgcgagccaaactaattgaactctaggctaccagagaagggagggagggctcaccggagcggaggaagagggcggcgtgctggctcgattgagctcagggaagggggagagaggtgaccgaagctggtgtgaaggaagctggagctcgggcggtcccttttataggcggccagggagggggaaagaggagaggtggcgagcaccggcgacattcctggcaattagatcaatgtagaactccacttctctttctgtcggcattcctggcaattcttttgggaatacatccatgaattcttctactacagatatgctttctgctgctagattaaacaccattggatcttgggtgggtggctgagcctgacatgaaactgactttccttggtggtcagtgagaaggatggtcttatctgcgcagcttatgac

SEQ ID NO: 156866 - DNA, 631 bp, Zea Mays
ctaagactacccagcgcaaatcgactggacctcatggtgtgccacgacatcagctagcctccaggcacgaaggaagcagtagtggcagttatgacccaattggagacctggaagccagggtggagcaactccattcagaactacgccccaggaatagggcacgtgagtgggatagcgaccgtattgcggagctatcagccgaagtgagtcgcctgcagtaccaaatttcagaacgcgatacaaccattgattgggccgtcaactcgcgctctttcgcttgggactgtgaagcgaaagctctagctcacgtggcagaacttagcgcatccctcgaaaacctgcaagcgtactgtaataccttacatgaagaagtgcatgtattgtatgatcgactgcaaccggacgtgccaccaggcgttgctgcaatgggagacggaccatcgggaacagctaatgaaggacctaatggggagctagacctttttaggcccctccttccatgaaccttgctgacgaactgtctcctgcagcaggcaatggagcaacgaaggatgaagaagactagagtagtatagtctaagtattgtacttatgtaaaataagtaagaaaagttgagttgtataatggagt

SEQ ID NO: 156867 - DNA, 935 bp, Zea Mays
ccctcctttttcttaggcattccccagccactagaggtcgaaaatattctatttgccaagtactcttgtactagatctctagtgctgatttcggctgctaccactctgaattctacttcggctagctagcatggggagctaagctgcatgtggcacaagggccttgtcatgccaaagcttaatttcaatggactcatgaccatggtcattagcttctcccttttcttctcgtctgattttatgtaaaaccatttgcttatccaaccggtcggccacttggtacgatagccaatcaccggggcctttgtaactttccgatatgcgaagttgtagcagccgaagttcttatgaagaccatccgctctggccttcgtttgatagtgcagctcgtgcacccggcaaaaagcttcgacattaagactcataccttggcttcggagatcccatatgtagacactaagtctaacgattgcattgggtgtcaactgatgaaagtatatctcaaaattctttaaaacttctccaatcatctcatgtagagggaatcgaagcgctgctctggagaagctcttaaaaacaacgatttcatcctcccttggctgcggaaccacctcttccccggcaaaccggacaagcttgctcccggcttccccaaagtagcccaattttttcatcataaccatgtcgtctgccgtcatagtagattacaaaattcaatgtggctaggtttcattgggctcagaatagtgttgtcctcctcaccttcattctcacttcctccttcagccacgatctgttcaacttcagcagtggaggtaccttcggcaacagcctcctctggcacaacaagacccgatcacctcatcacttctgatattggtgctgtttcggacgcttcggcctcgtccccctcacgagacaccctagcagtggat

SEQ ID NO: 156868 - DNA, 675 bp, Zea Mays
aaaagtaaatgttgtattgaccttatgctctactaaaaagtatcatccgtcttgtatttcttgacatgagtacacgatgttggaggagtgacacatgtataatggtcatgctctcctagggcacatgggggcatgcgacataatgccccatggcattgcacaccctagccggggcatgtgttgaatactagcctatagggaccatgctgcataggatttttgaggcaaatctgcctgatggaggccacaatggtgagggcagcatgaattcatatgcctcctatggcatgggtcatgattgaagttactggagcgggtgttagagatagttgctcatgctgacattgccatactcatgttgcacaacgaaacatgacatactcaaaaggaaatgcacagaccccctatttagtgcgccaaatgttgttgcataacagcactagggtacacagagtaccaagagagagttagaagggagcatgacgttggttgttgatcatgttaaacctgagcacgagtgagaaccctcacactggcagttagagaggtttaggatacattgtacataataccctatattctcttgctactcatcaattgatgattacaaaggaggaaaatattataagctcaagcactagtgagcatcaagatcctactccccctcatctcgtc

SEQ ID NO: 156869 - DNA, 427 bp, Zea Mays
gagttatctcggaccgtgattgcagacttggaaagaatggcacctgtgttactgtgtaagctggagaagatctttccacccggcttcttcaatccgatgcagcatttgattcttcatctctcgtatgaggcacgaatgtggggggcgtgcagggacgttggtgctatccaatcgagagatgtctaaagtctatccaaaagaaatgtagaaataaatgcaaaatcgaggcttccattgcagaggcatacatactggaggaggtgtcaaacttcacaacaacttactatggtgacaaactgtcgagcgtgcataatccaccccctcattacaatgatggcggcaatgaatcgaacctcaacatttttcgagagcaactcggaagcgcaactggttcgaccaccaagaccctgagacatgaagagtggcg

SEQ ID NO: 156870 - DNA, 559 bp, Zea Mays
gttctccaaaattgatttgaaatctggttatcatcaatggagaattcgtgaggaggatattgagaagaccgctttttgcaccaggtatgggcattatgagttcatagtcatgtcttttggcttaactaatgctcctgctgcttttatggaagcaatgaataggatgttgcatgagttcttggacaactttgtggtcgtgttcctggttgacattctgatttattctaagactaaggctgagcatgagcagcatctccgtctcgttctgggtgccctaagggagaatcagttctatggcaagttgaagaagtgtgcattttggctgtccgaagtggctttcctggggcatgtgattaatcagcagggcattgcggttgatcccaagaatgttgcggctgtggtggagtggaagagaccctctagtgtctctgaaattcaaagtttcttggggctcgctggatattatcagcgtttcgtaccaaatttttccagaattgctaagcctttgactagacttttggagaagggtgttctattcgtctggtccagcgattgcgag

SEQ ID NO: 156871 - DNA, 438 bp, Zea Mays
aagatgcacctatagaatcccaaggctctaaggtacaaccaagttcagggactgcagccaaacacaggcgtgcaacctatctgtacaaggatacaacatcaatcaagaccaaggaaaatcaagcaagcaagaaaaagtcaattgtggagatgcttcggaaatcacctgaagatgtagttgatgaaaggcgtaaagggtgttctcaacccacaattccatccaagatgaagtccaaagagcagaagaattatgtggatatgcaatgggctttgtggttttatgaatgtggtgttccatttaatgcagcaacagcaagacaatttcaggttatagttgaggcaactgcccagtttggttcaggctataagcctccatcaccatatcaacttgggcagccattgcttaaggatgctgtgaaattgacaagtactatgaggg

SEQ ID NO: 156872 - DNA, 735 bp, Zea Mays
gcagaattataagtttgcaagataacttgataactgacatctcagttttttgtatcaagcaaatgtgctgtcaaaaacaaaagcaaatacaccatttcagttagtgggccatactgtgtcttaatcagacctttgtttccgcaataaggtgttcatggaactgcatgtgcgatacagcttctgctcatgatacaaccaacataagatctcaatagagaagtattcatatcccgtaacagcgcaatgttcaaagatatttgcctggttcaaatacgggcatgcagttcttcacgatcgtggtatcattccaccaacatgttgactcaaaaccaatattgtccaaatgaattcaagtttgtaaaaagccaggtgaaaaatcaaccaagcgacaaaatagagttgtaatctagcatctgttttggttacgaaaatgcttgtgaagtacttagaagataacattgatgtttaggatcaggcaatagaaggtaacataataagagcagtgtgaggccatatattgaggtgaaccacaattcaacaacagtgtacttattacagagtggaatataaaacaactcatgcattcatgaaaaaacataaacatgttaatttggaatacacaaaagggaagcataatactataagaaggtgacttgtccagattctcaaaggtgaaaaactaattgaaacctaagataagcatactataaagtagactattccaaacagagagaa

SEQ ID NO: 156873 - DNA, 641 bp, Zea Mays
atttctggctgattgtttccaatgaataaccaaacttgttccgtatctgtctaaatgattgcggcccctgcaagcccacaagaaaattgctagtgtctccttcgtactaactccgcgactagctaccaggccataattatgtaccaatgtatcatggagacgatgaaacacagttcgacgcatgcgaaacatgtcgtggcaatcatcactactctccaatgtacgctcaacccattggataccagtttccgccatgggtcttcttgaaaccccacttgacgaaccccccatatatccaaagcaactagtgcaactatgaattcctcatccccgttgtcattactttggtcgttatgaggctggaacatctgcaaacatacacacaataaccagttttcttgtatcaggagtgtaccataccaacaaactcacggttgtagattatcataagtccaacacgtttgacacaaatacatagtgctcacacatacaaatgtttttattgcaaatactacttgaactggaataattgaaatacttctccgacgaaaaaaactcaaacgactcatagtttataacacaactggacgacgaacaggactccgaccgacaactcgaaacagtgcgacccatgataccgc

SEQ ID NO: 156874 - DNA, 363 bp, Zea Mays
tgagggtgcagctggaccgacataataaacgtgctagacctagtgcacaagtctcctgtgggcacgaccgtatcagctaaggcacacagcttcatcatacaaattatagttacatacgtacagcgagggcatcacactttacaatggttcaaccttcgggatgatacccatctccctatatttaaacagcattatcctcagctcctcaccctcaaacagacttcgcaactccccctcacctacactcgccctatctggcgaggacaacaattcccgcctaccagccctgtccacacgaagacaaccaccctccacctcactcactctacgcttcgccaccgcccttcgccgcctatgcccagc

SEQ ID NO: 156875 - DNA, 478 bp, Zea Mays
gcgccgctaaaacatcgatggtcgcgacctcgatcaagatttcgctgcagttgcaccgcagacaccaatgggcacccggtcccaaacgggtgtccccttgaccggtgtgcgctgcgccgctcttgcggatcatctccgcgcggcgtcctgaccacccaagttccggtcgcacctgccggaaaaatacgacggaacgacgaacccgtcggagttcctgcaggtgtacgttatcgccatcacggcagcaggtggaaacaccactgtggtggcaacatattttcatgtggacctgcccggacctggctcatgaacctcaccccgggatcagtctactcctgggaagaactctgtgtgtggttcatggcgaacttcgccagtgcttaccggcagcacggtgtggaggcccacctccatgtagtgaggcaggagcccggggagaccctccggaagttcatctcccgcttcaccaaggtgcgag

SEQ ID NO: 156876 - DNA, 758 bp, Zea Mays
ccttgcagttcatccccttaatgctactgtagtattctcttttatagattaaggaagggagaggattacgtattttggtggaatatggccccggtcggccatgacctaatgatcctaatcttggagacttggacgtggagtcatacgcagcaccatgcgttcgatgatgtcatagtgtcagatgcctagctatagatcgcatgggtaggtatgtctagtcgtatcaacaaacaccaaagtatatcataggatacaacgtagctagtaattgatgtagcaataggtaccttataatacttcccgatacactaccatgcccacatgttgctatagaggtgatgcacatatcaaatagaggtcttgattacgtcaactgtcgaagtcttagtgatagtgtacctatcagactataacgtcacacaatatatttaatatgatatacgaaaaccttgtctataatactagtgttataaaactatcaggggtagatccccatcatgacatcgtatcttcgggggccaccatgcctcaatgggagtccttttacactccctcaacttgtgagttccttcatacttagccgctttaggactctcattgtcatctcaaaatgcccatgtcccaggggctcaaggcttagccacttaatttacccaaggtcggggaccttagagatttaggagaaaatagagggctccaggcgactaagagaacaaacaagtgttttgttgtgaagagtgaccccaaggccctggtct

SEQ ID NO: 156877 - DNA, 559 bp, Zea Mays
caattgctcaccagtgctcgccaatttgagatttcccccaaatcgatcccgagcaccgcgcaaagtaatctcaccgtggccagcgcacttcaggtccgttcatgtccgttgtcctcttgttttagcacccttacttgcccctgatgcctctcgaccaaaccgattaggctagaaccccttagatcaccgggaacacttcatgatgtccattgtgtccgctgtcgccgtggacaggatgatgtagagctcaaatctagcaattaagtggggggaaataatcgcgtggggttgaattcggtgtccagcaaaggggagggctagccgttgcttaatttggccagaacaagctcgccggagctcggcctagcgccgctcgccgtcgtggacctggtgttgtaaagaaacagaagtccggggggatttttgtaactgtcagtgagacatgggaattgcgccgcgaccccttttctagttattcaaatcagcagggacctattcgcaaagccggcagcgcgggcacgggtgcacgcgtctttacctgggcatgggccagattggg

SEQ ID NO: 156878 - DNA, 307 bp, Zea Mays
cctgtctcttgcaatacagcgaaccaaacaaacactgcattttgtatatgcagatacaattgcatccacagggaagggaaccaaacacatggagaatgaaggtctggtgccggtcacctgagctgctcccggcagtagtggatctccatgttgaagagccggttgtctttggagaggatgggagttggactcctcgcacgttggcgttccctgtttcggtggtggttcttcgttcggatggggattcagattctggtgaggattttccttcgccacccccttcgggctttgccgatgaagacaatga

SEQ ID NO: 156879 - DNA, 784 bp, Zea Mays
gcataactaaagttgagtttggtatccattgactcgtgcaacttctgccaaaagcgtgaggtaaactgagttcctcgatctgacacaatcttcttggcgactctatgtaaacacacaatcatgtccatatacagttttgccaacttggctcctgaataagtggtcttaactggtgtaaaacgtgacacttttgtcaatctgtccatgataacccggacataatcatatccctctcaggtatggggtaatccaactatgaaatctataatgatttcttcttattttccatttgggtacctttagaggttgaagtaatcctgctggcctttgatgctctgctttcactctctagctaacatcacaaagacctacatgtgcggctacatccatttttagtccataccactagcacttctcttttaagtcctaatacatcttggtacttctagggtgtatagaataagttgaatcgtgtgcttccttcaagatcatatgtcaaaggtgatcactttcaggctcatagattctattcatgaaccaaagggtaccttgatcatcttttgtaaactctggggcttttcccacactaatcaaggttttgatttctttaatcttttcatttgactcttgacctttgtggatttcttgttccaaggttgattctactttcataattgttgcctctgtgtagatgaccataccaaggttgagtcgttctagtttcaaacataaatcttgtgacactaaatgagtcatcctcatgctgacttgactcttctggctt

SEQ ID NO: 156880 - DNA, 345 bp, Zea Mays
gccgaagtagcagttttcctcttctttctccgtccccgcagcgggtagcagtagtcggggtaaacaaaaccaatggcatcaaaaactctgttcaatctcttttttcctcgacccccgaaggatgcggataatgcattatcttctgctttggaatatggcccaagcagttcatcacttgtaacttcgatgcatttcaaccagtcatcgtttggttcatcgaacttatccccatatctgaaggtgtatttcagtcgaaccaggtcatcttcgctagactcggtgacagtctccttcgccatttcccaattctctacaagcggccatactctgaatgctatatgttct

SEQ ID NO: 156881 - DNA, 919 bp, Zea Mays
gggccgttggatcaagcacgcacggctcagattaaatcgcgcaaacagcgaaccggtacgcaacggctgccgtgcgatttaggatatacggcacggattttatgatcgcgcgatctaatccagagcgctcatcaacgaactgacgcaccagatccgcccagatcaaaatatcccagggaggtcaccgtagccaaatcctgaccacagctttgacatcagacggctgctgtgcatcttccacctcacgccaaagcacgatgccacaggatcttcgcccgcggtgggatctatcgtacgggtcttgaggtcactcggcacccaaatcctatccaccggagtgcaagcagaggtagcgggcggaaacagtggtgttcttaccagttcttgtacgccgcgattcgcagaccatcgtccatggcatcccgcaactccacagtggttgaaaacaaactccaacgcgaccaccagggctggcgcggccacacgcaccactatcgcgaggaggagacagccactggcgcgcaggagcattaccatccgtctccctgaccgatcccacgaccaagcagacgggatggtgcgccacggaactccctccaatgtcgaccgcacgcagccacggaactcccaggcgttgtgcgagttcatgggaggtgctccattctctatcttctctcgatcgctccctgttcggtctccctttcaggtttccccaagctcggagttcatgggaggtgctcgatctcacagccgggacttgggggtgcacagggaggagggaaggagcaggccttcatatgccccccgaggacgagcctaatcaatccgctcccgaggtctgcgcggatcatggagaaccggtaggaagaagtcgtcggacgggagctcgccgcgcctgttacggtgagcagttctacgc

SEQ ID NO: 156882 - DNA, 786 bp, Zea Mays
gggccctaacctggccgacaccgaattctacctttggcggccatttcccctccatcaattccataaatccgagtcggactctccctgtccacgatgacagcggcaaccgagaacattttgatgtgttcatgatgactcagggtagtctagcacaaatggataggtttacgagtaacaggagacttaatggaggctagaacattaagcaaggatgctagaactgacctgcagacgtctggccatgatgaggtgcttacgggcgcggaaaactgatttggggagaaaagaaaattggagctctctggtggctaatcggaggcagtagtagatgctttggcttcgtgatgccttaacggagctagaggtgtgctcaatttatagtatctcaaagcggtggctctcaatttggtcatggcgtgctggcggtcggaggtagggaagagtactggcgcaatagctgcgtgtccttcaccgaggcaggttcactggtgatgagtccgcaatgtaaagcagcctactgcaatgtggtgaagtctcaacacacgtggcatacgatcggcaggcagccaacgtcggtgagcttatctgcgccggccgcaaggcaagggggtacgacggccagccaccagggttatcccctagcgaagatcttttacctaggagcgttatccggtcaccggtgagaacgaatcgcaatggcggcatggatctgggcgcacagtcgccggtggtaaggtgcgctgcaccagcgatcttgttcagggtactgtaccatcacgattaacc

SEQ ID NO: 156883 - DNA, 533 bp, Zea Mays
ggaggaagatccaggacaaacaatcaaacgctactggctcttaatttaagctctacatgtttttgagttaacgactagcttctaccacactgtcgttggagaggcattgaattgatttgatggctatagctgtagtttgggtatatccgtatatataacaactagttgagtggttgaggggtatttataccccctccatcttgtctaaggatactctcttgttggttgtttctactggttacactcgttggagagcatggtagaggtggtcatgcccagtgggttggttgagatttgataatcgcaagattatggacctagctcactagtgcattgaggatagtaagtgtgcatccacctttctcattaggtttgtttgggtcaagtaatagattatgcttgttactccttgtcatcagcatcaactaaacagtttaatagtgattgagagcttggtgatcttccggtggtgactgcgagaggcccaacatatggtgtaaacatttgtgggtaattcaccatgttggagagac

SEQ ID NO: 156884 - DNA, 687 bp, Zea Mays
gttggagtggcgggtccatggtgggtgtccttgggcggccgatggcacgccgtgcgcagagagaactccggcaaactcatgctcgggtggagctgagggcgtgcgagggagtacggtcgcggcctggggttgctttataggcgcgggcacaggcgagggcgcggggtcgggcgtcgcttggcgcgggcatgcggggccaagcgcctgggcgtgctctggcgtgccaggacaggtcgaacacgtggacgtttgtttctgcccttgttcaaacgcgtcctggtcgaccaaacgtgcaaatcttgccaaaaatcctgtgtaaagtctcttctctatgcctagggctatctgtcttgtgtgagttccaagtgaagatatggtcgggtgtgggagatatggtggcgccaggtcaggtctgtctggactgtttagcccgagacaaaacctatgtcaattcatgtcaaatggttttggtttgagttcaaatttttcaagggtgttccttgggtattttggcgcccttttgtcaattggaccatgttgttttggagcctgcaactaagtgaacacatgtgatctttagaagagggctgaaattatgcatagagaaagaggggttttttcttttgtgcttcccacatgagtgattaatttgaggattttgtgggaccttttttggtaaaattcctt

SEQ ID NO: 156885 - DNA, 464 bp, Zea Mays
cgcaaagtgatgaagtggggaaaacaatcaaggaaaagataagtgagattctgacataagagttgaagtaaaagttcattatcgaaggaagttacaaggaattaacgagatcaccaaggatgtgcaaaataaaaatgaccgctcatggattattaggaaacaagggtgatcaagggcacgttaactgaaatgtcttgaatagtcattggggtatgaaggtaagcatacatgaaaatatgagagtacgcaagactccaaggatacgagcataccaataccaagagaatagaaattgccaaaagataacgacttaacaacgaaatgggaaaggatctcaaaagacaggaaggtcatggtcatataaactcaactgtttaaataggcagcagaggtacaagggtaagtactttgaattaagggataagaatattaaaaatacaaggatatgagcatgtcaataccaa

SEQ ID NO: 156886 - DNA, 653 bp, Zea Mays
gatatggcaaccaacatggggtcatctcagagaactgcatgctgcagtaaaacagtcatcagaaccactactatttgggacatactccaatctttctataggtcaagaacaagaggtaaaattaaacaaagtaaaagttgattctttattcaaatagactccaccaaatccgaggacataatttatgatgtactccaggcacatatcttcgaaacagaaactcaatgtgtggctttcctagtcaactttgatcagcatcatatatcagaagtagtatttcgtaatatatcactggaactggccccaaaatcaatcagcattctcttagattgtaagcaggtagtttttgaaacagctaaggtgagtaaactaacgtatcatttatgtcagatcctttatttttcatctgtaaccataggataaaggaagatatcatcattgtccttctttgcgtgtgtcacaggtaaatgctcagcatggatcaagaacagctgaagaagtgcagtcttttagtgacattagtacttggaaggcattcaaggaaccaattcctcaagatgtgagtaaatctgcatacagtggaaaccgactctttgaacatctatcaactactaaagatgctaccgattatctatggtacattgttgggtaag

SEQ ID NO: 156887 - DNA, 505 bp, Zea Mays
gtcgatgggcggatggcggtcggaggtggtcggagtcgctttggccgcgcgcgggggcggaagagctcgtcggcggcgaggagtccagcctaaatatggcggtaaagttcaattggttggcttggggagctttaccaggtgacacagaagctatgcacacgaggaatttgaaaatggtgtagtggcttacccggtccacactctccggtgggcggaggaagtccggcgagggtgatctagcgtctccagtggggttgcgctcggtctgagggcttgggaagattcacgggtctctggtgaagctaaccgagcagctatcatggacgcagggtggctgaggcaagttggtcgcggtggccggcgtttaggtggcttgggcaagcggcgcagcgctcgcctgagctaagaacttggtcgggacagtgaggtgaggtgcagaatgaagtgtcgcgcacccgggatgacttataggcacaggcaggcgcagttgaggggtcggtctggc

SEQ ID NO: 156888 - DNA, 431 bp, Zea Mays
gttttgggattgactgtatcggctggacttcggattgtgttttcttgtcgccggatgatggtggtgaaggcccgtttcaaattttgaatttgtgtgactgggatttggacctcgtagcgtagagatttagtcttctcggtttggtggggccggtttctgttttagggatgatgatggtgaaggccccgttcaaatttcgcattcggatgtctgggatgtggagcttgtatgatagggatttcgtcctcttgattttgtggtcttatttggagctcgtaggatgggaattttgtcttctggatgctgcgcttcttgtctctgctatcgtgatgttggtggtgcagttaaaatttctcgttggaatggttggggtttggagctcatagtatacggattggatttcgtcctcaggattttgcacttatgcattg

SEQ ID NO: 156889 - DNA, 433 bp, Zea Mays
cagttctagagaacatgtacttgtctactagggtggtccggagctgtgtagccgtttagcttggttccgtaccctaagcctgcacactccaccactctgtgacaggtaccctagtatttgggactatagtcctatgggttcgataatcggggcccggttctagagaacggacacacatcccctggggtggtccgaagctgtgtggttgctcagcctggtcccgtaccctaagcctacacgctccaccactctgcgacgcgtgccctagtatttggagctgcggtccagggggtccggacacacagattggcttcccggtctaaatcctgcaggtcctgttgcgtgaatcaaaggataaaagataccagttagtgggtcctatgggtgcgctactaaagcttcctagccaaggctatgtgcaggtcctggtccc

SEQ ID NO: 156890 - DNA, 496 bp, Zea Mays
cgagaacgctgatcagggggtggaatgaaggcttaatagagaggcggagtgaggtcagtgctcaatttaaagggatcggctacgcgtcacgccaattttggctagaaccaacatggcggaggtgggatatttcactggcgagcccgtcgtggcgccagccggtgcaagggctccaagatggtaattccgggcgtgctacggttatcactacgtggtgaaagagtcacggcgtggtgcaattgaggtcgccggcgtaccacgacgacaccggccgctcggccacgtcgcacgagcatcaagtgcagccgataagtttctacccatgaccaaatccaccccctgctagatcttttactcccccacagttattcactacgtggcaagcacgaatctccccggcgaactctgatcttggcgcaagctcaccggcgacagtgcactgaacctggcgttcttcgtcaggtcactgttcatcactgaacatccacccgagtgt

SEQ ID NO: 156891 - DNA, 419 bp, Zea Mays
ccagacacaggcttcatcctccctggacggcgggttgattatgtaaaattctagggtctcttatgcataagtcgctcggcgaaggggtatgaagcgatacagaccgcccgatccaaccacaacggcccagattagattatcataatatccgaatcggtatcccccgctggcgatcggatcccgatccaacggtcttggtttacttcacctaaattgttataccctggataatctgcgccctccatcggccgatcgacgaccctgattcggtaggatgaaaggggaagcccaacctgatctcagccgtgcgcgaggaaatcaataacgcacgcgatgtcatcttcccagatctaatcttattcgttccctccccatccaacggctaccagcccatcctctatctcccaacatcagccgaa

SEQ ID NO: 156892 - DNA, 557 bp, Zea Mays
tgtcgatgtcgacgggagcacaagcagagatgctgggcatgtggctgctccatggcagcagtttccatggctagtgctactgtgcaggggaaagaggggcaagagagaggtttcatgagttgcacgaaactacataggacgcgacccttcttttatggatgcgagaggttgtgggtgaggtggataggcgcggaggcgaggtagttgtggtggcatctgagtcagacacgcacgcgcgaaacgagtgacggtttgagaagatgaagcggacgcatgggtccatgatgacaatgagatgaacgggtgtggggataggcagttgtgcggcggattgcacgagaccgtgtaagacagagacggagctagacgagtggtagacagggttacataaaattagacaaagatagtcggagctggcccacgggcccaggatgataaggtagacgtcggaggggtagacagtgatagacgaggatagccgatgcgagcagcatgcagttcgcgagaagtagtttggtgatctcggggaaaagggcacaagatctggaacaagatcg

SEQ ID NO: 156893 - DNA, 1016 bp, Zea Mays
cccttcgacctgaggcgcggtggcgccgcgcagtgtctacggcggagacctgctggcgcgcccgcgattcgacgccccaatgccccaagcccaaaattgacgggtgctacacaacaaatagatgaagacgaatcatttggacggttttcttaccggaattagaggcgacgacctcactgcccgcgacgcaaggcggatacgcggcggaagtcgaactacggcgagcgattacagtcgccccaaggccccgcagttcaaattgatggcgcagtcagcttcacgggtcctcgacgaacgccctcacccgcacgcgcgaacccgagcgcgtgtacaggggagagtcaccggcggcgggcacccaccgtgcggatgcggcgatttgtgaggttagcggcggtcgcaaggcaagacaagaggtggaatcggggggtccggggtcgtggcacctatatggatgcgtacgggggcagtgccgcaacggccgggccggacttccgcgaattcgtcgcggcgacgctttctctacactcggcgatagggcggcactggaaattagggcgacggacctaggggaaactgtggaacggagagaggcaatggatcgtggccacggatataggggtgggctgagccgcagctgcaacgacgtcggcgagatccccggaaggtgctctccgcggatcacgcgaccgctgttgacgcagccgtgcgaaggaagggggtgacaggtggggtcccgagttcagtgaccgagcgcaacacgcgctgagccgcggacaacgagtggctgatgtatggggcccacagagcagcgagggaaagagatcacagctgagcacgttagactgcccggtgggcccagcgtgtcggcgcgcgcctgcggagcaagatgggctgcgcagaggggttttccctggtgggccaaaatggtagccgaagcccaggtaaggttgttcactgttttctttattctttttattttatgtttccctttctctccttttcaaatttagatt

SEQ ID NO: 156894 - DNA, 568 bp, Zea Mays
ctcaagaaaaggatgatgaggaaggaactttgtggatgaccaatgaggtttttgatgtgggcgtaaaggtggtgggtgataaatcctccacccaagcaaacccatcaacctcaagtcatccaagtcttgatgaagttcatctaccccaaaggatgccaaccgtggtagaagatgaacatgaaagtgttgatggtgaagtgcctcttgatcaagtggatgatgaggaggagcaaattcaaagacaaccatcagtgccccatcctcgagtccatcataccattcaaagagatcatctggtggacaacatcctgggtagcatcaggagaggggtaacaactcgatcccgtttagcaaatttttgtgaattttactcgtttgtctcctctcttgagccacttaaggttgaagaagcgttggatgatccggattggataattgccatgcaagaggagttgaacaacttcacccggaatgaagtctggtccctggttcaaagacccaagcaaaatgtgattgggacaaaatgggtctttaggaacaaacaagatgaacatggcgttgttacaag

SEQ ID NO: 156895 - DNA, 661 bp, Zea Mays
agccaaccgatcaaattttagtggctcagattagatcggcgtgattgcgaaccggtacgccataggggccctcggatctagatccaacagcccgggttttacacaactgagttctaatctcgtccgctcattcggatcgaacgacacagatccacccacagaactggtgcccatacattcaaatccgagccatccctccgagatccaatggcaccgggcacgtctcctttcccagctacccagccgacccaaactacggcggcgctcattgttcggccactatgccccgccggagcacggtactgagccaacctggtggcctagaactaagcgaatccgctacatgatttgacgacgacatgatgagcaggttagtagccaacttaccggtcgttgaagttgtggttggagcttgcccaaacgcctcgcggcagctcggtccaatccaacaacgacgagaaattccccattacaagctagcggttatcaacgtcgttgatcttcacacgtcataccgacacgcgtgaacatcccaaggcaatccataccccaggggaatggcgcagagaaggtggtcttcgtcaacgcgtagtttggcggcgggcaccgtgcgctaacgagccattgcgacgactcccaaccaccacaccgcatggggatg

SEQ ID NO: 156896 - DNA, 431 bp, Zea Mays
cggcacctttggaagctgaagcaccctcggtcgtacccaccggagctgggtgaccctggcctgcaacgtcaagagccagtgtatccccgtgagctagactgccctccaaggtcgaagaagcgtgagaaattgtctgggttatttcttgcccgacaggattaccagccaaaaggatgtcatccgtaatctctgtacgggcgatagaactttcagtctcaggaggctccaacaaaaggtcttcaggaataatttcctctagtgcatgatcaatggcagacatcgtcaacccctggagactaactagtctctataaagcctgcattggagcgtcattgctgctatggttgcggttgttcttgcgaatcaaagggacaacttcttcctcctcttcatcctcatcaagcacacgaccaccaactctgacaccacca

SEQ ID NO: 156897 - DNA, 629 bp, Zea Mays
ttttttcctgtgcttatttaggttctaattctgttcattatcaacattaccagcccgtgataagccaacatcaagctagtgttgtcaattgtgcattgtgctactctattggcaaagcaaaccaaaagattaggtgtttgtgtttgtaaatcatatgtattcatgaaattggtactggccgtggtatgtttcctgcctattttgtgactccttatcaagctgcagtaacattgtcgatttaggtcaaatcataatgggaacacctaacgttattattggggtctgaagattaaatatttcatgagtattcttctatggtatctgttcgaatatgcagcttggatggaccatttgaatttcctttgattccaaaagtaagtttcaaatgaggccttcaataatactcagtggtaaaaatatttcatcttgctggtgtgagactactttacactgccaagttcagtttgcgatgattatattaggcaactacaggcaatgtatttctatccagtgcatttgtgacttgtctgttggaatactcctctactgattgattatattctccctgcttagagctgcgcttgtttgaatttatctgcgtccttttattaccaaaaaggcttctgatt

SEQ ID NO: 156898 - DNA, 420 bp, Zea Mays
gctgcatgcacagggcccctaccgatgggagaagcgcagagggggtgctgtccacgtcgctccgtggatccgcgaccacgaccaggctccagtcggatgcggtatcggtatgctcccgagttgcttgaggtaatccccgaggccaaagcgacgacaagattatgactttgatcacgaaagatctctcctctctacctctcgcggtggtggtggccttgctcggttgttgggtaatgagggtgtcgcaccccaatatcggtacatatacctagagcaagctaggggaggttggtggttgcgtaggtggcggccggttgttacggagatccacgggcgcggtgttcggccgaggttgttctttctacgcaaaagtcggacgcgcctgtgataccgtgaccaagccacaatggtgaagacagc

SEQ ID NO: 156899 - DNA, 754 bp, Zea Mays
aatggaagtcataaaagaaaaaaagaaatgacctcctcggtgccttgggtcgaaactggccgacccaattcctcccgtcgagctatcctggggctggggcacgcgccaacaaatggggcccagcgtcagcctcacctggcatgccgcacgtcctagcaactcgctgacaagtggtccaactgcgtcagacgctccatcccctcatgcaccgtcgctgaaacgtgggtcgcttggccagcgttagcttgggtgtcgtggactcaacctcactcatcgtccagtgggcccactatgtcatccccaatcgaatcgtaataggagaatccgatatccccatcgcggtctttgttggccatgcgcgggcacaaccacatctcttaatcgtaggcatcagcttggccggatagtccatccctcgatacgtataaaccctggcctccgcccttgagtttcttcaaatcgcccatggcagagagaaatcgagagaaatagggggaacagcgccagcattaggcctgggtcgtcgtcgtctgccttgcgctttggttctagtccgtgggtttggctgagagactttgtggtgacgccgggaatcaatctgcgtcaaccgtctgcagggagacagccctgctccggcgcaatttgtcatcaccgtccctcgacgccacggaatcaccatgccccgtggtccaccacttcgtcatcaccatctgtggtgagtccctagccatcctctttgggttaattccctcta

SEQ ID NO: 156900 - DNA, 709 bp, Zea Mays
ctcgattcttagcccataatatgttaacttacctacgagaacaactcattctcatgtacacatatgggtaaatcacaattttatacactcgaagaggcaaggacaactttatttcacatcacctatttcctggcctatctagtgtcttcaaacaagagtggacccacttcaattgaagagtattcggttgaatcatattacttttactgacacaattacataaatactgcataatatgtatctatcaagattttcatggttttcccctctttcgctcatagccctagcaccaaaaatatcatgtgcataacagggttttgattcagcctaaaatgaaatagtccagacgtacatatataaaatagtctgggcctacatccatgaaatagcccaaaatgaaataggccaaaaataacattcatgtacgtccgagcctacatccatgtaaacaacgtccaggttatattggcacgctccctggaaacttcaagtctacccatccacatcttttgcatgcaggtaggagctgctgcccggatacacgagtgccatccatgtctaccgcatgcacgcaggagctgctggccggatacacgcgcatgcacgcaggatctgctggatacacgcgtgtctaggtcaagccgtcgacggctgttctagcaccttccctgcagcaaggtgttgcatgtcagataagggagaaaaaacc

SEQ ID NO: 156901 - DNA, 1106 bp, Zea Mays
gaacattattccattttgtttttcctttttaacctcatgaagaatctcatgtaaagctactacactatccaagatgtacctttccttgaggaagcctaactgcgaattactaatgaccttagtaatgcatgacaccagcctgttattaaggggttttgtgataattttatagctcacatttaaaaggcaaattggtctatagtttttcaattcttttgcttcctcggtcttaggaagtaaagtgattataccatagttaagtctttctataggaagcacacctttatggaagtcttcaaacatgtgacacaagtcaaacgaaatcacttcccaaaaatcttggtagaactcggccggtaatccatcgggactagggcgctgttatgtttcatggacttaaccacattatggatttcgtggatagaaaaagaagtgagaaaggacttatcctcttccccaagcctagccatatcgacattactcatagaaatatgagtatcgtcagaggtcccgaacagatttcggtagaagtttgtggctaacgcatttatattatcttccccttgtatcacatggtcatcctgaagcaaagataaaatcctcattttccttctaccatttgctttcaggtgaaagtatttagtattgttatcaccttccataatgattttttccctcgacttctgccttacttttgtttcatcctcaatcacaatatttctcaaacgagcttcatagacgattttctcctgtttttcatgatcaatcaggctattgacttcgcttttcacatctaactccttgattttaactgtcagatccttcttcaatttcttataccttccttcaatgctaatgttccaccctttgagttttttcctcaatcttttcaccttttccttccagatctccaagcttgaactgctccttacgggtttactccagcactctttcacaatctgaccaaagtcgggtctgtgtttccagcacagttcatatttaaaatccctcttgttataaattcttgtaccagaactcaaacaaagggggacatgatcagaaaacgttctattgaggcccctgacacaagtgtcatggtaagttaa

SEQ ID NO: 156902 - DNA, 302 bp, Zea Mays
ggttgagcttctctgcatcttctgctcgggcaatcatctgacggtggtgccgggccaagaaatcatactgggcatccagggtgagcaggtatgcagtgaggtacacgactgtggggtcgtcctcaagaagctgctgctcttccaatgcacgcatcctggccatccaaactggacggtctctctgaaagggcggaaagaatctgagcggggtgtcggccacttcttcatagatctgacatagagccctcaatgccttgcgagcgacgacttggcaggtgtctttgaatctgtgcccagcagta

SEQ ID NO: 156903 - DNA, 503 bp, Zea Mays
gacttgactgaaggcttcagaaaactttgaaacacaacaactttgtcctctcttggctttggcactaaatcatcacctcctagccgcatccaatcaacattgtcaatatagccaaagaatttatgtacctcaagtgtcctcctttgatctttgatttaccgaagtccacatggcttggcttcgtaggataaatggtggtgctatcctcttcaatatcaatgttgtcactatcctcgaacagattcacaacgccggctttggcctgagaggcggtagcctctattattgtaactaacttctcaaccgtcgtttcttgaacgcttgatgaaggtgccaagggcacatcagcaccaggctgctctcctgccatttcctattaaaaaacgtacctttcagctagctaaggctggtttggaggtggaaaagcaatcaaaataagctttgaaggcagagcaggcttcagcaacaacacacacaaaagaagaaaatatcgtaccaacact

SEQ ID NO: 156904 - DNA, 326 bp, Zea Mays
gaagaaattgctgcaactgtcgaggaaaccccggctgcagtgcctaaaaaaagggagaagatgcttggaaaagagaaggagtctgcggaagatgcttcggaagaaggaaatttatactttcaaaacataattgggcaagaattgtcaagggctgaaaaagaagagctgagggactatgccatatcttgcgggtaccagccaggggcgctgctcttcggtggtgttgccgaagagagtttaggatgccttcgggaccaaattggggtgaaggttgtcagcactttatcaaaaagtgttggttttccgaagctcgaagccgatctcag

SEQ ID NO: 156905 - DNA, 1449 bp, Zea Mays
aaatcaaaccttcttgtttaaatttctagcttgtacaatcaaaaccactataacaaaaatatatattatacccgtctcagaaaatgggtaaagatgatatcaggagcgtgaatcatatgcatgagttggtgtcaacaagagctggattatccactaatttgtaccctaaaatcaactgcggccaagagctaacatttgatatcatggagacctcaagcatttcatattaataaaataaccatgatgactttgatttattatataaaaaaaatggtgcaaagaaaataaagtttacccttatatctagaggttggtgtaacacaagcatgataaccataaccattagaagcccacagttgatcatttgacacctgaacataaagtattgcttcaattcaatgacaattagattttctaagagtggtagcataactagccttcataaataaatctgttaatatcagttttgcttcactagaatgcaaagcatgcaaattgactttacatgctaaatatccaaaagtatataagcctatgctgacctgtgaatcttctattgcccatgttagtgcatacaaaacattagtaccataagaaactttactaaagaaaaaaacatcagtccaatttcgaatttgatcatccaaaataagggtgtcaaaactcaaaagtaagcattaaagttttctctcatgcccttctgaagtttctcgcattgttttcaggtcgggcgaccagctggtcgttccagaggaccgaccaggcgcctaatcgcgattagggtgacgattaggacgcttaatcggtcctggtcgacctctggtcgtcccctaatcgtcctatatatttctgggcatatgtatatataatatgatatatgtatatataagcaatactgcaataggtattatataagtatgaaattgaaactgagtaacagactgaaaggcaatataggcatatagcactatagcagaactgaaactgaaatattgaatacaaggctacaagcagtaatgcagtacctactacctagagcatatcatcatccaagcaaaaagcagcagcagcttctccaacagattcagattcatcagaattcagacaataggaaagataggaaagggggagaagggggggaaccttgagatgaggagctcatctcgtcgctagtgttttggagacaccgccggtgttctggagctgctgctggtgttctagagccgcagcctgtgttctggacttggcagaggagaggaaaagtttcaagggatgacaaggggtggtggcgcattgcctttatactactgtagatgggcctaaaaatagaagcccagtggcccactagaaaaccctagcagcttggacaaatcctggtcgatttaccatctagtcggatgactaatcacccctaatcgacgactagtcggacgacctggacgacttgat

SEQ ID NO: 156906 - DNA, 507 bp, Zea Mays
gtctagatgatccatctctcttctaagtagggaggtatgatggtatcttaaagcagaaagcaagggtgtgatgggcagggtatggttagataccaacacttttgatagaaatttggggtagtttcttcttagataatcctctgtttcccatgtggcttgctcttcggtgtggttgccccattggactttatacatcttaactgcccggttgctagtggatctgcttctgtggtctaggaccttgacagggtgttctttgtaggtcaagtcttgttctatctccacctctggttcagtcagaatctttgttggtactcggacacacttcttcagctgagatatgtggaatacatcatgtattgctcacagcttaggtggtagcttcagtttgtaagctattggtccacatgcttccatgatctcataaggtccaatatagcgaggagctaattttcctttaattccaaatttttgcacacctttggtgggtgagaccttgagataaac

SEQ ID NO: 156907 - DNA, 606 bp, Zea Mays
attatgttgacaagtcctcaaggtgaaagaatccaagttaacatagacaagtcaacagatgaaaaagggaaaacagtgatcaatcacttggaagaaaaggccttggaaaatatcaaagtagtgtgcgaatacccagacatatttccggaggaattaccaggtatgccacctgaccgtgatatagagttttctattgaattattacccggaaccgcaccgatttcaaaaagaccttatagaatggatgtcaaagatttagtagactgaagaaacaaatagaagaattactagaaaaaggtttcattcgcccaagttcatccccttggggagccccagtgctatttgtgaacaagaaggatggttcgaggagaatgtgcgttgattatagaagtttgaacgaagtaaccatcaaaaataaatacccattacctcggattgaagatttgtttgaccagatgaagggagctaggatattctcgaagatagatctgagatcgggatatcatgaattaaaaatttgagcagaagatgtacccaagacagccttcacgatgagatatggattatatgagtttttggtcatgtcgtttggactgactaatgcac

SEQ ID NO: 156908 - DNA, 444 bp, Zea Mays
gccgcgggccgacctcaccatagcgcctcagccggtaaaacttggctcattaattcaccttcgcctccgcattgttttgcgtgtatccaatcgggggttaactcactgatcgacgatcggggcgtcggcgggggaggggatctccaccgtgggccgcggctcggtgttcacggagtcggggggaggaagagaactccatggccgttgatctttgcgtggacgggcaagatcaaaacccgcgtaccgttttggtgtgggggtgcatctggccgttgatccgtgatccggtggtcgtggtcggttatgtgttatgatgtgatctagagcgttggcgctagatcggacggtccgagttgcatacccgttcggattaatatggatctaatcctggccacagaacttagatcgtgtggctcggattatcccataccccttcgccaaggc

SEQ ID NO: 156909 - DNA, 761 bp, Zea Mays
tggtgacatgccgaagtagtcatcgcttcctctatgtttatatgtcgagtcaaaatgcggggtactagtggtacgctaagtggtgctccaaataaattaatcagttaaggcggaatctgtcatgcgtgatttattgttggtgaatagtttgaattacgagttatatgaggattacgttagaaactagtatgcggcgtgtaactgtgctcgtgatgtgaataacatatcaataggtattgttggtgtcattagcaagtgtgatgattttggttgtgcgataaattttgaagggcgaagaacatgtctagtgtgtcgatcaggttaaccgataggttccgtaatatgcttgtgatgcttttatgtgcatgataagctcgatgccttgtcgtcgtagtctcaggaaattttctgaaatatgctagtgctccactgatgggttgaatgaacttgagatgtattacaatagctgtgtgtcgtgccggttatccaaaaatggcgaaaggtggtgtgtgatggtaattgggaaatagtcacgtcattagtcaactcatgttaggcaggagttgattgtgttaagtgattgttatatatgttgtgtctcgaattgtgataataataggcaagccgacgtgtatgctgtctagcgggttgtgttgttgctctggttaatcaacttgttagatggccttagttaagctcgtaatcctggtgatttgcttgttttggtctagatacgcatgattatggtcgcgggtaaaaag

SEQ ID NO: 156910 - DNA, 786 bp, Zea Mays
tgaaattctctaggttacgttggctgcaattagcccttcattactcaatgattggtgatctagagcagtaagatcctgtattttctttttgtcctgacactttctcttttatttgttcatgatttatttactttaacattatatatgtaccacgccaagtcctactcttatctgttttggactttgcacggtttattcttttggcgtgtcttgataattgtgatgtattattactacatgttggagtcagaatattggatttttggagtatattttatattgtgcaaattattttcatggtcaaagtgtcaaacgaatttgcacatgatcaatgaactttttctgtctacttatctattgttaatgatgtggcattccagaaacagggtcgaatctgtatctttgcttctaatttctgatcattagaagtttgtcttctatagtctatactgccacatgccatctattcggtgattaacaaatgatgatgtcttttatggatgaggttgagattatatgtagattttctgctgactttaggcattattcttcatctttctgttttaagtaaccaagtatgcttttattgtgtttgtctgctttttttattgaagaagattaatactatcttctgtttgcatggatatctaacactagtggcttgctaggtcactgaatttactcgctgaggttaatcttgcggaagaaggtgtattgcaactgctattggcatctattcataggttatctagtaggactggaagtgataatgaagccacagtgtca

SEQ ID NO: 156911 - DNA, 723 bp, Zea Mays
taacaatccaagtgtatgcatatgacgagatgacctaagggtggagtttagggggaaaatagaaataaggggggggttaggagattagggttccaaaccttgggttgagattttgggatgttacaaacctaccccacttaaaggaatctcgccctcgagatttagactggatttgagaaaagataagggtattccctcctcaaggagtcctcactctcccaggtagcttcctcttctccttctctgctccactgaactttacagagtttcacttctgagttgcgggtcttccggactgccaagtcaagaatctttactggcttctcacggtactgaaggtctttctgaatttgtattgcctcttcttcaatgtgactttctggtgcttgcaggcatttgcggagctgggatacgtgaaacacattgtggatgtcagacatggattctggtagttcaagacggtatgctgcgggtcctactctgcagatgatgggatagggaccgacaaatcgcggtactagctttcctttcacttggaaccttctgacaccacgcatcggggagaccttgaggtagacgaagtctccttcctcaaatctgagttctctctgcctgttgtccgcataactcttttgccgactctgagcttcaagtaatctcctgcggatcagggcaactttctcctcagcctctgtcacacccaggtttcggggacaccaagac

SEQ ID NO: 156912 - DNA, 761 bp, Zea Mays
ggttacttcccgtcggccaacagagttagatgtcggagataagttaattccggtcgacttgaatgctgaccacgacaggagacgtggccgcggtgcacagcctccatcacatcgtcaaggaacaagtcgtggttgtggctcctcttcgcgcccggtctgtcagatctgtggcaaggagggccacaccgctgtccactgctggcacaggaacgatgatagctacaatcaagaacctccatcggcgactatggctaccagtgcctcgtacaaagtcgaccagatctggtataatgacaccacggcgatcgacatatcacaagtgatctcgaccctctgacgatgcgtgaacgttaccagggtggtgatcaagttcaagtcggcaatggtataggtttgtagattttacatatcggtcctccattaattttgttgatcgctcacttgctttgcatcatgttcttcatgttcctgatacgacaaaacatctgatcttagttcataaattttcacgcgataatgatgtattctttgagtttcacccttggcactttttcattaagatcggtaaacaaagacaacgcttctggagggcaagtgtaacggggggcctctatccactcaaactagatgatgttgcttccttatcccatgctcttcttagtcaatctgttagctgtgaccattggcatgctagccttggtcacccgtcaagtccagtagttagatatatcttgcacttcaataatattccatgttcccgg

SEQ ID NO: 156913 - DNA, 537 bp, Zea Mays
ttatccaagtggcaaatgtcattcatcagacaccgccaccgacctcggcgtcaaaaattgtcattgccgatcctacagccatcggagccgaaaccaccggagccgaaaccgggggagccgaagccaccggagccgaagccaccggagcaagcactgaagccgaagccatcgggggcgaaaccgggaccaactaagatcctaacctggaaactacacttgatgatattgacaatatgcttctgagaatggctgaagaagaagctgttgtggttgcagtgaacacggcaacagaaaaaggaaaagagcagattgaagacattttggaaaaagaaaattttaattttcaagatatacttggacaagggttgtcagacgctgaaaaagaagagctgaagaaatatgctatatcctgaggatacaaactagggtctctgttttttggtggagtcaatgaagggaagctgagatgccttcggaaccgaaccgaggccaaggttgttaggaccttctccaaaagcgttggcctgccgaagatag

SEQ ID NO: 156914 - DNA, 382 bp, Zea Mays
ccggaataaaactgtttggtgaattacaagggcgtgttagccctgaggatttaaacaaaaaatttacggagattgtcaatattccaggaatgttccaggtcttcgccagattgcgttgttagtctgtacgcgctgggagacgacttcgtcttaacgataaatggtccttcccactttggctccagcttaccccgtgactctgtctgggttgtgcagacaagtacgaggtccccttcgttgaattctcttgggacgactgtgtggtcgcgccaggccttcgtttgggcttggtatttgttgagggcctggattgcgaagacacggtctccgtcgatgagatttttgtaggttagctcgtcgacatcgggtactgctaaagcgc

SEQ ID NO: 156915 - DNA, 666 bp, Zea Mays
ggcgaggtccaacgctggcaagattaatccacgatttaagtgtatgaaaccccaattcgacccgtccatacgctacatcaatgatgacgggtacgggcgagtggtcttaccagtgattttacacgacagcgagcagtccacggaacgaaggttgttccgccccagatttgaactccggcgagcacacacctgacccccggtcgccaaacctccacagcgagatcccagatactatactcagggcgcgacggggcatccacacgacgtgacgacgacgaattggcggattaacggcggcttccgctgcgctctctctcccgtgggcaacagcgatggcggcaagctggatgaggtgagaagaaaaggtcgcggggcccaatttatagcccagggcgaggacgagctcggttaggcttaccccgagattcaagcgtggatttaggggttgttacggcatcccctgccatggctgttgtccgagaagtcagggaagggagagatacgactgactgcccaagggtagagggacagggtaatgcggtgacgcccacgcaacaaccatctgcggagctcggcgcctgttgcaggtattttgtttttcatgtcgtagaggaaactgattcctcgagccacacagagaagatgacagctgaccagaggtcctgt

SEQ ID NO: 156916 - DNA, 554 bp, Zea Mays
gcgcaaggtgggaaaactggcgcggtgactgggtgattgctagcgccgaggccaatgaccgcctcgtcctgccaagcaacgggccatccctcgaccgcaagcactggaggaccaagccaacggtgtcgctagagctcctgctcgtactggagaggatcaagaccttggcaaccggtggtctgacctccatgcatgtggtcagggacttcctgaagtgctgggtcatgccgctgcagaggaggtcgtgcctgtgctgctggttcactggcccaaatgatatcgaccggatccagcgcgggccgggcaccgatctgtcctcagaggagctggaactcctggtgaaggggattactggtgagtcctttgtccctgaatctttgatactcccctaggacatctcggcactgtgtgatgatccagggccgcgaacggtggtcctggccacgctgccgaccctcaatgagagcggcgtggcagttcgtcagaccggcggtcgggaccccctccgtgggatccagatccccgatgtcatgagcttgttacacttagaatgc

SEQ ID NO: 156917 - DNA, 613 bp, Zea Mays
cccatttacatgtgataggaacaacatgcgagggtaaaggaacgatatcccatgtaccagtgcgttcaagagcaaccaattcatcaatcatagctagctgccactcaacaatcccagaagcttcctgatatgtagtgggttcaacaattgccacagcagcccgtggaaaaccatagcgatctggaggttcaatgataccacagtcacgaagacgatatccctgattaaaaacatcattagactcattattgttagtacaagaatcaggtacaagatcagtatcaggatcagtcgtagaaatagtgcgggaacgacgaatgcaggtttggatggcaggtggtttggaagagtaagaagatgacgtggaggtggaaggtggtgttattggaatgagaacatcatatgtggatgtagaagatgatggtgcagatgcaggaatggaaggaagacacttgaaagaagtaaattctgtgggataatatgatgagtgagtagactggttgtgaaagaaggggcgattttcattgaagcatgtaaattttatgcacaaattacttggcacatgttgtggattgagtggaaaagaaatctatttaatttaaggttgtaaatg

SEQ ID NO: 156918 - DNA, 602 bp, Zea Mays
ctcgacctcctttttgagcccgcaccccactcactcactcccctcgcctagaagcgctcctctgtagacctctcgcacctctcccttgcacagcgcacgcccgaggagcaccatcgccgtccgtcgtgacctcgggtccattccgcggccgccatcgagcctctgccgtgttcgttgccccggtgagctccttctcctcgccagcaactcaagacacccttggtttgcccctaccccttctattccccccctactcgcactcaccgaactcttcactgtgcaactgtattgccgtcgtcgttgacccgggcccctgttgtgttctcgccgtcgctcaagcgctccagagtcgtctctcaagttaactcacctccccatgcccctgatttccctttccctaccttgttgctcgcgtaatcgctcgccagagtaggctagcgccgctgccgagccgctctaccgcgaatcattgccttccagtgcctctgtcgatgtcgtgcccacgaccgagtctgtcgtgccaccctgaacccacttgagcccttcccagcaccccagggccccccggcatgcccgcgccctcacctctggcagagctttgc

SEQ ID NO: 156919 - DNA, 517 bp, Zea Mays
ctcctagagtgaatatggtgccaaagcatcagggacgttcagatggatgaagatttataaactttcttaccccttgaaagcataaggtagtttgtttggcccctgttgcattgtagcttggcaacagttcagtatgaacccatagtgtgcatcttattaattttattatttaatctacctccttattgctacattagtatatcgatgaatgtgcgatgttattttcaacactggacaacatccagcaggcaagtaattttagaactggacatgaatttcaataaacaatatatgcacctatgtgtgttttggattcttcatagatttgtatgagctctaaatctaacggaaacattaatcaattgcctggattagagaaggaaatgttgagattcaatggcttacctcagtatattatgaaattaaggccaatgttcttctagaacctattttcttcacttatcaggtttgttcctcttggtcgccttcttggaactgatgttcgaatcagaacaca

SEQ ID NO: 156920 - DNA, 892 bp, Zea Mays
cagccacacactacgcctgaaaataatccagccagaggactacaaaagaaacaaaaacatactattgattccagaattccaccatctgaagaacaaataaatgaaggttagccttacagtacaaaataaaattctgtcttgtgaggaacaatagattgcttctatgaaacaaatgcaaatacaaaagatcaatgattgactccattatggtgacgtctattttttacttaattgcactcatcggccggctgccagagttttagaccaaaaatacataacttcacagcatcatgcatgtctatcaacatggctatgagattagatgttgtgtagtctttcattggtatagaatttgcttcagagtgataaatgttgtgaccaaaaaaacaaggttcagttctcaacctctcaaaaagaaccgatgaaccaaacaaaaaatattaacattcagattgctctgtagtatcccgcaacaccttcattttgtgaccgcatactgtatgtccatctgaccagggcatctcaattctgaacaaaatcaataaccaccaacagtccaaaagaagatacagttagcattacgctcgacagaattcaacttttccgaaagttctatacagcaaacagaggcaatttacatcaaatcactacagctataattaccttctgttggaaatttgggatacttggtcgccaagagttcattgtaacacctcaaactaatacaatgaaaggtgaagttttaaaccatggaagttatggaggaatcacttcctgcacatttggggctggtaccatctggaaactaaatgtcatgaatgcagatcctgttcctagtgaccatgtgggcatcagcctttcttgttcattgacgttcaataaacatttcaag

SEQ ID NO: 156921 - DNA, 787 bp, Zea Mays
aaaaaataaaaagaaaaagaataaaaagcttacctgggccggactgcaccatttcggcccatctaccaaaacctcacctctctccgcgccgcccaaaccctaggagatcggcgccgacacccagggcccacgtgccatcccctgcgctccgcctgttaagctgtcgcgcgggcccgcgttgtcatcacccgtctccgcgctcacgaacacccgcgccctctgaccagtgggccccgaccctcatggctcggtcagcgctcgtcgtcaacctccctcaacgggcgctcccgagctcggcgggagaccgcgccaaaatcggtggaccgttgaagactgaccccgattttcccctcgcgtataaagcctccattgcggcacatccctaatcgctttgccgcactaccccgcgactcgagaaccaccgccgttgagagaaaagggagaggggaggtctacccgcgccgccgccggcttggagcttacaagggcaacgaatcgaccgtcgccgggcataggggtgatctcaggtgactgctgaagctggcttgggacctcctgggcgaagcaagtcccatggtggtcacgaattgctcgccggagcgcttcactgccgccaagccgcccctttgccgtggccagggtcttccgcgccgcgaatccctaggtatgaagtccttaccgagttccttaagcccctagctacgttcagcacgtttcgtatgaggttgggtcctctgcgtcgtcaattcgtggtcgccggcgtgaccgccgccgtccattggggggg

SEQ ID NO: 156922 - DNA, 910 bp, Zea Mays
ggatatgggccgttagattggttctagacggtcttgattaaaccggtccacacactgaaccgatacgcgctaggagcccatagactaataaccaataacttagattttaagcacctgagattcattctgatccgttcgatcaaattaaacggtcaggattactaggtcgaaagggtatgctaggaatttaatctcatccactggctcaccgatcaacggtcaagtacccatcttcttcatccaagcaggacacaatggtgcgagcaacccccacaatggaggccatgacagcgtttaggtgattcggcaacccgaccctccaacgcacaaacggatgagagctagacgtagcgaggaggtcaacgaagctagcgagggagcccttaccgaacatgtggtggcagcagtggcctcgcccatgagttcttgcaaccagatggcaggttccatgctctggggagcaattgggtcgaaagcggtggtctacccagtctagactcatcaacgagaagagaagcagtttgtttctttcacccaaagcaggaaacgacaacttggtgtcatctcccgctgtgatctggtggaggatcaccgaggacggcctggcagagatggacaggtagagccagaaggagacagcgaagcctccttcctcgccggctcaggccgctcccgtttctgggtcgacgcgcacgccgcagagctcgcgatagccgtcattcccgccgcattccgattccgactccgccttcgcccccacggaggcaggtgaagattttgcctcagccgtcgaccatcgttcgacatggtacggatgcccggggggttcatggcctcggttttataggcgccaatggggaaagatcgagtttgatttggtgaatctttatccaaggcgaatgatctggat

SEQ ID NO: 156923 - DNA, 526 bp, Zea Mays
aggtctctaactctgtctgctaatcattaaccctgtctgctaattatatgttcaattgtggctgtcagtcttttccagcaaggggtaaaaagtaggctcctctcctgaaaggcacacatgagtatgcctatagcatgctgttgggtttagattcttgatcagttcaaacatggggggatcctgtgtttattcttgtttttttatatcagttcaaacagagagccacgaacatgtttgaatgccttcatttgacagatgaaccaatattctaatattggttgctgaacatgggggacatgatttaggctggtggcgccttgtcatgccctgatgtttgttgtattgcccatgagtcacagacaaagcatcctttcttattaccctttggaggtttcagctcagtgattttaggtcagcaaagcgactgtcagcctcaagtcccacccaaccgtgcaagtgacagatgaggatgtcttgcactacatccatgtagtgttcattatctgttgtaacatataaaagcttt

SEQ ID NO: 156924 - DNA, 522 bp, Zea Mays
ggtggctgtggagaggaggtgagcgctggggaaggggagtcaggggcgatggagatgacaatgtgctagggcgacgccggagggcacaacagggaggggcagtgcggcgtggagggcagtgtagtggcgaggggagggggcaatgcggaggcgaggatgcgagtagaatggggaattagggacaatacgtgtgggccccaactgtaggacgcatgggtcccaagtgtaagtaacggaaacaacgtaacagtgtttgaacgacgacaatttgttcgactgtggggaaaattgagaaggaaacaaatttaagggtagcaatgaggagactgttccaagtaagggcacccatgtaaaaaaccccttaattaaggtacaaagcatacaaccaagcagactaaggaagattttggaaccttttttcaccttagtttcaggtacctcagtcctcttcaccttttgctttgttctagtccctcgaagtccttcttgccttcatccctggttcaacaaactatttgcaag

SEQ ID NO: 156925 - DNA, 625 bp, Zea Mays
tcgtttggctctgtgtctaagtgttttgagtctgatgattctgggagttcgattgcgtggacggaggagtcttcagatgaggacttggattattttgcagcgttagatgtggctgcagcggagccttcgccgcgcgtggagggttccgaggggtgcctgggtgcgagtactgggtataggcggcgaagggcggtggcgaaacggagagtgagtgaattttcgcgaagtggtaggcgtcatcgtagtgagatggagagtggtcgtcttcgcgtggacgggactggtaagcgagaattgttgtcctcgccgattggggcgagtgtaggtgagggggagctgcgaaatctttttgagggtgaggaattgaggataatgctgtccaactacagggagatgggtatcatcccaaaggttgagccaatgtaatatatgatgccctcgctgtgtgtatgtgaccgcaatttgtatgataaggcttctgcacggagtcttttgggaaagacttcaattttgtatgataggtcgatctttacgtatttgttgtgctgttccggctgcacccgtaagcgacttttgcacggagagtcttttggaaaagacttcgattttgcgcacttattattcc

SEQ ID NO: 156926 - DNA, 474 bp, Zea Mays
tgaaggtagcgggtaccttacagccccttcctataccatcttggaaatgggaggatatttgcatggattttattgtgggtttacccaacacatcccgacaccacgattctatttgggtcattgtggataggttgaccaagacaactcatttcttgccagtacataccactcacagggcagaaaagtatgcagaaatctatattgaccagatagtgcgtttgcatggaataccaaggactatcgtgtcagacagaggagcaccgtttgtggcacgtttttgggagcaactgcaagagtcacttgggacccatgtaataagaagctcggcataccatccttagacagatgatcagacagaaagggtgaattagattttggaggacatgttgagggcatgtgtgttgcactatgggaagaattgggataagtgcctctcgttggtgaagttctcttataacaacagctaccagtcca

SEQ ID NO: 156927 - DNA, 757 bp, Zea Mays
attttatttaaatatttattaggaacgtgtttattttaggtgacgttgcatcaaatgtaagaaaattttattggaaggcattctaatatcacaatcctcgaagaaacatgaggcatattttatggatgtgtgttacttaattctttagatgtgattatttccatgatgtaatgagtgaatggtaaaacacgtaacgagagcaactcttatataagtttgggtattacagaaagtcatcagagtcttcatagctcccgcctcggtagtgtcgtccgacctgaatccaatagtctcagagtcaagggagtgccagcccggctacagggggtgagcctctagagtcagccaaactcggcaacgtagtaccgaatgctcctcgtacaactgcaccgtgtacaaagggggcgtagggtaaccggcagtgttgagcacctcccacaagatgtaagggaaaccctcatgggaaaggaaatcagaactgaaacgagtgtctcctccattggcgggggtgggtgaagtcatctgtggaagaggatcagatgtaaaggttacggtagtgaaaaggaaaaacatgtgcccgggtcgttaaaaggaggtgggttagatttgattttactccttatgttatttattattatccctattggctacattcatgctaagaggcatctttcctttaatttctaatcctttcatgttttataatgcatgcatgctgaaaagaacgtctcctcaccgatcagaagggtgcttttag

SEQ ID NO: 156928 - DNA, 870 bp, Zea Mays
atctccaggctacaaactagagagcaactacaaaactaagagaggtcaacaaagagagagccaaaagagatgcctacacaaccagccatccccactatttatagagatgtgttctacttccctaaactacccctagatgcatagagcttatccactcagccatgggtaaaatggaccaactcccgacattttgatctgacgaccacacattattcacaaagttgctttgcctcgatgcaccatttgtgatgacaccacatgcctcccctaattctcgccagaacgtaccatcaggttttgacgcccaaacctactaaaaccagcgaactatagcattaggtggttttaaggctcaaccaccgaaacctccgcgggtagcataccccgtacacatccccccacgtcctagcacgtgtcccgccagtccacaaccacgtcggttacacgatctactcctccatgacctcccgtctgttagtgtccttaggtgtcagccatcacgactagacacacagtttctctagtcctaaggtcaagactcaatgctcgtccttcccgcactcggtccatcagcacgatcctgcatgaccttcaccttcttctctactgaccaccgtcttctgactacacacctgcacaccacaagccaagaaacaggtttgcacatagaaactcacaccttggttagtgcaaccgactcacccaagacgctactcattgaccactcatcccaacatgaacacaagagcacaaatcaacattgtgttcgcagttgggcagctatagttggtggtggcaggtggctatcgctagcggtgaccaacggctatggttgggaccgacttctaatagggcagcaatggcgcgaca

SEQ ID NO: 156929 - DNA, 903 bp, Zea Mays
cgtgacgtcggtgcctggattcgtgctcgggttgatcaagtgacgctcggaatcacgtcgtcgtggataagtccggccggaaaaataaatccgaccaccgtacagagttgtcgcggtgaaaaccgataagaacgccggtgaccgccgcctcccggccttgcgccgtgtggctttgctttccaccgcgtcgtcgtggctccttacagccgtcaaatcatcgccggtgagctcaccacgactgtggacacgaatccactgcgccacgattcttccttatctccgaccgccgcgcgtcgccgttaaaattcccggccaccgctcgctctccctataaattgagccctccaccagctccgctaggtcatccagcaccaagccacccaatattgccctcagtcgatcgccagtgagtcctaatttccaacttcccccaaatcaattttccgccacccgaaaccgacctcaacgcggccagctcccttcccggtcagtccaaccctccctctccctcgtttaagctttctcacatgcctacgatgcttgctgacccgtccaattggactaggggtccaccgaccgtcgggaacgcgttgttctttggatcatccgcgcggtcaccgtggccagggatattagggtcgccgttcatgcaattgacttaggggaaacattgattggggcgtgaatttggtttaggccaaagcagggtgccggtcttggtgcgattcggacggtctgtgagctcgccggagctctgccgtgcccctcgccgtcgaggatctggcgcggtaaagaaatagaacatggaggtcatttctgcgaaatgtcagcgacggtgttaaatagtgtgtgggctcctttgggttattaaaaaactgcagggccttattcgcaaagttgccg

SEQ ID NO: 156930 - DNA, 385 bp, Zea Mays
gcttcggtgtggcaacgtttggcagtgcagcagaaccaaccgcctccgtttgccgcagactcccatagaagaaggtcggtgtggaggaggatcactccgttggagcctgcgctgaaggcagacacttcaaggatgtttgctgcaggcgactctcaaagaagcctacacaacaagaagaaaagacgacgctccaaacggggcaaaggatcgttggggtttggtgctggtccaggctctatgtccccggtttcctctgatactgctgacgcctccaggaaggtccataggtcggcgctgaggtctggaggacaaatggagatattcaagaagtcattgccttcttgtgtgttggaattcaccactgagatggcgcgtgaagaggtat

SEQ ID NO: 156931 - DNA, 479 bp, Zea Mays
gggaaaatgagaatggtggaagtaattctctagaaaggtggcaggcccgagttaggagaatgcaccaattcctgaggggctgggctaaaaacgtggggggccatataagaaggaaaaacaggctatcctcgatagattagacgctctagataagaaagcagagcatactcttctatcccagttagagatggattataaaaacgttttaaagaaaagactgatggatatgctcagggaggaggaactgaagtggtaccagagagcgaaagcgaaaaatctgcttcagggagacgcaaatactcagtacttccacctcatggctaatgggagacataggaaaactagaatttttaagcttcaggatggtaacaatgttatcgagggagatgaaaatcttaagcgacatatcacttcttactataaagatctctttggaccgccggaagcctcgcatatcactctggatgattctattagag

SEQ ID NO: 156932 - DNA, 1255 bp, Zea Mays
gtggttacttcggataagtaacaacatgaggatgaaggttcatactcctaacttgtgttaccttgtttttttgatgtcatgaagcaatcgagaacaagtgaccaacaccaccatggtgcataggacaaagcacgagcaaccgcgccgtctcccgcgccatggtgcataggacaaagcagcccctgatgtccaacatctccgcgaagtctcggcccttatcgtagcccgtggttggaagccagacagtgttggacggtcagtaggatgtccgcatagacgagccacagcccaagaacatgaacgtgcacccaaactcgtggagcactaatgggatgtcagtctagatggatcgatgtggcccaaagccaatataataggaagacatactttatcttaagaggaagcatatttggaaaatgtgggactcattagatagaactttagtgcggctaaaagcagcactcctgtaacatgaagattattcatgatcagaaaacagaaaacacggtgagaaaggatccttacccactctcaatgccaacgatccagcccagcgtctatcacgttgtcgtgatcgtggcggccacaaggcgagagtgataggtggtatcagagacatccttcctcggtggtgtgtggcagcggtgtttggtggtgtcagatggtagggatccttcgagcgttgaagtttcaccttcaccgacgacctcacctttgcttcgttctacctccggtgtctctgcttggctttcacgatctgagtttctcgagttagcagcggttattttctactgtttgttgaggtctggtctgagaatctcacaatcacaacgtcgcctaagccttctccgcaagcactttttctgcttgatcatatggcagatcaccaccacctagtttatggaacgtttggattgcatactttccaatatggacaatctcactggtcgtgttgatcaattataggttcaggttcatcttaattcaaatgtgttggatcaggtggttcaggatcagcgagtgttggccactcaggtcgatgccaatgggaaggcggtactatgccttaatctagaacggattgctcgtgacctagaggattctacaaattttgtgtttgattagtcgtctccgagtgcaccttcacatcatcgcactgttcaaggtgctcggggtgctcatattagaactccaaaacaactgttactgatgcatttgtaggctgccactaccagaggcgcaggcgccaggatcc

SEQ ID NO: 156933 - DNA, 346 bp, Zea Mays
tactacagcagccaagtacttatatgagcttatcagacggactcttctaccgaggatgggatacagggaggctaccacacatattcagctttggctccttggtgccctggtctctcactctgagtttgacgttgtggacttcctgatttgtgagatcgaggacaccgttttggatgggattcgtgctcgtcggcagttgccctatgctcactacttgtgccacatctttgcgcagctgattcagcctcctcggtttcagggcacccttgaggcctctcaccttgtttttggatccaaccgtcctgcgcctgagattcctgtgccagcttctgctcctgtttttgac

SEQ ID NO: 156934 - DNA, 756 bp, Zea Mays
atttggttgataaagtggatacatccgtatttgtttattaaatctgaatctggatccggatatccgatttgttgttgaatccggatatcaaatggatatatccggaattcgatttctccgccaccgcaagatcgcgtctgtcgtctgttgctctgcttggtattggtatggcgcgcatttcgctggctcccgcctcgctctcacgccaaatgctcctatcgcgcgcgcaaaaaccaaaatcctctctctgtagcgcctaaatcttgtcgcaggccgcacttcctattcatttcaccaatagaaatcaccaccatctctctcatccaaaattccccacatgcaaatagggaccagcagtccaccagaccaccacaccatcggcgtcacaccctctactcaagtgctcagtggcggcgacggcggcacctgaccaccacaccatcggcgtcacaccctctgctcaagtgctcagtggcggcgacagcgacacctgtgcgacggttgtgctggaccgatatgctcttggcctacttccacgacactaaggcagtgcctgtacctccttccaccgctgtgttggattgctgctcttaggcagcctccttcccctttctaatctgtaccccacgaacaaggataaaggactatccattgttcccagtacaaccccttcccaaatcccaactcaaggtgattgttttttaattttctaatttctaatcttgcaatgacgtacaatatttagtgcagatctag

SEQ ID NO: 156935 - DNA, 512 bp, Zea Mays
tcacacgtgcaacaccgacttatgaaacctttacaacctgcaaaatatattccaaatactttttagtggcatcggtcaccactttagtatttcaggaaacctagtagcattactattttaatggcggtaatcatagacactccctcctgacatgaaatctaagaccaagacattcaaaaaagggggtatggggattagacaccgcacaaatttattaacatatctactgcagagatgaatctcactgttgtgtacctattagtatatacaatgttgtttgttttgtccatgaaccgataaactgcaatagtttgtgtgaagaatgttgattcagatttagcttttcctatatgcttgacatgttaacacaaaataaaatcaatgattgaaggtgtaaacatactcatcggatgacccccgagctagccagggcatggtcgagcagggagaaagcggacgtgtccaggttcaggagcacaaatgcgcgcgtgggcatccatttgggcgctgcg

SEQ ID NO: 156936 - DNA, 1266 bp, Zea Mays
agaaggaagcgcctcaaggatcccaatcgtggaacaagaatcggaatcttagctggagattgaagccaaatcttggcaaatttgacatcaaggaggacattgtgacttcttctggcgatgggggacaatcaggtattctcaaaacccctcctgctgcttcgaaaaaagagattgagaatgctcgtcgtcctttctgtcacaaatgcgggatggagggtcatcatgctagagattgtttcaagtctctgtggtgcgatatttgtcgcaaagaaactcatgtgcctgctcgatgtgtccttcccaaacaaaacaagccttgcatgcctattgttggtatggcagctgacgggttagggctttactcttcccattttgcgaaacccctatctagaaaaccaaaaaggagcttcatcggtttggtgaaggttgttgaggggctgatttctgctaaagaccttgagaaggattttggttttcattttccgtggggcaaaacttggaaagcaaccaagtgccatgtcgggttcttgatgcaattcccttctcaagagaaacttgatgagatgattaatttctctgaacttaaaatgaaaatgtccggggcaaaaaattctgtctcttattggagctcacaggctaaacctaaatccaagcttcattctgtgtggattgtggctgaaaatgtccctgaggaacttcaaaactatcaagctatttgtgagctgggatcaacaattggggctgttgaagaggtggatatcttatctttagactctaaagatattgtgagattcaaggtacacgtcaaaagtgttgctatgattcctccaattatagaggtaggtgttaaacctttactctatgacatattcttcaagattgatgatatcactgatgagggatggaacgatgagtctataaatcttggcaaaagagcatcagtggacaggcaaggtcttgatgatccttcttatgaaaaaactggcaaaaaagctagaaatgtaggggataagtctgttaaagaagagttgagacttgaaaacaatggggatatgatgtctcaaggcaaatcttctggtcgggggcctgacttgggtgataacaatgaaaacctgaacccgatatatgaagataaaggttatgtcaatgatcctataaatgaagatgaagagtttcatgagagtgaagatgacctcctgagttctcaagatttggaagaatttgccaaagatgatgagggggttttaccttcaagccaagaaaaaa

SEQ ID NO: 156937 - DNA, 854 bp, Zea Mays
gtcgacttaagccgattgctccgttagcagggcatagtggtcaccccgagttaagtaagagtgcaggtcgaccatgaacaatatgggtattcttgaggtctctttattgatgatatatttccagtttacatagtacattgtcgtcccgatagcttttgaaatacagctaggggtaaaatttcctgaggtgttctatgttccatgagtttccaatttccgtgccatccatctgagtgagacgatatgatcccagccgagtgacttctgctactatgaatgatccttcccataaaggtgacaacttatgtcgtccctcccccgttagaattcggtggaggacgaggtctcccactgcaaaggatcgacgtcgcatggccttatcgtggtaacgcctcaaagtttgctggtaccgcgctgattgaattactatatttagtcgttcttcttcgagtatatcaatatcctccagcctagtagcctcggcttctgctatgctttcaaagatcaaccttggcgccccaaacttgaggtcagcaggtagtactgcctctgacccatagaccatgaagaaagtagtatttccatgcagagctcgactaggttgggttcttaggctccaaacgacgtaggacaactcccttatccactttcctgcaaacttttcgtttttatcgaagactttcttcctgagtgcctccaatatcatcccgttagctcgttcaacctgcccgttggctcttgggtgtgccaccgaagcatatttgatctgaatgcttttttgctcgcagaaatcgaagaactctgaacttgtgaagttggatcctaggtcagttatgatactatttggtattctg

SEQ ID NO: 156938 - DNA, 905 bp, Zea Mays
ctttaatgaaatgccctgcttttccacagttatagcaaggatatttggtgtcagtgggagcaggcaaacggggagcttggttatttgtaggtaatgattggcgttgcatattggtgggacgaatgtagataggagttttagcagggtaagtggctgaacggtaaggagtgttggtagagccagctgttctgatgattaccttttgatgcttggctggatcttgggaagatccagttccagatcctttccacaaccttttagcattttgatgcacccgccccttatcttctactgcaattgccacactgactgctctattaaatgtcaagtcataacccattttcttctgcagcttgaaactcaaaccccgcatgaaacaatctcgctttttaacgtcagtgttcacatgatcaacaacatactgggactagtgattgaacttcccaagatatttcatcaccgtgttaggaccttgcttaagcattaaaaattcctccagtttcatttgcaggactccatctggaatataatgtgctctaaaagcttccttaaattcagcccaagtaatttgatgtcttgctggttgtacagccacaaagtttgcccaccaagtgctggcaggtccacgaagtaattgagctgcgaactgaggtttttgcacttctgtacactggatcaacccaaacgtttgctccaccacccaaagccattcatcggcttcaagtggctcttcaacttttataaaagtgggaggtcggatctccatgaattccatgtaagaagcatttctggcattgtttggaggtacccgggccccatgttgattttggttctgaagcacttcacgcaaaacacgtgcattatcagtcgtcgcatttactaacgcggcaattgcatcagctagg

SEQ ID NO: 156939 - DNA, 610 bp, Zea Mays
agttcaccaggggtcagagttttatagcctagggctaggacggttgaagcagtccgcccgagaaccccggcgatgcgattcagttaacaggatgcggccgcgacgcggaatggccacatcgcgaggggaagggagcgcaatccacggaatcccatggttccgggtccgtcactgcacagggaggagggagctccagcagagctacgacgcgcatatacgcgccagggcgcggagtccgccctgtaattcatcgcacacgaagcggagcggagatagggatgagggcgaggaaggaggggattccctgcccagccgcacagagaagaggaggatttggtcggcagcttagagaagacctcgaccggaggtggtgaagcggtcgtggatccgttgaccgagcccgcaaagtcccaacagccccgggcgaatccaaaccatccccgaagcatacgcgcgacaggagggagccaatcgattctgtttgcgtccatgcggggttgggggcgattctgacattccggccccagatggcagtttctccaggtcaagccaacggcaagtgcacaagccgaccgaacggtgggccccaccaggcagaacaggtttgcgc

SEQ ID NO: 156940 - DNA, 1213 bp, Zea Mays
ccgcgtgcctcggcgccgacaggcgggcccgccccgtcagtcccacatatgcacgcttctatgcgtcggatgccgactgggagaccccaccctgtcagccagtcccggcatcgcgcgcacacgtttcgctgttcctgggaccccacatgtcacactctctgccatcgcgcggacgcgctacacatttggctggccggtgggtttccaccctctctaatgtttatcttcccccgttaacaaatcgccgccgcgacatatccgccatagttctcgcaaccatcctgccagctgagtcggactaccctgtgcggggtatatacatgtcaccccgcccctagaccttggtgcatagcaaactcatcgacccacatagccgtcgcgggtgaaaaagagcctgagatcgccgccgccgtcaatacccgtgtacgccattgcccaagctttgtctcgggtccggtggggttcgcgggcgctctaggatcgttcgcgcgcctgcaggtgagcactgggcgcattagagcctcccgaatcgctcaccggagttgccgcgccgccgctgtgaatcatctaggccctttagtgatgttttggtagttaatgacaactgtttgtggactaacagttcttggagaaataagaatgcagggttggaccacataaaacaggaaatcttggagattgataagcaatggttgtggatcaagtgaaggcaaaagtataacataaagtataacataggttttgttttttgccggtcttcagaagtttagagaagatacttgaccggattagtaagttagatagccgtactattaagaggggtcaataactttaatctgtgtaaaacttagtgcctcatagagcatctaggtcaggactgcggacggtccggccccaaggcccggacggtccacgcatcccaagactttgcacttttcaaacaagcttttgaaaggatttttaactcatgaaatttgaagcgctgttagtcccggacggtccgcgtatcccaacacgttgcacttttcaaacaagcttttgaaaggatttttaactcatgaaatttgaagcgttgttagtcctcatgcaaatgcaaccactagatgctctatgaggcactaagttttacacagattaaagtcattgacccctcttaatagtacggctatctaacctactaatccggtcaagtatcttctctaaactcctgaag

SEQ ID NO: 156941 - DNA, 407 bp, Zea Mays
ctcgcacctctcaaacaaagccatacaagtggaaagggcaagggaagaagaaaaaggtcacctcaagaggaaattccaagtcctccgagctcagcaacaagaccggcaccagagaactcgatcctttaggtttccacccaagggaccaagcttcattagaccagctggacccactccatcatgtttcagtcagcagagtcagagctcctttcatgccccctcgattgcaagcaaccaactgccagtaaatgcctattggcactgcagagaccccagtcacttcaaaaacaactgcccccagttgaaggcatcaggacctgcttactccaactcggtgaatggccccaagaatacctcaacactctcccccaaggcgccctcctccatcagccagcagaacaagaccc

SEQ ID NO: 156942 - DNA, 632 bp, Zea Mays
cgaggtgaaattttttggcatgcttcgcacgagcgaaccactctgttagttgtgcacacaatgactggctagtagaaaccttggcgcatgactttagtagtgagagctctacgtcccgagtgtgatctgcatgttcctctatggacctagcaaagttctatgccttcgacttcagttatgcattttagcataggttggcttattcccttcttgtatagctgtccatcgatcacagtgaagtcacggcatatgtgtctcaaccttttgcctttgctttggtcggaggggtgatagtgaccttgaaggtataaggtgatgggtgcccaccagtcttcggtcattatcagatttacgattttgcgcccatcgaggtcttgtgttatctgtaggccttcggggtttcttacagctggtgtatcgatcgtgtgaaaacatgtcagatggtagtggttcgcctttcgctgctgcttttgccaacatgtcggcctcttcattcttgttccgttctatgtgttgcaaagtgaatcctttgaattgcctctctagacttcgcacgacagagagatattgcatgaggactggctctttggtggagcagtcctttttgatttggccagtcactaacttagaat

SEQ ID NO: 156943 - DNA, 777 bp, Zea Mays
tgaacctaactgattattccatgaacactcacacaattgaatattatgtggactgaaattttgccagataatatcttaaccccaataaggttaggttgaaagttgaattgttctcatagcaccacaaagtaatgatagtttaagctcatttcacaagtgtattgaaagataaacagacatgactgcaaataaacattcttagttcgtacccctatataatttactagagcgttgtggtctcttcacagaacaatgagctgatagagccatttgtgcatttttctgatgtactcaatagggagacagctagcttcagttggtagcaacagtgaaataattcatctgaacagaaagagcatttcctataactacagttctgaaggatagcttcagttgtagggatgttgatttcgaatgctactaagttagtatagtgaacattagatcaaaacagcctgcagctgtgtgagtttaaaatatgttagcaaggttgccagagctcaaaaaggggccgcacaagtttcattctaggatcaggagctacatggatttgcaactgcaaaatcaattccttttattaggtgtcattcaaataggaacactacaaattattgtggtatatgactgggaaatcatttatccaacaaatcagactactgcacatgagccttaggcatggtgattttaatggactgttctattagcatatgattacttttgatcacttgctttcttttagatcaaatctacacgtgccttagccaaagtcgtgccgtc

SEQ ID NO: 156944 - DNA, 306 bp, Zea Mays
gaatgctttcttagatattggagaaatataagttgttaaattgtatatcacacatttttagtatgacaacgaggagctacaaaatctgtatttatattttctaagcttaccaatactgagtatgcctgttgatatgagttcatttattattgcaaacttagtatgcctttatttagatatgtacaatttagtatgtctttatttagatactgagtgcgattaaggttcatcaagatcaaccaatcataacgtgtttattaatttgtagtagccacgattgtctttctccagatgagttatctagag

SEQ ID NO: 156945 - DNA, 297 bp, Zea Mays
tttcctctattttccagggggtctttaggaaatgttctcgggcgaagaggtacccgtacactctggccgtccgatcggaaatcaggggctcggattagatctccatactcgcgaaccggtacacaccactagccatcggatcaagatcctacggctacacgacgaaaacaaagtcataactcccatggccgttgatctgcccaccgacggacacgatcatccgattgaatcggtcccgccctaatctaatcgcggccgttcacggtgatccaacggcgcacgcaggtcatccccaac

SEQ ID NO: 156946 - DNA, 544 bp, Zea Mays
caacaaacacgctagatcaagtgcacaagtcctctacaggcacggccggatcagcgaaggcacacaacctcatcatacaaactatggttacatacatacagcgagggcatcacaccttacattggctcaaccttcgggatgatacccatctccctgtagttaaacagcattatcctcagctcctcaccctcaaaaagatttcacaactccccctcacctacactcgccccaaccggcgaggacaacaattcccgcttgccagccccatccacacgaagacgaccaccctccacctcactcactctacgcttcgccgctgcccttcgccgcctacgcccagcactcggaccaggaacgacttcagcatccatcacacgtggagaagcctccgccgcagccacatccaaagtcgcaaaataatccaaatcctcatccgaagactcctccatccacacaaccgaactcccagaatcatcagactcaaaaaacttagacacggaatcatccgaatcatttccagcaaccacggtcgaagccgccacaa

SEQ ID NO: 156947 - DNA, 1184 bp, Zea Mays
ggaaacagaggcactaaccagcatttgtcatctccaactcagaaacccgccgctgaagtagcactggattccaatgcatcagagacagagctctttctgggacaaaagcaccctgtgatcttagccgatcagccatctcgtcaaccaaagcctggtattgaaaacaagtgagtgcagagacaatatttcgctcgaaatctagctatatcaggaaaaaccaagttacctgaagattggagaagaatgaaggaagccccaaatcatgagaaaccggttggtgactcgatgagggaatatcagccgaggcaatctgaagagcatcattagggattaactcaacatcaccggcagaaatcaaaactctagcgttgggtgtgtcggtctctaagtcaacttcctgatttgaagcacgtgctgctgccatgcaatcagaatgtggaggagaagacccgatgtggacgtccatggaggtatgagaaggagagcccactcggacaccctcgggggctgggtcatagcctgcattgcccatcggagccggatcaccaccggcagcaccctcgggggctaggttgtagctcgcactacccacccgagccggatcattgccggcaacaccctcgggggctaggtaatcgctggcgccatccttgaggaccggattctctgcaacagccacctctaaggctgaaggattcttagttacctccataggaatggagcaacctagaccagcttcttgactctgaagaccgcactccaaggtcgatgaggctcaagacgctgctcgggataactctaaccccacatccggaatgttagcgcaaacgtccatcataccaccatctgttggctcggacagcagatcttcaggaaccatatcctcgagagcctgatcaaagtatgctatggacaactctcgcagaccaacgagtgcagacaaggctcgagaaggaatatcactactccccccactgaccaggtagcgccgactgtttttctgaattaaggagatttcctcctcctcttcctcatcctcgtcaacaatacgaacaacacaccctttggggtcagtgtcggccggattgcacccattgagatcagcatcatcaagttactactcagggccagttcgctaaacgctcagcgcaccaagccgtcccttgcctacacccattgggggg

SEQ ID NO: 156948 - DNA, 538 bp, Zea Mays
aacttgtgagcatggtgatgagtcctttgaagctaagcttcggcatgacgaggccattgtgcaacatgcaactcggctccccatgccaattagtcgaagtagaattcagagtagtggtaaagcacatcagtactcgagacatggtgcaagaatatttggctaataaaacttttccatcatctggtgggtagggaatgccaaagaggaaggatgaagggaaaattttgaacttgtccagttgccataccagttcaaatttcagaatactttcagtgggccctgtgttgaatggttggaaatgatagagacaatgtgcaatgagatccttggtaactatacaaagaaagaggatcaattgatgatagtcgcctttggtacttggaagaaacgaaggctgaactaggtaatggatgcccttggcttcgaatacccagactatgagagacttgacaaataagccagggtgaagaaaaagagaattgtaagaattttgaaaaggcaagcaattagatctattgaaaaagacaagcaaagggcc

SEQ ID NO: 156949 - DNA, 750 bp, Zea Mays
ggctgagttgtgagcttcattgagcaggacttcccgtgcctctcctttcggtacacacagacggttcttgaaccaaaggactccttgttcatctgttctgaggtccggaagttgttctttgagagctttttgccataagtcttgctgtctccgtgtccaggcgttgagctttgcgtatgaggtcttctagcattggcttgacttctaggctgtcattgtttcccatgcatgcattcagctgagcggattccttcttccagtcttctagaaagttggttccctttatctcgaatggttttcggctgagggcgtctgctaccacgttggcctttccggggtggtaatggacctcaaggtcataatctttgatcagttccagacatcttctctgacggaggttgagatctggttgagtgaagatatactttagactcttgtggtcggtgaagatgtggcatttgttcccaattaggtagtgcctccatatttttagggcatacactatggctgctaattccaaatcgtgggtgggataattctattcatgtggcttgagtaagcgtgatgcataagcaataactttctcattttgcatcaggacacaccctaagccttgccttgaagcatcacagaagacgtcgaaatcctggtgtatatctggtagtgtcaaaacgggtgcggtcgtgagcttttcctttatgatctagaaactttcctcacactttggggtccacacaaacttattatctt

SEQ ID NO: 156950 - DNA, 723 bp, Zea Mays
ctgggaagaaaaaccaccaagagagctcgtcgccgagggttaggagagagaaagaatgagggatctccatcgtcgtgtggatagatcatggtcgtcgttgttcgggccccggagagtgatcgagggggtccacgggggcaccttgcacgtagtcgttgccttcttggacggtgagatccaccagagcgcctccaattgctcaccgaagcaacccagctgcggtcgagacgcatctcttcatcagcatgtacttcaacgcgtgcgattcatggtaaggatccttccacctagtttgccatgttcttcttaacatatagcatacttcggattgttgtttcatgcaacgaattcggaaggggctttgcgccgacaacatcgccggagcataggcggcaccgccgaccgggggtgccagaggaagggagcgtccaggaaccaggaccgttgatcgtagatggacgactacgattagcgtagcgtaccggtcattcaatggcactggtcactcggatcaagatctgacggtcaagagaagaagcgcgttatacatccgtgactattttgttaaaacgaccttgtggtttcacagattgatccacaattaatagtgaaaagaatctcgcagtctagtccaactttgtataaaatgaacccccaaactccttataaatagtgttcgccgtccttggtgggattaaataaatgaaataaaatggataatcc

SEQ ID NO: 156951 - DNA, 689 bp, Zea Mays
agttggcctagctcgcgcgcgcccgagcgttctcccgcgctgataggcggaccccgcctgtcggcctgtctcgccctcgcgctctctcccctctctccctcccgctgccaagtgggccagtcttatcggcgtcgttcctctcacacgcacgcccgctctctctctgtcccgcgaccccacctgtcagtccatccccaacctcttgcccacgtccctcgtcgtggatgcgcccacgaccgcgtgttatccggccacctcctcacgtcctcactctttttgagcctgtgccccgctcacccactttcccttgctcacttgcaccctcagtcaaaccccctcgccccctctctcaccctgcgcatgcgaccagacaagctccaccgccgctcaccgaagaccgccgccgttctgcgaccgtcgttgagtccctatcgcgtctgtggcctcggtaagcaccgccgcatcacccgcaactcaggacacccttcgatttgccttttccctcactgtttactcggtccgcgctcaccggagcacttcttgcgcagctagagcccgccgtcgtcgactcgaggctccaccgcacccccgctgtcccccaagcgctccagagttcgcactcaaggtgagcaaccttttcgtgcccttaattcgtctgttattgtccttttgcctgcacaattcctcgc

SEQ ID NO: 156952 - DNA, 706 bp, Zea Mays
ggacgtagggaatataaatcccaactccgtactcttgactcctccatccgagcgcatattcgtgaacacccaaagccaactgccctcgtcgcatgtacgcaagaagaactaaaactgagccgccattgattactagcgcatacagctgttccgggcacaaagacaaatttgtgtgctttgctgggtgcccaggtacgttttcgttgcggcgccgggaaggaagatcgacagggtggcggggaatttctcgccgtcacgcaatgacgccatgaatctgccatacgttgtggacctgctttcctctgccctcaccctcggtatgtcacccttgtcttacccaccatgactctgccataggttagcactatttggattagggttcgggtcaccggatcatcgggcgagatcacgatggggctgcgctgccgcgggtcaagcgcagcgtcggcctacgggaggtcgagttggtgaagacgcgctcgcgccatcggatcttcctagggaggtctagattgagtggtgtgtggaccgttgatgtcatgggtatggctgggattgggcgccaagcgtgcctattcggtatgattcgatcatgacccttgatatgtagatgggcggccaggattagaagaccgtgtaccccttcgtctattttatttggacggatagatcgtgatcggatgactggtgtttcgatcggctgtgg

SEQ ID NO: 156953 - DNA, 659 bp, Zea Mays
cgagccgaatgacgaatggcttaaagtcgttgaggtgaccagtgatgagctgttggggacttatacgaaggcaaaggacgaagcctggaacactgtctttggtgctcgaggcaaaaggagactaaatagagtttttgatgtgattggatttatttatcctaactactgctttcccgctcggaaacaaggaacgtagaggaaaattgcaacaacaacctcttccgccgcgccgaagccaaagagggccaaagtttaggctcatcggccgaagctgcactttttagagaagactgctgcagtgcctgctacagagaagatggaaattgttgaatatgccgaagctaccccctcggctttggagataatacctgttatgactgtcgaagctactgtcactcaggtagaagaagcagaaccatagagcttaaatatagagcagcaaccgaagctgcagagtcccccaaccatgatggggttgtcaaagttagcatccgctccagcatcaactcctaggaaagggagaatggctagcgttttggacgctattctaaaatcttcgaatgtgccaactcctgcttcttctaaggcttctgaggacaaaattgaagagttgggaggagcagttgctgcaagtgcttctcctgcatgcactaaagccg

SEQ ID NO: 156954 - DNA, 449 bp, Zea Mays
tgtaccggaggcgcatgctgcggctgggtcaacgcactgcgcaatcatgggtaatgaccttatcctcgtattcctcatcttctttgctctgtgtggctatgtcgaattggggagggatcactagagcaggtggattgggatcgcctgggagggcgccactgtcgaagcaagcgccaccgtggtcagctcagtagaggaagaagagccgataaccgttggatgggaaaaggacgtctaggattagatctggtatgtgttggtcctcgaccgtcgatcttacagcgaacgactgcgattggaaccagccattccagcgctgatgtgggtcggtagccgttgatctcgcgatccatggctcgggtgtgaagacaggttttaatctaatcccgaccctcaatactcgatcggatggccgaagtcttttcataccccttcgcgctggcactttt

SEQ ID NO: 156955 - DNA, 571 bp, Zea Mays
aaaagtttgaattaaatttgaattcaaatggaatttgaaaagaaagaaaagaaatgtagaaataaaagaaaaagagaaagagatcttacctgggccgcggaccagctttcggcccacctctgaattactcacgcgcggcccacacattcccttcacccgcgtgcgcgtgtatcagccgcggacccgatcggtgggacccacctggctgcctctcactcgtgcccgcaccttaccccatccactgacccgtgggccatctgtgtcagcacttccttctccaccgaatccagccaacctcgccgcgaagaccggagtgggggcgtgattccggggttgaccccgtcacagctggcgctccaaaccgacctccctggtggccataaagcatgacaccgaaccctagcctcctcttcttgctgccgccgccatcaaatcgagggagagagaaaatagctgtgtcgcggcagggtgagaaacttgtggtcagctgtgttgctccatggccgggcgctgtggggcggatccaccgtgacccgtattgccgagcgcagagagagaagccgtgggccac

SEQ ID NO: 156956 - DNA, 940 bp, Zea Mays
catcgggccgctcgtcaggctcctcgacgagcgggaggccgacgtgagcctggaggccgcggccgcgctggccaagttcgcgtgcatggacaactacctgcacgtggaccactgcaattcgatcatcgaccacggcggcgccaagcacctggtgcagctcgtctacttcggcgagcaggtggtccagaccgcggcggtcctcctcatctgccacctcgcgcacaacgtcccccacagcgaggaactcgctcaggccgaggttttgacggtgctcgactgggcgtggaagcagggctacatgtcacaggatccggtgatcgagagcttgctgcccgaggcaaagattaggatggagctctaccagtccagagcttactactattgatctgtatcgaacacctgctgttaactaggggggaaaacaaaaacagaaggatgactgccgcttcaccttcacctcaactgactactgtatatagattcaggtaactttattcatagctagtctggttaacgttgttatatttagagaaagatagagagaaaaccataggcagtttttttaaagcaatccatatggttttcatgtttcgttgggacataggttcttgatactggaggagatggtaaagtgttgttttgaggctatcagaaagttaccgtttgttttatataggttatgtatcccatttggtggtgaacaatgtgatataacccttgttatgggagataattagcccatgacagtggaggcaaaatcagtagctcctttttgtgtgtatatcagcatcagctttaatggttaactgtaatctcagttggtgactagcacagccagcagaggtggatctagggacctgtttggttcaaccatttagacccgtatctattccctctcacagccgatgtcgttccttgaagtttggttagcacactccat

SEQ ID NO: 156957 - DNA, 590 bp, Zea Mays
ggtcagcgtgccactgatccgagctgggctggacagtcgctgccgcgtggggtcacggtgtcagctccttcctcaacagaaatccgcgcatggcgggcggcacagtctcccctcaccttcttccggagctgctggcggtggctccgagtccgtagggtcggggcgttaaatgccgtgcttgcccacgaaccctccaccctaaaaccacacgaaaccagctgccctccccatgaccgagagagctcccccgtgcatgccgccgccggctaaaaccacaccgcgtgggtgaccaaccgtagcaaggtatccggagtgttcgcaggtgaccacggaagcgttctgcggcacattagggcggaatagcccatcggaccgccacgaattcctcgacgtcgttcaatctccaccacggtaccgcactgtcacgtgggcagggcagtcgccatcccgatttgaggtagatccactctcatcctccttgtttcaatctccgcggcgcgtaggacgtaggaatcggagtttaaacgcgtgggcagcgaggatggggacctctggcaatggcgccgccgtggtcctgcggggagcgcctc

SEQ ID NO: 156958 - DNA, 953 bp, Zea Mays
cttttctagggtattctaggggtctttaggcgccactttgtcaattgggccaagtggttttgaagtttgaaagaaggtgaacatgtttgatctttggaaaagggttggttttggacttagaagaattctgatttttcccttaggtttccccctttggtgaaccttttggggtttttctaaaacctttttggggtcacttccttactatttttagtagggtattaggtgtactacaaatgttataattggcccaagtcatgatcatgtggtttttatagccttatggtcatgctcacttatagtgctccaattgtccaaaggggtttgcattagggtttgggcatgtctctccactatatgtacatgataaagccaagtcatgactcctaagaggagttgcacttacttaggatcttgatttccaagtttggtgtactttgctcaagttaaaccacatgtgatgatgggcaggacttgtgtattcttgagtgaagaccctaagtaatacctggggtgttacaccttcgtcttgacgatgaatggaccctcccactttgtctccaccttgccccgtgactctgtctgggttgttcggacgagtacgaggtccacttcgtcgaattctcttgggacgactacgtggtcgcgccaggccttcgtttgagcttggtatttgttgagggcctgcagggcgaagacacggtctctgtcgatgaagtctttggaggttggttcgtctacgtctgggacggctgcggcgcttgtccgtggtgacccatgttttatttcctgtggggtcatggccttcgatccgtatagcaggcgaaagggagtgaatccagtcgcccgacactcggtcatgttcagcgcccagactgcttcaggtagtaggtcggcccatttacccttcttgtcgtcgagaagcattttcttgatggcagtgaaaatcttgc

SEQ ID NO: 156959 - DNA, 421 bp, Zea Mays
catggcggtcaccacggagcgggcgaaatgcaagataagtgttctccttgaccctgatcttttctgcgatttgggggggaatacgtcatctctaagcaatctcggctgggatgctggaagtagttcttctcagttcacccctccggttttatctgatctgtgttctagccatgaatctcatcttgatgaagatcttgattctgagtcacgtggtttggaacaaggaaatcaatctgtttctgctattcagtcatctacgcggaaggaatctggtgttttggctgggcatccagcaaaacaattcgaatttcctgccggtaatgtcattgtgaatacggagacaaagccaatccataatgttccattacggtctggggctaatggccgtcaggtggggcgcgtggcctttggcatgcccttt

SEQ ID NO: 156960 - DNA, 829 bp, Zea Mays
gcatcgcagggaacctaggagaaaaataggaactcgcgctcgtcgccttcctccaagcaaacgccgacgtcttcgcttgggagccgtcgcagatgcctgggatccccagggaggtgatcgagcaccagctaaaggtttacccggacgccaagccggtgagccagaagccacaaagatagtccgtggaacgacaggacttcatccgtgaggaggtccggaagctgttgcatgctggctttattgaagaggttcatcaccccatgtggttggccaacccagttgtcgtgccgaaggcaaacgggaagcttcatatgtgcatcgactacaccagcctaaataaggcatgccccaaggacccgtatccactgccgcgtatagattagattgtggactctaccttggggtgcgacctcttgtccttcttggacgcctactctggtttccatcaaatctggatggctaaggaggataggaggcataccgcttttgtgacagtagatggactatactgttatgttgtaatgccctacggtctgaggaacgccttgccaacatttgttcgggcgatgagtaagactttcggggacctgatccgggacaaggtggaaatttacatcgatgacatcgtggtcaagactagggaaaggtcggctatagtggaagacctaaccctggttttcggcaagctgtgggcaacccgcaccaagatgaatccggagaaatgcatcttcggtgtctccgcagggaagttgctggggttcctagtttcataccagggcattgaagctaacccagagaaaatcaaggctattgaggtaatgaggcctcc

SEQ ID NO: 156961 - DNA, 565 bp, Zea Mays
ctggtgtcgatcaagctgctcgtcccaaggaaaggaatgttgcggttgaaagagcctgcacagagctgcaagtctcatccacaggccacagcccatgcaaacgcaagacaaggaggtactaccaaaaggaatcgggcggcgctttcccgcattggacagggacacgcacaacggcaaggacggagaccagggcgacggcgacacatctggtgctcatctaaagtggctcaggtttgggccagtgggcagtgggagagacagaataatgcgtccatgcttatcccttgaagctatagctaagcacatcgctgctcgtcctagaatgtgccatggctcttcaagcgtgcaaggggggtgcaatgcaagaaagctgtgacggggccatgccatatgctgccatcatcgccgaaccagcagaggaggaaatggaggtgtgccttgtcatcgtgggcctctggaacggatcggaataaagtgtgtgcttgccacactggaatacgatgctgcttatcgcttatagtacctaacaattctgctcagtggatggctaatctatctatcgtgt

SEQ ID NO: 156962 - DNA, 761 bp, Zea Mays
gaaaagtggagtcacactggaaatccaaggacactccgcagtcgagcaggacatgggttaggcctgcgcagtcagactccggccgaaaaaaccgtaaccagtcccaagtgaacaccatcgccaatcaacaatagactgggtacattgctcgtcgccacaagtatcccacgaaatagggtcgtggcagcaaccccagaggtagaggcaaaggccaagtcccgcaacaacaaaagttttactgtctttttcacggcaaaagactccacacatcccaccaggggttgccctgaaaccaaggccaccaaagataggatggccagaaatcaaccagctgacaaccaatgagttgtcgcccacacctaccaccaccaacaatatcaccagcgttgattccacaatgaacaataccatccccaccagcaaaaccatatgtaccagcaacaccaagagatccaaaccctcccaccaccaccaccacatcacccaaatccaccaccatgctcaccagcacccaaacaagaagactttgctgatcaacccttccgtggggtcattcacatgattactggttgatcgagcacagaatttgacacgaaacggcagaagaaagaccactaccgaagagtcaatcatgtagccctaactgggccggttgtttagacaaagtggtctcatatactactgtaacatcccaattttgatcccaaggttagaaaccctaaactcctaaaccccccttatttatctcctaagaccccatc

SEQ ID NO: 156963 - DNA, 526 bp, Zea Mays
ccggttcaaccttcattttggtcgggtgccgaaggccgtaatcattaattgatcttttttgtatagtttcccaaaatttcattgcacattgtctcaatcatttccagccactcttggcaaggctccttgaactgtttctcaaatttaaaacgataaggcaatcgaacaagctcaagttttttctttgttccctttagcttcggcatgctccattcacttgacgttggaggtgttctattagccaagtattcttgaaccagatctctagtgctgatttgttcaaccaccaccctgaattctgatacagacagttggcatgttgaccctggctgcatgttgcacaaaggtatggtcattctgaagcttaaagccaacgggcacatgaccatcgtcatcagtttcccccttctcttttcatcggctttaatataaaaccattcactcttccagtatgttgaccacttggtgcgatagctaaggaccggagccttcgtatctttgcgatacgcgaaattataacaaccaa

SEQ ID NO: 156964 - DNA, 720 bp, Zea Mays
tcgcaatcccacggacctagcccgagcctagccggagataattcaccggcggtcaccgtggctcggtcatttccgccgctgtgtcacccatgcctcgctcctccctcactgggtctcttctttacgtggtaacccatgcacgaacgatgtaatccgcggccgtggatcgctagccggaccaccgcgcctataaataaccccgccacccatggcgaggtattcatctcttcaccagtgagcttggttgaagcacaaaattcgtagaatcctctccacctctcccaaaattagtggtgcacagcgaatccatagtcccttgcgaccatgtagccccaacctcacctcctaattccaccagaacccgttgcggcaccattttccccttttcattcaccagcgcgtgaaaatcctccgcgctccgtggccagccactcccaggtctgctcctgctcttcttaatagtgtttcagcacccatatacactcgtgatactcatcggctccaccctctatgcttggccacgctcaattacccggaacacatgaaattgtgttcggtattccccgccgccgtggtcggactaagccagggtcataaccacccaattgaagcttgttctaaggttgtctcgagtccataatgatttcccaataattaatttgggcagccaccaccaatcttggccggttcgagcaacacagtggtcgacggtgagcgcgt

SEQ ID NO: 156965 - DNA, 903 bp, Zea Mays
agcatgatagtcgccaaagccgtccctttttcttcttctcctcctcaacagacgcagttgggcggctaatttggtgaggacgctttgggcgaataccctcaggctttcgggtgtccactgttttgtcaagctcttgtataaccgtaacagccattggttcagcatgggctgagtcagaagattctccagccaacatgttgagtacaacatctatttctgtatcatctggactcaccggcatctcaaaatgaacttgcctctcatcattgggaagatcacaaagaggagcaaccagagcctcaatgtcttcaggagagggtcgcactctaagacccagaccactattaccagcaggaggggttggacatgaaattgaaaaaggacttaggaggtggcaaattccaagcagagtaggcaacaggagcaccaacatttgatactttgcccctcaagatcatgtctagtcggctcaccagatcctcagtaggaattttcctgttggtaacctgagtcgagtcagtaatgccactgtacaagtaagttgggtatgctttgtccttcaagggctgaatattcttaaaaacaaagtcagcaaccacagcctcagaagttagacctctctccttcagtagatagatttcaacaagcaaaaccctagcttctgttacctccaaggcagtaggagactcaacccaactcgaagtgcgtacatctagctgtctccccgaccgagggagggacttgccgtggttttccacaataaaccactcaaggcgccaccctttaatgttgtccttgagaggaatgtcaaggtattctgtcttcctcccgcggcgcatctccagacttgcaccacccacgagctggtgctgcccacagccatcccaggaaaacagtgataca

SEQ ID NO: 156966 - DNA, 413 bp, Zea Mays
gactcacaaccccgtcaccgatccccaacctagaaacatcacaaagctggtgtctggtgacctttgccactccatgccacctccacctagctcctctctcctgtagggtttatgaccctacgttggtccaagggttgtgtcggtggaactctaagggaccgccgaaacctacaaaattgtaaattgtgcactggtaataatatcaatccaacaaaaaatagaactccccgtcaaaataaaattacttgaagttcgttgcctgtgtcgttgtaacaacctcgtcatcagcctctccatcggcctctccatcgtagtcctccccatagtcatcatcacgcatcgatgaaccttggcgtgccagctcgtcctcctgcctaggtgcattgtggtctgccgcctcgcgcgcttgctca

SEQ ID NO: 156967 - DNA, 1679 bp, Zea Mays
catttattgtcaagattcagttctgggtcttacacagcttacagtatccccagttttagtgagttcaacttagcacaaccagcctcacatgttatatattcagaaaacagacaactgagggaaaatgtatcttatgcataagggatcgttgtttaaagggatccgaactgacaagagtatgatgaaccaagaagcacatattaactgtgaattacctgcgaaggatatgagcgccgaactgatctaagtgcgtcactgttaatattaaaccctccatcagaggcagcctcaaagactccgtaaagcttacgcagtgtatagtcaaagagaaacaagggcatcccttttctgatgtggctgacaaaggatcgatactccaagggtagaccgaaaatgcttgcttggaagcattggtcccttgtgacgctgttggacatgaagatagctcctgccatggagcccgcagcatcatgcctaattgacagcccgggcccctcgtgcctcattccaacggaccttgcacagccacaggtgaaatgagtgagaaccgactgtcaccgacatttaagggatcctatcagctgcatatgagggctggcctaaaatcctggctttaaaatcagatctaacagtgcacaattgttttagaaaaactcttcccactcttagccttttcgttttattatagaaaaactccagatatagtccatcgtgagatctaattttgaagggcagaattctataggtgcagatgtgcgctagccttctatatacacctgatatcatccctacatttaattagctacatactggctatacagtatttcaaacagtgatggcaggatgtcaaaattaattttaataacgttagaaggaagcgagtcagaataaaacaaaaataagtcaagtgttcaaccaaaggaagaaataaccattacaagaaaggctaatcaaaaagggtggagaccacagcaagtacagaaaagtacggaagtgatgattaggaacagtaaacggacaaaagaacaaacaattttttagataaaaactttccccgctttatttcaacgaaacatcgaaggaacaaacaattgtggtccaaacaatattttttattttctgcatggaagaaactggttcgaccaaacataaactatctacaacgcggcaccaaatctgcaatgcgcgaagcaaaaggcgaaggtaacggtgtagcgcagagcacggcggtagaacgaaaccaaaccacatggatccaaattatccacaagtgctgagacttgcagataaattggcgattgagcgctggggcataccgacctgcagaccgtaaaccctaacaatcgaggtgacaaagaaaaataaataaatatcgcgacgcaagtggcgtctgtaaagcgagccaacagaagacgtggcgacgggatgatgatcattgatcgcaggagaaagtagatggagggagtagaggactagagtggagggggttcgcacttgggatcgacgcgcatgcgagcgatgggtggtggaggcgttgaaggcagaagggttacccgttgaggaaccccgacggaggccacggcaggaaagcggcgggcgtggtggctagcggagcggttggcggagacgggagaaaggcagacagcacagccgccgcaccggctgcagatagaaaggcc

SEQ ID NO: 156968 - DNA, 495 bp, Zea Mays
gcggaaagtgatcgacatccgatattgatccaacgaaggcgtcgtgggcctaagcaatttccaacgaggtcatctcgcgcttcttaatttttcctacttagcttggtcactctggtccaccccttctcaccggttcaggatccctcattatcgcccaccctcacgatcgtccaccggagaaccgttcgcagattgttctttcttcctcctaccattgcacaacctcctctcttccatggctagacgggatcctcagaatgaatcattggcaccaacgatggatcgacatatgattgtggcagcttcaactcgaacccatgaaacagtttttctcctcccaggcaatcgatgcgagataacgaacatgcgtcgatgaccaacagccacctcttgaggatcacccatcaaagtatttggaggaagaagacaaccatatgctatcatccatggtaggcacaccacactcagcaccgttaatggaatcgataaccccac

SEQ ID NO: 156969 - DNA, 635 bp, Zea Mays
gtgcatcctagttaataaacttggtgtcaaaatactactccacgtacactcaaaagtgcatgcatatacgagtataaattttaccgggaaataaataaaccttttcttaatcaaataattaaaagaaataaatgttgggatgaccgccatgcagaaaaaacttccgtgcctcgcacgcatgcttttgaatgccacatgcaacgaagccagccatccaggcgcgcgtcctttcccgctcacaatttatgcacgtcacccacgaacacacgtctctcagcatgcagtttagtcgcgcccgcgcgtgatttttcccacgaccactgttcaacttgttcacggcgcctataaataaaagggcacagcgagcgtaaagaggaggagaagaaaaaaggaagtgccgtcaggctgccgctttgagttgcctgctgctgcgacgacgaagaaaacaacaaagcatcgtcaagctgcctctcggcttccccggcccaaccaccaccaggcttctacgttcagagagctccggctgcagctgtgcccgctgttcaccaccactcagtgccgtgagagcggatccaaaccaggagcacatcgcgactccatcggcaaggaaagtcttccgtcaaacacctctctag

SEQ ID NO: 156970 - DNA, 445 bp, Zea Mays
ccagtgaccatcaaacgctatagttctgtttctgaaagccctcgccaccgggaggtcccagttctgtaggtttcggccaccatcgtttcacgcctttcaggctgcctgttcggtagtacgtggcaaatgttaatttcgtatgcttataacacaagagactcaccgaatgatgtgtcgtgcaaaaggaaactgcaaggagtgcgggttcagtaacagaaccagctgcattgcaaaggtggcaatcattgattcgagtccttcaaaaagggtatcgaaggtgtcaaaaaaacttgtaaaacaagcaggcaccaattgggatcctgtaatcattcatgtgcagcaacaagaaaccaatcaatttccaggtgtcggggccaaaacatatcctccagatttcagcagtcaagaatgcgtattcacagtcgttcaaatgattagctcggta

SEQ ID NO: 156971 - DNA, 376 bp, Zea Mays
tacgctaaaatccgcttgagctcccacgcacgattgactccatatcttctgttccgatatatacggtaacttccagcttcgtgggcgcgctaatcacggtggtgtgtggacccacctgaacgaaccaatgaaatgtttgttgccgctctcctgttatgcaagtctgaaccattaaatatgttagcataaacacgagtaggaaccaactacccgaccagcgaacacgacactagcccaccttcgtccatcctaactcgaccccaccacgtgcgcaccttctgtttacgtaaaacataacacatgtttacacatgcataaacgtgccccacaatcgcgcagacgcacgcgccccactggccccacgtgaccacgtgcg

SEQ ID NO: 156972 - DNA, 337 bp, Zea Mays
aatatattgagcaatggagacaccggatgttggggatacgatcctcgggcccctgagacccacgagtcagtaagaggacggagtaagagtctgccttggaaggacccacccctcgaaaaggcctgaggcactagcccggattaggcaaatctagaggatgccagtcgagtggattccacacccggcctaggactaacctgtcataaatgattgatcgcattaaatgtgcctggtgccaagccacgacaggaaaagtcgatcctccttccactcatgacctacaaggccataggcctacgacccagtcatggcttaccaaccctaggcctgagccccc

SEQ ID NO: 156973 - DNA, 605 bp, Zea Mays
gatcgaaacagtagccgcgacagagaaaagggtggcagggcttatcggcggcggtctagctccagtgcagtggtctcggagatcggggaggttctggcaaacacgtcgatgggcggatggtggtcggtggtggtcggagtcgtcctggccacacgcaggagcggacgagctcgtcggtggcgaggggcttggcctgtacacggcggtagggttcaattggtcggcttagagagcttcaccagatgacgtagaagctgtgcgcacaaggaatcgaaaaatgctgcactagtttacctcgatcatgtgctccggcgggcggagggattccgacgagggcgatctagcgtctccggtgagatagtgcttggtcggagggctcgggaagcttcaccggaccctggggaggtcggccgagcagtgggtttgggtgaggatgggccagagtgaccggtccacggtggtcgcactcaggtggattctagcgggcagcgaagctctcggtttccgggcaaacttcgatgatcgagtgcgggtaagcaagaggggctgaggcaaggacgtctgagggagctggcggcttatataggcgcgggtgcagctagggc

SEQ ID NO: 156974 - DNA, 795 bp, Zea Mays
gtgagaagaaggggatgatgggctgccacacgaggggagaagaagcatgacctccatttttgctggtagggcatcgacgtcgtcaatctcgcgcataccacggaagccgatctccacacccgccagcgcgactcggcccgccgaagccgatctccacgcccgccagcgcgagaaggggcggggatccgggccgctgtgcgggggggggggggggtgaagaaggggacgacgggggtgcgggacggagaggagggtgcatcacggggccggagagggaggcgtccatcgcggagaggatggaagggggcacggctggggcggatccgatgatggcggcgcgaggggcggatcggcgtagggaggcgggaggtggcgactgcggagacctagcatcctcggatgggtccttgagcagcgcacgggggtcgggggggtgagggccgaccgcgactcgcgcggcgcagggcggtgggaggcaacaactgcggagtgaggtgcgtagagtgggatgctatgtgggttagacgatgtcgatgcacgtagatcgtgggcagcagatacggacggtccagattacccggaggcagaaccaggggagacagcctaccccttgcgttcttaataggtagtatagattatggtatatagataggttggtagatatagatttctcttatctaggtaatgccgaatattgtacatatttaagagcaagatatttgtcatgttccataccccttatttctaacctttttattctatattttgtgctgaaatacatggcttacatgttgt

SEQ ID NO: 156975 - DNA, 297 bp, Zea Mays
gcgagctgtgctgtgcggaacgaaactgcccagtagcttctcgtgacagaagaagtgagtggtgttggtcggactagagggcaatagaaacgtactgtacgttttggtgtgggttcgagcagtaggagcgacgctattgtcacgcccaggaaaaagcaggtggtggcgctcattcaccgttcagtattgaacgcccgcgggggcggggcatggaaagttgttgggtttgtcctctggttttgagagcgctagcgcactatgggctagctagttgaatggaacagttgtcgatgggta

SEQ ID NO: 156976 - DNA, 809 bp, Zea Mays
tggcggtgggcgcagggaggctccggcgagcacctgcaccggccgatttacctaaggactgatgctctacttcggtcgaaaccgaattcatgccccaaccattgattcccctaagttaattgcacaaatggtgaactaatgtggtctggccacggtgagcgcgcggatgaaccaaagatccatgcgttcccgacggtcagtggacccctagtccaattggacgggtcagcaagcatcgtagacatgtgataatgcttaaacgagggagagggagggttggactgaccggagtatggctggccgcggtgaggttgggcttcgggtggcggagaacagatttggggcgaacgtgaaattggagagctgtggggagtaatcggagctacgcgtgggttctctggatgcacaattacctagcggcactggccgaggctccaatttataggcagcttcgacggtggctgggaattttaacggcgatgtgtggcggtcgaagataaggaagaggtctggcgttgtggttacgtgtccccagtcgtggcgagctcatcgacgatgatgggacggcagtagggaatcacgacggtgccgtggaaaggctcggacatgcggcgggcacagagatggcatgacgacggcgagcggccttatctacggcggtgagcaaaagggggaaagtattacggctgaccggggtggcttccagctcgacggcgacgacgatctttttttccacgcagcgttatccggttgccagcgaacgttaatcttaacgcagcggcgcgaatccttgcgcgggggagggtcac

SEQ ID NO: 156977 - DNA, 825 bp, Zea Mays
gaaattcgccaaaaacaaaaaagctcactatcccatccctagtgcttgtttgcctgagactgtcttcaacggtgaacgcctccctcccccctcccattctgtagcggcaacaggatccccctatacactgcatcggttcccccttcaatgccctcaataccacagcaggcttctctctccctctccgtcaagcgtgacgctaaatcgtcctcccacctcgctgttgtcgccgagtgcactgccatggacgtcatcgtcccgctccataggttgccgcgccaccgagcagagaaccagtagttcagttagctgtagcgcaatgtatattttagtagcatggtgggatttagagagatggtatagaggaaaccattgcagaaggtgaatatatagggggagagagggtgatgatgtggcatggaaataggatatagggggaaaaatttaggggaaaccgctgaagtttgtggcagtcgtcatccacaagcccaagcagtgctacaagtgacagggagatgaacagctcgcccgtagtggggatttgtggcaggcacggtgcttcgtggaatggtactggcagtccaagctctgcgcatttcctttttaaaaaaacgtcgtacggaaagagtagaactaaacataaacctacaagaattccgatgaggcggtaagatgagtagtagaactttacattttttaataaaagatacgtggtgtggtaagataatcttttgtggtggtgggcaatggcgaatcactgtcataccgtacagggaaaaccaaaacattttacttctgatgaggaggagtaagcactaattcgca

SEQ ID NO: 156978 - DNA, 334 bp, Zea Mays
gtgaaagaggccgaggaaaaggttcagaaaattattcataatatgaagaaagcccaagctcggcagaagagctatgcagacaaacggcgaaggcccttgtattttcttgaaggggactacgtctacttgaaggtttcaccaatgaagggtgtatcgcgtttcgggataaaaggaaagcttgcacccaggtacattggtccatttcctatacttgaaagatatgggccagtggcataccgactccagttacccgaaacattgtctgttgtacatagtgtgttccacgtgtcccaattgaagaagtgtcttcgggttcctgatcgaaccattgaag

SEQ ID NO: 156979 - DNA, 589 bp, Zea Mays
gactagaacgacaaaatgaatgaagagggaggggggtaagccatggctgttaagccttccttcgctgagatttttctatccctccaactcagatgctgctctggtcatttgtcaaatttagatgggaaaggaggaataatcttgaccattgaagaaaaattggactaggatagcgccatcagtggttgaagctcagatatcagatgcatactaaggatgaagggatatacatttattcagcacaaccatcaccatcagtagattattcagcacaccaagaaaagcattggcttatggattatttagcattgcgatagatcgtgcagtaggcttagcaccacatcaatctacaaagatacttccggctacctggaaatgcgcgaaaatcaaataatcaggaaactctggagttgcatggcaccacgaaaatgtggattgacatttgataccgaactgcaataatcatcactgctgctggtgtgcgcaaggactgaaaacttgcctagcccaggcaacgattctcgtgtaggattttgatggcctgcctggatataaaagctgcctggcaggtagcaagcaaacacgctcg

SEQ ID NO: 156980 - DNA, 770 bp, Zea Mays
gccaccccgagttaagtaagtaggccaattgacagcgaacaatttgagtgcctttgaagtctttttattgatgatatatttctcaatttatagaatacatcgtcgtcccaatagcttcggggatgtagctaggggttaaacttcctgaggtgttctatgttccatgagttcccaatttccgtgccgtcaatctgagtgagacgatatgatcccggccgagtgacttcagttactatgaatggtccttcccataggggtgacaatttgtgtcgtccctcccccgttagaattcggcggaggacgagatctcccactgcgaaggatcgatgtcgtatggccttatcatgatagcgcctcagagtttgctgataccgtgccgattgaatcaccgtgttcactcgctcttcttcgagtacatcgacatcctccagcctagtagctttagcttctgctatgttttcaaagattaaccttggtgccccgaacttgagatcagcaggtagcactgcttctgaaccatagaccatgaagaaaggtgtgtttccatgcagagctcgactaggttgagttctcaggctccaaacaacatacgacagctctctgatccactttcctgcgaacttttcattcttgtcgaagactttctttctgagcacctccaatatcatcccgttagctctttcgacctgcccgttggctcttgggtgtgccaccgaggcatatttgatctgaatgctcttttgctcgcagaaatcgaagaactctgaact

SEQ ID NO: 156981 - DNA, 335 bp, Zea Mays
cctgcgtccacacctcagcaagcttgatgaccgcgggcagaaggttgtcttcatcggctaccaggacgggtcaaaggcgtatcgtttctacgaccctgtcaccaagcgcgtccatgtctcacgcgacgccgtctttgacgagagcgcgcgctgggactagggagaagcattgacggcggggagcgaggacaccttcacgatggagtacgactacgacctgaggagccatgatgaggtggctataccaaggtcatcatcgctggggacaccgccctcaccgggcacaccaccttctacaagcgcaccgactgcatcggacacgacgtctacaccta

SEQ ID NO: 156982 - DNA, 863 bp, Zea Mays
ggttccatctcgatctgatggtccggatcctgcaagaacttcctcagcatagagacatgaaaaaccgggtgtacccctgccatggaatccggcaattgcaagcgataagccaagttgcccacccgggccaagatagtgaacggtccaatatatcttgggctaagctttccggagacaccgaaccgaacaactcctttagtgggtgataccctgagaaggacttggtcacccactgcaaattccaaatcccgcctcctcacatcagcataactcttctgatggctctgagcggccaaagtattctgacgaatttcccaaaccttctcagaagtctgctgaacccaattagaaccaaccagggatatctctcccaaagtctcccagcacagaggggagatataccgcctgccatataaagcctcaaatggtgccatctttatgctaacctggtagctgttgttataagcaaactctgccaatgcaagatgatcttcccagctacccttccaagacagaacacaagcacgcaacatatcttccaaggtttggatcgttcgctccgactgaccatcagtctgaggatgaaaagcgacactaagagaaagtttggtgcccaatgcactgtgaagactctcccagaatttggatacaaatttggagtctcgatcagaaacaatggacttaggtaccccgtggagcctgattacttccttcatatacaaggggaccaattctgaagctgaatttgtggtcttcatgggaataaaatgcgcagacttagtcaagcgatccactaccacccaaatagcatctctgccccgaggagaatgaggtaagcccaccacagaatccatggtgatgtg

SEQ ID NO: 156983 - DNA, 622 bp, Zea Mays
acttaatcttagcaaatggatcatggtctggtttaagattatgatgacgtctaccattacctcccataccttgtcgattacgtgcgaggtgttgtcgcagcggtgcataaacatcgtcatcatcgtcgtcgtcgtccacaggagagtgagctggggctggagttggtggtggaggacgagcctccagtacgtccatgcgtgtaacaagttcatcaactcgtcgatcaagctgctcataggatgtcgccgcagagtcctggtatttttaaaagcttcagtcatcgcgtgcatcctctccttcaattccatctgagagacacactcatcgtcgttaagcttaggccccttgtccttgtccatttgattctttggtcctgtcattgttagcacaaaacagagacaaaaaggcaacaaacaatatcaaccctacaactatctctcagggtggtggtggaggtggtggaatacaaattatgaagcgtcttaccctgctcttacaacgttcttaccagcactgcaggtggtaaacggtgaccggtgtgactatccaacgagcgtgagtgtgattgcaaaggagtacctattctgctcgagagaaagctggagctatgggaaggctgac

SEQ ID NO: 156984 - DNA, 519 bp, Zea Mays
tgcatacttgatctgaatgcatttttgctcgcagaagtcgaagaattctgaacttgtgaagttggatcctaggtcagttatgatgctgtttggtatcctgaatctgaatattatgtcttgtatgaattccacggctttagctgaggttaaagaagcaatgggcttgaactctatccatttagtgaatttgtcgattgctaccaatacatgagtgtatcctccttgagctttcttgaaaggtccaatcatatccagtccccagcaggcgaaaggccaagttactggtatggtctgcagttgttgtgctggtaggtgttgttgttttgacaagtattggcaagcttcgcatctctgaactaactcggttgcatcactctttgctgttggccaatagaaccctgacctgaagaccttcccgactagtgttttggatgctgcatgtattccacattgcccagcatgaacctcctccagaagtcgcttcccagtagatggggggatgcacttcatgaggacgcc

SEQ ID NO: 156985 - DNA, 307 bp, Zea Mays
caggtccagaaaaaaacatatctctagctattcgttatttcatattgaattttcctcatattgtagagaaatctcagctaatctgttcacatcttgaaaacacaatcacaattgctctttacacatgaaatgtccctgaagtgttagcatatacataatggtgattgtgacagtagagtcatgctatctggagtcctttattcagtatttcggacaaatggctgtcacattttatttagcaaggaaatataaggtgcaaaatattatattagtgaacctatgagcagttgagcatactcaatctcat

SEQ ID NO: 156986 - DNA, 478 bp, Zea Mays
gagtaatcgcgttggggattgctgcggtgctaggactttctcgccgaagcggagctccgtgccgaactcgcagctcgccgttgcctggaacctccgtgccctaatcgtcggtgagtacccgacctcagtattcacgcagacctcctctttgttttgtgctagagaaataggtgtgaggtgctcggattatccgggacgctgatcgccggcaggtctccgccgcgtgtgttgcacagcgccgctgcctggccgcggaccgaagacgatggcgcgcgaccgttggatctgcagggtgcgttgtggtcagattaaacatatcgattcgaccgcgttcgatctggaccatcgattagatttcctaggtgtatgattctggctcgggctggtgggctcgtggccgtagatgggcgatcggacgaccactatttgataccggttcgggcaaccccaaaattaatccttgccattagtttttgat

SEQ ID NO: 156987 - DNA, 562 bp, Zea Mays
ctccgccgcactagattcctctaggaatacgcccgccgagatcccgcgatactccctgaaccgaccgagcgccctctacggcacagacggccagaaccgcggtggcggcccgttttccccccacggcggcacaaaattcccaacggtggaggcgaggtggatggtaaaagggaggcacgagcggattggactcgggatggcgccccacgttcctggtcttatgggggaaggcggccacaggttgatcggagcagccacggcgcagcggaagaagctccggtggttgcggtcggtagttgaggtgagggactgacaaggaggccccacgcgccgtgatcggtcttgcgcgcggggggctgaccccaggggcccgcacgtcagcggaggaagggaaggagcgagcgtggtgtatgactgacgggcaaggcccacatgtcggcgcagtgatccctgtggcaacggagtgggtcgtcgcgtgtagcataggcttgggccaaattcaggtctttcggcccatttagctagttttcctttttcttttatattttctgttttccccact

SEQ ID NO: 156988 - DNA, 662 bp, Zea Mays
tggcgcacaccgaggacaatctaaggtgttcccagtaatctgatggggtctaactcaattggctgggccgataagcatctatagcacacaagagtgccaaaacgtgagtcaggagggtatgaacggacttggaaacgatagtccacgatgtggtggttcgcggtggtgcagagaatagaattgggggaaatcccaaattagggagatgtgggggacgattgtaggtgagggctggttcactgggtgcacaattacttagcggagcaagctggggcataaatttatagagtctttgagcggcggctccaaatttggaagggaggtgctagcgatcggagagaggagacgcgtactggcacgggtgaccgtggctgtcaccgtggcaaggccctaggcgatagatgggttgtctactatgatcaattgcgacgtggtaagatggctgacggtgtggcataaccgcgagggatggcggcatgacggtgatggtcgcgtggccacatcgccgggcaagtgggcatggcgacagggcaaaacagtggcccaagttcatctttaacgcgatatttcttaccccgagtagttatatgcactccgccgggcacgaatcgcggcaatcagcgtgaatccgagcgcaaggtcaccgacggtgagggggtctg

SEQ ID NO: 156989 - DNA, 597 bp, Zea Mays
cggacgggtccgattttcatgggagaagttccgccatgcgtgggattgaagacgacggcgtccagggaacgggctgggaacatggccccatattgcagcgactcagattttgacaagggcgcgcccctggagtctgaccaaggggccccacacggcagtggaacaccagtgctgaagcgcgtgagacagacgggcggctgacgcaagggtccgcgatgtcagcgaccacgacgccaggccagtggcgcagcacaaacacgggtgggctaggtgcgcgtgggggagagaagactgggccgaaatggtggtggctggcccaagtgtccagttttgttttattattttcttttttgttttcctttattttcaaatttagaatttgaattcaaaatttgcatcaaaatttgtacttgaattaagtattcaacttgaacctaccagtgtaggataaatttatttatttacggatttattttgtgttttatagtatttcttccttcttttccattttttttcaatcccctttccgaatttaggttttaatccaattcaaaccaagtttgaattctaaatctcaattttatgcacaagcaaaac

SEQ ID NO: 156990 - DNA, 329 bp, Zea Mays
gacgaaggcagctctttggtgaagatgtcaacgaagtgagatgtcatggggacatggaggacacgaatatcaccaagtgcaacgtgctcccgaacaaagtgtagatcaatctctacacgcttggtgtgatggtgtcgaatggggttcgaagacatgtagacaacattgacgttgtcacagtacaacaaggttgtcttgcggaagggagtgtgcatctcagacaatagttggcataaccaggtggcctatgcaacggtgttggcaacaactcagtacttagcctcgtcgctggaatgtgagacaatgttctgatgtttggacaaccagaa

SEQ ID NO: 156991 - DNA, 292 bp, Zea Mays
aacctgtcgatttgatgtatcatcattttctatcgttttagcaaccaaggaaaggcagtggccaagcccactaagaacactgttaagtttattcctatcatgtaggttgattctgtcgttgctcagtaccgcaacaaagttgttgaaggtctgtcagaaaaagataatgcaaatgaaactataagtttaagttggtaatgaatatggtcggggaatatacaatctctaggggtgagaagcagttcaaataaaacatatattccttagtagttattacttgataaaagctgga

SEQ ID NO: 156992 - DNA, 1249 bp, Zea Mays
ttcatattaaaaatctatttaataatcctcttctctgatttcattatgtcctggactgcgcctcaataactgagaagcacaggggctacggggtaaaattccagagacacagcgaacagtaaaaatggacggcgggttgattctctggtttccagggggttctttaacaaaactgcaagccgaagaggtatgaagccaactcggccgtcagatcggacatgggcgttccagattagatctggagtggatcgaaacggtacgcgtcggccaccgcacgatcaaatctcaacgcttcttattcaaaacgctcgctacacctgtcatccgtctgatctaaatcggacggccagaagaagatcaggccgaaccggtatactgcgagggtcgttggatctaggatcgaggatccggatttaattacctctagatctagtaacaaccgtacgatgcgagatcaacgaccaccacttcctcggccgaaacggtacactaggatttaatcccaaccgcacactaccggatcaatggcccacgtcccggctacaaccccgcgcccaccaacgtcgatcatgaggcggtgccgccctttcctcacggcggcaagctcgccggaataccgcccccgaagttctaagggtagaattcctactccgcctagttcaacaggaaggggacaacacggtgaaccaaatggttagtgacataccgaagttgggcgcacgtgtacatgatgcccaggtcgaggcggatccacggcggtgtcgtccctccggtgagcaattaaaccgccgctgatgacgctccgaacacaccccagctaccgcgagattccttgaacccgaccaagccccctcgcaccacgaaaccgcccgaacgttgtttaatcccgaacaccacggcggcggcggatttctcttcctcgcgattcaagacgacgacgccctcgcttccaggtggctagccggtgctttcggaggttgggtaaacgagagggaatgccgctcgggtcacccatttatggccgactcggtgcaaccacccgcgaacgaggagccgcgttttccggtggatctcgctgacccacgcgctggcgcgaggtagcggacgagattggtactgacaccgtgggtcccatgcgaaagggatagatcaagtcgcgtgcggatgggcgcggcgtcatgagaccgacgcgcaggccccaccagtcggcgcgcgctggatggggaggtgggccgcgctgtgcgattcc

SEQ ID NO: 156993 - DNA, 659 bp, Zea Mays
ttttgtttgtggaagaggattttcttttcgaatggctaaggggctctaggaaggggatcgctaaagatgtcaggaaaggtgtcaagtgtgttcctaagatggttaggttttggaagccacacttgtttctgaggaggatctctcataggttcatcaatcacaccatctatcataggggtgacaggcttagcaaaggtggttttgataagcttgggagtggatgaaggtttctctgaaggtgtcaaaccactgcactcaccaaccttcccaaagcgagcgacactcccatccttagtagcaaagcctaaccccggtccgccagttcccctcttgaaatgactgaccatcatgcccaactggggctcactgcacaacacccaactcaagatagatcgaaggtatgtgttttcttccttgattcttgtcttgtcgtgtctgcaggactcaagggcagattgcaaaccctcacaaagtgcacactgcataggtgcaggggcactcactgagctagcctcctcaagcaaagctatcctatcgtctctctttgctagctcatactgcaagccaggacaaatggtacatgcacccaacaggattgacctagatctcaactcgtcgcgctcatctagcaaggtagagtacttgttctacaaagtggt

SEQ ID NO: 156994 - DNA, 1001 bp, Zea Mays
gcacgatcaagcctgatccagttggatcaattttccgttgccatcagaaaggcgcatcatcgttcagagggatccagttgcgatgaggatgcagcttcagcgttcagaggcggatcagcaacagcaataacaaactgcggcgctctcggttttcaaaaccctggccaattcatctatagtctaggacttttatccctaatccatgttttcatatgcttcctattttgtatggattcccacaattgaaaatgttaagttacaacaatctagactttggcattagctagtacttcctctgctccgagttataagcacttttagcttttctagatgtgttattatcttctatttcagtgaattggcactgctgctgacattttctagccaataaaagtatatggccaaaagcgagcaacagcgtcatatttcaaatgtgcaaaaaaaaacatcaagcttatcagccagaagtaaccaactaaacaaccaaagcagagcaaacagggattcaaatccttaatgagttcataactactcatagagcaatcttgttgaaaaaacggtacacaattcttcagattcaagctttaaatagcaagctctagttaaggaatgataacttaaaacaacatcatgcctatgaaacatcagcaaaaacccagcaagtaatatgactgtacaaactagtaagatataagtgtgattatggccgcttaaaaatctcaacacatagcctctgtaacaagggcgtccaactaatgttcatgagcaggcatgtcgtccaaaaactattagcagacagtttatccaaatcataacacaaagaaataagtagcaacagacaatttctccaaacttcataacagataaaaatacgtagcaatagagagatggcattttcgtcacctttactacctaaatcataacagtgaagtaaatgtcgagcagcacaagctaaaaaaatcaaacaagataagaaacagttcgtcataaattattcttta

SEQ ID NO: 156995 - DNA, 676 bp, Zea Mays
tattttattctagtatggtctatatttctctcaatctattagatctgatctcactcttgtgcttgtgacacctttgtagatgccctctgaccataacctttttgtctattgggattcttccctcctccgtcattaaatcactaccttttgactatctttattcccttagtattgacatgctcgtaccattagattcttcaatactcttgtttcaaatacttacatttgaatttctactacctacttaaacacttcagtttatatgtccacgaatttcttgccttctgaaaccccttcttatttcgttgttaagttgttatcctttgcccttttctattcccttgccttggtatgcccgcatctttggaatcttgcatattcttatattcttatgtatgcttatctttcataccccaatgaatgttcaagacatttcatttttcacgcccttgaccacctttatttcttgatgatccatgagcaaccattctatttcacagatcctcgaggatctcatcgtttccttataacttccctcggtaataatttctgttacttcaacccttctgttggaaccttacctatcttaccctcgattgttttctccacttcgccatttcgcgagtcttgccttaactctatccttggttatgcttttcacgattatcatctttac

SEQ ID NO: 156996 - DNA, 651 bp, Zea Mays
caattagggtcattttagggtttgggcatttttctcactttgaggtgcatgatatgattaaggcatgatccttaagataaaaagacttagttcagtttttgctcctaagtttttggtgtcttttgctcaattggattcacatgtgataatgatcttgagttagcactaagaagaaccctagataacactggggtgttacaacaaccgtggccagctactataaattgagtgcacaaccagctcctttagtttatcacgaacccagagcacccactcccacccccgattagccatcgtagcgccctaatttagttcttcccccaaatcggtcattcgcaccaccgtgtgacgccgcgtcgtgcatctccaggtccgctctcgccctccttatccgtgtttcagcactctcgcatgcttgtgatacttgtcggctcaaccaattgagctagaccgcgcttaatcgtcgggaacctcggtgttcgccatcgtcgtgggtaggagaatctagggccagattagttcaattaggcatggactagactcgcctgggctcggggatggtgatccgatgcttagttccggcggtcgtcgtcgtttaggacagatttcggtcaagagatagccagcgggtgaacgtgtcgtcgccagtga

SEQ ID NO: 156997 - DNA, 761 bp, Zea Mays
tgctgcggatgtccatgaggtggctcgacgtcagcgggagactgacgacaacctacgtcgtcaagcttcctctttgggtactcccttcgccccccgctcgcccgacgtacctctccatcctcctcctccggagatcaacgagtggtaccagcaggcatacggggtgccttttatgacagcagacgacgtcgacaaagaagaagaagcttattttgatgatcgtgagcagtttgtcctgcctccgtatcacggggatccgggccaatcgtcctctcaccctccgccctaggatccttctggcagtgctcctccccccggatcagtctggggaggaacactttgcctctcacctggcgcaccacttctttgctcctcatcatcctcctcccaactggtgatccttggactggcgtctctctctctttttggttcttgttgccaaaaagggggagaaggtttattattgcagtacccctgtcagtaccctcctttatgcagtaccctggcagtaccctttatttttgtaatgaacaatcggtctgtaataactatttggtctatcgtatgatgcttgcatggctctaaagccataaacttttttatgatgtgatgagatgagttctcattattgtaatagcagtagaatttttcatatcatatgctatgcgataatgagcttgaatgtgtaatttttactctctctatctagttatgtttcattcctcattgttgtgtgtatggtgttaattgttctctctttc

SEQ ID NO: 156998 - DNA, 593 bp, Zea Mays
gggagagagaaagagaactccggcggggaaatttacctcggttgaagcacggatgctggtggagctccgttcgacagtggcaggtcgttgtcaggaacggaggatgggccttgccatggaggattcaggggcttgaaaattggcgcgtgcagctccagtgggggcgctgagacgaggagagtgaggcagggagggaagtgggcacaggtagcggctttaaaaggggtcgggcgtgtgggaggtggctgggaaacacgtgacataggcgcgtccacggcgagcgtgcgggctagaggttagaggaaagggggagctaacaagcggggcccatggggcggcgacataggcgcgcgggggcgagcaggtaacggtgctgacggggcaggctcacagcgcagagagcaagggcgcgcgcgggtgagggaatcggtgccgacaggctggccccactggtcagagagagagggggaaggtgggtgcgcgactggagtgggccaaaaggttgggcggggagggggtctgggcttcttttgcttttttttcttatattctgaatttctaattccttttcatttttttgtcctttcgaattg

SEQ ID NO: 156999 - DNA, 464 bp, Zea Mays
cggtactgacacgtgactaggctttatcctgtgcacttgcgctccccgctcaggcggagacccgatgctgccacgtggcttgctgcccgtgacgtaagccagcgggcggagcctgacataaggcttctgggccgcgcggtctctgcatttattgcggaagggacgcgccgcctgtccaccctgctgacaggcgatgtgccccctcagcatttaatgcgtcctgtccactccgctgacaggcggcgccagggcaatcccacagacagcgtgccagtccagtccattgtcaaacagtgcgcccgtgctgtggggtgcactgtgtccatcatcacttatacgagaagcttcccctgcacgccgatactacgcagatctcggatgtcagacacaagaagattgctccagcagcgaacattagtagctccaagtactacatccgttatgttcctgggcccatatgtcgg

SEQ ID NO: 157000 - DNA, 509 bp, Zea Mays
cgatcgcctatacactgcatgctcaagtggggtttttacaaatccaagtttcaacatctccttatcaagtcttgcattacaagccctaggtgcccgacacagcccatataaagctttcttcggtttgagcacctttccattccctttttctacaacaattcctggagcttgttgaacatatacctcctcaaccaagtctccattgagaaatgccgatttgacatccatgtgatgcaccttccaaccacttctagctgccagagctattatcagcaaccttactgtctcaatacgggttacaagcacaaacacctcttcaaagtccacccctcatgttgagcatattcttttgctactaacctagccttgtgcttgatcacactgccttttggatctttcttcacattgaagacctacttgaggcttacaacacagcgaatcgactccattttagctaccattgcctccctctagcactattctcgcaaggcatcctccacactcttagg

SEQ ID NO: 157001 - DNA, 531 bp, Zea Mays
ggggtgaagccattgaccgatcaagcagaccaacacactcagcaactaatgggaacaagcttttatatccacggcggcgatgtcgatggcgatcgatcttaagatgaaaaacttaatgggcggttgagagtgaaagtgacaagagtaagcaacgttgatatccacggcgacgatggtgatggcaatgctgcaggagcagtagcgtgctggagactccacctcgtcacctcctcctcctcaactttacatcctcaacaccacccttgtgcatccatctattctggtttctggctgagccagtgagcctgtcgcccatgagctcatcttcctctattgcctcaacctagacgccgacatccccaccatcctcgagatctccctatcccaggtcatctgcgtcttctacccgttcgcggctgcctcctgctcaccttgagcacgtccaaccgatacaagctctactaccactctatggacggcggcgccttcaccatcgtcgtgtacaacgccattggtggtgcagatgacggc

SEQ ID NO: 157002 - DNA, 471 bp, Zea Mays
gatcatctccggcagtaccctcgggggctggacagtggcttgcacttcccacccgagccgagtcaccctcggcaacaccctcgggggctgggtaagcgtcaacaccatccttgagggccaggttctctgcagtagccgcctctaaggctgaaggcccctcagttacttccatgggaccgagatgatccaagtcagtctcctgaccctcaagaccgcgctctaaggtcgatgaggtgcgggatgacctcaacccagcatcgagcacatcagcacatacctccatcacaccatcatccgctggctctgataaaaggtcctttggaaccatatcttctagagtctgatcaaagtttgccagagataactcctgtagaccaacgagagctgacagagcaggagaaggaaccccgctactttccccactgacaatatactgccgactgttcttccgagtcagagggacctcatctt

SEQ ID NO: 157003 - DNA, 822 bp, Zea Mays
ggctacagtttgtagagcttttcttaaaaagctactgtagagcttttgattaagcttttcggtgatgttattagcgtcctaaactcagcaccacaaaaccagtcttttcagcttcccatataaattcagctttttctgagcatatagcagctaaaccaaaaaaagctttatctggaatcgtaaggctcaagaccgggttttaatcactgaaaggaatgctgttaatgcaggtgaaaaaaaaaataaaaatcccaatcggctagctgtggaacttcagagtttctgtaatgagtatttggaattctttaacaaggaacatatatcagctccccatgttaaccaaacctggtcaaaaccgggcccaggacatctaaaaataaatgttgatggttcttatcggaaggatgcaatcttggaggttggagttttgtggttaggaataatcaaggggaaggtatagctgctgtagcaggtttcatagctgcagttgctagcccctttgaagcgattgcatgtttaaaagctctgaattttgcctcaaacaaggtatgatgactctgaagattgaaacagactgtaagtgtcttcggattgcatgtttaaaagctctgaattttgcctcaaacaaggtatgatgactctgaagattgaaacagactgtaagtgtcttcgagatgccctcacatcgaatgggatgattcgcatgatggagtgattattagggagcttaagttcctgattttgtcatgtttcaatgatgttaaggtgttgtttgcgcctagaatgtgtaacaaggtagcactactattggttttgatagtc

SEQ ID NO: 157004 - DNA, 365 bp, Zea Mays
gtcggcaaagtcacacaccacacggatgtcctgcacccgcaaggcatcctcaccctccaccaccatggagtaaagaattcctgacttccttgaccgacaatccggaagcaattgcgacatcaaggataacgtgaactttggagaacttcccaagaatatcacctccctacccgacggtgcctgtaataacattgtcttccaaaaacaggatataaacgcgcgatactgagataaccaatccatacccaagataacatcgaatgcccccaaggaaatcacaacaagattggccgaaaagacctcatcagcaagaataacggaacacacctgacaaatagaacagctactaatggagccattagcag

SEQ ID NO: 157005 - DNA, 828 bp, Zea Mays
cttgggctcaattcttcaactgggccaaactctcaatcccgctggcccatttcggccttaagacttttgtttttcctccgcgccactgactgaccgggcccacatactgggtcatcgtcttcccgaaatccatggcaccctcctcgccgtgggcatgcagccgtcgctgtgtgtctctggtgggttgttacgatgctaacaaactcgcaccaaacccttgactataacccaccgcgccgcacaccttgcctcgtgctccaatcccccaaccggcgcggcaccatggacaatgaaaaacaaagcagtgcgccgtcgtgtgtgagggtgtgagcgtcgtctctgccgcacggtgggagctgggttcttcaacgacttgcgcgcggtgtccagctgtgaatcactgccatacccttcgcccgcttcaaccatacggatgcaccaagcagtgagagagagtggaatgggagatctgccgcagccaccattgccaacgaagtgcagggacatgtgagggattcatacgaagaggtggtgtgatgtgaggtagctgatcatcgttgggtcatcgcgaaccttctgctaccgctagaactacgaatgcggtggcagagctcggtgaatttctcgccaggattccgccgccgtcgagattccgcctgtcgtcgtggatcgtcgtcccctctgcgcgcattgtggtaagagacccagaatccatttcgctttgtttctatctgcgcatagaacgttttggggaagaaagttgttaactgtagggccggttctgggttcgccggcagagggaacaccacgcggcagacccttgtcgtc

SEQ ID NO: 157006 - DNA, 1075 bp, Zea Mays
agactttccccttaatgaacccgcataccacgtcgaccattagatctaggatcaatggccagtgactcgtccacgcccatgcgagaccagatcaacggttgagatgagcccgacccaaaagggcatgtgtgcacaaatccaggccactatcttttgatccaagggcccagagatgcccaatcccagatctaatcctaacccttggtcagagatggacggctaggagggcttctcccacctcgcaaccagccaccgagcggcggcgccctttgccacacggcggaacacgacggcgagatccccccatcaacccaattcgcgtgaggtttgcccaattggtggccgctacacgtagcagggatcaagacgaacatcctagaacactccattccccaaatgaggccgacggtgaccgcgcccatgcctccaagcggatcccgcgaccacaacaactccggtgactaaatttccgctgccatctaccctcccgattcacggattatgcattaagggggaaacggatgaaggttagggccttatcttaccagaggggaagtcgcggcgagagaggttcgcggagtcgtcgggtacccaaccggaggtgtccgcggtgagcaattcactagttgtagagagtcgctcgcccaggtgacctcaactccacttagtacggtgaccaatcgatattccagggtgcagggtggagatcgattttcactacggccgaggatagctagcggcggggcttggttgatgagaaaagggggttctgggcacgtggcttatagcttccttcccccagctgcggacggtcagcccggcgcccgatttctacggagtcggttgcgcgcggtagttgagctcggcgcggatttggggaagaagagcggaagaagatgagccgcacgcggcgaagggacgcggcagagaagctcgccatggggaggaaccaggggcccgtccgcgcggtggaatagggcatccggcccgcggaacaacgcctggaatccagggcatggcgtcaacggattctgcagctcgcggcacacccgccatgcgcgccgagaggagcgcg

SEQ ID NO: 157007 - DNA, 535 bp, Zea Mays
gacgaagccatgattattgccttcggtgctcgagggaaaaagagtctgaatagagtttttgatgtaatcgggtttgtttatcctgactattgattccctgcccgaaaacaagggttaaagagaaaaaaggcagcttcgacctcttttggtgcacagaagacgaagagtgctaaggtcatgactcgtaggcctaagctacattccttagaaaaaaactgttgaagagcttacgatagagaaggtgaagtttattgaaaatgtcgaatctgtccccttagctacgaaaacagttcctactatgccagccgaagctagtgtcgatccggtagaagagccgggatcaaagaaaacagaagaacagccaaaactgctgagtcccccaactgtaacagagttgtcgaagctactagccactacaacaacgactccgaggaagaggaggacggctatgttttggatgctattttggaatccgtgaaaacaccaactcctgcttctgccgaagcttctgggagaaagttgaagatgcaagaga

SEQ ID NO: 157008 - DNA, 600 bp, Zea Mays
ggagagggcaagaaaaagtgtcaaacctccgtacctttgacagcggagggaggctcgacggagagagggagagctcggcatagacgagtgacgacgacgacaccgatggagatctcaagggagagggagagctcgagggagagctcggcacagacgagtcacggcgatgacaccgatggagatctcgagggagagggagagagggagatctcgagggagagagggagggcgagtggagatggcgtacccggccgaggcggcgccaaaccctagcacgcgtgatccagctcgagggagagagggagggcgagtggagatggcgtacccggtcgagacggcggcaaaccctagcacgcgggatccagctcgagggagagctcgagaaaccctagcacgcggggctgcgcgagcgaatgcggctgcaagcgaggtgtcgcacgtgtggagccaggctgccgagcgacgcccaaattggccgtatgagccgggcctgattgagagttggattttgcaccaagcgagccaggctccgacccccacacaggtaaccaaacaacatgcaccatccgatttttgcatcccatgggtcttgcatgctca

SEQ ID NO: 157009 - DNA, 1111 bp, Zea Mays
ctctctcattcgtgccatgtgctgccatttccccttcctcactcgatccgtccagtcgtcagcgtgccacctgctttcaccgtccatccctccgtcccctacgctacaattttcttagcaggttgtcgggtcgtgctcgcacgctccgtttggatgtaggcgtgccatttgctcctgttgtccgtgccttcgttcccatacttgctcctgccgccatcagcaggtcgccgggccacgcttgctcgctccgtccaaatgtcggcgtgacacttgctcctgccggtcgtgcctctgttccagcgccaccacatcacatcacgtatccttctgtcgcgctatagacgacgagcagctccgtgcagtagtcgctgcattggaatgtcggcgtcgccaagggcattgcattcttgccgctgctgtcgatgtagccttagcctgacacgaagaagatttctatatttgtgtttagttcagcattccctgtgcagatggtttgtcgttgttgctacagcggaaacagctctagttgttccccaaaatcgatgcccgtttgttgcaacatctaattgtgaaccatttttaatgtttgcgcgttatgtatattttttaaaaaaataatgttttatttctatatattaaaccaggacccgttcgtcccaaaccaaggtggacacgtcgtccaaaatttggaagccgtcggattgtttctccatgacgagatcctaccgtctagctattgcaccagttatacaatccccgaagcctccggaagcctctggccattgctcccagctgtggatcgagtgttttctattccaacttattccttctgaaaggtagcactcattctttatctctctatctccctctctcatctgtgccatgtgctaccatttctccttcctcactcgctccgtccagtcgtcagcgtgccacctgctttcaccgtctatccctctgtcccctacgctaccattttcttagcaggttgtcgggtcgtgctcgcacgcgccgtttggacgtaggtgtgccatttgctcgtgttgtccgtggctccgttcccacaccttctcctgccgccatccccttcgccgccatcagcaggtcgccg

SEQ ID NO: 157010 - DNA, 752 bp, Zea Mays
cacgccttgaacgagcaacagaagtagaagttaatgacggtgaagatgtggataggatggaccagatgcttgaggatctgcagcctgaactggccccggatcatcatgattcacctacaccggaggttcagaagttcttccacctcctcaaagcgtcaaaagagcctcttcacgggcacactgacgtgaccgtcctcgaattcgtgacccggctggtgtcaattaagtccaagtttgcattcttaattatatgttacaaggagcttgttgatttaattagtgaggttcttcctacgggtcacaagatgcccaaagacatgtaccagtccaagaaattgcttgaaggtcttagtatggagtatgagaagattgatgtttgccaggacaattgtatgcttttttggaaggaacatgacagagagcataaatgcttaaaatgtgggaagtcgaggtacgtggagcttgtaaatgaagaaggggagaaggtggtggcaaaggttgtacataaacagcttcgatacatgtctctcactcttagactgaaatgctggtttctcttgaggaagaccgctatgcacatgaggtggcataaagattgtacgaacagacaagatgggttaatggtgcacccgtcagatggtgatgcatggaaggctcttaacaactttgatccagattttgccagcgatgcaagaaacgttcgtatcggcttggcaactgatggtttcacacctttcaatatgactgttgtg

SEQ ID NO: 157011 - DNA, 690 bp, Zea Mays
cattgtggcacatccctaatcgctttgccgcactaccccgcgacccgagaaccaccgccgttgagagaaaagggagaggggaggtctgcccgcgccgccgccagcttggagcttacaagggcaacgaatcgaccgtctccgggcataggggtgatctcgggtgactgctgaagctggcttgggacctcctgggcgaagcaagtcccctggtggtcatgaattgctcgccggagcgcttcaccgccgccaagccgctcctttgccgtggccagggtcttccgcgccgcgaatccctaggtatgaagtccttaccgagttccttaagcccctagctacgttcagcacgtttcgtatgaggttgggtcctctgcgtcgtcaattcgtggtcgccggcgtgaccgccgccgtccattgggggggcttgaccgcgtggcctggcgctgctttgggacgacgactggtctgtcgtcggatggccactggacggattagattagatcatgcacaccggttggaccttagcccttggatcgggatcggtcgaatcgaaggaacctttgctattttaaatctgcaccattgattctggatccgatggtcgcgggtttgtaccggttcgctttagtacagatttaatcttgcgcgctgaattcggatccaacggcccacatctaaggataccccttcgcg

SEQ ID NO: 157012 - DNA, 404 bp, Zea Mays
tggactctgtccgagctgtacggacgagtatgaggtccccttcactgaattccctcgggatgactgtgtggtcgcgccatgttttgtctgggcttggtatttatttagagcctgtagagcgaagacgcggtctccatcgataagatccttcgaagtgggttcgtccacgtcggggacagctgacgaaaccgttcgcggggacccatgttttatttcttgtggggtcatggcctccgatccatatagaaggcggaaaggggtgaacccagtcgccctgcactcagtcgtgtttagcgcccagaccgcttcaggtaacaaatcagcccacctgcccttttttcgtcgaggagcatcttcttgacagctataaaattttttccattggcgcgttccacaactccgtt

SEQ ID NO: 157013 - DNA, 644 bp, Zea Mays
gtgaatctcaccaccgatgaactcatgccgcgattcgtgctcattggcgcgtcgataactgtgagaggtaaaaagatcggaagggaggaggatttggtcctggatgtgagcttatcggccgcactcgattgcctggcgacgtgtctgtgcggtcgatgtcaacgggggatgccggcaatctcagtcacgccacgtcataggccgttttaccacgtcgttgcgagtcatggagagtaactagtgactgtcgtaagaccttgccccagtacgcgccatggtgaactcactttagcaacaatatcccttcaccgtcatgatccaaatctcgttcaaaatttggagcaaccatgaccgacttctataaattgagcgcatcccttgctccgcccctttgtcacgaacccaacgcaactccaaccacgtcatgccatctatcgttgctcgtgaattctggttttctcccaattcggtctgccgtgccgccgtgagacaccttgccgaggccaaccatccacaggtcggtttgtgcttctctggtttgtgttctagcatccttaggttctcctcttgcttgtgaactcgatcaattgaacgctatcgcgcttggtcatcgagaacaactctgcatgtcctcggtattcgcc

SEQ ID NO: 157014 - DNA, 951 bp, Zea Mays
aagctacctcggtttgggccaaatttcattgcctcggcccatttataaactccactgcgctgactcgaccatgtccctgtcgcgtgtggcccacgcataagactcccagactgtgctgtgtgagcaccttcgtttgcctcctgtgtgactgacatgggggtccggcttatcagcctcgttcttgcgcacttgtgacactggattgtggggtccgctccctcggatcttctcccacctcctgtggtgctcaatagaacgccttgggcgtgaaccaaattcctccctcattgttctcgaatttgttgcgattcttccgcatctgcctgggattcgcggcagcccaagctccttgccagggctataaaacctgagccacgattgctcccgtcccatcttcatggacctccggtgtgcgccatggtggggctgggacagatccgccgtcgttgatttgcattttcttcaccggtgaaccctttgtgtcgtgccctagtgcatcgccatgtcttgtggatgaagtctatggctgtgtcgtgggggattggagaccaagggcccctgaatacctcaacagagttctctctccaccgacaagccgcagacctccgtagaatagcccatcacaatttcaatcaccggtaaatcgattgctagcaagctcaccatgtcatccttaatgcgtgtcgcggcttcggtttgggctaggctgctgggttggttcggagccaagctccggcggattcaccgtcgcgtgccgccgctctagtgatcgagacgtagaagaatgctgtgggtcgttagatccatgaccgacgcctaggattaatccactcgtacccccttcgtgttttgatctgatccgttggatcaaaactgggtagaggatattagtcgattgcgtggccaaatctcgaccatggatccgtgatccaacgactcacatcacgtacc

SEQ ID NO: 157015 - DNA, 305 bp, Zea Mays
cttttccggctttagattaatttcctctccggcaaagcgaattagctcctttttggcctcactgaaatagcctaacttcatcaacttaggcatatcatcttcggtaatggtggacctcccaaattccaggtggctgggtttagatggcatggcactataatcatcttcagattcatcttcctcagcaccaacctgctcagcctcagtagcaggtgcaccttcgtcagaaacatcttccgacactactagccccgactatttcatcacttcggaaatttgagcagtttcagcagtttcggcttctt

SEQ ID NO: 157016 - DNA, 422 bp, Zea Mays
attaattcaattctatgcaaattatgccaggctctgcttttgaggtatttgtagaactttgaacagtcggcttttgggaaagttattttgttcttataggagatatttttgaggtgtcatttgtgtctttacaggatttctgcatgcgttgtggcgtttgctgtgtttattgatcaatataataaggcgcttttacttttagtgtgaatttctttccttctctgttcagtgcatacattagtatgttggaggatgtttatatagcatgattaggaccttcgttagaattgacatatctagaacggttttccaaagtctcctattgagctgataactgatagtaatccaccatccctacttgttcataaatgaacctggaacatattacaacactccatgctgcattctgtcttgatttaggg

SEQ ID NO: 157017 - DNA, 325 bp, Zea Mays
aggatgatacccatctccctatagttgaacaacattatcctcaattcctcacccgcaaacagacttcgcagctccccctcacccacactcgccccagccgacgaggacaacaattcccgcttgccagccctgtccacacgaaggcgaccacctcccacctcaccacgatgacgcctatcacctcgcggcaactcactcacccttcgtttcgccaccgcccttcgccgcctatgcccaacactcgcacccggaagatcctcatcacccattacacacggtgaagcctccgctgcagccacatccaatgccgcaaagtaatccaaat

SEQ ID NO: 157018 - DNA, 464 bp, Zea Mays
cgcatggcgggcagattagttccctttggcaaaccaaacaacttatcgagattcgaacgcaggatcggacaactcctcacggtgtcattccgtgaaccaaacacgtcgtaaaattcaccgaaccaggaagggattcagcggttccctcccttgtcgcttgatcaacttgggtgtctcaaaaagtagtctattcggttaatccccagcacctacaactgagctctcttgtgcttacacaaaactgagcaaaaagaaacgggcacagaaaactccatacacataaaaaaaactcggctgacataaaaaaaacttggcccgtagaggaaagaccggtctcacggtattatattaagaagaaactcaatcaaaaccctggtcgagaaagatcatgaaagctaccctgcccctgcaatatgagggtccacccgtatagattagatctttattcctgatttgagtcctct

SEQ ID NO: 157019 - DNA, 367 bp, Zea Mays
aaggcgaggtacttggtctgatgtaacccttctctaacagctcatctatctgcttcttgagttccaccaattctagtccagacactcgataggctcttttagaaatgggggcggtgccaggaataagctctatggcaaattcgacttttctctcgggtggcatgcccgttagctcctcgggaaacacatccggaaagtccgacacaaccttgatagcctcgagcgggttggcctccttgctatcaaccgaaatctggtgacaatctcccttcgttgttttaggcatccttagctcagccactaccttctctccgagtggggacttcaatgttatgatcctcttgtcacagctaacattcgcttcata

SEQ ID NO: 157020 - DNA, 562 bp, Zea Mays
tgctatatctgatggagagggcaagacaccttatagagtattagagttgatatgagggggtatatatagccccaaatgcccaaactagtccatactatttgacttggattttttgtgtgcatcgaacatgtctggtgctagcaccatacatgtcggtgctactccaacggctacttcttcaaaactagccgttagtgtatagacatctggtgcgccactagtgtcacaccggacacgttcggtgcatgcaactggatggagcacagtcacctttttatgacaatgtttcatgagatatttctttatcaataactttcctctctatgacaatgttttctttagtggttgcatctctcaaatcttttctttagcttctcattctctaatgtgattaggtgaatcttgtcaaaaagttttttctcttcctcttgattgcatatatgatcagttgaatgttcatgattcatactcagtcatcatatagtagctacatcaatcttaacaatgttgttaatagcctcatatatttcaatagataaaagctcatgtgtaacaataagat

SEQ ID NO: 157021 - DNA, 877 bp, Zea Mays
ccggatcctatcaacgaaacgttatgcgatcttctaatcgcaaccgttcgccgcaaaatccacgtccagaaagctcccccgtcccgccagacaccgcacacggcagcgccgcctagacctagggggcgaccatggtcgggatgcccctgttctgcacagctagccactaaatcccgaattgaactgcgctacacgaagcctagagcagggcgaacaatagggtacccaaattaccttggtttgggtgaggactcttctgcccacgaggtggcgcggatccgtagcggagcacaaccacgacgagaaattcccgcggcgccagtgaataatctcgagcggagctgatgcgaccgccttccaatcggccacgagaagcctttaggtccacaccgggagtgcagacgactgccaacccgggtttccctcgcggcaattccccctatccctcaaggatggcaatggcggtacgatggctaggtcggcgtgtggtttctgcgcagggagagggcagggagacccatagggcgtccagggtaagttttatccccgagctcccccctcaaccataagcccgcgattctcccgcaaggtccgcacacgtggggaagaaccggtcagagcgtatgacggagggcccccacaagtcagcgaaagaaaggaatggaagttgcgcgcgcgggactcactgattgcgggacccacctatctgtgtgcgcgtgaggcagatggcctggtcccacatgttggcgtgtcggtcggctggtttgggccgcgcggaggaatcttgctcgtgggccgaaatcaggagaaatgagcccatgcgatgcttttctattttcctttctatttttaattttctttttccctttttcatttg

SEQ ID NO: 157022 - DNA, 624 bp, Zea Mays
gggagttaatagaatagaagtgaaaggcaaatgtcatgacaacttgacaaacatcgttccaaagcaaaagaggacaagaagtcgacaggatggtctctaaacagttaacactggacctaatgaccttccttggattttgttggaccaatagaccacccaaaaaatagacatgcatcgtcggtagtactcacttttccatagccatagatggtaatggtatacatcgatctggattgtttccaagtcgaagtcgaacaccatggcaacatgcattatcaccaaatcaccacatggcctggtgccctcgtcaaagtgtagccttcaaccaaaatgcaggattaaggagcttctccgtcatggatcgcgatctcttggagattcttgccgtgatacaaatgcagctgccaagagaaagagatcggtatgccatatcaaaacggtggccttataccaccgctccaggtgccgaagttctctccgggcaactcgtagccagccgcgttccctccaagatcatacagtgacatgccatgaccaatgccgccgacatcgccacccgtcactccagaagactgcgacgcctcctgttgctgtccttcggccggctccactgctgcgccttgg

SEQ ID NO: 157023 - DNA, 652 bp, Zea Mays
gccatgcccgttttcatggttgaccggcccgtgactctcgtacttagcgcgcactgctgggccatgcgcggggtgcctcgagtcgccgcactggttctgaaaacttatcttttcagttttccgcgacggccctgaggagtcgtggtattggcgcgagtggcgatgcgacttttccgcaccaagtgaccggcgcatcggttgcatgcatgacatgtgggcctgggcccccatgttggaccgccggttgcagcgaagctgagggggcacataaccgcggggctgttgtacgcttcccgtgtggcggttcgacttttcgaccgctggtttcggcgaagatgatggagcgtttaaccgcggggcggatgcatgctcctttatgcagcggttcacattcctgaccactggttgccccgagaatgaaggggtgcataactgtggggcagttgcacgctccctgcgtggtggttcgccttcttcgcgcttcgggtcagtcagcctgacacgtggggcctagcccccatgtcatagggtaggaaccttggagtacgtcgggggagattttgcccgtgacgcttcagggcgcgagtggggagatctgcctataaaaagggatcaatctcccgggcagtaaccatgctttgctcttctcgcc

SEQ ID NO: 157024 - DNA, 513 bp, Zea Mays
gcggcggagtcttcgctgtggctagagatgggcgaaacgtttgatcccccggctggggcgaggatcgaacaccgtcaacgaaaagtggtggcgaagcatagtgttggtgagagttcgcgaagtggtaggcgccggatggggttggagcgaactcgtcttcgtgtatatcggggtaatcaacgcgacttgttgtctttgtcgtttgggacgagtattggtgagggggacctacggaatttgtttgagggtggggaattgaaaatgatttttgtttaattatcgggaggcgggcattatcccgaatgttgagccgatgtagaatgtgtgatgccctcgcttgtcgtgaggtagtagaggacgcaattgtatttatttgtgcggtgggtctggtgacccttcgctgtgtgtatgtaatctgcgacttgtattgtaatgtggcctgttgcccttcgcttggcagtgtgatgttgtaagtgtctggcggcacccttgggcgatttttgcacggggctg

SEQ ID NO: 157025 - DNA, 1180 bp, Zea Mays
cggccttcctgctgctccaagtaaacggtcttgcccttgacctgcctgaaggggcgacgaggatcctcatcatcgcctccccctggcgccgacacattcttcgtgcgcggcatcctgagctgatgtctacaaatgagagagagagactaagcacagagcgaaaatgtccgagagattttagcaaagatgagatgactacctggaaagctcacacgagaggtgacgatccaggcaggacgggagacggcacacgggcaatcaaggtcactgaaatgacagaagaggtgagcacgtattagtcacatagtcataagtatatgaaatgtgaataaatacatacacaagagaaatatggcacaggaaacacaagatgagacgatcgagaggtcaaacgacgtgaaaacgacgtttgaacgataaatagtgccataggaggtttggaattcgaattgaggcacgaaacgatatggaattgagccgatacttcacgaataggtttatgtagttgaatatgagtgaagtgtgtgcttggtttgaatttaggcgaagaaaaagagatttgtgcactcggctcggaaacgatcgctcgaaaagggaaatttggtgaaatttaagcctggaatctcggattggcgtgaaatttggcaagagtgttactggaagtgttgggaaggtgcctgaaaaatttgggttcaatttgagcatttttggctggtttgggcatttcaccgagcacgcggcgtgcgaggaattaggttttcggtgaaatggccatttgaggtgggaaaaccctcccgaaggagctaagaacctgcaggagtgtttaaggaatacaggggaacacaatacacaacttggttgcactggatttcacaggaattcacaagattttggaagtgatgcacaagggggtggcacagtccaaagaaacagagagaaagagagaagcagaggggaggaaagaggaagccagagctgctcaccgaggagggaaggagaggggcacgaggacgccgtgggatcgccagtggtcgccggagaggggaggtcgccggcgggggagagggaatcgccagagacagagagatggcgctggtgaaatgagcctctggctcggtctcgggctggaggcctttttttaaaacgcgatatgggcgcaccggacagtctacagtgcctg

SEQ ID NO: 157026 - DNA, 858 bp, Zea Mays
aactagcttacgtgtatgggtacattttgcaacccgcacctcaccaccgttactaccccttaggcaccaccaaacctaagctccactgaaggcacctccatcaaccgagctttgaggggttctaccaaaaaggacctaggtctatggcccaaggcgacacgatcggtcggctcaaaagggaagcctaatgcgactaccatccatattcacccctagaggatccacgaaggtaacaaagggtcacaagggcatccccatttcggggcctcggacaacctcaaacttgggcaaggtcgctaggctcgatagagcaagcccgatcccacctttgacgtgtcgaggcgacccatcgttagccttgtgcctccaaaggcgcttgggatacacgagtctaggatcatcgccataactaggtaccaccctcgtacttctatgatcttctagagacgtcctttagtggaagtcgaaagctctcttatgggttttggttgttctggagacgtcctttgtgctcccctgcaggttttgagctccctagggagggtttcattcactaaaatagctatttcaccgttattcaaaaacctcgcatgccaagtgttcggtgaaatgcccaaaccagtcaaaatcgctcaaatcgaccccaactttttccagcacactccagctactaccagtatctaacacaccgattttcacccctatccaatatcccagacacatgttatcccaccaccttccctttatagcgaatctttttgcgtcgagtgccaaaaatatttttcctctgccaaacttcaaatcaagcacccacttcactcattttcactcatatatacctatctgtgaagtatcggc

SEQ ID NO: 157027 - DNA, 1150 bp, Zea Mays
agtgcatcctgaacgtgcaacgtgttggtaacaaatgatgaaaggacgactgatatatgatgttgacgtctttcagtcgacagcaaaaattaaggccactcaaagaatgaacatacctgaagagcatgtaagctgttagaaaatattttctcaaagacatcatctcccctcccgagccgcagttgctttccaagcaactctattgggtcatcttcagctggtgacgcagatatattgcattcaccactacttgagtgaaaactaaaccccagaatatgcactctagcacatcgtatgtcaaaaccagactgatcacaagaaaagcgatacatgttatcagaagctggtacaggaatataagaattttgctcagttggttcacagctcaatgatgtctgagacagaaagttaagaagttttggatcctcatcataagcacggtctctagtgaaccaaagagtcagggtcaacctttccccttcagttacctgtaaagcaaaacatgttgtaactgttggtaaaaatggaagggcatgcgagatccttcacaaagatcgaaaataattgataacaacaaggctgcaaagaattgatttttaccccaaaaaatgtgcaaggaaaaaacagaaatttgggatgactgttgataatgaaatgtcatattcaccattaactgtatagtacagttcatgaaagagttgatatgcatccaaatatccaacaaaaagtgaagaataaaataaaaagaaacagtgaataatgcagacaacaggacatacctcatttacacaatgaacattacgagtatcagccgtgtatatgacaacatcctggacaaaaatgtttctcataaaacttaccaaaattacccagaacattttactaacaacaaatgtgtgcttcataagaagtattttgaaaccacatggatgcaaagtaaaattagatttgcttacaccagcaactggaacaatacaggaaggatcaccatcctgaaactgcaaaattccacccttatagtcctctccatgattgttcaagtagcaaactgcctttaaataataagataagaaagagcaagtgagaaacagattagaacacaaacaaacaaaatggacatcagaaataattctagtatacaagatttcgt

SEQ ID NO: 157028 - DNA, 750 bp, Zea Mays
atcagaataactaggcgatgtcatctgtccatgtcttgttaggtctggaatcaatttgatcggtgacaagttggacatctggctggttgagacagagggccttcgactggacaccactctgccatgtactttaatgcttctgttgattggacttgcgttttagtaaccacatttgggcttcctcccgtttcaaccgatctcctctttttgtcgcggtacattcattgcgtatattttgtgggtatcaccgcttcagaaaatcttgaagattccgggcgatacacccaatgggtgtgcccaagcggtgtctgtcccgcgaaaggtgtttattgcgttgccctgaagtagtaatttgatgtgacggaggggtgtaatcatttgcttgagcagttgatttgggtccaaccggtgccgtgttacacgaaacagcgtcggttgcctggctcattttcaggcgacttgaattgcttattgaattcttgcgactattcagtgagcggggtaggaagtggacaatcacccctcggcctctttagcccactttccctggctgttttcttcactcgcccttgatcacttgctctcttcttgttcgtcacttctccactttctgcacgaccatggacagaggcaagaggggcaagggatggcctcgccacgctgacggcaagcgtcctccaagtccaccctcggaggactttggtgactcggagtactcggaggaagtttcctccgagtatgatcggtcgc

SEQ ID NO: 157029 - DNA, 888 bp, Zea Mays
cgtcggcggaggaacgagctcgagatggtggtgaacggcgacgattcctccctggcctgcgcaacgcgagatgggaccttgactctacgtgcatgcgaatgagggagggggagagtgagtggggctctgaaggggttcaagcaggcgtgggacgacggtcttgacgcgcgacgtgggcgtggagtcctcggtgtgcgcatggagcgcgtaggcggacggttggagggatggggctgacgggtggggtcgaggtgtgagcgagctagtgcgggcgcgcgggcaacgagcgctgatagggcgggcccatgccgcagagagatagagatagtgggtgacagattagggtctaaggtttgggtgtggttcattggaggccaactgacttagatgaagccccaatggtggcctggtagggggtttgttgggcagtgtaagaggcaggggtgccatcagcagtgtcttattggagcggtagtagtctgtgacggattattgaggaagtgggggtggtggtgttttcctgcgaaaggagtcactggagatgagaaagaatggtggggtggggataactattactgggtgttgggtccagctgataggtggttaggcgggccctgatggaataagtcttgtggttgttgtggatgactgcagttagaggacaacacaaccttgctgcagcttttgactactttaatggacaacgactttagaggaaagcaagacaatagttagaggacgacacaaccttgctgcagttttgcagttttgactagaggacagtaggacaacatctccaactttagaggatagcaggacatcatcttcttgctgcagtgtgcagtctttgactagaggacaacatctttgtgtagtgcagtgtgagtg

SEQ ID NO: 157030 - DNA, 511 bp, Zea Mays
aaactgcatagcccctgagcccccaagtttggcagagggtatgagaaggtcgttgatgaagacacttggaggggtgtcttcatgtgaggccgtcagcttggccatagtgtcgatggcctgattgtcgcgtcttagtcttaggacgtgacagagctcaagaccatggaacttttcctcgagcttgcatatcttgttacagtaggcctccatcatctcgttatgataggatgccaccttcatgacttagtcttccataagctttgagttccccaagacgtagagcctgcgcacacctaggtcggcgacgatgcggagcccgtttatcaagcctttgtactccgccacattgttagttgccttgaagcggaggcgaatggcgtactgaagcattgacacctcaggggagatcaatacgaccctagatccccctctcgattccatgaacgaaccatcaaaatacattgtccagtatttctatttggtcagagccagtacggattgcacttctgtc

SEQ ID NO: 157031 - DNA, 540 bp, Zea Mays
gctcacaagtgcagtttaaacatgtatggtgatttatcctgaattatgtctgcatacatggtcaatttaattcatgtgcctttatttaggaattatgtctgcaacaagaaggtttctgtgtttatcaacaaatgattgattcatgtgcatttatttgagaatttatatggcccatacaggaacaaatagttgaagaagatgcagtgaaatttgtttgccgagaagctaagcagatgcactgaagtcatcttgtgtcattccatatcatgctacattgccctaacctgcactgctttcattgaacaacgcacatgcatttacctatacatcattatatgtgtagagtgacgtggggcgttaattttacggatctccgccactgaccattgtatctgcagatatcccaaaatgtcgtgagacatatccataaagaacttctcgtagaaaagatggcacgagcagcggtcgacgcgccgccggccaacggagggacctgctgccacgccaccaagggacccgggtacgccatgtcgctggaga

SEQ ID NO: 157032 - DNA, 775 bp, Zea Mays
ctggctgaggactcttctgatgctgctcctgctgggacattggtggtggcgctccccctagaggctggtacgaccttggatacttagaagcctaccagtactcgcccgaggcgcccttgccgagccaatccacctggtccttctgctgatgagcagaaaaagaaaaggagacgcctccggcgagtatccagtttggatcgggacgttggtacttcggttcctgctactgaagaagtgcctgtaactgaatttattgacgctgaccccaatgggtgtacccaatctgctgctgatcccaatgtgggtgctccatctgttgctgatcccaatgggggcgttgcctgtgttgctaatgtagacgacgaggaagaagaggacgaagttcctttgactcggaaaaacagtcggcagttcatcgctagtggtgaaagtagtggagtttcttctcctgctttgtctgctctcattggtctgcaagaattgtccctggtgaattttgattagactcttgaggatatggttccagaggatttgttatcagagccagcagatgatggtgtgatggaggtttgtgctgatgtgcttgatgctgggttgaggtcatcccgtgcctcgtcgaccttagagcgcgatcttgagggtcaggagactaacttggatcgtcctggtcccatggaagtgactgagggcccatcagccttagaggtggctaccgcagagaacttggaccccaaggatggtgttgacacttgcccagcccccgaggatgttgccg

SEQ ID NO: 157033 - DNA, 1196 bp, Zea Mays
gaagtttgtaaattttaggtttcgcctattcacccccctctaggcaacttttagttcccaatggggaggaggctacgtcgtggtgtgttggggttgaagtaaggttttctttggtttggaaattattttcattgcccttctgatctcctgttgtctttccgctgcccgcacgacactagatgatgccgacgttgaggcgagtcatctctaggaccaactcgttgagtccgacgatcgcatggcaggtaatgtccttcttgacatcttctacatctttctttggactaatcctcctttttgtgctccttttctagctttggaagccgagatgcaagagctcaatcaccaggtggaccaagttatgaagtgggtcagggctcgcggttcatccctagaggagcacctagacaacatcccagaatgtgtccgagacattatagactttggcgttcatcgagggcaatcatcaccttgatcgttggggagttccactctaatcatagccttcatgacctcgtagaggttccatgtgacctctcgaacgatgcactagaggagatgctagagggttacgatgatatagatgattgtgtcgtggtcgcactgtctatggatgatgtcatttgtaaggcttggtgacccaccattgttgtatggatgattgtgtcatggtcgcactgtctatggatgattgtgtcgtggttgcatcgatcctaaccgcaaattcgacgatgacaactacctccgaaaagctaaaagaacggtaagattgatgtagctatgtcgatcaccaattaggatgtttgcttatgaatgagttttgtctatataggaagctacgagtggctaaaagcctagcgacattgaggtgttcatgtagggtcatataggagtagaccctaataatcccaagcagctgtgcagccagatggccatggatcggtgggtgagttttggctcaaaactataaaagtccaaagtataaaaatttctgcatttgtaagttcatgaatgatgtataggtggcatatggagaggagatggttcggcgtcatgaccccgactttgactggagacatgaaccattggatcccttagtggtgtatgctaatggtgggggaaaagaacatggacggttagcactaacttataaaattacacgattgatactaaattgatcatgtattaagcacact

SEQ ID NO: 157034 - DNA, 925 bp, Zea Mays
cacagttaagttatatgcatattttttccttgttgagatgattatgttttgcaactgtgtttgtttgacattcttttctagtggtcgttactaatcatttcatctgtcaaggtgtatgcatattttgtccttttttagatgattagtttttgcaactgtgttcatattgctgaaatgaagtgtctgttggtggaacttctgcatttatcaataaatccacttataaacgcagctacccgttcatagacggtcaagttattttgacaggatgggaagaagaaatctctaatgtggccagcaatatcatggaggagccaagtccaaagcagtaagctatcccttgctccctgacgtcttatagttcagcaaatgtgtactttaaacgtctgaacagaaatgttttgatttgctgtgcgtacagactgtttcttgtccggggaaagatcagaaaaatgattgaacatgatgtgtcacctcatttcattttctctgtaagctttgtttcattaatgtctctatgatttctatagtccagtagcttgttttctccagacagattgtataactgttgatcttccctttttgttatcctttatctgacattgtagcacctggtcgcggaactgaaaagggacaaggatgaagacttccagcacagcgttgatgaattggcctcggacttgaaccatgtaagcattgctagcatctgcaatgagccaatgatcgtcggttttttttttttccatttttcagctaacaaacctgcaaccactatgtagtgtaggctgacttgcattgctttgtttggtcccatatggctagtttcaagattccaaagggcagtgcaaaggaaacaaatcacgggaggcaaactttaaaacgaggtatatgaacatagaaggttttaccgctgaggctcatgacc

SEQ ID NO: 157035 - DNA, 704 bp, Zea Mays
gttcttactcaccgaccgcgctacattgaaccggccatagtgcctgaatttggcggtgagacctcttcggctattgaagccaaaggatctgttcttacgtagaggattgaagagccggctgcaatgccgaaggctgacaaaattgaagaaccaagaaccgaagggacaaaaacatcagaagttctaagcccttcggcaggagtggaggtgccgaagacacaaaaagatctagcagcaacccccaagagaaaaaggatggctagtgtattagatgtgctggagacgataaaaacttcaagctctactccaggaaaaattgccaaggcttcaaaaacacagattgaaactgagacaaagctgaccgaagccgaagctatagtgagctaggctgacgccgaagctgggccttcagtgcccgccaaggagaaaccctcggaaactagagaaaaggcagcagaagaagagggtatagaacaaattttgcctgaaaaagctgccgctcctgctcccgaagcgtcttccgaagtccttgattatattattcgacacgcttcgggaaaaagattatctgaagaagagatttttgaagctaaacactatgcccaagaactgaaatacccgaaaggggccttagtgtttaatggcatagacgaagatgacttcttatattgcctcccagacaacaaagaattatccgtctgctg

SEQ ID NO: 157036 - DNA, 513 bp, Zea Mays
aaggatggtgtaatggaacaaagtggtcaaacttggcagacgatccacgacaaccaaaatagcattgtaacctgctgactagggcagtccttcaatgaaatcaagtgatataatctgtcatgcctatgtaggaacaggtagatgttgtaagaggcccgggtaattagagcgattcggtttagcttgatgacacacttggcagtcagccacaaagttctgtatgaatgctttcttctagggccagaaaatagctacttgatatggccatatgtcaccagaaaccctgagtgacccccctatggcgctggaatgaagtgcagcaacaaccttgttctgaaaggcaacattagagcccaaccacacacgatcattgtatcgaatgatcccatcttgcaaattgtatggagggcattcagcaacagccaatgctgtgatcagtttcaatgcttatgaatcttcctgataaccgaccataacttcttgaagccaagctaaagatgcggtggacaaagc

SEQ ID NO: 157037 - DNA, 531 bp, Zea Mays
caccatcgaggttctagagaactagctccggaatacccagcaatagcttgaagaggcaaaggagcacctggacatgcatcaccaggatatgcaataggacatggacgcagacgaggatgtggatatttagggggaggatcctgagccagcttctagcttggacactgctagcacaactcgctctggagggccaccttctccagattctagctttgcctcgcatgcccactagatgccaggatggggaatacatgtgatagggagtagagctccttaggatagcttagcttttgggatttcatggtatactaggctaggagttggattttgggttggcaattgtaacaatggaaaactttattttggatgatgggaaaaccaatgagattaagttcatgtgtgaatttactatgaccagatctgagattgaaatcccctctatctgtctatattcttgttgtgtgtaacaataggagctccttaattgcagatggcagaaagagcgtgccatgggcagaactagcagattcc

SEQ ID NO: 157038 - DNA, 2415 bp, Zea Mays
agcagttttacaagaactcacggcacagatttattttcatcagttgtggaattaatggtactcaagacaaaagtatatttgcacttgagtattgtaagtccacaacagaaaaaatacaagctacaacaacatacaaccataaatgccagtggccgtagcctgagtgagaaaaaatctcaatcacatgaagtttctgaagaccatgttatatcattcagcattggaagaacctaaacctctagaagacgcatccgctgcaacccatgtcgagtgggcaaagtggacacgccccctccatccttgcagaagccattgcccatcctgggagatcaggaagtccttgtggtgatgcttcttgaccatatctctcactagctctacagtgctcatcttcagtgagagctgcctcaggccagcccgttggtttctcgtgtgccattgtctgtacctctcagggcgttccaccaggtccacgccttcgcagctgagggcattcagcgcagaacgtccaagcacgacctgctccagcaccattcgagatttactctcccttgggattgttgcatcgaatatgtcaaacagcgccatgtaatagaacaacatctctcgaaaacgtgacaggaaggatgaaccatacgaacaattgtacacgctctggatgaaaacatgtggtctcatcttgctgatgttacaaaggactatatccctggggcttaggtcatcaaaggatatgccctcgtccatcaaggtgctgaaactaaagagatcattcacgacaagcacttcatcggcttctaggttcaggtcctcgatgcaagcgtcctcccagtttgtcttgatagcgtggaacttgaacaagggcagaccaaactcatgggcagatctgccgagtcggcaccgtatttcctcaatgttctcagttgggtaggacttaggcttggggagacctatggctgtgatcttcacctctggcagggcaccttctctactcgccaacgagcggaacaagcttacccattggtatccgaactgcataccataatcaacgatgtgtagcttattcttacccaccatggcctgcatgatagtcatctcggagaaagaaagtgccaccttgttgaagcagcaggcttcaaagtaaaggttggaggccttggtgaactccacgacagaaggtcgctctgccattagcaactcccaaagcagactgcccgtgcccacgagccgtgcctccagtcccttggtgaaacattgggccaaccgttgtgtggcatcccccgtctctgatgcgtgctgaatgatctgcttcagcagctcccgtgccctcgagtgattgttcactgacacctcctgcgcacaagagatcatcaacctgcgtatgtccaccacattgttgtccctcgtctccttgctattcctgttttgctttacaactttattattgtctgtggtgacacggagcttgtccatgtccctgatgcattccttatagccaagcagcatcatttcatcaagcgtctcattggccaagttctcctgtggctcctcgatcaccgtcatagcagcttttctggttcttatctccatttgtagatgatcatccctgctatgtctcttcttgacgccgctgtgactgctgttttccctgaccgtctgattcaccagctcatcccttctgaagttgttgtctttgggcaggagcacgttggcctcttccatgcctttcaagaatgtccccgcagcatctgtgcccttggataaagccgaactgagcatgcttttatcaacattgacttcatgcaagaactcgttgcacccctccctgttgccagtgtcagtgccagaggaaggggaagagagaatctgagcaaagggctgctgcacctggagtagcgcagggtgatcactgaacttatcatcaaaatcattgtcctccatgagcacgtgtgagacgtaagagagcatcatctcattagggacatggtgctggccctcgctgctgtcattgggcttctcgagaaggtcagggaagacaggtggggatggtggtgactgctccatgagacccttgctgaagaattcctcaggtgtggtggccatggtgatcaaatgtagtgcagtcagtggttcagtagccaagatgaagagaggacttctaatttggtcaatggttccaacagttccaatgctgcatggatagcggagatgatggctagcgatttttccaatgttgcttggctaatggttccaaaatctagcatttgttttactttacctattgaaaataacaaagcaagaagataccattgtgcaacgcgaagctaaacaagagcaagaatatgctgttgtacaacgcgaagcatatttaaataaagctttacaggcaaatatatgtgaagtagtaatagtgatcag

SEQ ID NO: 157039 - DNA, 379 bp, Zea Mays
acgccaacacgaaattctttcacctggtagccaacaataggagaaagaagaactatatcagatatctccttcggaatggtactttattgtctagccaacaagacaaactgcaagaggctcaccaacatttcaaggagattctgggagagacaggaatgagacataaggtagttcagtgggccgctctagattattcccccttttcgttaggtgagctcgacatcgtgatacaagagtcggagatcaagaatgtggtcatgagtttacattctgaaaaagctcctggcccggatggtttcattagccttttctataaatgttgttggaccttggttaaagaagacctcattgctgcaattaacgatttctacaattttag

SEQ ID NO: 157040 - DNA, 479 bp, Zea Mays
cgtctcgcccatgcctcaccggcgcgttcgccgccgagcgcctcacgccccgtcgcctcgccattaaggctcgcaccagccttagcgaccaccccgccactgtacccgagccgtcccctcacccctcgcctgcctgagccgtcccaatcgtcgtttgctccattcccgccatcatggcgagctcgtcggcgctcgccgtcccctccatccctctccctctcccgggcgcctataaaaggagctgcccgagcctcgttctctccacaccagctctggccatctcctccgcttctccctgagccaatcgagctagcgccgccgcacttccccgtcgctccggtgagctccattctcccctcccaagtgaatttcagtcgaattaaccagtgtgtgaagctccgccacacgctcacggtcacagggcaccccttcccgccccctattgcacccgactgcctcaccggcgacctcaccgccgt

SEQ ID NO: 157041 - DNA, 516 bp, Zea Mays
ggtatgggaaggggttgcaaagggcctgctgccttcaagtgactagctttgattctctggcaagtgtcacactcagatatgtacttggcaatttccctcttcattctggtccaccaatataaagatctgagatcatggtacatcttggtgctaccagggtgcatggaaaattttgaaagatgagcttcgtccagtatcttccttctgagctccgggtccttgggaacaatcaatcaatctccaaaccatagaattcccttgctgtcttgccggaagcacttgtatttttcggccttttgcttgatcatttccttgataacctgaacacccttatcttcaatctgtgccctgactatctgctcttgcaatgtgggctccaccgagatgtagcttaagtcacctgaagaaacaacttccaggttcaatctgcacaactcatcacacaaggtggtaactctcacatccatgttcatacaattgcactgggcctttctgctcaaggcatctgccacaaca

SEQ ID NO: 157042 - DNA, 714 bp, Zea Mays
cgccagggtctttatcctctctagttagccaggggcggcgctttccgcggtctcggcggctcagttccggaggcgaggtagactggggcttctaggatgctggggtggtctggatacctagaaaggttggggaggatcggcgagccctatagcatggtcggtgttgcaagaacgggactgagacgtgcatacggtggagggggaacctcgggcagaccggaggttactccgttgagcaatcgcgcataaccaagggcagaccaaggcaaattagaggcggggttagatcagttaccttgagagaaggctcagggctctcgaacggcatttggggcacgacaaggttacgggtcgacggcggaggagctgcggcggtgtagagacaggaccgatgagcgtggaccgagagaaacagaggggaagggagtgaaccgaggggtgtcctaggtcgccggtgatggggcaaagctcaccgaggtaatagacacggcgagggctcgacggtgaccgcagaacgagcacagaaccacggcgaatggcagcggagctccatagatgcgcgtgcggtgtgaggtgagtgctggggtgctacgagtgcacgagtgagggaggaggagagcgggtggggcactggatagctagaaaagggccacagtgaggacgggcgcagcctcagcgtgcggcgtgggcgcggagtccaaagcaatgcgcggg

SEQ ID NO: 157043 - DNA, 752 bp, Zea Mays
ccgacttaagtcgtcgccaacttaagccgattgctccgttagtagggtatagtggtcaccctaagtcgaataaccgtgctgatttcaagtccaatccaatcgaagtaagctgaaagtcaagagtttgaacgcctttgaaaacgaaaactttattgatgatgaagtccccaaattacagagtacaatgtttctttgagaatttttgaggcgtcgctagggatagaactttctgaggtgctctatgttccatgagttccccacttccgtgccatccatttgagtaagccggtatgatcctgaccgagtgacctctgatacgatgaatggtccttcccatagtggtgacagcttgtgccgtccttccctagttagaattcggcgaaggaccaagtctcccactgcaaaggaccagtgtcgcacgactttatcatgatagcgcctcaaggtctgctggtacctagccgactgaattactgtgttcaatagttcttcctccaacacatcaatatcttctagcctggtagcttctggttcagctatgctttcgaaagtcaacctcgacgccccaaatattaggtcagcggacagcactacctctgacccataaaccatgaagaatggggtatttccatgcagagctcgactgagttgagttcttaggctccaaaccacgtatgacagccctttgatccattttcctgcaagcttttcattcttgtcaaatactttcttcctgagtgcttccagtatca

SEQ ID NO: 157044 - DNA, 492 bp, Zea Mays
attatagcgtagaaacatatagacaaggatttatatggactgtttggtttagcttttttcgggggagctttcgtagggagaatctgacggtggaaaatatctgactatcgtggatattacgtgcagagaaagataattaaaagagtccatacgatttaaaatgtagaaagtgacggtttcacaacgactcacccgattctgtgtttacgttgatttttggaagattttgacattagtgatttttataaaagcgggctgaaaacttacgcgtttgccagtttacaacagcttctggtgggcagaagatgaaaaaaagaaaacacaaacagggcgatattccaatgactctacttggcttgggtatagaacaacggaaaacatgtacatttgggctaccaataagaaatgggcacattggatgaactactagtagtaggcacgtgccactctattgcactgttgcacccccttcgatttttcatgaaaggccgt

SEQ ID NO: 157045 - DNA, 1070 bp, Zea Mays
ctctgttcctaacaagaatcgagagataatcgggtgggatcatggccggttcaggcgactgaaatagatgagccatggtacagtgttttggatggatcagaacgccagctcagctcgccgtcgttgatcaccgtccggaatcgtgcagggtgttgggtggataacaccgggaaaaaggtagctcgtacgtggcaccctctccgtgctcggccgaagttactcaccagcggccgccgtgactcagtggattccgccgcagtggcactcatgccatagttctccctcactgtatctctttccgacgtggtaagcatgtgcgtgtgttactctccgtggccgggggccatccgttgggccgccgtgcctataaattgagcagggggtcacggcgaggtgctcgctgatcttcaagtgagctcagatacaaccagaaattcacactatcctctccaccttctctcaaatcgattgcgcacggtgaaagcccagtcccttatgatcctatagcctcaatccccacccctaatttcatccagagacgttgaattgccactttccccaattcagtccgccgcgccacccaaaacagcccgcccgtggccagcgtactctggtaagtcattgtccaatccttgcgtcgttctagtgttcttgcatactcgcgaagctcacggtggcgaccgtttgctctgatcgaccgtggtttggcgagaacatgtactcccgttctcggttcccgccgtgcacgtggaccggctgttctcggggtgctagagttaaattagtgggtgttccgaggccgtcttaggtcggtaaagcctccccgataatcggcttgagcaatcatcgccggtcatggtcggtatgtgcctcggcaggcgtgaacgatgagcgcgccgcggtcgaggactagtttggagaagaaatagaaagtcgggggcgtttctgtgaagtgtcagcgactattttaaatagggtttggagttcttcaggttattcaatactgcaggggtctgttcgcaaaatcgccggagcgcgtgggcgcgcgcatttcttctggtcgtgggccg

SEQ ID NO: 157046 - DNA, 422 bp, Zea Mays
gcagagttcaagcaatcgttcagggaacattacattcccgatggtgttctgcagatgaaactggaagagcttgttcatttaaagcaaggaggagactcggtgatgcaataccttgccaaatttaatcatctgtcccagtatgttatagagcaagttgacacggacctaaaaaagaagaattgtttcatgagaggtctgaatgatcgactacagcggaagatggccacttgtctatatctcacttatagcagggtcgtgagcacaacacttttggtggaggccaagaatttggggcagggaaagacaaaaagatttgggcgtgaagggggtgaaggatcctcttaaggatccgagatgcggtcgaggttggtgatccgtccctttaacccaaatcgcttttttcctcgtccacccgcctatcc

SEQ ID NO: 157047 - DNA, 541 bp, Zea Mays
ttttctttcccggccactgcttgcgagcgctataaattgagcccgcggctagcttcgcaacatcatcacgcaccaccacacccagtattgctcccagccgatcaccagcgagctcaaattttgcattctccccaacccggttcaaatacaccatgaagctaacctcgccgtggccagccgtccacaggtcagtccatgtcctctgcttccccgtttaagtgctctcatatgtctacgatgcttgccgacccacgcaattgcactaggaaccctctgatcgccaggaacacactcctctgtctgcaatgttcacggtcaccgtggccagagctaattagttagtcgttgatgaaattaggttaggggaatggatcggggagggttccattgggtgttagtcgctcggggaccctagtcgttgccccattcggccggtcctggagctcgccggagctcggccgcgctcgacgccgtcgtggacccagcgcggtaaagaattagaaaccggagggtttatgtgcaaaccgtcagcgactctgtg

SEQ ID NO: 157048 - DNA, 947 bp, Zea Mays
gccgagggggactactactaggggagagagacaaagagtgagccgccgccaccgcctgggcctccactccatgggccatggcccagacgaccccaaatatgctcctatacgttgacaagtggatgaatgactcagggaccgacaagccaacgcattaccatcgagacattacaaaagtctggggggctggcttaagtagacatgtgaatcaggctgcaagttacaagccccatgggcagctaagctgcctgctaagctaccctattacgtaatctagagcagacagactgaacaatgcacagaattagatagtaacataaacgagaaaccatttgggcttcggtccacacctccatcgagcagctagtcccaaggttgttgcattgcatctgtctccaaacttgttcttggcatgccaagttgcgccacccattccagactcatttggacagccaaggtttccagcttgcggagcacctaaaacccggcgcaaagttccctgcccccaacttcaagagattcaccatctgctatcatcaatcaatttcctcacatgattccttccttttcctgtctgaagcatacgcatggaagaacgtgctccggccctcttttggttagccatgaggtacggaatcacatgttcctgacatgttctccgggttcacctattcctgacatatgcttgttctcctcctataattttctagctccctctttacctcacctatcctcttctctaaatctcccaagaacattgttgtcccatctctatagctctccgagcacctttttatggatttccatcatactcacctcacccagtcactctcccttaaaggttgaaactcccatccatgcctactcagctcgggcggcacactcttcctcatctaaccacattgcttcaaacttgcgcaccaccatccctggttgctcacaccatt

SEQ ID NO: 157049 - DNA, 833 bp, Zea Mays
tcagacttaacaagttcagcagtaacattaccttccttcacggttatgaatgcagttacaccatccgaccttggaataacaccctttgcacccccaagtatgaatctggaagaaaccagactcaccacctgcaaaaccacatagagctgcctgcggcttcggtccgttaaacaccgggcactcctcggggacatgattgtcttcgcaaatttcacaacaaagttcatcccgtcgtttcttccccttgtcagcaacgccggatgtaacgtctgcaacctgtttacaagccggctcggtctgcataccactactgtgagctacaatcaccctggcatcagagccgaacgacccaccatacgtgtgaaaccggttgccgcggcgacgccatgaaccacgccctcgaacttcccagttttcccgaccacgggacgaccaactgtcaagacccgaggaacgaccacgtacctgctggcgtcggcgatccatcactctccagccctcaggatcagtttcctccttagccatgtcactagagttgatggccgacttgaggacgtcggcgtacgttttgagaacaggaaatggcggctggtgatagaatggcgagagaacagggttcccaggttttggcgtactaaaaactttctgacggagtaaatgaaggccaggattacggctggcccagcagagagtggctgacgccagaaaacactgcgaacccgtttccttctgcgggctcaattcttgcgctggtgtctggcccacagagtaagaaggctggtacacaacacgcgaacgtgatccctcagtaaagtcgtccagcacacatggcg

SEQ ID NO: 157050 - DNA, 616 bp, Zea Mays
gtccaaagcccatttggctaggggtgtcctagggcctagggcatgtggcgtgcctggacccccattgcggatgggaacgtgttgaggcccagggcacctggcgtaccaagaccccattttggtatgtggagtgggcaaacataggaggcctctcaggaggctccttactccagtgagaaccctaggacacatggcgctgtcggacccaccagggataggggccgcctaggacacgtggtgcaactggaccctacagacaacttattgcggtgggcgtatacatgataggcgcttgatgaatgcatctgtagcaggttgcctccctctcgacgatgtggtaggagtctcagacacaaatttcttatgggtcttcttgatatgacccaccatggtggtggtgtctatcgcttgtacttcccacaggtcggtttgatgtagtgcacatggtacctgtaccaataggagtgttggtctagtccctaacattgaacaatcacatgctataatggcactcaaatgccctaaacatcattgagaagttgtgaaagcactttctacaaagatccccaactctcggcattgtgctccatagagtcatttttctttagcattgact

SEQ ID NO: 157051 - DNA, 490 bp, Zea Mays
gcaagaaaatgtgtggtggtaacaagaaagtggcggttaagcgaatacaagaccagagtaccgattacgatggcttatatgtggagcttggtggggattaataaacaagggatacaatctaaattctagttgttgttaagttaaataaccatccgactagaagttccctgcctagtgctgaccacaagattcgagtgatggaagtagatcaaacacacgcgcaaagaaatttcagatttgatgcaaatcaaggagtatgattggaatgcaagtgttgcgatcaaacccaaccaaaattttgcaccaaaagacaatagcaaactggttgaacaacttgatgaaatttcagcacttgtgcacataaacaaactgatggttctacttttctttcacaatcttgttcaacacttttctttgatacttttctttcttcttttttttgatactctttttttatagaactaaacacagagatctgatatgatattgc

SEQ ID NO: 157052 - DNA, 1091 bp, Zea Mays
tggggaccaaggagatggcatggctgattgggtgcctattccctgccttgtgggcaggagattgattggctgattgggtgcctattttcctgccttgtggggaggttgggtgcccacctcctcatctctatttagccaggggttgcactccctcttagagttgggttttctttgatagttttagcatcgtgcacacttcttgtactgcagttgtgctcaacggccacctgtggacagcctagtgaaccccaactcgtgagtgattgatattcagttttacatacatcttgttcttgcttgtttctttgatttctcgcaggaatagaacttcatgttcaggttgattttgccaccagcaaggtcaataaccatttggagttggttctatgattgctaaggcaccacgacctgttcgttcgtagtcggatcacgagagtcaccttctctaccaaatcgaaattatccacctcaccgaaagatcggcactccagttctatcaagtggtatcagatttttaggttgctcggtgagttttatcgagttttatccctttagtttgagagtgttcattgtcccaacgtccaccagaaaagctacaaaaaatttgtaggctagaaccttgtcccagaaccatttggccttgcattctctttcagtaatcttgtattattgaatttgtgtgcatttgcatcaagtgttgctggttgcctcgtagttccattgttatcgccgtttttttcattcatacatcccacgtctgttgttcaccaccattcttttttgttcatatgacccacatcttttttttcctccctccttgtttcgttggcacgttgttatccttgctgattggaacgctatggggcgtcggatctggttatcaaaaaaaggaaggaaacaaacaataaaggacaactaaaaaaaggcaaggtacaaaaaaattaaaaaaaaagaaaaagaaagaaggaaagtgaaagaaggcaaccagaaattagcgcgccccatttccttaatcagtattgttgtgttgggcaagccaaaccagcaattagatttgggcgcctaccatcattgtttttggcaagcaggcc

SEQ ID NO: 157053 - DNA, 1324 bp, Zea Mays
cggggtttgtggcagaggagcgacgatggaagggcggggacatggtgaggctattgttaagcccgtggatgtggccgtgtctcccctcctgaccacgatggttggcggcgcgtgctgccacagcagcgttgttctcctccagcgtggcctggcggctcctccgccgcggtccgttcggcgcggccgcccgcgtgcctcgggggtaagtgcctgaactgcctctcctcctcccaccgcgtcgccacctgccgacttccgcctcgctgcctccgctgtcgtgggttccgtcacctggctcgggactgcaagaggccgcgcagggcgtccggcgccggcgccgggctggcgggggctggggcgccgcggaggtttgtgcgcgctcgtcgggtgggttcttccaccccctctggctccaacgcggagggctccactcctccttcgtcacctaagctccctcaccggctggccgacggtagtgcggccacgggcctgctgcccggccaccatctgctgcgcccctccgaggcggtgtgcttcatcgaccgtagcgacggcatatctggcgaggaggactctctggccacctctctgctggtgcgcgctgggaacgggcggcgggacatccccatcgccgaggcgcggcgggccttcttggcgttgcccggggtgcgcgcgggcgacttcgagctcagaccttcccaccccaacaacttcctccttctccctgcttcggcgggcgtccgtgacctgctgctcggtgcccgtcctgtggtggtgcatggtaccacgctggtactccatccatggacgcggctcgcgcacgcagctcgcgtcgagttgttcttcaaggtgaagctggagatcgtggggatccatccccacgcgtggtcgcgtgacaccgcctccatgatcctggctccggcgtgctggatcgagaaggtggacgcggcgtcggccgacaagacggaccagtcgttcttcggcgtcactgcctggacaaacgaccccagcgccatcccccgttctgtttcgctgctcatcgcagagaacgagctgcgggtggtgcattctgacgaggtcctgcatcgcattttcgaccgcctgccctcgtatctgaggaagaaggtgacgctcaagtacggtgttatggtccacctgcgggaggtggaggacctcgctccgagctcctcttcgtcatcttcgtcgccctctccgccgagctccgacgatgacagcggactcggggagaaccccgaccggcgttttctttcctccggtcgcggttggggctctcgacgttggcgctttccctgcagtcgtggag

SEQ ID NO: 157054 - DNA, 344 bp, Zea Mays
gtgatttcattggcacaagagatataatccaagagcacatagcctatagggtgtggccactcgtagataattgggagatgccgaaggatactgctgccgggtccaccgaaggtggattagttcgtttgaaatataccttcaggttcagagatcggtttgatgagccaaatgacgattggctgaaaagcattgaggctactagtgacgagttacttggggcatataccagagcccaagatgatgctttatcctcagccttcagggtcggggcaagaaaagattgaacatggttttttatgcaattggcttcatataccttgattactgctacccattgcgaaggc

SEQ ID NO: 157055 - DNA, 532 bp, Zea Mays
ggggggcaggccgttcggtcgtctgatcttaacggacgactggattagaatcgggcgattactcctaggcgatttgattaagaccgttggatcggatcggacgatcgatacgtgcatcggacatcattaaatcgtaaacgtagatccaggatctgagggcacagagtgaataccggttcgtttgaacagacttctaatcctcatcgtcggatgttgatcggacgactgttagcgcgagataccccttcggcttgcgctttgcaaataggaccctctggttaaatgaaataaacccgccgtccaccgcgggttgaatctgagtctgggatatttttatacattagtccatgtgtttctctgttattggcgcccagtcctgagatcagtaaaacaggaaaaatagattagaaaatagatttttaatataaaaataaatacagaaacttgtttaatccataagaaattcatattaagtccaaattagttcattctgatttctataattctgtaatattattatttatcacatagt

SEQ ID NO: 157056 - DNA, 559 bp, Zea Mays
ttttctccgaagacccagtagagcagcgaagatcgtcagcaccaaggagaaagttgcagggacagtcacattgatgtcatcctaccaagctgtcgcgtgttgccaccttctgttgtctaccaacgcaccaacccaacaggctccaaccttaaagtctcgatgtcggccgagcagccagcgagaaaccacaagaaggctaaggtgaggacacccaaacgaagggtgaggggtccaaggacgatactatcaatagggtaggactggtgtccgcgcgtgtcaccgttgttcgcctgcaagcgggtatgactttcgctgaaggacctcccaccacacgtcaggatccagccggcccacccacaccaccggcgaaagggaagtggagagatggatctggctgaggaggctcaaaatccggtctccagtcaaccgaggagcgtggaccgaagctgaaccagcgaggacgccgccctatggccatgacccaccacttgctgctccgccacgtcgaactcgccattgccagctgcaggtccactgtcaggctaaggcccatgtggcc

SEQ ID NO: 157057 - DNA, 793 bp, Zea Mays
ctgcaagcttttcatttttgtcaaatattttcttcctgagtgcttccagtatcatctcgttggctctttctacttggccattggctcttggatgcgctactgatgcaaaagtcgaagaattcatagctggtgaagttggatcccaggtcgattatgatgctgtttggtattccaaacctgaatattatgtcttgtatgaattccactgccttggctgaggttaaagaggcaatgggcttatactctatccattttgtgaatttgtcaatggcaaccagcacgtgagtatagcctccctgagctttcttgaaaggtccattcatgtccagccccaagcatgcaaatggccatgttataggaatggtctgcaactgatgtgtagacaaatgttgttgctttgataagaattggcaagcttcacatttctggactaactcggcagcgtcactcttcgctgttggccaatgaaaaccttcccaaccagagttctggatgctgcatgtactctgcactgcccggcatggatttcatctaacagttgcttcccaatagccgagtgaatacacttcatgaggactcccgtcgcacctcttctgtacagtgtgccccctatgagggtgtagtgggctgactgtcttgcgatgcgctccgctgctgctttgtcatccggttcttctttgttttttacgtacctgatgataggctctctccagtcattggggtccgagtcttgttggctcaaggtgttgcactcttccgtctgatccgagagaatgctcgggtgtgatatttc

SEQ ID NO: 157058 - DNA, 430 bp, Zea Mays
tgacatcatatgctatttataggttatttgatctttcatctgatttagaataaccagagcaggaattttatttgcagccaattctacctaggaaatgtcaaaatgctttagcgatttatccagtggcttttttcttatgagagtgatcatctatgggatagattttcgcttttcatcttattcagtgatggttcaatttttgtgctctgtccagttgttctatttggaagtgactatagcaagaaacatattcaagaaatatatgaagatgttaatgcatttggattgaaatcttcaaatccaaatgttgtcactaattcatatttggtcaaaagctaatgcatatgcatcattagatgattctctgacattataggggcctctttgtagagtttgtgaggacaataatgaatctgaaggcaagagcagc

SEQ ID NO: 157059 - DNA, 571 bp, Zea Mays
tgcctcgttagaaaaaaacagatgactttcatcataaggccttattctgagcatagccaacataaatcaaaatgggcataatttttcttacatgtatttctgcatgtggttgttcaacttatatggttcttaagaccctaacactgagtaaataagtcggaagtgcttatttgttcaacttatgtaagtgtttgttcagtttgaggatacgggcagtgtctggctattggctaaagccagaccatgttacattcattagtgtactcaccgcgtactcacacacgcaggggaagttgagatcaaactaagatacctcaatgcaacgaacaaaagctgcaggttggagcctaaaaatgagtactacagttgtgttgttgatttgttgggcagaaatgttaagttttccggtgcttctaggcccatcagtcactaaaccaatagaatctaagcagaccttccttcttgcaactggtatttgctgagctgaaatggtccgccatatccatgatcagttggatttagaatctgaagtggagctaaacagctaactgagtaatctcggaaggagcac

SEQ ID NO: 157060 - DNA, 438 bp, Zea Mays
taaaatctggaggtaaactgtgagcctctattagaaacgatcttctttggtacaccatgtaaacacacaatccgagccatgtataactctgccaactgagaacctttataagtagtcttgaccggaatgaagtgagccactttggtcagtctatccacaatcacccatatcgaatcgtaccatttcggggtgcgaggcaacccgacaatgaaatccatgccaatttcttcccatttacattcgagtatctttaataggtgcagtagtccagctggactttgatgttcagctttgactctttgacacacatcacacatagccacgtgtgcaaccacatctctttttagcccataccaccactacttctgcttcaaatcctgatacatcttagtgctccctggatgaatagagtaatcagagtcatgggcttccttaagt

SEQ ID NO: 157061 - DNA, 923 bp, Zea Mays
atgtaaagccgatttggactcctgcgtaccttggcaagaaggagacgagaggggtcccagatcctcatgactctgtgctcgaccttcacgcgcgaaccgttctcatccagctgtcccaagctgatgacagagttcctcaacacggggatgtagtagactccggtgagcagcctctgctcactagacggtgaagacgacagagctggcacccttgatctctacgccagaggcgtccccaaacttgacggagcctcggacgctagagtcaagctcggtgaagaactcccgtcggccggtcatgtgatgaatggcgccggtgtcgaggcaccatccttcgatcatgtctttgctggagccgtcgccgaggaaagcgtgtgcttttgactcatcaaggtggaggagtgccgttgtggccggtgccgctggagatagctcgatgcttgcatgtgctaggagtagagcctcctcctccgcctccgcctgtgtgacgttgacctgaccacatcgtggctgtcgatagtccctggcccaatagccaagcttgccacagttgtgacagtcgtcatctcgtgtcggtttcttgttgctaacggcgccgctttggacacctccacgagcaccaccctcagcatgtcctcgcgccctggcctgggtgcctccacgtgccttgcgcggcttgccacatttgtggcctcgtgtcgaggaggactccccttcttcttgtcaccctgggaggcctcccactgctcccgagtgagatgtagcttcccgccgatagtgataggcccagagggagcctgtggttcatcgccgtcgaccaccttaagacgacctatcgcctctttgattgtcatcgtggagaggtctagcagagactcgatcgagcgagcaatctgcttgtacttctcggggatgcaacggaa

SEQ ID NO: 157062 - DNA, 286 bp, Zea Mays
ggcttagaaaaatcaggcaagcttaacactggagctgaactaagcagctgtttgagtgttgaaaatgccagctcatgatcagatgtccatacatataatgtcccttttttgagtaagtcagtcaagggcttggcaatgactgcaaaatggcgcacaaatctcctatagtaaccagcaagaccgaggaaactccttaattccttcacattagttggacttggccagtgcagaatggcgtcaaccttggaagggtcagtggccaccccttcttcactaatgacatgcc

SEQ ID NO: 157063 - DNA, 331 bp, Zea Mays
agcaatagtaccgccagaacagtcaactgggagggagtcagttccagggacagaataatcaggcacctcgtcttcctgccctagcaaccaaacagagcagtcaagcagccccagtgcaaggagaaggcagaggatgtttccattgtggagagcagcgccattggacgatgcattatccaaagaagatggctcaacagtagccaacccccaatgccctagcaagacagaatgcacctcaacagggagcaggcaatcgtgttcagatgcgctacaaccatgggagtctgagccatctggaggccgaagcagtccaggaaacaccagacatgat

SEQ ID NO: 157064 - DNA, 392 bp, Zea Mays
gggtgaaaactgtcagacctctgaatatccaaagcttcgctagcttctgggaggggcgctaccaccggtgtttcagcacgggccgcatcagaggaatcttcagctaacatatccagcatggcacttatctctacatcactgggattcaaaggcacctcaaaatgaacctgcctctcgtcgtcaggaatttcttccagtgaggcaaccaaagcattaacttcttcgggagagggtcgcactctaaggcccaaaccgctatcaccggcaggaggattcgacacaaaactggtaaaggccttggaaggaggcagattccaggctgagtacgcaacaggagcaccaatgttcgacaccttgcctctgagtatcatttcgagccggctcaccaagtc

SEQ ID NO: 157065 - DNA, 353 bp, Zea Mays
ttagaacaccagcgtaccccttcgctaatttcatctcggcggtaggatggtgatccgagggatgggagcggatactagcgtggttggatctcggacgttggcctcgaatccgacggttgcggtcgattactggttcacttaaagcgccttctaatcgcgactctcggtgtgtgatccaacggcccagatcctagcgtaccccttcggccgtgactttttactaaagagaccctgaactatgcagaaaacaacctgcagtccactcgggtgttcccctgagtctggagaattcttacccgagaccccctggtgtctcctggaattgaggcccagtccagagaatttggaaaatc

SEQ ID NO: 157066 - DNA, 345 bp, Zea Mays
gaagaggtggcgtgcggaagccgaagggtgtagaggggtccggtgctgtcacatatgaggagggggcgccgagttgctgagtccttcacagtaagaccagaagagtcaaactcgacagaacaagaattatcaacggtaaaacgacgaatagaaagaagattgtggaccaaagaaggagcgacaagaacatcgggaatgcgaaaagagccgggagggccggcggcacccacagatgtgacaggaagacacgagccatttgccaccatgatggacgaagggagagaggaaggagggcgaacagaggtgagtataccagggtcgggagtggtgtggtaggtagcaccg

SEQ ID NO: 157067 - DNA, 393 bp, Zea Mays
tgtatgggtgaaagtacaaggtcagtcagatgacttttttcttaggccaaccagatgatgtagacaaacaaacttggcatcctcgcacactgaaaaattccattgaatatgcactgcataagtacatatcaccatgaatatcaatgagtttacactaaaagttagtttacaaaagcatcgatacactgaagactacggactagcaatacctagatgtctataatgtgctacaaagttacctcaggtggcgcaaaggaaaggtagctcaagtagtgctcctgagtaggtttcttgtacccaggggtttcaaacgaaacatcaatcatttcaggatttgcaagagctggatatccatctacatatgggatgtcaactgaaagtggtatgggtgac

SEQ ID NO: 157068 - DNA, 535 bp, Zea Mays
tcactacctggagaacgtttcccctaacttaattgcacaattaaccaactaccgagctctggccacggtggccgtgagcatcgcggcaagacagtcgcgttcccggcgacccaaagggctcctagctcaattgtgtgggtcggcaagcatcacagacgcataagaatgcttaaacaagggagcagaggggaagagctaaccggagttgggctgaccatggcggggttgagttcacggtgttttagaaccggattgggggagaatccgaaattcgtgcttgctagtgagggatttgagatgcaggtgggtgcagtaggtgcttggatacatggcggagctgggggcacggtcaatttatagagcccgcgagcggtggtgaccaatttggtcgagccgtgctggcggccggagatgaagaagaaggcggcgcagtgaattcgtggctaacgccgtggcaagctcaccggtgttgacaagacagtggtaggaagtcacggcgacacgatggcgcggttaagacacgcggcgcaaggcc

SEQ ID NO: 157069 - DNA, 382 bp, Zea Mays
ctttactcttctttttctcgaatgtggacaccaattttggtagagggaatttagatttctttgattgtcgtgaatcccttgatggctgtggagaaggtggtggtgtcctaaatgttgatgcttgtggcggagacggtggattagaaagaggatgaggagcatcatgggaagattgtggaggtgatgatggatgtaaaggtactaaagtttgaggaggcagagatggttggggatgagacgacgacggcattggtggatcaaccaattcgacttcccttcgaggccaaaggatgaaatttttgatggcttgtccaagtgtctcgattccttcgggcccagggatgtctagcatgtcgtcctcagatccttggacgaccgtcat

SEQ ID NO: 157070 - DNA, 452 bp, Zea Mays
gctgtggctgccggttggtgcggcaaaacagcaagaacaacgacgtcacgaacatagcttgagcatggtgcagaggggggctgcgccagcgaggttgacgaccagttaggtagctcgtcgagcacctagcggagcgcgtcactgcgcgggacagcaggggaaaactcggctgtaagggccggctatggaatggacaaggagatggagcttgatgatgcgtgcatagcgaagtttgccgagcgcgtgctacagggaacggcgacgtccagatggggctgcgcaacacatcgagcacccggcgggcatcacggcttgctgtccattgcgcagcaccccacctagacatttcgccgaatgcttggcacacgcgcagtggtggcaatgagacgaagcaagggaaagtccccggggctgcaagggaatcccggcggcgaggggatgcgctgtcccgg

SEQ ID NO: 157071 - DNA, 779 bp, Zea Mays
ccctggccacggtgcactcgtcgtccatcaccgacgcggcccgtactggccatgatcggcggtggctgtctaaaatagctacggggtgaacattcccgacctaaggcgacccaagaacaatcttcaattttggctggcacacttagagagtgttctacccacgcacacggcggaacccgtgacgtcgagcccgcgttcccgttcaatcatgcctgaattggtccaacggcggccacgacgagcttcaggggtacacagagctactaaaacaacattcaaaaagtgcatagccatacccgagtggctcggtcacggagcgcggagaacttgtcctcgccggtgacagagaaagggaaaaatggtgccgcaacggctctgggcggaattgggaggtgagattgaggctcggccgtaaggaactgtagtttcatcgtgcacactcaatttgggaagagggtgtagaggcagtgcaaattttaggcttcgatcaaactcactggtggagatgtgaataccccgtcgtggatcatggtgctatttatagccacggcggtccggctaacgatcagcaaccgtggaaggctttgttcacgcatggcaaccatgtatagaagaggtacagtaagggagatcgaggcatgggtgacaccgcggcggaaatgatcaagccccggtgaccgccggtgggatatctccggccacgcacgactgagctcgcgggatggtgccacgtccaaagtttacttctccgcgatcaaatcctcaccgattcatccgag

SEQ ID NO: 157072 - DNA, 327 bp, Zea Mays
cgaagccgcgccgacgctggcctgtgcctggagcagcagcacgaggaaggaaaacagcagctggagccgtccagagccctggcgaagccgccgccgcgcacccatggcaacgggagcgcctcctcccggagaatagcaacccgggaaccaggcgccagttcgctacccaccgtcgctggccgagcctctgcctctcaggttcccaatgccttggaggacgagacgggaccaccgctgcgttcaacgaccgggcacggaaatgttgggtcggcttggagatccgttgcctgtcccctgcatcgccatcacgccggggagaacagacgc

SEQ ID NO: 157073 - DNA, 843 bp, Zea Mays
acaaattcacagaacttgctcgctatgcacctgatgatgtcagcacggaagccaagaagatggcccatttcttgaaggggttgagaccagaactcaagaccatcctcgccagccaagacttcctcagtttcttgcacctctcgaacaaggccatccagttggaaagagcacgagaagaagaaaaaggtcacctcaagagaaagtttcaagttcttcgagctcagcagcaggacatgcaccagtgagtttgatcttttgggttccctcccaaagggtcaaacttcagcaagccaacagggtctgctccgtcacatttcaaccagtctggtcaaagttccctccacaccccatctgttgcaagcagccaacctccaaccaatgcttgttggcattgtggagaccccagtcacttcaagaataattgtccgcagttgaagacatctgtatctgcctactccaactcggtgaatggccccaagaatgtttcaacacccgcctccaaggcaccctccaccaacagccagttaagcaagacctagtttcacggtagggctcgagtgaaccacgtcgacacccaagaagctcagcaagcccctggagtagtgctccgtgagttcctagtcgaatttacccctgctgctgtactttttgattctggagcatcccattctttcatcgccactagttttgtggaaaagcatggcatccccactgcatctttagaaatccccttgatcacccaaaccccagggtcagaccttctatgccacctcaaatgctcccaagtcagaattcttttaagtggggtagtattcttggcggacttagtcgtactaccatccc

SEQ ID NO: 157074 - DNA, 1461 bp, Zea Mays
cactaccaccccggaaaggccaacgtagtagcagacgccctcagccgaaaacccttcggggttaagggagcaaactttctggaagattggaagaaagaatcagctcagctaaatgcatgtctgggagacaacagtggcctggaagtcaagccaaatctagaagatctcatgtgcaaggcccaacgcctggacgcagcaacaaccaagcttatggaaagagcacgaaaggagcaacttccggacctcaggacagataagcaaggagccctctggttcaaggatcgcctgtgcgtgccagtaggagaaacacgagaaaccctgctcgatgaagcccacaactcagcttactctatccacccagggaccaccaaaatgtacttagaccttaagaccagatattggtggaaagggatgaaaagggaaatagcacagtatgtggcccgatgtgacacctgtcagcgaacaaaggccgaacatcagaagcctgcaggcctacttcaacccctcccaatacccgaatggaagtgggaagaaataggcatggatttcgtaaccggactgcccagatcacaaagaggaaatgattccatatgggtaataatcgatcgtctcaccaaggtggcccatttcattccagtaaagaccacttttggaggagcagcccttgcccgaatataccttaaagagatagtcaggctacatggcattccacggaagatagtatcagatagaggaacgcagttcacttcaaaattttggaagggccttcagcaagcaataggcaccaagctagatttcagcactgcttatcacccccagtcagatggtcaaacagaaagagtcaacaaggtccttgaagatttactcagagcctgcgtgttagccttcgatggagattgggagtctagtttgccgtacgccgaattctcatacaacaacagccatcaggccagcatcaaaatgtcaccattcgaagcactgtatggaagaaaatgccagactcccctaatgtggtccaatgtaggggaaaggacactagaaggacccgacttcgttaaagaagccgaagaaaaagttgctttgatccgcagaaggttacttgaagctcagagtcgacagaagagttacgcagacaataggcgaagggaactcagatttgaggaaggagattttgtttatctcaaggtttccccaatgcgtggtgtcaaaagattccagatgaaaggaaagctagcaccccgtttcgtcggtccttaccctgtcatttcccgaataggacccgtggcataccgtcttgagctaccagaatccatgtcggatattcacaatgtgttccatgtgtctcaactccgcaaatgcctaaaagtaccagaaacccgtatcgaggcagaagcaattcagattcaaaaggatctccagtaccgggaaaagccagtgaagattcttgactcagcagtcaga

SEQ ID NO: 157075 - DNA, 669 bp, Zea Mays
caggatcacacccattgggatccacagcagtcgggtcacacccattggggtcagcttcagcaaattcaggcactggcacttccttagtagcaggaacagaaggatcggcatcctgatccaagctagacactcgacgaagacgtcctcttcttctttttcttcccctcagcaggacaagtgggctgattgtctcggcgagaacgcttcgggcgaaaactgtcagacctctgagcatccaaagctttgccggcctcagggatgaacaccaccaccagtgtttcagcaggagcggcatcagaagaatcctcagctaacatatccagaatggcacttatctctgcgtcacttggattcaaaggcacctcaaaatgaacctgcctctcgtcgtcaggaatttcgtcgagtgaggcaaccaaagcactaacttcttcggtagagggtcgcactctaaggcccaaaccgctatcaccagtaggaggatttgacacgaaactggtaaaggccttggaaggaggcagattccaggccgagcatgcaacaggagctccgatgttcgacaccttgcctctgagtatcatctcgagccggctcaccaagtccacaacaggaattcttctattggttacccgggttgaatcagccaggcctcgatacagataggccggatat

SEQ ID NO: 157076 - DNA, 634 bp, Zea Mays
cgaaggatgagtgaaaagaacaatggtgcaagcaggctatttatagaggctgggagtgaccgtccacttcctaccacgcttgctgaacagtctcacgtattcaataagtaattcaagccgcttgaaaatgagtcaggcaatagacaccgcttcgcgtaacacggcaccgtttggaccaaggtcaactgctcgggcgatatgattacaccccacggtcacatcaagttactactccaggacagtgtgctaaacgctctgcgtaccaagacaccccttgggcacacccattgggtgtgtagccaggaatttaaaaagattttttgaagaagtcatatccatacaatatacacaatgaatgtaccaagacaaaaggaggagatcggctgaggagggaggaagtccaaatatatctactgaaccacaagtccaatcagcagatgcattgaagcacagagcggggtgatatccagctgagagccatctgccagacgtccaatccgtcaccgatcaaataaatttcagacctaacaaggtatggacagatagcattatttgaatttgcaagaacatgggatgaaggcaaaatgctgatttctaaagcataagatgatgatagaatgctgatttctaaagc

SEQ ID NO: 157077 - DNA, 447 bp, Zea Mays
tctgcctagcccagctatgcgcgaagcgcagcccagctctctcgcgcccatccgcgcgcgcatcctctcctgccctctctctgtcgcatggggctggcatggcctgaaccgctgatgggtgggcccgccatgtcggattcatcatgtccgtggagatccttgcgagcaccatagaacccgccaacaacccctcatcgatctccgaccattgcaggcggatcttgtgccgaagccgtgggttttcggttgctatcgatcggaatttgcctgcccttttctccgtgctacataatcccagagcttcccccaacagcctctcccatggctgggcgggcgtcgttcatccacggtgggggctccctgccagggctgcacgaccagctctccctgttccccagggcgagctccctccaacggccaagtccctccgtcgcgccccgctcctcg

SEQ ID NO: 157078 - DNA, 614 bp, Zea Mays
gtcacggcgaaggggtacggttaactctcgaccgttggatctgttttcaagggacaagattagatcggtgtattatgcgaaccggtattcaatccgggccgcaggattcacgatcaacgacccatattttaagtaatcacgactgccccagggccatccgatcaaaatcaacggatccgattccatgtacgaagcgttattctctcttctaatctcgaacgtccgctccacgatcaacggcccccatcgtttcacccaatcccgccccaaacacggcggcgccgcccagtggccgcggcgagccatcgccggaggagttcaattcgggtgattccgtaccccaatcgcaacaataattggtgctacacaatccttgcgacgtgacgactacttgggtggagtactcaccggcgataatgttgtggcgaaggctgtccacggtgaggggcggcttcacggcggacggtaaagatcggcgagcaattcccccggtttccccggcttatgagcccgatgaaccgcgccaacacgatcctggcatgatggcaaggcccccccgacctttatccgaccaccgaccgccagcgaaggtggaagtcgagtgcggcggccac

SEQ ID NO: 157079 - DNA, 623 bp, Zea Mays
agctagttagctctgatattagaggacttagcatcgtgaaaggcaagggttcagtcattacctctggaatttctatcacgctaatagaggttatcgaaggggtctctgctgaatgcttcggcagagaaggtccttcttctccatggctagatggcacagtcctccttttctttgatggcgaaggttttggtgtcaactttggattctttgttatccttttcttctcgtccttctcaacaaatctttgcgcttgcctttttaaaatgctcaaaacccttttcttttttactcccccggctccttcgtcaagtctctcatagtcaggatactcgaagccaagggcatccatcacccgattcagccttcatttttctcgtgtgccgaaggcagtggtcattagttggtcttctttcatagtataattctcgaggatttcgttacacgttgtgtcgatgacctccaaccattcagcacatggtttgctaaagctcttctgaaatttaatacggtatggaagccgtaaaagttcatattcattcccttcttctttcttcttcggcagtgctcatccactcgacgtcgggaaagttttatacgcaagatattcatggaccagatctcga

SEQ ID NO: 157080 - DNA, 330 bp, Zea Mays
gacctcattcagagctcgataatcgatacacatccttttggtgccatctttcttctccacaaataggataggggcggcccaaggcgaggtgcttggccggatgtaacctttcactgacagctcatcaatctgtttcttaagttcaaccaactctggtccgaatattctgtaagctctcttaaagatgggggcggttccaggaagaagctctatagcaaactcaactttctgctctggtggcatacctggtaagtcctttggaaacacgtctgggaactcggacacaaccttgataatctcaattgggtctacttcactgctatcaacagc

SEQ ID NO: 157081 - DNA, 479 bp, Zea Mays
tagggtacgggaccaggctaagcggctacacagctccggaccaccccaggggacgtgtgtccgttctctagaaccgaaccctaggttgctggacccataggactatagttccaaatactagggtaccgtcacagagtggtggagcatgcaggcttagggtacggaaccaagctaaacggctacacagctccagaccaccctaggagacaagtacccgttctctagaactggcccccaggccgccggacccccctaccgaggaatcccaaacttcaagcctggctattcaattcggatgtcattatactggcaagggtgggaactgtatgggtgggttagataaaaaatgatgctcgtaaattgaaaaaataagagcatcacaaaaacaaatctgggggtgactcttttctttataacttgatattcatgagtgtaggccaactgaccgagtttatgagggcagacctcaccgggctggc

SEQ ID NO: 157082 - DNA, 761 bp, Zea Mays
aggagaggggtctgactgtagaggctgtggttgctgattttgtcttcaagaacattcagcctttgaaggacagggcatacccggcctatctgtaccgaggtctagctgactcaactcgggtcactaacagaagaattcccgctgtagacttggtgaaccggcttgaaatgatacttagaggcaaggtatcaaatgttggcgcccctgtcgcatactcggtctggaacctgcctccttccaaggcctttgctcattttgtgtcgaatcctcctgctgctgatggcggtttgggccttagagtgcgaccctctgccgaagaagttagtgctttggttgcttcgcttggagaaattcctgatgatgaacggcatgtccactttgaggtgcctttggatcctagtgatgcagagataagtgctatgcttgatatgttggctgaggactcttctgatgctgctcctgctgggacattggtggtggcgcctctcccagaagctggtacaaccttggatattcagaggcctgtcagtgtttgcccgaaacacccttgccgagccaatcaacttgattctcctgctgatgagcagaaaaagaaaaagagacgtcttcggcgagtatctagcttggatcgggatgttggtccttcggttcctgctgctgaggaagtgcctgtgcctgaatttaccgacgcttaccccaatgggtgtgattcatctgtcgctgatcccaatgggtgtgatccatctgtcgctgatcccaat

SEQ ID NO: 157083 - DNA, 502 bp, Zea Mays
aaattgcaaacacgaaccaatatcgaagctagctcatttgttaaatgtttgtttgtttgtttgttttggtttcctccaacatttcataggcctatcaatttcgaaacacatattactctattggatttgaggattggacaatatatataatagacatcaaagcaataatttttaattatggaaaccaatggtgtgattcatccacaattatccatgcatcattgatctatcatgactgtactccaaagcattcatgcattaagcatcggtgtgttatttacggtgtcacaagagcaatgttgtgtgagatgaaggaaatgaacaagttataggactaacatcatcacaacagctgggtactgaccattacctctattttttctctcaattctctcacaatcaatactatggatcctatgtgtcacaatggacggaactaaaccttaataacttgctctatgcccaatgacaacaatttcaaactcatatatatcgttttgct

SEQ ID NO: 157084 - DNA, 393 bp, Zea Mays
ttctggtacaacacctgctttcattcttcattgggctcttctccattcgaggttctctatggtcgttcgcctcgtcactttggtctgtcggtggatgattcagtggcccatatagacctcaactcttggctgaaccagtgggagctgatgcttcgcgtggtcaaggacaacctgcagcgtgcccagcagaggatgcgcaaccaagctgacaagaaacatgctgaacgggtatttcaggttggtgacaaagtttatttgaaacttcaaccctatgtgcagtcttctgtggccactcgagcaaatcataagctttcctacaagtttttcggcccttatgaagtattgcagaaggttggcgctgtcgcatacaaacttcgtttgccggaatcttcg

SEQ ID NO: 157085 - DNA, 895 bp, Zea Mays
atgaactagaataagcacaagcacaatagacttccgatacttccacacaacttcacattgctttgtccagatggactagaactgacatcatgacccacaaccaaaatagaggccttctctacaaactctagctctcacaactcacaagtattcagatccactttctcaaatgcatctagctactcttcaataacatgcaaagagatgtttcaacgacacgttgaagctgcaaatgtttagatttagccctgctcttaaacttcttatatctatatggttaaactctagatgactgatcatatcctcccctctcttctaattcttttttcttcattgttaagtcatttcaattaataaaattcactgcagggccctcctctacattatttcattttcaaaaataacatgcaaagagacttgaagatgacatctgtactatccccacttctctccacacttgaagcacaacccactcttccttctaaactcattcaaagaggtcaatctatcttcactcagatttgtttgctttcgttgtcacatgttccgattcaactgtctttgatttgtccaccgttggattaaaggcatccttggtgaattcgttcccaaaacactaacgaaccctgcataactcctcttcctgaatcaaagccaaggcactagcaatgtcaacatccctaaagatggatggacctatagagaaaagaacatgcaaatgtgtatatgtagttatgtacacatccacatacatgccccccattactcagtccggtaacaagaggtgatatttgactattcgagggctgacttccaagccttttacaagctgagtttaaatgcttggaagtggtacggtatgtttatgctgtctccaacaacgactcctaaattt

SEQ ID NO: 157086 - DNA, 610 bp, Zea Mays
cggacaagcacttcagccgtccccaacgtagacgaaccaacttccaaggacctcatcgacggagaccatgtcttcgccctgcaggccctcaacaaataccaagctcaaacaaaggcatggcgcgaccaaacagtcgtcccaagagaattcaacgaaggggacctcgtactcgtccggacaactcggacagagtcacggggcaagctggagccaaagtggaatgtcccttcatcgtcaagacgaaggcgtcccccagcgcgtacaggctaacaacgccatccggcgaggacctagagcattcctggaatattgataatctccgtaaattttttgtttgaatccttagggctaacacgcccttgtaattcaccaaacaatatcattccgacccgcactcttttcctcccggggggtgaggtttttaatgaggtggagccatgtaatatacacgcaaaaatcccccacaaaaactaagacaatatgtcgaaaaagaccgcatcgacggtcttcggcattcgaccacaccgaagtcaccacgaggggcagcgctgaccaccctcgtgtgcgacactccgctcaaaagtcgcctaagggtgcagccggaatggca

SEQ ID NO: 157087 - DNA, 293 bp, Zea Mays
caaatcatgttcttatacaaaaaaggaataaagtggattggcacatgtgcgtcgactatacagatctcaacaaacactgtccgaaggatcccttcgaacttcctagaatagatcaggtggtagattcaaccgccggatgttctatactgtcattcttggattgctactcaggataccatcaaatcagcttggcaaaagaagacgaggaaaaaacagcattcattaccccgtttggagctttctactatacctccatgccgttcggcctcaagaacgctggagcgacttaccag

SEQ ID NO: 157088 - DNA, 537 bp, Zea Mays
gctgcggttgggcctgggccgcctgcggcgctggagcttcctgatgctgggcccttgctgcctgctgttgcctctgctgtgctcctgcttgttgctgcggcggcgcttgctgctctgcctgcttccgactcgacgacgaggcggctgcggcggccgatgacgacgacggagacggcccggcctccgctggcgcactggttccttggccaccagcaggcccgtcgggaccaggctccatggccagcagctctccgatccctgcctgttcctggtacctgctgtttaagtgtagcggtgtaggtgagatcagagagcgatgctaccgcctacccggcatagggaatcaagctactacggacgatgggggaagaaggtagaagaaagcaggaagaaagaatgaaacaagcggctagctggttggcagtgtagcatcctttacggcttttgtcgctggttgggttaatagcgtctccactacacgctgtcgacggcttaatcgtaatcattttcatttgtttatttattactgtttttttt

SEQ ID NO: 157089 - DNA, 685 bp, Zea Mays
ccttaaattgtgattcacaaataagtgtattttgtgtagtgtggattgattgtgagtgcatgtgtcgcaagaaaagaattagtgcgcatataggcgatgaatgagtgtgatgaaatagtgacatgccttcgtagtcatcatgtcgtcggttggtgacctaactgaaggtcgtagagaaaggtcgattgtttgtgtgttattattgtcaccttgtggatctgtatgatttgcaacgtgaagtagtaggctctgcatgtgatgctagatgtctaggtagacattctcgaattgtggtgctcggaccgtcgagatgaaggttaagtcggtcgatgccgattaagtagttaaattgattaagggaataatcatggggttaaactagaaactagtgttctcgcacccgttcgggatgttgtagtctaaatgcgtatgtttatgatcgtggatgaaaagtagtagtgctcaggtgatgtctaaattaaaatgcaaactattggtgaaaagcgcttcgatattgattgttatagataatgcattgttaattgagtatggtacttttagtgcgcaaaataacttgtataaaaattagtaagtctacatgttagttctcacttagttattttaactctaacaattgtcaaaatgttagaatgatttaagtcgctagaacatgtcaattcttgaa

SEQ ID NO: 157090 - DNA, 967 bp, Zea Mays
agtatcgcaagcgcatgtcgaccacgtcggtagaaggtacagtgagtgagattatggcatgagcgccatcgcggcaaaagttaccgatcatggtggccgccggtgaggtctccggctggactcagggagtagtgccacgtatgcactgtttaactctgactctatccgtttcttatcgcgcgtgaatccggacggaggcggcgcgaatcttcgtgcagggaggtcaccggcggtgagcacgcagcgctggcaatctgatccacagcagagcactgtaccatggcgaactgcattcagagcgcctgacagtcagcatttaggctcgattttctcacaactctatatggtaacatactccatgctctgcagcaaagttggagagctacaaattagctacaagtttgtcataacagccatgggcagattcttgctggaacatagttgaatgtatgctcaaagtctcagtggttgcactctctatctgaaaattcagacccagtaacctgacagtccaacttcagtcttaattatctctaaattcttctcaacaactatgcttacactcttaagcaaagttgttctcctttgtttggtctacaactttgatgtggttccctagggcaaaaaccctagaatttgaaagatacaaagctccaaagttgagccctcaacactgaatttcagacttagtatagaactcaattgaggtccattttgcaattaagtccaaaatccaatatttggcttacaagtacacacatttgtgaaccaaatgactttacatgctttaacattgtagtttttgcactttagtccaaatgtgcactgtttttgcacataggcccctagggtttggatttaggattttccagggtttcaatttgggtttttggtatctcaggggtacaaatgtaattcaagtccattcttgggagcattttataactattcccctaaagcttttagg

SEQ ID NO: 157091 - DNA, 516 bp, Zea Mays
ctcgaagggagaggttcaaccgtggtagaaggagagggtgacgattgattggctgcgatcaccagatcgttgattggctgcttttcttttttggcggcacaggactgtccggtgggggtatgatactgtccgatgacccagttgaccgttggcgcctgccgatgtggccaaagtagccgttggacacctgtcaccggtctgtccggcggtgatgcctggactgtccaatgatttttagccgaagaggccgatgctaaggaggttgggcaatacagccacctagctgtcaggtgcacaccggatagtccgattggtggcaccatacagtccggtgctgcccatactagcccattttcttctcttttgtgccaaacttctttagctccttttgacttgacttgagaggttccctagcatttagacaaacataattagcacataaaataattgactaagtacgtgttagaaccataccttttccatccaatttcttcagaatttgcaatatgcctaaac

SEQ ID NO: 157092 - DNA, 755 bp, Zea Mays
taggactgtgcgggagtcatcttttgagggacacggagagaagatttactggacaaatatgagtaaattggggaaaattaggtgtttctcagtctatattttttattgcgcctaatatttagttatataccttcaacacgtttcatcaggattggaattagatatattgctgcgatgtgtgatagatcatcagcgaggcaagatactcggtggaggacatttcaggagctgtttatgttagttggtccaacaacatcgctcggaccagagaaaaaatgtctgtgtttttatggacgccctttcaggtttatgcatgcctaattcatatgagaatgttggggcattacacttgtgatgtaaacaatctgtgacttttgtttagttttcaggtaatcaaccaattatagtatgtggtcctggagttcatagttttgctacttttctggcgcgacgatgtggctaaggcgatgacagagcctagaacggattggtcgtcctgctctgtgtcagaagttatgtgaattttctgcctcttagcgctagacagatgcttttcttcatttttccaactccttgccattgatttctactgttgtttgtttattttagtgcagcaacggagcctatgaagaagccctattttctgctgctgtttgccaactccaagcagatcgcccacttaagaagcccaccctcctcgctatagaaggtatgtgtttagcatatatgaaatgttgttctgttgtctgtgtctg

SEQ ID NO: 157093 - DNA, 795 bp, Zea Mays
cgtctacataacagtgcgtgcacgccacctgatgccctacgatgggacgcctaatacgacaagctgaacggacaagcctttgggcgcaatctctttgcctcgcccgaagtatgatctagcccgcgggcacaatctctccgcctcgcccgaccctgggtccagccttcgggtcatttctctgcttcgcctgacgacatgctcagccctcgagcgaattctctgccccgcccgagctcgacctcggccaccgactacgccgcgaatcccgcagacagccactccgcccgactgtagcgcacgtcgagggacgactcggctaacgcctcggaaagatttctgcatcaaccaagcaggggctctgatctcgatgagtgcagcagggaatctcaacgtcatcacgcgccaagacaatgatgcaccccgtaagcagcttttgtcccatacctcggcgctgttacaaccactatggcatgggcgacctctctctcgggagctcgggtgtacgaacgacccctcggtctcggtctcggctctctacgggaagtcaccaggcatgaatcaactgcacagttcgccgtcatgtcagacgtcagggcatctttccttcgaatacaaggcccgtcttcagtagggacgatccccttggtgtataaataggtggtggtccctccacggacgataaatcaacacacgtagacaaacgctcactcctccactctgtctcagatattggcacttgtctcaatcatctctagggacttggggacttctcctctcccgctgtgcttgtaaacc

SEQ ID NO: 157094 - DNA, 1057 bp, Zea Mays
gtcaggtccggagtattttgggtaccggaatgaatgcatgcctctgtaaggaaaaggttttagtaattgaatagaaacaactaaaaatggtgaactaaaatacataaattgaaaaaatttacaatgtgggaaggtcacatgacgatagatgatgagatatatctggaagtttacctggttgaggcgcttccgtagcattgtctgtgtcgatagactccgcgcgaaggacatcatcgatcatctcagcaaatgtgtccgctaattcatatttcttcacaaccatcttggtaagagtatttttgatggtggaacacgctttgccaacttcggaatcgtactcaaccaacttttctatgaatttcggccggtcacgtggttggagctgcttgatcttacttgaaagcatatccttgatccatggaagctggatatgaatggtatgatgaccacaagggtcgagacgaggcacatcaaaaatgtttgtcctggccctttgcagtgaaataatatataataatgcataagtcataattaatacgtagaacacatggatataattatacataaaacatttgtcatgcccagcagttagttctgcacatggatgtcatgtctgttttgtcataaactaacctcggattgtacatggacagtagggacaatagaataacaagtttctgagctgcttcggaactgaaaaaaagttgtaatataagtaaatgcatgaaacatacccataaatatattgagaggtgtgaaaaaatgaagtatatgatgtctattgcgagtttatgcggactggtacaaaaactaatagtgatgctacagatatacaacatgcccataataagtgaaatgcatatttatgcagggtaatagcttcatattttttttgtacaaatgacataccacacaatggccgaatggttccccgctttggcgtggcttcctcttatcaacttctgtcagtgcttggataatgtttttatcgaagaattttatgcgaggtgtgccacgtttgttgtggggggctgcagcgtcatgcaagtggtccaaa

SEQ ID NO: 157095 - DNA, 379 bp, Zea Mays
aggctttaaatattatgattagcccaattaactttctcttgggcatcttaatccttttagaggtatattaataacttatttcacaatctatgatacttaattgttatgattttgctcccactaattttgatgttctttaagaacataatcccttgtacttattacggtgtaatgtagataactcatttacttagaatccaaattcctatcgttagctagattgtacttttgtcttgataaggttatagtcaaatattcatcaatcggtattagccagaatgataaaaaaatgaggcatacgagtttctaataacaagctttgttaaactaatttaataaaatatgcgttggccaaaataaaatgtacaacaactttcgc

SEQ ID NO: 157096 - DNA, 465 bp, Zea Mays
gatggtccggatcccacaagaacttcctcaacatagagatatgaaacaccgggtgtacccctgccatggaatccggcaattgcaagcgataagccaggctgcccactcgagccaagatagtgaacggtccaatatatctcggaccgagttttctggagacaccgaaccgaacaactcctttagtaggtgataccctgaggaggacttggtcacccactgcaaattccaagtcccgcctcctcacatcagcataactcttctgacggctatgagcggccaaaatattctgacgaatttcccgaaccttctcagaagtctgctgaacccaatcaggaccaaccagggatctctctcccaaagtctcccagcacagaggggagatacactgcctgccatataaagcctcaaatggtgccatcttgatgctagcctggtagctgttgttataagcaaactctaccaatg

SEQ ID NO: 157097 - DNA, 340 bp, Zea Mays
ccacctagcaacagaaatacccccacctggaggaaaagacttcaggccctgtcagggagagatcctaccgaggatgaccccaccatcgtctacatggccggatacctccacactctcgataaccactatgacgacctttcctcccactgcacccacctaaactcccgggtggaaagcttagaacagcatgtcaaggaacttaaaaaggagaaggcatccctccaagagtgtctcgatatagtagaaggcgaggaggccaacactcgtgaagcctaccgaaccctgaagatggattatgataagaagctaaagaagctcgcccccacgaagaaaatccaaa

SEQ ID NO: 157098 - DNA, 575 bp, Zea Mays
ggttgatgcccatctggtcgaaggcatactggaagatgatgttggcttgactcccgttgtcaatgagggccttctggagctcccagctttccacattgcaactgatgatgagtgcgtctgcatggggcacgctgcgaaggtcgacgactgttgcatcgaaggttagtggtacatgagaccactttgtctgaatgacaggtcctgtgatggcgatatggttgacccttcagtagtgatcccttttttgtcgtttgttctcaaattccgagctggaccctctggtgatcatatgaatcattcccctgaagggtggatcggtgaagtcttcctgctttggtggtgggggagtggtaggtgttggtttggatgttgtgatgatggtggtggcagggctaacctttcttggtattgaaggtgttgttgatgtgggaagagattggggttttgctgctggggtaatataggtgctcgttttggtactgatgctggtggtattgttgcagttgataggtatgagcgacgactctttagttgtctatcagggaggccctagccattcagtcttttgttgcctt

SEQ ID NO: 157099 - DNA, 299 bp, Zea Mays
ctactggttcgtcgccgatgaggccgccacggtagatgccaccgagctctcgcgacagtgctctcttcactctccgaccgccaccgcgccaactcaaattcacgagccaccgcccccaagtcctataaattgagcacaccgtcaggtccgtagggtagtcacgcatccagccaccaagccgtgccctcaattgatcaccagagctcactaatttctcatttcccccaaacctactttccgccaccgtgaaagaggcctcgttgtggccagcttgattcaggtccgatcttgccctctgc

SEQ ID NO: 157100 - DNA, 878 bp, Zea Mays
ggcgtgacaatggcgagccactgtgtgcgcaacaacagcgagcagaacacgcgagcagcggagatggcacgagcaaagaaataaatatggtgccgcgatagcgttccacaagtagagcagtaaatcgtcgatggtggggttgctacgcgagctccacacggggttggggattcggcaaacggcggcacgcacaactcaacaacagatgcgcgatgcagacgtaggctagcagcagaggagcagggcgtggcgagactgagcagagggaggagaactcgtggctgtgcctcttataggcgagggagagagtgaatcgggttggaattacgtgccttgaaggctatttgcagctcgacgttggtggctcaagaaactgacgttgtaattctccattaataacgccatgaagctgtgcacagtaactgaagagaaaactgcggcagggtggacatggcccgaggcatgcggatgtggcccacaggttggcaggcaaacgcaaggtcagcgacgtggtctggtggaaagggagggctggccggcgccattgatggcagtccccaagtggggaagaagaagagttggaaaccattaatggaggtagaagaaactgccgaacggcatagagaagaggaagaggagaggtctcggctgctatgacgggtgtgcacggcatttgaccgtagcaagaggccaagcgcaggtgggcgcagagcatcgtggcatgcgacaacgacatgcacaggtgagctggtgggaggcgtgcgtgctttttttcagttcttgatttggagaaagagagagatcttacaagtggggtccacctgccatagagagagagggagagagaagggtgtacgtgctgcgagcacatggagccg

SEQ ID NO: 157101 - DNA, 915 bp, Zea Mays
aacaacagcaatactagaaagcttagcaagcacgtcagggccaggatgaccaagatgttggtgccatagggacgcaggagcagtaacagcagcaagggcgtagtgtgtagtggctggaggagcacgtgcagtaggaagactgatggtgtatagtggcccagagctattgcacctaaggattgtgttcctggaattgagatccttcacagaaaggccaaacaggtcaaattccatggaacaattattattagtcgtaaactgacagatagaaagaagattcttaatggtatcaggtgtaacaagaacattgttaagataaaactggccagaaagcactgtatctcctacagaggtgaccgacagactagacccgttgccaacaacgatggatgaaggaatggtagaggtgggagaacgaaagcgggagatgttaccagagtccgaggtcatatggttggaggcccggagtcagcaatccactcggtgatggattggggctgctgaagagtcatcgtgttgaaggaagaggccagcgactgctgatcccaggcaccctgccacgggttccagggtgattgggcagcttgttgttgctggtgcgcaccataagtagcctgtgcctgatgttgtagctgatgttgctgctgggtagcatacagctgcgctgaaatcgggatgggcgccagtggggtggtatgctgggatagacccacgggctggcccagagcagtgaggaacacctgttgctgttgggggcgagggggctgctgcagttcacccatattcggactggggtacatggagatcgttccagtccatgggttgtagagagagggccagggggtcggcacacctatcgccgaggtgctgccattagcctggttgcacgcaggaccagcggagtggtctccgtgc

SEQ ID NO: 157102 - DNA, 715 bp, Zea Mays
gttttctgcttatcttcattaattggcctcattgcttgtcttttcaaaatactaacaaccattttcttctttactcccccagcttcttcttcaaatctctcataggcaggatattcgaagctcagggcgtccattacttggttcaaccttcctttcttccgagtgccaaaagcagtggtcattagttggtcctatttcttgttataattaccaagaatctcattacacattgtctctatcatttccagctattcggagcaagggtcattgaaggtattctgaaacttgaaatgatatggaagccttacaagctcaagcttctttccttcgtcctttatcttcggcattccccatccgcttgatgttggaaaagttttattggctagatattcctagagtaagtcttgactactgatgtggtcggctacaactctgaaatgaacttcagctagctggcatggggagccgagttgcatattgtacaaaggccttgtccggccaaaacttaatatcaaaggacacatcaccatgctcataatcttctctcttctcttcttgtcagccttcatgtaaaaccattcactggtctagccagtaggccacttggtgtggtacccgatcataagagccttgtatcctttcggtatgcaaaattgtagcatccgaagtttttgtgcaggccatctgctctggccttggtctggtaatggagttc

SEQ ID NO: 157103 - DNA, 567 bp, Zea Mays
aacggtggtgacctcttccatgctgcgttgcgcgtggttgcattttcgacgcttgtcgtggtgctcttggcgttctttcttcgcacttcttggctcgttagcatcgcgtggggtgtttcccttgtagaaaatgcccccacagtgtccttcccattgaaaaacttggtggcaatgtcgaggaggtcggcggtagtttttggtcggccatagccgagctcgtgcacgagtgcctcaattgtggtgccgtaggtgaatgcacttacgacgctgacgtctgtggcattgggaagctcattccttttctaggaaaatatgtagatgtaatcccggagactctccctgctcttctggacacacctcttgaggtcccatgagctcctagggtgtttgtacgtgccctgaaagttgttgacgaaggcctttttgaggttggacgagtcgttaatggtgttgctcagcaagtgctcagaccatgccatgtgccccatccgtgaggtggatgaacaagaacaatatgatcaggggatcatccttgatccctggcatgcgatggcgaggcgatagtat

SEQ ID NO: 157104 - DNA, 574 bp, Zea Mays
cctgcaagaactacttcacgcaagctccagacacggcctacttccacagcctgttggcttggatgatggatgaatactaccatgacatgtttgtctccatcaagtactactgtgcagagcacacacatcctacggaggctacctactggaaggcacatgtgatagtcaccgcttggaatgtcatcactaatgctcagaaggtggagaccactcatagacacagggctcatcgagcagatgtgttggatagcatggaggatgtcgctcaggaggcctatcactagttcactactaccatggtaggaggtatgaggccatgaagaaggatcgatttaggtacctttctcgtttggacactgagtgggcttggcaagttagcttcccagaaggtgaggatcccaccctaatggcaactgtgtgccatgtccacgccttgtaagcagccaatgaacaactcaaggtggagctacgtgcatctcagcagtcggagaagcgtctccaaaagcaaatcgacaccatgagtgttcagcttgagcagccttagatctacaagaagaagccccggaccttcacc

SEQ ID NO: 157105 - DNA, 688 bp, Zea Mays
gttcgacgtctcagaggtcaacctcccatttaacgccatcattgggaggccagccctgtaccggttcatggccatcgcccattacgggtacttggtcctcaagatgccatcccccgcaggagttctcaccatgcggggtgatcaaaccgccgctctggaggctgttgaaaaactacacaccctggcggccgagaccgctcggccaaacggcgaaggaagaagctcctcagcccctggcgccaaagcaccgaaggtgcaaccaaccgaagcagacgacgggcactcaaaggtgactgcgaagaccatccaggttggcgcagacccatcctggaccacccgcatcgcgggagaactgggagagaaataggaactcgcgctcgtcaccttcctccgggcaaattccgacgtattcgcttaggagccgtcgcagatgcctgggatccccagggaggtgattgagcaccatctgaagatctatccgaacgccaagccagtaagccagaagcctcggagacagtccgggaacggcaggacttcatccatgaggaggttcggaaactgttgcacgctggcttcattgaagaggttcaccaccccgtgtggctggccaacccagtcatcgtgccaaaagcaaacaggaaactccggatgtgcatcgattacaccagcctgaataaggcatgcccca

SEQ ID NO: 157106 - DNA, 1022 bp, Zea Mays
acaattgtgaaagtaaatgtggcgtgctggttttgaaacttttcctgacttatgccaatcgcttggctggtaaggcatagtggtcgccttaagatgagtagatgtcatcgtatcatgctgacttaaatcattgctgacttgagtcgattgccccgctagtagggtagtgattcccctaagccgagtcagcgtgagcatgtagcatcgtcttaggtcgtcgccgacctaagccgatagctccgttagcagggtatagtggtcaccctaagtcgagtaagcgcgagcatgttgcaccatcttaagtcgtcgttgacttaagccgattactccgttagtagtgtatagtggtcacccttaagtcaagtgagcacgagcatgttgcaccgtcttaagtcttcgccgacttaagccgattgctccgttagtagggtatagtggtcaccctaagtcgagtaagcgcgagcattttgcaccgtcttaagtcttcgccgacttaggccgattgctccgttagtagggtatagtggtcaccctaagtcgagtaagcgcgagcatgttgcaccgtcttaagtcatcgccgacttaagccgattgctccgttagtagggtatagtggtcaccctaagtcgagtaagcgcgaccgtgttgcaccgtcttaagttgtcaccgacttaagtcgattgctccattaatagggtatagtggtcaccctaagtcgagtaagggtgttgattccaagtccaatcaaatcgaagtcaattgatagtcaacagtttgagtgcccttgaaaatgaaatctttattgatgacgtattctccaattttagaatacaatgttgctctgatagcttttgaggccttgctaagggtaaaactttctaatatgctctattttccatgaattccccacttccgttccatccatttgagtaagccggtatgatcccggacgagtgacttctgacacaatgaatggctcttcccatagtggtgacaacttgtgtcgtccctcccccgtttga

SEQ ID NO: 157107 - DNA, 549 bp, Zea Mays
ccgacttactcaaatggatggcacggaaatagggaattcatggaatatagagcatctcaggaagttttacccctagccagatttcaaaggctatcggggcagcattgtattctgtaatcggaaaatacatcatcaataaaaagacttcattctcaaaggcactcaaactatttattatcaatctgcatacttactcgactcagggtgatcactataccctactaacagagtaatcggcttaagtcggcagtgacttaagacggtgcaacatgctcacgcttacttaacttagggtgaccactataccctactaacggagcaatcggcttaagtcggtagtgacttaagacggtgcaacatgctcacgcttacttaacttagggtgaccactataccctactaacggagcaatcagtttaagtcggcagtgacttaagatggtgcaacatgctcacgcttacttaacttagggtgaccactataccctactaacggagcaatcgacttaagtcggtagtgacttaagacggtgcaacatgctcacgctta

SEQ ID NO: 157108 - DNA, 535 bp, Zea Mays
ctcgacgtgggtgggaccaggttttggagtgctatcagcctcgcatgtccctgatatgtaggcccaaccagatcacaggaagctgtcgactctttatggttgataccccctagggagctgaacacagctcggactgacgtttgcatgtgactatttacgtaggagaccaatttggagcacgttgacaccctcctgatcaggtttagatcagatggcatactaggcaaacctcgaagccaagccacatcctaggatccaggccattgactaaggggtaggggtccttcagccgccctgggggcctcccggatcctcgtgttgctgttgtttctcaccggtgggtttcgggtggcaacacattctggcatgcccggtgggaccatccatgtcaacatctttgacatccgctacccagatggtgaacactcagataatgcgacatatcttatacgcatggctctctcgtgctcccatacgcacaaccatccaaaccacccaaataacatccaacggtgccacattatttttccaaaaa

SEQ ID NO: 157109 - DNA, 616 bp, Zea Mays
attggacctctgaactaccaacttcagagtcatacattccccaacttctagacactcctgaacaaggcaattggccttgaaagcaaaagaaaggaattatctgaccataaaaggaagttccaaggtcagtcaagcaggaacacccggccaaacaatgctcaaggttcgcagttccgctctggaaatcagggtggaagcaattatcaagtgcaacgctctggacaacaaggccagagaaataatcagagtcaaaaccagcaaaggagcaactcccagaccaaccagaggtctggtggacattcacagaatcgtcaaggtggcaccaataacacgcaggccagaaacaacgcacctatccaacccaacggctgcttcaagtgcggtgagctaggccactatgccaacaactgcccaaggcgcaaccagcagacaccccagaaaggcaataattagaggaatggccagaacacccccgctcgtggatctgctcagaacaagactcctcagaaccagagcagaggaagggtcaatcacgtcactgcggaatcagtgcctgaggatatgctgacatagtgtatggtatgttccttgttaactccatacctgcatcagtttt

SEQ ID NO: 157110 - DNA, 477 bp, Zea Mays
cgccaggaaatggaatgaatgggacacctgggaaactcaagcttgagaaacttgcaatcaataagttctctccaactagcctattgaattccatcaaattgagaagagaaggtcctctttctctcatgacagagcacaaagaagcattatggagcacgtattcgccaaccacaaagcccgatacttctgttctaaataggctcattgacgctggtgtgtcaccaaggattgaggagtccatgtcggtagtcaacaatgagatattgtggcagcacttcttggagttgacgaccaacttccttgtgccttttgggccgtatctgagaactacaacaccatcagaagggacttcaccttttgttgacccaccattgctaccaccgtttcatgcagttgagttcatcaatggtttggcagctagaggtccagggaagtttttgtccaaaaggatgaggtccaattggttggacctatata

SEQ ID NO: 157111 - DNA, 647 bp, Zea Mays
agatcctcttaggtcctcaatgcagatgacttctttgtgtttcatggacttcaacattcgatctttctccatgagctcagacaaaacactccaatgttataaccatagggaaaaataacaagagatctagctagtctattcaattcgttatcctcgctagtgtcatcaggaacatatttacccctggtgactatggccacccttgcgtttcctgccacaaggaacatgagcgttgtggcttcacccatagtcttcgctagatcctcggcaaacttagtcatttcaacatccaaacccaccaaatcttcaggcacggtctccgcctcgttcggtgacctcgaccccatcgccctttttctcacttcaccctaagtaggcaatgccttccgcttcaaaccaaccatgtcttcaccgcctttgataaccaccgtctccttcatagtagtacttgagtcttcctcctccccttcttcaatgtcttcaggacatggcccgtactccagctcattcatttcaaaaaccctattgagatgaatgttaccatctcagtttctaggcttcttgttaattcaatctttgttgagtacttcccaacaatttaaacaacctctgcctcaacctcactaacgaaggtcgccctgtctcgc

SEQ ID NO: 157112 - DNA, 2135 bp, Zea Mays
gtgtcgtggtcctccaagcgccagcacacggttttctggtccagcgccaaggccgaataccgtgttgtggcaaatggcatttctgaagctacatggttacgtcagttactccttgagcttcggcacctgccgcaccgtgccaccctagtctactgtgacaacgtcagtgctgtatatctctccagcaatccagtgcaacatcaacggatgaagcatgttgagatcgatctccactttgttcgagagaaggtcgctctcggacacgatcgggttcttcatgttcctacgacatctcagtacgcaaacgtcttcatcaagggcctacccacctcattgttctaggagtttcggtgcagcttaacggttagcgatggtcccgattagactgcgcgaaatgttagactattgtaattatagaaagactaaatatggtagtcagcccttgatggtaggctgtccttgattgtaggcttgtacgcctgtgcgattggctgtgagccacctgacctcatacattgtcgtggaatagattgatttattctcacaattactctttcaaaagcaaacttcaggaaggtaatctcaccgcgagtttgggcacctgctgagctgtccacgttaagcaatgggtcagcggcggcgtgggaaatccggtgagaaatctccccaatcccagtactctattccatatcccgacctgagctacacgttgaggataccaaggcgaatcggtttaggaagctctcaccgtaagatgccatagaacactcgacatcgatgtgaggtggatctgcggcgatggtcatgttcaacggcgagcaattgctgcccctccggtgcacgtgcacttggtggctcctcagacatgatcggcgctcacaggcgtggaggcgaagaacgacgatggtggatcctcgtgcactctccggcttcgacctgctccccctccctcaccggctcgccgctaatggctatggactcctcggcatgggcacaaatgaatgaggggttggtggaggctagttgtttatagtccgaagacaaggtccaggcattccacagggccgattacaccgccaccgaacggaatccaaggtaggcggggcggctgcatcgtcgacattctcggccggggtcgttgagacaggaaacttggctatcgagccccacctgccagcgacagtactaaggagcatgtcgcaaagcgaggctgaccggtgggccagtggtgcacgcagtctttgccacgggcgcgggcgtggagagcgctcgcagatgaccaactgacagggtgaccccagcaggcggcgccgggctccatcccccactgggctacgcgcggcattggtgtagtcggccaaaaacagggatggtccgaccaatatccttgttctttttccttttcttttcttttttctatctatatatatactacttaagactccactgtaggcgttcatagtccgtgcgccatgttctgcctcctcccaccgctcgtccgtgccgcagctcccgtcgccgcaatccgtgcctccgccgccgcaatccgtgcccgcaatcccctcccgtcgtcgcagcaacccacactagctctcctgccctcgccaccgcccctgcgcgcccaccatggcacacacggagaaaggaaaaaaacatgcccctcccgatgtcgagtgggcctccatggagacgacacccagatccgaccattgagtccctcgacgccgctgcttactcctccatcgccgtggtgacctcctcgggctcgatggcgctgccatcatcttactcctccgtcacccgtggctagcgcgtgggtttgattcccgacattttcttgcgaattcgggagtgatttggggcccctatatggcgaggatttgagtggatttgagaggaacaagtggaggtcggcgacatggccatcacaagcctcctggtcctggacccctacttccgagggaagaagccgaggggagactacgggacggcgagcgtagaaggcaggctagacgacggtgctgccatcacgggcctcttactcctgtacccatacttctaggggaagaagccagtggccgagagacaacagaccgcgtgaggcagcgacagtacgaggcacgccacctagcctg

SEQ ID NO: 157113 - DNA, 550 bp, Zea Mays
gcgcctgagattcctgtgccagcttctgctcctgttttcgactctcaggccgaggatgcagctcttcgacagtttgacacttagggtacagcagctgatgatgatgatgatgatgattttgggttcctcctccgcctccgcctcctatgcctccacgctcacatgatcatgaggctgggagttctagtgctgcccctgctcctcctcaggctatggaccctgctcttgcttcgattctggctcacctgtcagccgagcaggcccggttatccgagaggatgctctcgatgtttcagaacatgcaggacaggcaggatgcacttcagcagcaactacttcaggatcgtgctgagaatagggcattcatggctcttatgcttcagcagtctggtatctcagtacctccggttcagtctgctccacctcctccgcttcacgctccagtggtgccatcgattttgtcaggaccccctgttggtccctctccgctccggccggtcactttggcgttcacctctccggttctcagctctgtctgcccgcagccgcc

SEQ ID NO: 157114 - DNA, 651 bp, Zea Mays
ttttttgtctagatccaagaaatttatttgccagttatgacaaagctcatgttgtatctctcattttatacaaatatttaacttgcaatgtataggttcaaattcacgtgctaacgtggatgaagttattagaggtggagaaggaccaaatcgtctctaattaggtacttttatatttttaatcaagtttattgtatttttagatgttgaattgaagtaaatactgtattagtcgatgtttgtggtatatattgttttagcggtatatttagtcgtacaatatattaggggctgtttaaagtaaccttcaaattttatagagtggctcgaggcgttaattttataaagctccgccaccgaggggaacgacatataagcacgggtgtcgacgcatgtgggatgctgcagagagggaagaacatggacacacggttggtggctcctggctaccacccttggttgcggatttgacgaccggtggttgcgctgcgaggataagtgtggttgaggaaagggaataggagaaaggaatgtggtacgtatagatggccaaatggcactaacacggtgggtcggcccgggcaccgcactaaaaagcacggcccaggcacagcacggcccgttcctttcagtgccagtgccgggcacggc

SEQ ID NO: 157115 - DNA, 279 bp, Zea Mays
cagggactgtcgacagccacgacgtggccaggccaacgtcgcacaggcggaggcggaggaggaggctctgctcctagcacatgcaagcatcgagctatctccagcggcaccggccgcagcggcactccttcaccttgatgagtcgaaagcacgcgctttcctcgacgatggctccagcaaagacatgatcgaaggatggtgcctcgacaccgacgccactcatcacatgaccggccgatgggagttcttcaccgagcttgactctagcgtctgaggctc

SEQ ID NO: 157116 - DNA, 526 bp, Zea Mays
gcgctttcaagcgaacacttcatcatttaaggttaacttcgtcagacgggttagcttcgtcaaactgtaaaaatccatcaaaatggccagagtgcggtcaactgcaagggtgtctcgtgagggggaagaatctgaggccactgaaacagcaccaatttcagaagtaatgaaacgatcaggtcttgttgtggctaacgaaggtacttctaatgtcgaagctgaacagactatgattgagggtgaagatgttgagagcgaagaagactacagtattctgatcccaacgaagcctagtcatctagattttgaaaaatctattgtgtctgaagacgacatgcctatgatgatgaaactaggctattttggagaagctgaaagcaaacttgttcgattcactggaaaagagactaccccagagccgaagaaatatgaagttgtggttttcaagcgcttcttcaaagcggggctgcgatttcctatgaacgagatgataggggaagtcctaaagaacttcgaaatatatctt

SEQ ID NO: 157117 - DNA, 435 bp, Zea Mays
agttcaccggagtagttccctgtgtcacccctatctctgctgaagccagcccaggccttagcgcgccttaagtcccctccccgtggccggaatcgctcaccggagtttctccggcccgcccgagaccttctcaccgccgtcctcccctctcttctcgtggattcatggccacttccccgccatcgagttcgccgtggcaccctcttcccctctacccaactccggcgaccccagagccaccctagctcgcgctcgcctcaactccggagacttcactgccgcggagaggagcggcaccgcccacagctgtctgtttccccggtctaatcccctccgtctgattcagatcgaacggcctggaccgcgggataccgcttcacacacgcgcgcctgacgcgccctggcccacctgtcagtgccattcgcacccgctcg

SEQ ID NO: 157118 - DNA, 459 bp, Zea Mays
gaatggtccttgagaatgaacgagttcatcgaaacttggcaccccgagtaagttatctgattcacttacatatccatccaaggccttgagggcaaggattggtgtacgtggacccaataatttggttgggttgtgacagtgagggctccggtgaggggaagctacggtgtcggtgtgcgacgtgccgacgtgggtgagggaaacaagggtgagcaggagctatctcggtgctcccctttatatagccatgggcacggtgtcgggctgaccgacgcttcgggtgagcgcgcgggcgtgggtttggctgcgcactggccttgccagccatggtcgaacacatggtcgtttgcatctgccctcgtccaaacgccagtttggtagccctagcatgcatatcttagcaagaatcctgtgtatgttctcttcaccgtgccaaggcctctctggtttgtgtgagtc

SEQ ID NO: 157119 - DNA, 279 bp, Zea Mays
atatatttgtgaacagagagggtaataaaataatacggtgtgtatgtgcatgcacggagacgtctgactgaatcattcgtcctaccttataccattttagatcttgtttggatatagtcggattcatattagtagacacgtgctaagatggatcggagtacaacttcaactatatactatctcaatgtatgtggattaaagtgaacctaacaacatccaaataaggcatatagagtattatctctcctctctttgttttgggttttaagtgctctcgag

SEQ ID NO: 157120 - DNA, 654 bp, Zea Mays
ctcctgaaaactacaactccatcctctttcggctctggaatcgtcccctctccagcaaaacgaaccagttcatcatcattttctccaaaatatcctagtttcttcattagaactaaatcctcagctttaactgtggatctcccaaattcaatatgtctgggcttagtcggacataggatattatcatcatcctcactttcattttcactttcagcttcagccacggcctgttcagcttcggcatcagaaataccttcggcgatagtttcttcctgcacaaccaacccagaacgcctcatcatttctaagatgggagttgtctcagtcgtttcagtctcatatccctcgcgggtcaccctagcatttgatcttactctagccattttgttgttcagactctagcagacgaagttgcacttcgacggtgaaatgcttgttcgaaatgtaatgtggaaagcttcgtctttggtgaaaatttctagcagcacaatggtgatatagcaattaatatttgtgataatttctcaccaacttgtctgtttatatagccctgcaggagaaaaggcgctcgtactgactgatcggtggaccaacaagtgttgtgaatattttattcgttttctaataacaagctcacggaaggtattttttgga

SEQ ID NO: 157121 - DNA, 702 bp, Zea Mays
gccgcaagcctggccaacctagctcaaggaaacacacgcatgcagcagtgatggacgctttagcttctccagttgagttaatgcacataaagatcaaagcaacacacttacaaacctaataaaaatggaatcatgatgttgtatcgcttaataaaatggattggagggaatgtcatttgagctcagtatcccatgttaaaaaatttctatggcaaaatagattgtcaacgtccaagaaaggtcatacttctgaataccagcaatatgtcttctgaagatcccaccagcaaaagaaaacccaaagtagttccgactcatatcaacctcataaccctagaccctgtgccccaaggggccatgcccagcttcgactaagtctggagccctccaagccaggggacctggtcctggggcccttctagcctccggtgccctcaaggccagagggccggccggccaggtatcgaggccctcttggtacccagggccctcctagtctctagtgtcatgccactataaatctttcatgtgctggtagccacagcggtgccccagaggcccagatccagcgagcctcttggtattagacatctgcaaccctaatcgctataaatcactgttttaaatgtccggctaagggccttagcggcaagcttttggataagctataaaggctatagccggctatagcggcaagctaat

SEQ ID NO: 157122 - DNA, 669 bp, Zea Mays
atgggtgcggcataccgaaggggtgctgacagctccctatcaacacgatggtacgccaccacatatggtctttggcataccccatcttccttgtgggaccagttaaccccagtcatgggggatcgaagcactagagtctatacagtgacccacctaccaggaaggacgagacaatacgccataccgggtgtatgcctatgcacactggagggtgacgcagggttcgtgacgaaaggcgaggccacgccgcgcatgaccacaccatgagactttcatgtgggacccaccgagcaccactacaaggaaatcagcatcagacctgctacagggacccatacgctcgacggatagcggtatgctatgctaggagtatggctacacacaatcctacgaacgatgtcggaggcattacgccagttaggggcaacagatcatgcccttaccgcccttacaagtaggaaacaagtctcctctgtaagatcctacccttgagctacaaaagggtaggaccccctctttcttcccacacatgcaccagttgtaatacacctctcaatcaatactacgttcagaactacactagactagggcaaaagcttgaactagtataactctctatctccatcctctactcaaatcctaggtggctcaccattcggagtgagtccg

SEQ ID NO: 157123 - DNA, 1070 bp, Zea Mays
ccattctagctcctccaatcccctccgattttgtggctcccaaactagcccttcaggttcatactctacgataccggtaaaaatatctgcgccaatgaaagaaaactcatcagctctacatggcagctaattcatgcctttggttcacagaatggagcataggaataatgtatttttttctattttggagggaaaatgtagaactttgcatccactcaaacctcttggtacaattgctatgtttttcctacagcctacccaaacgatcatttcttcaacattcatatgttttatattcctgacgaattcctatgtttttcctgttcttgtgtttttgtgttgctgtgttccaaatagaaccttacttggataaaatagatcatagacgcaatcgcattatatgcaatccattaacagagatatgacaactgacaattgttgctttggatatgcaaactgcaaacagtaattgctatggatgatgcttatatgaaactgaggcatcaagtatcatccgttaaattgtactgcgatctgtcagctgctttactgaagtgttcaatatacaaatgtaaagttgtatgcatccctctactaccattgttcaagttctacatcacaaagacaaaaaaaaacaaggttttcacataagcattaagcactgaaacagtgaggacaagcattctccaatcatcatgcaactggttatgatttatcactactagaaacataagaaaacttcatggaattaccttaaatgcaaggcattgaatttcatggaactaccgtaaacacaaagcatcaaatttcatataataattgattgtctattatacaaggatgcattttcctcatattatgcatgattttcttttgcaaacatttgtgtggtgagcacgcatgcttgtatgtaattagtgctttcctaaacggtttcaggcagtcgttcaaacctgtccaaacggtgaacggaggaacaccaagttatttagggccggcagtcccctaaatggttgacccgtctaaacggtcaaccatcggtctaaatggccaaaacggaacatgtcctg

SEQ ID NO: 157124 - DNA, 1191 bp, Zea Mays
cgcgcctggaggaccacctcaccggtgcaaccaaggcccccgcacagaagattacgcaaggtgataaagaaatcgataatccgttatatggacaatggattgccatcgatcaacaggtgttgggttatctattactgaacatgtccagggatgctcttcttcaagtcgcaacaagcaagacggcagcagaagcctgggcattcctagaagcaacattttcatatatcaagaaagcccgtgctgttaacaccagaattgcactctccacaacacgcaagggtgatctaaccatatcagagtatgttgggaagatgcgagctcttgcagatgagatggcaagtgctggcaatcctctagatgatgaagacatcatctcctacattcttgcaggattagacgatgagtacaacccagtagtgaccactttggtcgcaagatcagactcagtaagtgttgctgaagcatatgcacaactgctcaactttgaacaacggatgcatcttcttcatggcgagcccagtcagcagcactcagcacatatggcagaccgaggacgcggaagccagcgaggccgaggaggtcgaacaggaggaaggacaactcgtggaagaggacgtaacaatcctggaccaccccgacaaaatagtggcagctacaacaacgacaaggacccaagatgtcagctatgcaagaagaagggacatacggtgatggactgctggcacaggtttgatgaaaattttgtgcctgatgatagatttgcaggaacagtatcaaactcatatggtgtggacaccaattggtactttgacacgggagccactgatcatgtcaccggggaactcgagaagctgacggttcgtgacaaatacaagggaggtgatcaggttcacacagcaagtggttcaggtatggagatagctcacattggtcattcagttataaaaaccccatatcgcaatctccatcttaaaaatattttacatgccccacaagccacaaaaagtcttgcctctgttcataagcttgctgctgataattttgctttccttgaatttcactctaatttttttgtgattaaggacaaggtcacgaagaaagttctccttaaaggaccatgtcacagaggtctctacccactatcatcatcgtccctaccttcatcaccaataaagcaggcttatggagtca

SEQ ID NO: 157125 - DNA, 1648 bp, Zea Mays
gtgcattttctcgcctaggcgccttgagaacactgtctctaagcgagtgatccttatttgtaattaaccctaacactaatgagctatattgccaacctaggcttgataggcccatgacatatgcctctaacaattttgttttgattgcacttgaacccaaaattgacccaaaaaaatgattatgctaaaggacccatttactcatttagtctacttgtttggtagaaccgtacgagtggtaacataataattccacgggagagactctaatattagttatttgattggagtgatatgtcaagatgctagaccaagcaagtcataaatggaaacgaaatacctcaaatccaaaatgcaatggattacgttcctttatctcctttgctagagtggtttggtcatctccatctctatcagtgcaaggtgacacatcgaaaataattatgtccaagagcttaggatcaaatggatcttgaagtaaagccaagaatcctggcttcagtacagcccaaacctatcaagaagcgtttgatttaacagctcatgtaaaagtcaccatcattttagtaaaacaaaataaaatcatcaaatattttcagtaccttttgccagctactactgcaaaaactaaaacaacaggatgaacagtatctctctttactgtccatctcaattttcggcaagtgccttgctgtaacataatcttcctttagcttaggcccatattctggcagaaatgataacagtgaaacttccaaaaacttgcagacctgcattttaacagatgttactgtataaaagaaaatgagaaacatgatgatccactctaacggacacatgaacaatacactttgtatatatttacacagtcatcaaaactaacatgacttgttttacggaaaagtgtttttgctacctctcttgagttgacaatatccaagtttcccaagaaatggttcaagtattcttgcatggcagcctttgcacgatcagaaattgattgctgacggccaagggcaggtcgaataacaggtaaaacagcacttgaagggacattcctgcatccaaagtttaagtatgtttattactatacatgcacatggatatgtgggaagccaattgctaagtgcatcaaaattgtttcaagattttgttgctgaagtttccattattcttttacttcaataaggtgaacattgttaataaaccaccactttacctgtttttgacagagttttcgtcatgctgtgaaggaacatgcacatcatcggcttcatcatcatcatgtacaactggcacatgctcccctatccccaaattttgaagccattctttgacctttaattaaacaaaggagattagttcagttctacatgactggaaatgaagcttccgcacaaaacaaatatactgtgtcaagaagagttgacagtcaaataaagggatagaatcaggttgatcagcaaaatcactcacttagaaggcatacttgcattgtgcagctacattagggtatagaacccccaaacagatctcaaagtaatatgcatgtgttggcccaagcaagtgaaaatgacagaaaatacagtgaaatgcaaaatgtaatgagaagcacctcctagatgcagatgatggttataaactaaat

SEQ ID NO: 157126 - DNA, 753 bp, Zea Mays
gaaaggctcatcataaccaagcggtggtgggtgccccacgtattcagtcatcatcaaacacgacccgatgatgagccatttcttagtcctaggtccgctgagagagaggagcgctctcgaagcactgaaagacatgggtgttcacaaaaggcaaataaggcaccgagagaaagaaaggccccgtttctgtggcctttacaaaggtgcgggccctccttgcctacctctagacgaagagttatcgagcaggacgactcctagcttccgagcaaaaggctatgtgactttcatcatgctggcaagatccaaattgctccaagcatcgtagtagccttcactcagggcctccagctcgatcccccttcaaagtgagatgtggcgacgatgaacacctaataaattccctgacagcaggattccttttcaagatcccaaaactggttcgcaaggccctgaaggaaggagactagtgactcaggccggatgaaggaggtgctccgaagcgccatccatgagcgctcactacttccgacaagaggcgcctcttcttatctagctcctctaggcggccttgcgcctcgatgaagctccctttggcagcgttgaatttcccttgtatagctgaccagaaaagacatgagctgcatgggggggggggtaagcgggcaacaaatgcctagcttcacaagagaccgttaaaaggcactaccttgcagagaggccaggagtttttcctccttggttcgaccgacc

SEQ ID NO: 157127 - DNA, 651 bp, Zea Mays
gggtcactggcgcaagattcccgagacacatagtatagtgaacgaggacggcgggttctatttaggaaaaacacaggggcgcatgtgtaaaactaacccgcgaagaggtatggatctatcctggccgtcctatccaagatctatggccacgattagatccgcgctttatgaaatcccgcccagatctaggccacacgatcacaatttaactccacgatacgaaggggtacgcaagttttaatctaccccatccgctcatcatcctacggtcctggcttcttcatcccgttcctctaatcctcgccatccgataaaagatctacggcccgcgctatctcttctcctcctacccaagcagcggcgtcgccgccatggctacacggtggaggacacgaccgagacccaatcggccattcccgagcacctctgtcaaattaaacggggctacacgaagctagtcgaacggtgagcgttatgatgtagttcctaccggcgattgtaatgtgatgaactcctcccacggagttgtgcggacccacgaccaagctgcgcgatctgtgagaaattcaccacgcacggccggcacccagagcaatacaactatgcgctactcactatggtaaatagagagcaccgatcacaaggcttatt

SEQ ID NO: 157128 - DNA, 574 bp, Zea Mays
gtgcgcgtgcgcgtggaagctggtaggaaatccaatccacgttggggtgcatggtgctctgcgtcattgcgcatgcatgcatgcacttgcgggttcataagaagcgggcaggaaaatctagccacgacgatatggcctacacactactactgtgtgttcgagagatcatcatggacatggagatggaggcgagacaagaaaaaaatcgtaggcagaaaagaaggacgggtgccatggtaaaagctacgaaacgatgatagtacgctagctagctacgccctggtcagtggtcacagattcgtttcattcattcattcattaggagcagtagtgaggtatgcgtagctatcgtcctttgcttgctagtatatatatatataaccacagggaaaaaaatgaaaaacaaaaagaagggccggatcccgaacgacgccgagagaatcagggggggggggaaattaaaaccaaaaaggcataaataaaaatgcaaaacgataaaagagggcaggccgtccggaataaagcaaaacgcgattcggcagcatgcagatacgtcgtcggagtactaaggttc

SEQ ID NO: 157129 - DNA, 1284 bp, Zea Mays
ctgggcctcgaaatccagaaagcgcaggggttattacagaagaattcctaagactcagaacctagctaagtggacggcgggttcatttacaaaaagaacaggggctcttatgtaagtgtggcttcgcgaaagggtattgtgaactttgggccgtaggatcgcacaccaacggtgtggattagatcggccccggtccgaaccggtatgcgctagacaccgtccgatctggatccaacgctcccaatctaaataccctaaatcaattctaagccggtcatcgacagatcgacggcgcacatcggctatgacgaaacggtatgtgatcttctaatctgagctgtccgttcgggatctaacggtgtcggggtatcgtcttccccacacagacatcgacggcagtgccgcgcccgcacggcggtggtagcaccggcgaacaacgcgtcgcacgcacgagtgataatcctaggtttcgacagcgtctacaccaagcgtagattacagtgaattcgtgggtgggtgacataccagccctgatgtcgtggtagcgcctggtcgcggagcaaggcagtctgcggtggaagtcagtcgacgacgataaattgccatgggtccgcggcctccccttccaattgcagacacgaacaacaacccggagtgcagacgaccctccccggcactacaccgagaccagacgagacacgatgacgagattcgtcggcggcggcgcgaatcggtgtggtggcgctgttaggagctagcaatgagggctcgggtcggtgctgggtagatgggagaggtggagaagggcgcataggctgccaatttaactcctatggactcggcacgagggtggaaggaggtcttccacgttccacagacaatggcggcgagatgtgcgcgaggtgggtgagttccgcgcggagtccgggcgctgacgaacggcgggatgacgtgtgggtccatgcggcaggcaaccagtggcatgcgcggactaagagtaactagcgcgtgcgcggtggttcgctatggccgagagcgtgcgaattcaccggcggaatcgatggagtccgctctcagcggcgaatcctccgcgaggtgagtgacgagcccgactaaggggccccacacgacagtgaaaggcgaacaagacgcgcggtagggaggtgtggggctgccaatcggttcccaccagtcagtggtcggatgggcgcgcgctgaggaaccgggaattgggcctgcgcgaggtgagaaagagataatgggccagaaatgaggtgggcggcc

SEQ ID NO: 157130 - DNA, 444 bp, Zea Mays
atgagcataaatgcatgatagttaacgacatggattgacaacacctttatatgttcaacgctaatgtagctgaagcactaaaacattgcccatttctattttcgcaaaaggcagcggtgattggagtgaactgccttgggtttgatgtgcgagtgtgcgcaagaactccagttcatgcctataagtagttaataaaaatacaaaattaaggcatatttagaacgaaccgttgaaattaaggcagatttagaacgcaccgtgtggattcatggtttggtgcaaattgtggttgggtttctactttctggatgggtttaattgtggcgtgtttctgggaggggcttaccattgtgttttcttagagttaatctttgcttctctacttgccattttattgtctcagaattaatcccaagcagtgcagactctcaagcttcagggttg

SEQ ID NO: 157131 - DNA, 671 bp, Zea Mays
tgccatgttaggccctagagcacaaaactactaccatgttaggcctagctcgtatgataggctctttatgtgatcgatgattgcatttctacttaccagagagctaggcacaaagaggactaaccagatcaagaatgtatagaaaagcaattatgtaccatatttgtagctggcttgcatcaacacggcaactttcatatgcgcgcgatctatctctttattcaaatcaggagcgagccacagttttcaacatgctctagaagatatgtctagtcttcgatctctatatcactggctccacgttgagaaaaaaagaaatatgcatgtgtgtatatatatctttgtacatctgtctgtcgcggaccgttttatacatagcaaggatatgcatatgtctgaattattgagacagaataacccttctaaatccttcaaatgacaagctcatcgccctccattgtcctctttttcaacatatattagctgctttacatgcatgcagtgcagaatccaatgccaagacccattataatagaaaagtgtgagaaaaagagaatgtcatgttgggtattggagtcacgtctttgatgtcaccatgaattaaacgtaaaataaaaagcaataatattttgcctaaaggtacgctaccaccttgtggcttacttgcgtga

SEQ ID NO: 157132 - DNA, 529 bp, Zea Mays
gatgctaggcactttcgtgataacattaggttttttaatggccatttctctttcacttccctatactgttgcctcgatagtacggcaactaatgtaagggattctggtatatacacgttccgagcacaaggcatgatgtaccacaatatcaagtcatttggtagggagggtggggcagagcataaacaccttgagctttacttttatgatgatgatcccactctcgagcatcggtaccgtaagtgtcgcgaagagcatcaacagaaagacaaaaaggttattccacagatagtctacatactacgtggaaactcgtactccgagcaccttaggaccatgggccacgttgagaaccttgatgactatcgtatcgcgttgaacctagaccagacgttgaatcagaagacatataacacacctctcattttagaggtggccgctgtttggatcgaagagaccgaagggcgaggccagttcagcaagagtgttatgctccatgggaaggacagttcaagccactacatccgct

SEQ ID NO: 157133 - DNA, 726 bp, Zea Mays
ggtaagcaaaaatataaaataaaagcgtaaaggtaaagagatcttctataccttgttgagcaggtttcgagcttcgtctctagccagctctcagccgcccttcgcccagatttgggtgataaatctattacctatgctacgagcttcggccagaatatcaattaggtcagatggtgacaagctgaagtttggcctgtttacggctcttacatgattgcatctggctttcatgaaagcaacagtcgtaccacgagaggccactagtgcatagaaatcaccgtggccagttatgacttcgtcgaggacgtcaaattctttttcaatacattcaagagctccgggaatatcttcggcagaaagggtaacttcttcagatgcggctccgatagaattgaagatccccttcagcctagcaatacattgagtagagaaaccgaagcatttatcccaaagatttgtcactatttcgctcggtttaacgttcttttcaattcctgcttcaattctcgcattcaacgccttggactcgcggtagaagcgatctgagttcttttccaaaactgtccgagcttgttccagttctttgctcaatttctcattttgagaatgcgcttcggcaagtgagcctttggctaaacgcagcagactgtctttttccttcaagaatcttcaagttttttaatcttatcttcaaagccttcgataacgatttcgtttttatgtcct

SEQ ID NO: 157134 - DNA, 577 bp, Zea Mays
atttagctttcgtgctgcagttgtcgttttagctttccagttctgtgagtgcaattgtttttgagcttcggctttctgcagtgatcatcactgaaatggccgaggataagaaaagcgtggatcccacactcgctggcttctatgaagccatggaaaggaccaacgtagaaaaaatcaccaatgaaatgttacctgggctatctggtgattcaagcgacagcgagagcttcaatgttgagagtgagaatgaagatgctgaagatcggtcatggaggccaagccacattgtttttgggaactcaactatcatacaagggtaaattgaaccgatgaaaggcaaatatttttatgatgtgtctatagtgagggctaggggagaagacactgttccccttcctgaaggtgatgaagtggtggtcttcaggagcttcatgaaagctgggcttcgctttccagttaacaaaatgttggtcaaagttttgaagacattcaagatataccttcatcagcttacccccgaagctcttatcagagtgggggttttatatgggccatgaggagtcagggactggagccg

SEQ ID NO: 157135 - DNA, 870 bp, Zea Mays
ttcaatttttgggcatagaactgagcttctcgcttttctttttcagtcaactttttccccgaagcatgtcgtaaaatataattgagagcttcggcaaatgctttggggtggcagtggcagttttttcagtcaaaatttgctctgccgcttctgtttctttctctctggtttccaaggacttctccttggcgggctctgaaggcccagcttcggtctcagcctggcgctgtgtagcttcggcttcagaggctgttgtctcaatttgcgtttttgaagcttcggctgtttttcctggagtagagcttgaagtctttatttcttcgagtacatctagtacgtggaccatccttttcctcttaggggtaactattggatctttttgtgccttcggcactgtcacctctgccgaaggacttgtaacttctgatatctttgttctctcgacctccggctcacccaatttggccaatggtgccttcggcgttgcagccggctcttcagtcttctgcgtaagtgcagtttctttggcttcgttaaccgaagaggtctcaccgccaaaatcaggcactgtggccgtttcaatgtagcgtggtcggtgagtgaggaccttcactttcttcctcttcggcgtgggctcactagaggcagccgaagcaacatctttcacaggagccgcacctttccttttctaaccccgtagtgggtaccggtagtcagggtacacaaatcctatagcatcaaaaactctgtttagtctcttcttttttcgattcctgaaggccgcagataatgtgttgtcttctgctctggagtatggcccaagcaattcgtcacttgtagcttcgatacattttaaccagtcatcatccg

SEQ ID NO: 157136 - DNA, 691 bp, Zea Mays
cccaaaggtgctcaatttgaattaattggatattcggactcggactatgcggggtgcaaagttgatagaaaaagcacctccagttgttgtcaatttcttggtagatctcttgtttcatggtcttctaaaaaacaaaattcggttgctctctctaccgccgaggcggaatatatatcggtcggaaattgttgtgctcaactattatggatgaaacaaactctattggattatgggattattttcaagaatgtgcctctcatgtgtgataatgagagtgcagtaaaattggctacaaatccggtccaacactcaagaactaagcatattgatatacgacatcacttcttaagggatcatgttggaaagggagatatctctatttattccattggtacggatgatcaattagccgacatttttacaaagacattggatgaaatgagattttgtactctaagaagtgaaatgaatgtgatcgatctctcaaatgtggcttgaagttgatcgcacatgtgtagtattgcatttcggctctaaatatgctctctatgctatttatttggtatttttgatgcagttttcattttaaattgatctaagtagtttaatatgaaaaaattgcattcctcaattacataatgtgtatatgcatgcatactaacccttggatttgtcgaaatgtccatatatg

SEQ ID NO: 157137 - DNA, 931 bp, Zea Mays
gcccattggagctagatcactaccagcaacaccctcgggggcagggttgcatcttgtgatacccacccgagacggatcattaccggcaacaccctcgggggctgggtaatcgctagcaccacccttgggggctgggtcttctgtaacatccacctctacggctgaaggatcctcagtcacctccatgggagtcgggcaatctagaccaacctcttgacaccgaagaccgccttccaaggtcgacgatgcgtgagatgctgcccaggatacctctaaacccacatctggaatgtcagagaaaacatccatcatatcaccatcggtcggctctgacagcatatcctcaggaacgacatcctcaagggcctgatcagaatctgttatggataattcttgcaggccaacaagagcagacagagctggagaaggaatatcactatctcctctactacctctgtaacatcgactattcttgtgaattagtggaacttcttcttcttcttcgtcctcatcgaaaatgtggacaaaggatggggtaggatcacacccattgggctcagctgcaacaggatcacacccattgggctcagctgcaataggatcacacccattgggctcagctgcaataggattacacccattggggtcagtcggtgcatggtcacacccattggggacaaattcagcaggtacaccaccagtgtgatcaactccagtaaagacctctgctggtacttcttcacaagtaggagcagaaggtccagcatcctggtccaaacatgacaaccgccggagccgtctctttttcttcttcttcccttcagaaggtgcagttgggcgactgacctggcgaagacgctttgggcgagtaccctcaagctttcgggtgtccactattctgtcaagctctggtataactgcaatagccatt

SEQ ID NO: 157138 - DNA, 869 bp, Zea Mays
ctcgcttccacgtgatctgtagcgacgtacgccgcatttgcattgcgtctacatgtcgtgcttgctgctcgcctccacatcgtcttctgtagcagcagacatccgttctggcgtggtctgtgcttgtagtagccaatctctagcagcgcttctccacgtacagtgcttctccacgtggtctatgctctgactgtacgtgatcgcactagacgttcgttcggaggccggatcttctgcggcggatcgttcggaggcgtggtctgtgctctgactgtaataaataacattggtatctattaccatgggaatgaaaagcgctaattgtttggatagatattgtaatgttttccattccctatatattgtttggatagtccagtaatgaaacaactaacagaaccagtagcaggtggcgtttggttgaatcaggtgaaccaaagataatacaggtgaagaaaattcataaacagcaagcacgcccatccacattggcctcttctgaggcccaacccaaactctcctcccccgccggtccagcgacctacgcgacccactcccacaccctcgtggtgctcagatcggtaaccgtccgcggcctcctgcgctaaagctcgccaaggtgagaagccagcgcatcgtggtgcgctcggatcggtaaccgtgcgtggcctcctgcgctcaagctcgtatgcagcctcctgcactcaagcttgtccgtggctcctgcgctcaagctcgtccgcgactcctgcgctcaagctcgccaagatgagaagccagcgcatcgtggtgaactcgaatcggtaaccgtctataacaaccctagtgttactagcactaaaacttgagcataacatcataacaagttg

SEQ ID NO: 157139 - DNA, 832 bp, Zea Mays
atgagcgccagcacctgacgattcgattgggttgtgagagagaaagacgctccgccagggtggatttcgagctcggatcaccctcgggtctcggatggtgttccctggggagcacgcgcgtggatctgccggcagtagtgtcggctggcaactcaccggtatgagatcacttcgcaccttctcggcgttccgccattgtcgaagcttgcatcgccgccataggaaatcgtgtgctagctggtcgtagcggggcgaggcacaccatcgccccggagttgcttatagatcaatagcgaatgatgatcggggcacgtccgtcgtcgtcggtgtctgcgttgctccgtggagcgcactggcgtaatattccatcgaggaagaagaggctttagcctttgatccggccctagacggttaggattagaagtatgtcgcgggagccagggaccgtgggattttaagcagagggtttagatcagtttggctttttttccctccgctcgattaaatcttatccgttgatgcgagatccggtggcgcgaaatggtgctgtgagtcgttaaatccgaaccatagaagtttaaccggttggcggataggccgatctaatcagggcgctccgtagtcgatctgacggcccctatcaacagataccccttcgccaagtcgattttgtaaaagagccctcttggaattcaggaactaacccgcagtctagtgaatagtgttctgagtctaggatttattacaccgaggcccctgggtttctgtttaatcatgcgctcagtccaaatattggttataacagggaaactaattgagaaattgatttttt

SEQ ID NO: 157140 - DNA, 661 bp, Zea Mays
tttgccttatttgtgaagttgattcttctggaatagtaactgagtaactcgggcgtcatatcgtcgcttttaggggtgatggtcgagctattattgtcaacatttacgcttttgaaatagcgtccgagtgatgacgaagccacgtcagcgtcgaaatgactgatgactacgtcggcgctcttagaggtaacagccgagtgacttatgacgacgtcggcgttttagaggtaactgccgagtgacttgaagacgacgtcagagttttagagataactatcgagtgaatgatggtaacgtcggtgttttagaaataacagccgagttagaacgggctgcgtcggccactttgaggataatagccgagtgatgatgtggcataccggtgccttagaagtagccgccgggtgatgacatggcacgccagcgttttagaagtaattgccgggtgatgactgggtgctttttggaaacggtatctgacccgggaatatcccatatgtattgcgctttcagacgcctctgctttccatgccctagttcttgctttcttgcctccagatcttctctgtccttttgcaattcggctcccgctctgttcattgttaaagttgagatggcgcccaagcgaaaggcctcgagttcattcgctgcggtgattccc

SEQ ID NO: 157141 - DNA, 400 bp, Zea Mays
atcgatccctcggaccccatcgaacgggttagagactaggcgaatcacccactgatatcttttggggcgtgtctccagaccactagctgactcgggtcgaaagcagctcagacccccgctcggattacccgataacagctcaatggaaacatcttgctcgtcgcccatcgagggtagcatgacgcattccccccttcctactcgttgagaggcgatgaaggggtgtataaaccaaaagtagagacatccctcgatcaacctcttgctccatgcaaaggctcaggggctgacctcgcaaaccatgcaaaaggttgccacagatcgaccgaagatcaaatgggacctatcaaagcaaaagccctcgaaggaatcaactactccttcaaggccttgggggcta

SEQ ID NO: 157142 - DNA, 662 bp, Zea Mays
atcgggtggccagccttggcctctcctacggctagcagaggcggcagcgctcgtccccgcggcggagaactcgccggagacgaggggcgcgggggccctgcgggtctttggggcgacctggacggccggagaggttggggaaggcgcggggagtcttctggtgggggctaggtcggggcaggggcaccggagggggcggtccacggtgaagcggctcggcggcggcgcaaaagggctccggcgagcaattgaacgcgacaggaggcaatacaaaggtcgggagggggcgggagaggttccttacctcaaggcggactccggggactcctcggtgacggcaatggcgcgacggcggcccgggtcgacggtggcggacctccgcggctgcacggaggacggcgggtgagcgcgggcagagggaaatagggaggggaagaggaattggggcgtgtcccgggttgcggacgccgaggcgaagctcaccgtggcagggggcacgacggagctccaacggcgacggggaaacgggctcgggacggcggcggttaatggcagcggtgctctggcgtgtgcgcagcgcgggggaggtgagagaggggtctgctggtgcgcaaatgagggagggggagagggcgagcggggttctgggctcaagtggccgg

SEQ ID NO: 157143 - DNA, 356 bp, Zea Mays
ggaacatgggcatttggctggcttatccacgacatccacttgccctgcgaccaccatgctgtcgacgccggggatagccatccatctctactgcgctatgtaattgggtgtttcaccatgttgctgtaagttgtggcaagcagccaattaccaccatgaaccattactccatcgtgtgccacgatgaacgcgctgccgtgaaatatcccgtcgccaacgtgagtgatcttatcccaaattcacgaagccgatggtcgaaccctttaaaacaagtgttccccttgttccgcctctctgttatgcgcccaacccacccttagccagcgtttctcataaactgtagctcgagttcttcg

SEQ ID NO: 157144 - DNA, 679 bp, Zea Mays
tttcagcagttccaaagaccacataatctatatggacatacaattttgatgtcgttaccatggtctagaagtcaagattattatttattttacctctaaataagtcaagattactatttcttttaattctaaagaagtcaagattaccaccttcaattgagaatctgacatcgagcagttgctgcattttcttgtggtgtccttttccgctctacgcctccagtttcttaccataatcatttataccttgacacgtcgttaagatttaggttgtaacatagccaactttctgttttttccatgatgtttctggagaccagagagagatgttcagcgcatcaacttataccatactctgataattgaccattgtatatggaacgggggaaatagcagtagcaaaatttcacctgtagggaccaaataatgtggctttgtctctaggacaacatcatgttcaatgctggctgtaggacactgagaatttgcaggtttatcattagcaaaacattgcgaatatacctatttgacatctgcaagtacatctatgttgtacatccgtacaggcttatttgttctcctgccactcaaagatgcaaaatggtcagtattgctggacatcgaatgctgacaagcatctctgtgtttaaacatacacctctttgtttccctggacagc

SEQ ID NO: 157145 - DNA, 323 bp, Zea Mays
gccgctgtagcatgctgaagatcgatcaattgaggatcggtagccagtggttgcaccttggtctcatctcgctcccgaaagcgggcaggtggaatgggtggagcggaaacgggagcgggaggaggagcagtggaagtgggagtagtggaggtggtaggtatggctgaggtggtggatggcacaggagtgactggagcgggcgaagtgggaggtggagtggtagcagtggcgggtgtggtagcagtggcgggagtagaaggtgtggaggagcgaggccgagaggcgagtcgacgaactctgtaagcaatctaatctgatgatat

SEQ ID NO: 157146 - DNA, 667 bp, Zea Mays
gcttgtacgatatgaagataaagggcgaacacaactttttgatttccaagattggtcaaggaacaagggtggtttcatatttctcctagcttcatcatactacaagagcgtacaagtgttataatccttagcatagatccttttgaaccttataaattacagagcatgatatccaaataatctttctgatccaacagtatttctttgagcacaatttgagagagacttgagcaggattttagggcaactagagtatcacattgtttgcatatagcagatgacaccatactttattctctttataaagaggcaaaacacaataagtgcgagagattctccaaatttattcatatatcacttagcacaattacaaatattgaaaggggcaacactttgacattttttttgtgagacatactccttcattctaaatgatatattattcttccttgttagatgtaccacacttcagagctggaggtcgattgtcttcaactactattctttctccagacggggtttccaaacacatggttctctcagtatgttggattactgccttagttctttgtaaccaattctttccaagaatcacatcctttctcattgattctatcactaggagatcagctggaaaatctatcccgttgattttaacacttacttt

SEQ ID NO: 157147 - DNA, 543 bp, Zea Mays
ctttttcatgaagaactgataataccgaagttgctagttttctggtagtatggagtagtccgtgcccagtactgccgagttcagtatttgttggttttttacttgcatcgctaaaatcaggcctgtttttttttcttccaaaaaaggggtcctggaaggctaaaagaagacggtgtttagaacagaaatcttgatatcagttgcgaacactgagattagaagctagtttaaggaccaacaggctccttatcgccatcttcgatccatccagctgaatgtatttggagttattattattctctgaattttcagtattttctagcttatgtgccaattcgatttctgcatcacatgaatttttacgtgcccttttgttggtacagttttctcagactggtttgtgattttgcttcgccgaaactattacaagaaagaactcctagactgctgtcaataatagcttatccgtgttctcttaaaaaagggacttatcggcattacgataaattttgatggctgagtattctttgccttcatctgttg

SEQ ID NO: 157148 - DNA, 653 bp, Zea Mays
ctcatgcatatgcaagaagtgttataatctgagttggcctgtctatacaatttggctctcatccctttatatagtcgagggatcgaacaaccattataatacaatgttttttagatggggtgtgtcatccccgttctcgagtacctatcccttcctatatgtctctatgtgtgcgtctgctttgtactcctcgagctgtcccaaccacgagggtggttgagtcctgaagatgtccggagccatgttgtttggtacgcttcctgtgtggggaaggtctgtcttgtatttccctctcttgatgtttgtctttgttgactatcattctcttagagcatggctagccattttctgtgtggttcatacatttgggagtgtagtagttgcccgatggagtcatcagagtcttgtgtctaaccctatcgttgtccttcgcacgcctcagtttggggcgtaatctggattgtcagagatttgtagacgtgtccctcctgtcaggttatgctacctctaggttgtgggcccttcgaacatgctttgttattttaccttgccttgggagactgaggttgggaccatccgattgaggtgacttggttgggatctttgttttgggtgattgaggtcgagattatcctggttgagggagatatttt

SEQ ID NO: 157149 - DNA, 710 bp, Zea Mays
ttggtcggggggtatcaagggcacacaagaacactaaaacgagagggcagagggcatgtgcagacctgaatcgagctggccgcggtgaggattctttcacggtggcggaaactcagtttgggggaagtgagaaattcgtggtctctggtggataattgaaggcaagcgtgggtgcgttggcttcgtgataacatggcgcaatagacccggccatcaatttataggatcgctaagtggtggccggggatttggacgaagacacgcggcggtcggaggaataggaggttactggtgctcgggttagtcgctttcaccgtggcagtgcaccggcgatccccgtgcatgcgagacgcgatttacagcgacgtggtctaatgctttagcacatggcaggagatcgacgggcagccaatgccggtgaactgatctgcgctggccgcaaagcatgggggtacggcggccagctacccgagttatccccaggcgaagatcttttgccccaaagcgctatccggtcactagtgagcgtgaatcgtaatggcggcgacgatcatggcgtggattcatcggcggcgaggaggggtgaacctaggatcatgttcaggttactgtaccatggcgcagtctactcagttgacctgacagaccaacattgagctcgattttctcctgatttcatgtaacaaccggttcaactctctttatcaaag

SEQ ID NO: 157150 - DNA, 292 bp, Zea Mays
attggggaagaagacttggaaacgaggaaagcagggaggaagacgaggctgagaaccagcgtctttgtctgttcattaattcttcgataccttcttacaatactagagagagcttataaactaccgaccagtccgaccaaatacacgacccattcgggcccaaatactcatgtgttgcctcgcctctaccgcttcgttggtgtgacaccgtcagtattgttggtcagcttttccatcttcagtgctccatcttcagtgctggtgagcttctgacgtctttcttgtattgttg

SEQ ID NO: 157151 - DNA, 2124 bp, Zea Mays
cagacacttaaaagccaaacagctcccgaaaaagccacccaagaactcaagaatgagaaaaaagataaagaacgctacgcagagacactagcaaccaaagtcaaaagaattagcaattcgttgctgcccaaaaacatccttattaaccctgcaatcacacactctgacttctctaggctttggaaggttctgcggttccgctctttccaaatctcccaccagaaaaggatgatcaaaccatcaaactctctccttgagcatttatcgactttggctctgcacttgttccaccaagtgtatattgacgaagattgtgccatccctggcagcaacgcgaggtcaagccaatgagaaagctgcgcccacaccgccctagtgaagatacagttttggaacaagtgggttatagcttctggttcttgtttgcaaagtctgcaaatcggatcattactccaacctcttttctggagattttcagctgttaagatcttattatgcaacagagtccacgcgaagaaacgacattttggctccactttcgccttccaaattggtaatagattgcacttggcataccctccaatgaattgggccaaataggcactcctggttgaataggcaccatcattggtccagcgccagtaaatggcgtcctcaatcactggatttaattgcacctcgcgtagagcttcccagagagccacaaactctctaatttccttggccccaacaactggagaaatgtggaagatccatctgttatttgttgtggcttttagaactgaaatattcttccgtgaggacttggcaaagagcgtgggagctatcaatcgtgccgacgtgccatcgatccaacacgaatgccaaaaagaggctttaaccccattgcccactgtcaccactgtagacgcatgaaagagatcccgatcaaccttgctacagggaatgtccaaaccgacccaagctctttcttgatttttccactcaaaccaaagccaacgaagtcgtaaagctcttgcaaaacgctccagatcgacgattcccaaaccacctaggttcaaagggcgcttcactaacggccacctgactaggcagtgtcccccagaaatattttctggttcctctcccttccacaagaaactacgacgaattttgtcaatttgcttgaaaatccacctctgttcagggaacacagtcaagtggtaaattggctgagctgatagcactgttttaaccaaagtcaatcgtccagccttagataatagtttccctttccatcccgaaagtctagcccgcaccttgtctaacagtggctgcacatcaatttttcggaggtttctcaaatgcagggggagcccaagatatctactcgggaatgaagccagcttccccgggaaccacatgggcaaagattcgaccatatctgcatgacaacggatgggaaaaatttccgtcttattaagattaaacttaagccccgagcaacgactgaaagtttgcaggatactttggaggacgccgagctcggcctcaactggtttgacaaaaatacccgcatcgtcagcgtacaaagagcaattaagggttgccggacatggaacgatttgcgaaaggattcctgactggatcgcccgctcaataattctttgaaaaggatcgatggcgaggataaagagcataggggacaaggggtcaccttgccggagtcccctcaaatgggtaattctcctacccggctttccattcataagcacacgagaagatgatgaagcgaggagagcagcaatccaatttctccatcttgcaccaaagccaagaatcgcaaggacttctaacaagtaagcccagctgacagaatcaaacgccttggaaatatcaagcttgatgaaaagtgcttcacatttattcttgtgcaatttttggatgactctctgtacatatagaaagttgtcatgtatactcctccctttgatgaaggcattctgcgatctggacaccagctgctcaagcctaggtgctaatctttctgctagcagctttgttagaaccttcgctaagctgtttatcaaactaatcggcctgaaatcagcaaggcagagtgccccctctttttttggaaggaga

SEQ ID NO: 157152 - DNA, 853 bp, Zea Mays
ggctttgcaaaagttactctcttaatgcatgacgtcaatgttgtgcatcagaatcaatgacttagcataaggaagatcccacaagccacatatgtgagtccagttatgctcctcaccaaaaccttgataccttttcccactatcgtttaggacaagtttcatgtgctcttctgtattttctatcccactacgtcgcttgggcagtcccttcgtgatgatggtgcccttcctaaacacctttctctgccttctgaaggggtgattcaagggtagaaaacatctatggcaatcaaagtaacatatcttgccaccagcactaagacaaaaacaatctgtatctttaccacaaaaaggacatgtcaatctaccatgcacgctccatccagagaaaataccatacgccataaaatcatgaaccgagaaaagatacgcaacccagagattgaatttttgcttcttgaagcagtcataggcttccactccttgccatagcttctttaactcttcaattagtggttgaagcatcacattgaggcataggctaggatgctcaggcccaggtataacaagacataagaacataaactcatatttcatgcaaagagcaggtggaaggttgtacggtatggcaatgacatgccaacatgaatacgacggagtggtcatattgaaaggcgtgaaaccatcagtcgccaagccgatatgaatgtttcttgcatcgctggcgaactctggatcaaagttgtcaagagccttccatgcatcaccatctaacgggtgcaccattaacccatcttgtttgtccgtatgatcttcgtgccacctcatgtgcatagcagtcttcctcgagaga

SEQ ID NO: 157153 - DNA, 543 bp, Zea Mays
ttgtcggcgagttcatactagtaaatagtaatctgcgtttcagtgtactgaatattgaactgcgtttcagtggccgccatatatgttagtgttttaagtgtctgacgagtaatatgcattttcagtgttttcagctgtcagtaatctacgttttcagtgttttcaactgccatatatactgtgtttcataccagtaatctatacacaaactctgaaaactctgaagaaggtgtaccatatatgatgcatgcgttttcggtgcctgcaatttctgtacactgtaggcgagggcatttgtgtaccagatgatttaaaaaacttacgacctgtttggattgacaaatgaactcatccagaatcatccgaacctaagtccgaacctgcatgttctgtttggtttgtgtcacgaggtaaacccatccgtcatcaagccatccttcgtagctttctctataggtataagttgacggtcgagctggttccttgaaaaagtagcggatgacctcgtccttctggtctctaacccatgacggatgatttgac

SEQ ID NO: 157154 - DNA, 456 bp, Zea Mays
tagacggatctctttggccctgcaagtattcgcaagttaaaagacgctaaattgagttcatagacggatctctttgacaaactaagcatgtaccttatgtttgaactatgaaatgaaatcgggcaatccatttctcgcaacctttctaagaagagtgtcatattcctgtggagtggggtcccttgatcgatgccagaattcatgaagaaattgttccatgtatggcgtcacctcttcaaggttggtcaatacatatagcatgatatgtcgccactcttcatgtgttagggtcttggtggtcgagccacttgcgcttccgagttggcctcgaaatatgctaaggttcgattcattgccaccgtcattgtaatgagggggtggattatgcacgctcggcagtttgtcaccataataagttgttgtgaagtttgacacctcctctagaatgtatgcctc

SEQ ID NO: 157155 - DNA, 472 bp, Zea Mays
gggcgaacagttttcggccgtcgatccgcgcgcagacgttatagattagaccagtgcactgtttcgctagggaactatcctgaccgtgtgattgggtttggacggatccgatagggtgtggggcgtggtggaatctggaccgacgatctttaatccgatgatcctcataacgtaccggttcagtaataagtcacgaccgtcgatctcgcgatcaacgactctggtagtatacctattggatacaaatgttcgatctgatctggcgcgtccgtttctaatcggacggctctggatcgcagataccccttcgcgtgttagttttacacatgagaccctctagtatttgagaataaacccgccgtccgcattcattattcactgagtctaggaatttatgcgagaaaccccctgagtgttctaggaaatgaggcccagtccagagtggattaaaaatagagaaataatattagaa

SEQ ID NO: 157156 - DNA, 997 bp, Zea Mays
acgcaatattactgggaagctcggggttcggtctataaaaatccagggcccagatcataaggctaaaggggtacgcacaagaccaaatccggtgcgttcatgagagactcaatgatcaaaatttaaaaaggctgcgatctattttcatacgtccactcatcgatctacggcaaggatgaatcgttgccgaagcgtcatctctactctaatcctatccctccatttcagatccgacgaccagtagatttcctccctattctaatcccaaccgtctgcttcagaatcaacggccaggaacctgtcgtttacctcccgatggtggctctcctacaactatggtggcgagatcgccgacccatcgtactactgcagtctagatcgtgatttcacacacagcgttgccgaaacagcgaagcagataccgtggacgagaaagactactaggtggcatatgacagcatgtggccagagaaccgaaactgctactccggcgtcattatcgaacctgggaccttgattagatcaaataatgctagcatttaaacccatacctcgaggtagcctacgacaaatcgtcggagcgaaagatacggtgtcgtcgtcacaccatggcggtgccccggtcgatagatccggccaccccggccccggccctggccccgatccctcctctgtttggcaatggcgacatggttatccgattgtttggggtagatctagattggttgggtctaactcctgcgctagccatgattatatagggcaaagtatttcagagtgttgaggggtattcgatcgaggagattgagtccgtcgtcccggacagaaaacccgacgcggataatgcaacggccaaggggcccaacggctcaggacatagccgcatgccaaggaagttttgatcccaaagtcaaggcaaaaatcccggagaggtgaagggttctagggtctgatcttgtggaaaacttggcagccagaatgatccccaaggtggcca

SEQ ID NO: 157157 - DNA, 819 bp, Zea Mays
gtagcactgtccaggttagtgttaagacctaccaccacacctacatatgtgttgaggcgatcttctccagcttcacctagaacaacacctgtctggctctccccacgaggatgtaggggaaggtgcctgtacgccgtgtcgtgcagctgctgtcgataggtgtggctgagggaccacaaagctctccgagtggcattgctgaccgaagctgagtacgcggacagtgacgtcagagactcatggatgatagagtcctgaaacctctgtctcctgcatccaacactctgatatgcacgtgagtgatgtagtaacaagcccaagggggctcagacacccgccttatatcatatagaggtcgaacgtaggttcccagcgcatgcaacacatcttgaagcaagtttgggaagtgtcacgtctcgaacattaaggtgtaatactctgtgataggccacattccaacaaagttgtcctcctgttcattgttggcttcttcatcgtcgttttcttgttcctctgcctcatcgtcatcgtctccaccatcaccagaatcatccgggtcatcaccttcagtagcaggggcttgagatattggcactggtggcactgaagatgaagctcccacatcaaaggcatgagattccgttaacggagtgggcattgctagaatctcctcagagctgtcctccaagatcacaccattcctcacatgaaggtggtgcagctccacagggacttcttccaccacaactgggtagaaaggagcttgctgaggtggagggatacggttggtattcacatgggtggtctagagggtgcgca

SEQ ID NO: 157158 - DNA, 374 bp, Zea Mays
ttctcctagcaacccttgcaaatctgtatgaatttcgttgctgctcgctgccgtcacctcttccagcagagcaaacacccagatatcatttccacgcaaccaccgctccacttgtaaagaagatacctcctgcaccacttgttgttttggatgattccccaccaactggacctcgatccctttgtccacaaaactgatcacctgagcgtcccaatcacaatgcatagggctgtgccttctcaaccaatcataacctaaaatagcatcataggcccccagccctagcaccctcatatcattctggtatgtgtgtccgttggcccaccactccaatgatcgcaccattgtgtcactatacataatctctccattgg

SEQ ID NO: 157159 - DNA, 456 bp, Zea Mays
aagagataattccagaaccaagggatgacgaagttatcgtctttaagagcttcttcagagcagggcttcagttcccgctaaatgacatgataggggaggttctaaagaactttgaaatataccttcatcagctgacccccgatgccatggttagacttagtgtgtacatatgggctcttcgaagccatggaatggatgcgaatgccggagctgtctgtcgggtgcacgaacttcactaccagacgaaggctagagcagatggccttcacaggaactttggctgctacaattttgcgtatcggaaggatatgaaggccctgattattggctatcgtaccaagtggccgactggatgaactaatgaatggttctacatgaaagcggatgagaaaacgagggagaagctaatgagcacggttatgagtccattagagttaaacttcggcatgacttgac

SEQ ID NO: 157160 - DNA, 592 bp, Zea Mays
gcgctataaataggggtagagggtacccagatcggtgtgcccacccccacaaatttcgccagcttcaacagatttctgttggagaccgtaggtagaggatgagtcttacatggtggccccacgagtcagacagtgtacggacgcccacccaccagccgttgcactagaacgcgcgcgaggctgattgtgtggcgcagaaataggcttcagttgcgcggatggcggcatgcttcttttcggtttcatggaggaagaaacgctggcaggctaaccggccaaatcgtgcgtgcgtgagaaatagatagattgctggccgcatgggtcccatgcgtaagtgtcacaagggaccatgcatgtgtgaagtaatggtgatgtcatctgcggctatatgaataattaaatcgaaggaaagagggtgggttacgtccacattttggcgttactgggcaagcagccatggaatcacgtagatgtgaggcttcattcatttttttgttttctttcttgtttttcttatttctattttaaatccttacctcagttccaaagctggattatatgaatgcaacaatacaaaaaccttgcatgatgc

SEQ ID NO: 157161 - DNA, 554 bp, Zea Mays
caggaatcccagcaacttcccagcggagacaccaaagacgcacttgtccgggttcagcttcgtgcgtgttgcccacagcttgtcgaagaccagggttaggtcttccactaaggtcgaccctctcttagtcttgaccatgatgtcatcgacgtatacctctactttgtccctaatcaggtccccaaaagacttactcatcacccgtacaaatgttgacaatgcgtttttcagaccgtaaggcattacgacatagcagtaaagcccatccactgttacaaaagcggtatgctccctatcttccctagacatctggatctgatggaaaccagagtaagcatctaagaaggacaagaggtcacacccggaggtagaatccacgatttgatctatgcgtggaagtggatacgggtccttgggacaagctttattaaggctggtgtagtcgatgtacatccaaagcttcccgtttgcctttggaacgatgactggattggccagccacactgggtgatgaacctcttcgatgaagccagcgtccagcagcttccagacct

SEQ ID NO: 157162 - DNA, 486 bp, Zea Mays
tgccacatgaaaatcaaagatcaaggccctgcaaatcgctttgttaggcgctctaatgggagttctgatggtacagtgcctgacaaagatcggtagatgcagtgtatctcgccgccgatgaccccgcgccgcgatcctcgtcggtgctacgattcgtgcctggtaacgcgcagataacaatgttggataaaagatcttggcactcgatgagcttggacccggccactgaactattcactgtacccacttgttgtatgactaaccgcggtgtcctcgccggagttcgccgtcttcgtacctgcgccacctgcctaggagcattaccacatcgcagtgaaccgtaatagggagtccgtccatcaccgggagccttgcctcagtaaaagccatgttagcgcttcccagtgatttcccctctctctggtcgacaacgcgccttctccaaattagacgccaccaacattgctctctataaattgatgcccc

SEQ ID NO: 157163 - DNA, 621 bp, Zea Mays
atcatattacaaagtaaatgaacatgtcaggaattgtactgaacaataaagaacataaatgtattgcatggaaccacactgaattgtgacatactcaaggtgtgagttgaatgccatatattggtgaagacaacaatggtacaaaagggtcacattcctcagaaacgatacaaatagaatttgttaagtaaattaatagctgcttgagttgactcaacatcagtgggaaaatggaatagactggcatgggtaaggttaggcaactaacagtttcaaaaccttggttgcattggcaactacgggtcaactgatgtggttctactgtcgaccgtttgcatctcctacaaacatgacgcccaaatgtagggttccaagttgttccgaatgcccagaccaattagtgtaggtttggccatcccagcggttggtacagagaaaggttgttcttacgggggctaaatctgatgaccaagaccgtaacaagtacacaggtcacactagaactgtggatctggttgacgtcgtatgtggtcggcaaaatcaacttggattattcaagaaaacgagtgctgttctaaaacattcgtcaaacatgtattgatttgacgcggtagacgatgg

SEQ ID NO: 157164 - DNA, 271 bp, Zea Mays
gaagaacaagtccatcaaataagggagaatttgagaactgcacagtcaaggcagaaaagctatgctgatacccggagaagattattagagtttaaagagggtgatcatgtctatttgaaggtgtcaccactccagggtatgagaagattcaaagtcaaagggaagttgtctcctcgcttcattggacccttcttaatcctaaagcgagtgggagaggtggcatatcaattggagttacctgatcatcttgcggatgtgcatgacgtctttc

SEQ ID NO: 157165 - DNA, 519 bp, Zea Mays
tgtgccgactcaacctgcacaagaggaagcccagcgtccaactcgtctacgtcgccaacgccgtgccaatactcgggtccacggtccagagtgggtgtaaggtgtgtgtggtataaatggcagtgtgtgtccttgtatcgggggtaagcaaaaactgagaaaaactctaatagaactcctcccagcttcctccccgtcctcctgctgttcctatcttccttccgtctcctccctcttctaacaattggtatcagagctattccaaccccctacctccctaccacccagccgtttctgtgatcactcgatcccactagtggagggagcaaggctagtgtcaatccgcccctatcgattctctccagccatgaaggatgagatcgagtctcgagtccaagaaatgctaagcaatggtgttatacaacatagcagcagtgctttttcctcccccgtgctgttagttaaaaagaaagaccagtcctggcggttttgcgtggattaccggcatcttaatgctct

SEQ ID NO: 157166 - DNA, 977 bp, Zea Mays
gctcatctttgtgaccttgtaacttctaaacaaaggagattttgccctaggtcaccacatcaaaattgtagcccaatcatagaagaacaattttgctgaagagggcaagccatgttcttgtgggtaatttggagataatcatgctcaaactttggctgtcaggctgcttaagtctgaaaatcagactgacagtgggcggacactgacttcaaactcaattctgagcatgatccaatgaaaatctaccttgggctgctatggcaaagttatagctggttggtagcactccacttttgctgcagagggtcggacctggtaccatagaaaatctggagaaaaagagctctgaagttgctctgtcaggcatgtatcaagaaactgaaactgaactcctgatggtacagtgacccgagtggctcagaacgccagcatagcctgctcgccgccggcgaccctccctgcgctaagatttgcgccgccgtcgtctcaattcgtgctcaggatgacttgataaacgctcggagcacaccgccggggataagcccggccattaaagtatcccggccaccgtacaaagttccccgcggtagaacccgataagctcgctggtaaccgccgcctcccggccgtgcgctgcgtggcctagtcgttctacagcaccgctgtgacaccttaaggctgtcccatcgtcgccggggagcctgccacgccacgggacacgaattcaccgcgcccgccttcttcttcatttccggccgtcgcgcgtcctccccgaattcactggccaccgccttaccctcctataaattgagcccgtgaccagctccgtagggtcatcagctaaccagccaccgccaattagccacgatcgttcgccggagctcgggaatttcacgttcgccccaaattgggtttccgccaccgtagaatcaagctcaccgcggccagccctttctaggtcagttcatccctccttc

SEQ ID NO: 157167 - DNA, 373 bp, Zea Mays
acgaggggggagccggtggcggggagtcgttgcccttagaggagaagttctcctcagagaacttcgagtctccgaagtcctccgacggaggagttgtaggatgcttgcgctttccttccccctggacgtgcttgcccttgcctcctttgccatcggccatggtgattctagtgagtgggagaagaagaagaatgcagaagcaagagcgggtgaagaaaacagacataggcaggcagactatttaaagagggcaaagggcgacactttgcctctcgcccgtacagcgaacagtcatgaggacttcaatagccacttaagtttccacgaaagggagcagaccactgacacctattggcgtaacacgacaccagaa

SEQ ID NO: 157168 - DNA, 318 bp, Zea Mays
tcataggattctgataaatctgtatagcactcatgttatcacataaaagaagtgtggcagtgtcacaagacacaccacaatcagctaataggcatcgcatctaaataattttagaggtagtagtggcaagagatcgaagttcagttttagtactagatcgagagatggctgcttgctttttggatttccatgcaataggagaggatccaagaagaatgcaataacctataatagaacatcgttcagtgggatcacttgcccaagtggcatcagagtaagcatgaagttgtagaggactatcaacaacataaaataaac

SEQ ID NO: 157169 - DNA, 626 bp, Zea Mays
cgcggacaacctcgttggcgcttccatcactggtacggccctgcattgttgttacgttgttctagactagcgtaggtcgaccggattgatggggtagggattgtggctcggtaatttggtcatcggcgttagtttttcgctagatgtcgtggcccgcgctaaccggaccttaaacctttccgtggggcgtacggtcgagtccgccgtaccctaataccagtgtaaccacagtttagtgagggggaaagccatgggggaaccgaattggctatcgccggccaccctccgccgcgctcaggggtagtagcgccgccgcgctaaagactcaggtgaagacgatggatccggaccgtccgatccgtctcgggcggccgggatttgggtcggggatgcctttcggccagggtgaatctggggcgttggatcacaaacgagtggttccgatcgcattgcgcctaatgcctggtcaggtgtagggactacttaatcttagcggccgaatcttgatccgacggccagttatgcataccgctccagggaaggcctaaatctaatctggcgcgcaggatacgtatcgggcggctgtaaacactacgtaccccttcaccatggcagaataacataag

SEQ ID NO: 157170 - DNA, 363 bp, Zea Mays
aagaattagacacaaaatgtttaccttgaaattagaatagaataaactgccggtaatatgttgtcgacggtagcgactaatatccgcttcaagcttcgggaagccaatactcttcgataatgtaccgacaaccttcgcaccggtttggtctcgtatacagcctaacccttcatcatcaataccaccaaagagaagcgcccccggccgatatccgcaagatagagcatactcttttagttcctctctttcagcttcagtcagctcctggccaattaggtttcagaagtcaaaagtttcgtcttccgaggtatcttcggttattcctcctttctcgggtttggcacccatggtctcttcggtggc

SEQ ID NO: 157171 - DNA, 548 bp, Zea Mays
ccgacaataccctcgggggctgggttgcggctcgcgctacccaccagagctggatcattaccggtgacacccttgggggctaggtaactgccagcaccaccctcgggggatgggttttctgcaacagccacctctaaggccgaaggatcctcagtcacctccatgggagtcgggcaatcctgaccaacttcttgacatcgaagactgccttccaaagtcgacgatgcgtgagacactgctcgggatacctctaatcccacgtatggaattttagagcaaacatccatcatatcgccaacagtcggctccgatagcatatcttcaggaacgacatcctcaagggcctgatcaaaatcttctatggacaactcttgaagactgacaagagcagacagagccggagaaggaatatcactatccccctactacctctgtaacgccggctattcttatgaattagcagaacttcttcttcctcttcttcgtcctcatcaaaaatacgaacaatagccggtgcacggtcacacctattggggtcagcttcagga

SEQ ID NO: 157172 - DNA, 273 bp, Zea Mays
gcacgtctttgttgcaattcccggccaccgctttcgatcagtataaattgagccccccgtaagctccacaaggtcatcacacacccagccacccagtatcaccctcaatcgttcgctgaggaactccaatttctaactttccccaaatcggttcgaatacaccgcaagaacacctcaccgcggccagcttgttccaggttagttcaagctcctcaatcatttgtcctagcatacttaagttatcctcaagctcctcgatccctttaattgaac

SEQ ID NO: 157173 - DNA, 684 bp, Zea Mays
ggacgacgaagtcggacaaagattgcacaaacggaggacaccaatggagcacaacacgcagctgtcggtagaaaccctaaaccctaggatgactaagtcggacagggtgcacatactgaggagcagaatggcgtcgaatcggagacagcgaacacgaaccctagaaccacgatgacaaaatagcggaggaaaagcggacggaacaaaccttagcgtcgaatcggagacagcggacacgaaccctagaaccacgatgacgaaatagcggacggaacaaacctattgcacagagcagcaaaggaatgaggaagcggagggaggaatggcgagtagcaaagagcttacgtgaaggagacggccggctgaggactgaggcggtgaagggagcaatggcgagcagcagccccgtgctaggcccaaaagaaaccaggggtgcgtactgtcggcagaaggatccagaaatgcagtcaaaccaatacaggaaaagccaagagtccaagactaagtattgaccattgattacagatccaacgactgaaaatgtactagctgacgtggacaccgtggttgtccctggtttgaaccgcctttgttaaataggaaatatgtaaaagctctgcaccacaacgcaatttttttaatttagcccttttctaaaaaaatatcacgtttacacacctaaac

SEQ ID NO: 157174 - DNA, 493 bp, Zea Mays
tacaaaccctaaaaatgaagctctcaactctgatcacaataaaacgagagcccgctccagagtcctctaaacgaactcgtgaattgagaactgataacacttcttgagcactattagaaatccatggatgaagctagacctactcaacattgagttgggtcttgggttatttagcatggcccgtgtccgacctcgtgcatagtgtcgggtcgggtcggttggctcgtgcctccctatttgatgtgttggtcagttttttcgtgttcggttgagttttttggggattggtctagttttggatcaaaaagttatggcttgtgtccggtccgtgaattattgtgggtcaaaaactatgactcataccagcctgttgcatcggtcgtgtcagtcgagtttttttggatgggtcaggccgggtcgtgcgatacatgctcatcaggtctagacgaagcagattgaaggttggagtcacagaacaaaaaacgcttcaaga

SEQ ID NO: 157175 - DNA, 623 bp, Zea Mays
cgtgggtgttgaaacacggacaaggagggcgagggcggacctgagagcggctggccatggtggggtgactcacggcggcgcagacgaccaatttggggaaaaacccaaattcttcggctatggtggctaattggaggcgagagttggtgctttaagctcgcaacaagttagcgaagcaggtcagggcatcaatttatagtagctcgaagcggtggctccgaatttgggaggcgagcggggcttatcttcccggcgagacgattaccgaggcccgccgtggagcgcatgcgttcactaggggacggtcactattaaggggatgccatgaccatgacaatgcggtgaatcaggcgactacgtgtcccttgctgtgatcacggtgagcaccggcggcgatatttcactcactacgcgggcaagtgggtacgacggtgactcagctctggccaagtcctcctcacccaagatcctttatccgcaacggttatccactccacaccggcacgaatcacggcaccggcgtgaatcgtggcatggagatcaccggcggcgaggttcactgaatctggcatctggttcagtcactgtaccatcgcaaactcctttcagtgtgcctgacaaag

SEQ ID NO: 157176 - DNA, 709 bp, Zea Mays
ccagcactaagacgaaaacaatttgtatctttagcacaataaggacacgtcaatctaccatgcacgctccatccagagaaaataccatacgccataaaatcatgaactgtgaacagctacgcaacacgaagattgaatttctgcttcttgaagcagtcataggcttccactccttgccatagcttctttaactcttcaatcagtggttgaagcatcacattgaggcgtacgccaggatgctcaggcccaagtataacaatacataggaacataaactcatatttcatgcaaagagcaggtggaaggttgtacagtatggcaatgacaagccaacatgaatacgacgcagcggtcgtattgaaaggcgtcaaaccatcaattgccaagccgatacgaagatttcttgcatcgctggcaaactcaggatcaaagttgtcaagagccttccatgcatcaccatctgatgggtgcaccattaacccatcttgtctgtccgtacaatctttattccacctcatgtgcatagcggtcttcctcgagagaaacaaacgtttcactctaggagtgagaggcatgtatcgaagttgtttatgtgcaacctttgtcaccaccttctccccttcttcatttacaagctccacgtacctcgacttcccacattttaagcatttctgctctctgtcatgttccttccaaaaaagcatacaat

SEQ ID NO: 157177 - DNA, 749 bp, Zea Mays
catttttttacaattgtttaacatttctgattcaaacaacaataaaagcaggcctggtgcaatggtgagagctgcctcacagagtcactgggtcacaggttcgaaacagctccacagagacaaggcttgcctcggattatcccttctctagaccccactcttgtctctggcaatgggtctgccttggttcaggcccactaacaaacttccagtagtggggtgagtcataaagtgtggcttcatccagtaacagtttttggagactgaatgcagttatataatcgcgtagcttatatataatatatatatgcctccgaaacaatcaactacagagatctaggaagatagccaatctaataaatttataaacaacatgtagaataaaacaagaaataatataacaaaaggcatgaaaactgcaaaaacaaaaacataagcggtctccaatctgtacaaggggtgcatatgtaacaagctacaaatcacctttttctagattacaaatcagctcctccgaacaaggtatataaaaatatggcagcacctgaacaccaacgagagagtagtaatcagggaatgatgaagttgcttatgatgaaaccatagggaatatgtaggtggacaactgaagtatacttcacacattagggattccaaatacaagaggtgagaacagatccttgtctaacaatcaagaaaatcagattgtatggaaaatagtaatatacagtaatcttcaaatataaaga

SEQ ID NO: 157178 - DNA, 361 bp, Zea Mays
gatgggagtggagtaacgaactagttgtgggggtagtgtggaaggaggccccggagtcaaccacccaatcggtggtgggagggggggtggtggtggcgaaggtacggtgtgagcggagagggctaaagaaggtgccccgatagaggtgctagggagggagggagatgacacaggctcaactgctagggaggcgatcgcaacacatgggaagacaagcggtccaagcacgtgacggcccacctgagggtggatctcgacgcagtcctggagaataaggttccagactggatcgaaggacacgaacatgccccggatgagctggccgttgtggaggagggcacgcacagtcacaggagcgacg

SEQ ID NO: 157179 - DNA, 312 bp, Zea Mays
ttggattagttaaaaaatctcctagctatgtctcttctactctcgagttacgatatcatgtgtgccccctacatttgggccattgcaatgtgtacagttgacaccaagcccgttagtcatgggaagctagggtttagggattttcttggctcggaccagtgttttggtctcttagccatcagtgggatgtgtgcatcaggcattatactgggagggtggtcattcccaacccgaacgagttttaaaaaatagtttcctcattttttggtggaggccatttctttatgaaaatccgtagcttttagccttcga

SEQ ID NO: 157180 - DNA, 705 bp, Zea Mays
attgcattgaacgcgcaggggcctcgcgggctgtcctctcgcctcgcgggccaccgggaacgtcagtcagtcggtgatcctacgcagctacgcctacgctagctgcagggcgtcgctgatcactagcgcaactgtggctgtcactgtagtggaaaatccgaggggaattcatggaccatcgtcccgccgtggtactggtggtaactgcagacgacgagcggtgttggtgttcctttcagctagcgtctcctccgaatcaatcaggtgcgacttggcaatgcagcgccactttactgggttaccgctttgtagttgtagtggtaactctgaacgtactaacagctaccaagaatatcttctttcttaatcatagttatactctctctctctctctctgtgtgtgtgtagtattaaaatagtggacttttagaaccatatattggtaccaatgctgtaggtaaaaaacaaatgccctccataagaaaagaggcatagagatgtaccaggaaaagagaggaaaatgtattgagaggacgaatatagattaattggatagcgagactgcaaagtattttaaaataaagtttaaatgctggtatgatatcgggacaagtgtatatatatattgtcctggcactattatagatgactccccaacagtcgagttgaaatgtagccgcgtaacagcacacggcaacgttgaac

SEQ ID NO: 157181 - DNA, 429 bp, Zea Mays
gagccggagctggaatccatatgcatggagatggtggacctgttgaacggatcattcatagcggccaatttgtttggtggctatcttagagccaacccttgtcctcggttttggcagaaggttctcaaaggccacagaaactatacgagtatgcacctgcatctctttggcgagtatcaatctgatcgactagcgaatggtcgcccagtatacatgtggagattacccaagactgatgatatgctaattgcttacgattattaccaagcgtgctcagcccagcagcatgatctgcccaagtttaccatagaagaggtgcaaatcggaagcacgagacctcgaggggactttcaagccgtcgcatggagatcaaacataccaccatactacagctatttgttgagttgtggggtgcaagcatcgtcgtcg

SEQ ID NO: 157182 - DNA, 564 bp, Zea Mays
cggccggcagcaaccaccctatggagtcgtcggcggcgatgacgatggaccaccaccgcgcggcgccgtcgctgtcgacggaagagaaacggcggatcgagcgggtggcccggtgcgtggcgcgggaccgggacggcggggacctcacggagaagctgctgctgcggctgctcggcctcacgcgcaacgcccgccgctggggcttcctcgcgccggaccacccgctccacccctactacctccagcacaaggtctccgagcgctgccggatcctccgcccgcgccacgccgccgccgaccggcggtgatcccatgcatatgcatgcggacgtgcagcggatcgaccattgataggactcgatcggccattaaaaaaaaactatgcgcgcaccacctggtctccttctcttttatgacatgagtaattggtaatccaacaatcatgcaacggattcggaaatacattgatgtgcctaattgcagcgtcaattatatgatagcagttggccattgatatttttcagatttgagatcgaaatgtttatgtgccgatctctttctctc

SEQ ID NO: 157183 - DNA, 375 bp, Zea Mays
ctctgacagctcatctatttgcttcttgagctcaactaactctggtccagataccctgtaagctcttttagaaatgggggcggtgccaggaaggagttctatggcaaactcaactttccgcttaggtggcatacctagtaaatctttcaggaacacatccggaaactctgacacaaccttgatagtctcgagtggatctgcctccttgctatcaatagccatctgatgacaacctcctttccttggctcaggtgagactaactcagtcaccacttcttctcctagtggagataccaacttaattgttctcttatcatagctgataattgcttgatacttgtctagccaatttatctctaggataacatctattcc

SEQ ID NO: 157184 - DNA, 386 bp, Zea Mays
atggtttctcgccattcaatctaactacaacatcctactcatgttggtccgtctttgctgttccatacaaccttccaccagctctttgcatgacatatccatctaagaaaaatggtttggttgattggagggtagtgtacaaagttaatcctcgtgaacgactatatgctcctggtgatgctggttatgttgaaagtcaaatcgagcaggaagtggggctgctgagattttccaagacgaagaacttacaagcacgtttaatgtacaaactgaaatgttggaagaatctttattaggcgatcaaaatgatgtagaggttcctccaaaaagaaaacgagtgacgagaaagaagaaagctacttggcgtccattaaatcgacgaaagc

SEQ ID NO: 157185 - DNA, 539 bp, Zea Mays
tggaaatcagggtggaaacaattatcagatgcaacgctctggacaacaaggcagagaaacaatcaaagtcagaaccaacagaggaacaactctcagaccaaccaaaggtctggtagtaattcggagactcgtcatggtggcgccgtgaacacgtaggccaaaagcaacaacacaccagtccaacccaatggttgtttcaagtgtggtgagcttggccattatgctaacaactacccaaggcgcaaccagcagacacctcagaagagcaacaaccagaggaatgaccagaatacccccactcgtggatctgcacagaacaggactccgcagaaccagagtagaggaagggtcaatcacgtcacagcggaatcagtgcctgaggatgccgacgtggtgtatggtatgtttcttatcaactccatacctgcttcagttttatttgactctggagcatcgcattcatttataactgagtcattcgtggaaaacataacataccaaagcaccctcttaagaagatgttacatattagttcaccg

SEQ ID NO: 157186 - DNA, 712 bp, Zea Mays
ttcggtctccgaaagtcgaaggttgaaattgatgatgccgccgaagcgtgtcagaaggcgtttagtactatctgattctttattggtacaagagatttaattcaagagcatataacattcagagtgtggtcgcttgtagagagctgggaaatgccaaaggagaccatcaccaagtctagcgaaggtgaactagtccggctgaagtatacattcaggtatggggataagttcgatgagccaaacgatgactggttaaaatgcatcgaggctacaagtgatgaactgcttggatcatattccaaggcagaagataatgcattatccacagccttcggaagtcggggaaaaaagagattgaatagagtttttgatgccattggcttcgtttaccccgactaccgctacccgctgcggggtcaagggaaaaagaggaaaactgctacttcggccaccccagacgaacctgtgtcgaaggggaaaaagttgaagatcctaactcaccggccgcgatacatcgaaccggccgcgatacctgaattcggcgaagggacctcctcggctgccaaaacaaaagaaactattcctcccgtgcagaggactgaagggccggttataatgccgaaggtgcctacagtcaaggtagctgaaacgaaggttgataaggctgaaaagccagaaactgaagaaataacgaagatgccagaggttttga

SEQ ID NO: 157187 - DNA, 355 bp, Zea Mays
ctatacgcgactggatgcctccacaaaatgtgagccaagtgagaagcttccttgggctcgctgggttctaccggcggtttgtaaaagactttagtactgttgctactcccatcaacgaattgaccaaaaaagaagtacattcaaatggggagaagcacaacaaaaggcatttgaagaattgaaaacgaagttaacaacaaccccagttcttgcactctcagacttcggtaagacatttgaaattgaatgtgatgcgagtggaattgggatcggaggcgtgctcatgcaagaacgaagaccaattgcctacttcagtgaaaagctaagcggtccgactctaaattattcagtttac

SEQ ID NO: 157188 - DNA, 394 bp, Zea Mays
ctgatctggtacactttaatgccaataagaggtacctcagttagaaatatatcacatagtcatgttttcactcaatctcgccgtcttccttttctatctcatacccgttgcatacagtgctatcttcctccaatcccagtgatgtttgtggatagggattataacgatccgaaacagtattacaatatggaaaatgaaaacggtcggttttgacttttgcatatttgtggaatgaacaaataaggaaacagtaaaaaactccatatccacaagggggcaccctaccaaaccccggtccaccatagtccacaacaaaccaaggcatttgttggatgctgtattgcactaggacttgtgacggactaggaatatgttgtagttaggactatttata

SEQ ID NO: 157189 - DNA, 688 bp, Zea Mays
cggagagcacatatttatgctggctcatggagaatgttcgtacatatagtcatcggtggcttgcgctatcaagaccattgatgatcaaactcgtaataggggttacaagtaggatggaagtggaaccaagaagttgagagagggaggagaggctcatagatctcttattgggatggaagtggagcttagaagttgtaaggtggagtcctagctaagtcttggcttggcggggctccagcttctggtcctcgttggcgctcctccttctgttcgtccttgtgggctagtcttcgtctgttgatccatctatcgatctcccttgccatgaggccagcctctccctttataggctaggacagggtcgactagcggtggcttccctgggaaggagtcgcaacgcaagagtaaaacctgcgttttacctcgagtgactccacgcgtactcatgggccccagggctgcctggttgccgtgtatttatcatgggggtggcgatggtactaggcgtcatcattccagttatgtcgacacctagctcctgtagtctagggctcggtgcagtctgtcatgtagtgccctacggaaggtctgtgctcccaggcctagttcgataagccataagtgcgccatagtccaaggatgcgtgagccattaatgttttgcagtcctagggctcataggtcatgag

SEQ ID NO: 157190 - DNA, 386 bp, Zea Mays
acatgtatattcagacttcctatgtcttgacacttaaattaactgagccatactatgtcttgacacttaaattaactgagccatactattttgatatcctgcattctcttttgggttaaccctggcatgtcacgaacatgatctatcctggaaatctgccttgactgctgtattttctgattctctaatcaaaattttgagaaatcagtgtagatggttctagagactataaagctctctatttcttgaacgtaattgaggtcttttgtgcttgcttgatctctggtagcttatccagtcaatctgcatccctcttatgtcattttttttttgttttcggtagatgaccttctggtgcttctatcgtactccatccgttcttaaat

SEQ ID NO: 157191 - DNA, 865 bp, Zea Mays
tttcttttgaacaaataattagctaaataatcttaggtgctaaaaaaatattctatgtgaggtgcttctaacaatcataatgtatgcaaatgatgagatgtcctatgaggtggagtctagggagcaattaggggggggggttaggggattagggttccaaaccttgggttaaattttgggatgttacaaacctaccccacttaaaggaatctcgccctcgagattcagactgggcttgagaaaaggtaagggtattccctcctcaaggagtcctcactctcccaggtagtttcctcttctccttctctgctccactgaactttacagagtctcacttctaagttgcgggtctttcggactgctgagtcaagaatctttactggcttttctcggtactgaagatccttgtcaatctggattgcctcttcttcgatgtggttttctggtacttgcaggcatttgcggagctgggacacgtgaaacacattgtggatatctgacatagattccggcaattcaaggcgatatgctgcgggtcctactctgccaatgatgggatagggaccgacaaatcgcggagctagctttcctttcacttgaaatcttttgactccgcgcatcgaggagaccttgaggtagacgaaatctccttcctcaagtctgagttctctccgcctgttgtccgcataactcttctgccgactctgagcttcaagtaatcttttgcggatcagggcaaccttctcttctacctctttaacgaaggcaggtccttctagtgtcttttcccctacgttggaccacattagaggggtctggcacttccgtccatacaatgcttcgaacggtgacatctcgatactgg

SEQ ID NO: 157192 - DNA, 870 bp, Zea Mays
gtgacttcatttaacgatcggtaatcaatacacatcctcatacttccatctttcttagagacgaaaaggactggtgctccccaaggggatgagctgggacgaatgtaccctttttgttgaagatctgcgatgtggagcttcaattctgctaactcggtaggagccatgcggtatggtctctttgcaatgggtgtcgttccaggaatcagatctatgtagaattccacttctctttctggtggcattcctggcaactcttccgggaagacatccatgaattcttctaccactgatatgctttctgctgctaaattaaacatcactggatcattggcggacgtctgagcttggcaagagactgactttccttggtggtctgtgagaaggactgtcttgtttgcgcaactgatgatacctttgtgcttggtcaactaatccattcctaagatcacatcaatcccttgggatggaaagacggttaagtctgccaagaacactacctcacttaaaatgattctgacttgggagcatttgtgctggcatagaaggtctgaccctggggttcgggtgaccaagggaatctctagaggggtagagcgaatgccatgcttttccacaaaactagtggctataaaagaatatgatgctcctgaatcgaaaagtacagtagcgggagtaaattcaacaaggaactcaccgagcactactcccagagcttgctgagcctcctgagcatcgacgtgatttactcgtgcccttccttgatactgggtcttgttctgttggctgatggaggagggcaccttgggagcggatgctgaggtattcttggggccattcaccgagttggagtaggcaggtcctgatggc

SEQ ID NO: 157193 - DNA, 758 bp, Zea Mays
gaagcaaacagagccattggattaaaaggatacggtccagattagattgttttataaatctaaccggtacgcatccccagccgtgggattagagatctacgcttaggatttcaatacgtgacacggttcgtttttattcgtcaagattcgatccaacggcgcacatctcatcacgcgagcaggcacgccagattgaatcccaaccactaatcccaggacggacggtgcaggggcttcttcttcccttgccaacccgaggcagcgccgccgcaagccttggcggagccatgccggcgatgcgcccatcgtgaccacccgaggatcctaccctgcccatgactcgcctacgcgtagggatgacttaggtgaattcaacggcggcctcctaaccttcaatcggtgattgcgtgatgtgggccacacggcgatgaggacgtctgcgccgagctacttaccagcgagcaatccaccacccaaccgatccaatctccacccgtcgaggtcctgagaaggtgcatcgtgatccgaagctccaagcccagctacacctccccaatttgagagtagaccaaatttttttcccggcggcgacgtgagttttctggtccgcggcggcgctcgcgattcgctgatctacgggtgaacgaaaccacaggacgccggccgatatatatatacaccaggagggtccaacgatggccgagcaaccggagatcgttgcggagtttgttgccgctgagattcacggtcgaaagcac

SEQ ID NO: 157194 - DNA, 804 bp, Zea Mays
gaaggtgatcggttcagaagaacgctgaagatcgaaccctgacaaatatctgaagaacaccaaaagatccacggcactgttgatttggaggaacttggatgaatcggtgaggatttgatcgcctgggagtagctcgatacgtggcatcgttccgcgggccgagccacgtgtggccggagttggtcaccggcgaccgccgtgactcgattaacttttgtcgtggtgtcacccgtgcctcgatctacctcactgtacttcacctctacgtggtatacatgcgctagcaaggttatccgcggccgctgatcgcttgtcggtccgctgtggctttaaatagcgtcatgaaccacggcgaggcactcaccgcctcaaccgcaagcttgagaagaacccaaaattcgcactgccttctccacctcctcccaaattgattgtgcacggtgaaactacagtctcttacggtcgtatagccccaatcccatcccccaatttcacccagagccggcgcgacgtcattttccccttttctctgtcaccggtgagcacaagactccgtgctccttggccggaccactctggtaaggctctgcctctctcgagtgttgttctagcagctctgtaggcacgtaaagctcactgtagcatctatttgaccaattcgggcataagtgattgggaacacgggatcaacatcacagtttccgtcgtgcacgtgggcagaccattctcaaagtgttcaagccaaagtgaagctcgttcctaggtcgccttgggtaggttatgctcccctgtcgctcgactgag

SEQ ID NO: 157195 - DNA, 370 bp, Zea Mays
gtgattgcgaaggagatgattggcttttgtttagtgtggacttaaccatgacatgagtttggtgttgtgtaacatgtctcttcgcttgtggttcatggatatagagaacaaaggtggtggtcgatggcaaaggtgaaggtcattcagatagactaggatcgatggtgacaaacacctaggcacatcgactagtgcaagagtacatggatgagtagaatgtgtttaccaagtgaagttgaggtgttggaagacttggtgattaggcggtcaagggctagtagtagcatgtgtagagaaaatggaaggagcatatccgatatgctactcacaaggggtttaatggtttaggattcaaacccacctcacaagg

SEQ ID NO: 157196 - DNA, 360 bp, Zea Mays
acagcataaaggcatcgcacccatgcgacgtctcctagccacgtggaggaccgcgcctgactccaccggatgggcgggccaaagggtgccacgtggcaaggaaaggcaccatgcctcagtaaggccggacccccacagagggtcaccgggcccctatatacatacaggtccggagcccccgggtaggtccgaaccccggcagggttctggaacgagaaggaccttggagtgtgcaggggtccggtgctgacatgtgtgcgggccttgctctccacttcccgcacaggcgaagacccgctgcttgtggcccatgacataagctacggggccaaacctgacgagaagtcgtgcagcccctgc

SEQ ID NO: 157197 - DNA, 781 bp, Zea Mays
gcctgatcccagcccatctcgcccctcctctctgcgtgcgcgtcttgctgcgtgaactggcactgatgtccgggtcccgcgtgtcatatgctgcggtgcaccagtgcttgcgttgtcccactgacggatgggcccacgtagcagttcgttttacaccgcgctgtgactgacgtgtggagccacgcggtcagaccccccctccttcaacagaatcacccacatcctcgggtcggtcggcacacgaagcgggatcttcggccatgaccgcccggatcctatggactcgttttgcatatgaaaatcgttcgtgtcacgttcctatgaccgattcaatcgcgtagacgaccggagctcaatccgagagggtgaggagagtggcgaccttgcctcgatttgactcgtgccgccgtggatccttgtcctcatcatcactcgaggccttagaaggggtcaggggccatcgccaaggtgccccgagcaagcgggttggtgctgtcggcatcgggaagggagtactaccagggaattgctcgtcggagttcaacggccgcgccgagccgcagttcgctgtggaccaggctcctgtgcgcgccatcctcggtgagttgtggcttccccgtttcggtcggttcagtgttacatgtcgcaacaagtagcttgggggttagtccggtagagcggatgatcgcggttgttcacaaatggcaccgacgtgcggatgattgggggaaagccaccgcgctggtgtttgcgttggggaagataagatttgggctactgg

SEQ ID NO: 157198 - DNA, 517 bp, Zea Mays
tttctaggttgatcggtgagtttatcgagtgtttttttctcctacagtccacaaaaccacataaaaattcagattggaccttataccagcacccttttgagcctcgcaccttctttcataatctgcattgttgaatttgtgtgctttcgcgtcatttgttgctggtcgcattgtgttttttctcaccatccttctttcttccttgtttttctccttcgtttacatcaaaccctagcgcgccacaaccatcttccttgtttttctccttcagttacatcaaaccctagcgcgccgcaaccatcttccttgtttctctccttcggttacatcaaaccgagtcaacgccacaaactgagtcaacgccgcttccttatttttctccttcggttacgtaaaaaaaacagaaaaaaacaaaccgagtcaacgccgcttccttgtttttctccttcggttacgtaaaaaaaacagaaacaaaaaaaaagaaaacgaaggagaaaggatacaaagcggttgtctc

SEQ ID NO: 157199 - DNA, 501 bp, Zea Mays
caggcaccatcttttaatttcacgtctgacgaaggacggggtcccttgcactgctgttcatggtctgtccttggatcccaaaacacatttgacgcccggaatttcgggtgaccatctcaatttaactcctgttgttcgcctgtaggacatacccagcgcaccaaacggtggctggctaggctagctacctaggtgactgttgaaggcttctgcaccagattgcctcatgacaacccctgcttactttactaatgggtaagatcagcgagtgtgtgtggcattagcagtctttgtcgtcgtgcaggtgcagttgatgcttattttggtttggcctgtgagccatcatgcttcgacggggaagagtgccgcgccggtgtctccgcttgctaatgatgttgcaaacgatattcgttgatgattcgttgagtaattcttagagcagctgcagtccatgttgaggacgctcgctcagcaaaactcggtcaacgggtcaaacctttt

SEQ ID NO: 157200 - DNA, 710 bp, Zea Mays
accatatccgcggttgctaccaatatccgcccgcgaccgtacccacgggtagaaatttatatccatgcccgtgcccatcggatttcggacgggtttcggatatccatcggataatgacagacacaatcatttatacaatatttcaataacataattagtcaaatttcttcccaattcaccatcatatacaattaaaacttaataaaagaattattatgggcctgtgagcctcggttaggagcactagagcttggaagggccagccgttagtggtgctacggtctctgagacttggaaggggccacgaggcacaacgtaggaagccagcaatgctataaggggcagtcaacagtgggaaattaggaccgttaggcgtggggtttatggtgttaggatttgttctttgctatgtaatatgtgctaggccaaaaaatacactatgggtcgatttcggatatccaacggataacccgcgggtagaaggtaatatcctaatccgtgcccgcccgacttcggatcggattcggatctgacccacgggtcaaaacatgtatccatatccggctccgtcgggtcggatatccggcggatatccatatccacgggtcaaattgccatccctagtttcttcatagcctagctcaccgcaagatgctctatcccatggtgacgggaacgggaacacagccaaccaaacattatctctcgac

SEQ ID NO: 157201 - DNA, 584 bp, Zea Mays
tcgccgtgtcatcaccaaggtctggagcagcggagtcagcctccagctccaagccagataaaacgccaaagttttctttcctcctcttcatttcggtggacatggtcagggagcttacccgacgcgtccgcttgcgacgagcgctaccattgctacaaattcttttctccccatcgcacagatgtccgagaacagcatccgctgacttagctcgagcagacccagataactctccagccagtgcacttagaactgcattcatctcagcatcatcagcaataggtttcatatggaagtgggtctgtctctcctccttaggaaaacccctatgcgcagtgatgagggcctcaatctcattcgaagaaggtcgcactctatggcctgggctcccgtcttgaacaggtggattggacacgaactctgaaaagggcctatgcaataacgaaatgacacatgaagagcactacaagtgacaatattgaaactcgtacacattagcacttaccattgggggaagattccaagcagagtaggaagggggagcaccgacgttcgaaattttactcctcggcatcacatcaact

SEQ ID NO: 157202 - DNA, 918 bp, Zea Mays
cgctgactcaaaagggaagaagctcctcactgaagaggctaccattcattttgaaaaaatgcccaaggctccttacacaagtcactattattttgataggcatgcgtacaaggattgtaggttgcttaggaaatttctgactaaatgagtaccatcgaaaaagggcctcagaccccatagggatgatggctaggaaaggaaggaccttgtttttcctgatgaaatgggtgcctattgatctttaagcaggtccgactactatgcatctaagagacattgaaacttgaatgaagcgaagtgttccaagcatgatcagttgtcccagcttttccttgactagtctgacaatgctatcactttcggtggatccaaccatcctgagcacgtccgtagctatggagatacccgctcattgagaaccccatcgtcagctccctacaactaacaaaggtattaatggatggggggcagcaggatcaacatcctcctctattctacgccttcgacgccatgtgcattggccgagactgcctatggcccatcggaggccccttccatggcatcattctgggaagacaagccacacccctcaggcaaatcgacttgcccgtcaccttaggtgtgccatatatttttaggacagagaccctcaccttcaaggtggtcagattctacaaaaaataccacaccattttaggaaggtcgtgttacgtgacgtgtcgtccctaactatacttacctcaagatcaagatgtcgtgcgctgttggcaccatcatcgtaggaatgatagctcatcatgcctacaagtgtgaagtggaatgctgcgacttagcagaaggggtcatcgcgatataggaattgcatgtgcttcaaactgtcaacgacaaggccgccgacactaaaaagatagcaggaac

SEQ ID NO: 157203 - DNA, 393 bp, Zea Mays
tgcatgtgtcaacttatctttcatcacgttgaaagagtgctcttgtacttcgccccaactaaaatgcactcccttcttcgtaagctcattcaaaggtgcagcaatagtactaaagtccttcacaaaacggcgatagaagccagcaagtcctaggaaactccgcacctgtgtgataatctttggcataggtcatccatgtattgcttctaccttggcttgatcaacctcaattccctgtggagtcacaacatagccaagaaacgacactcgatcggtgcaaaatgtgcacttctcaaggttaccaaataaatgtgcatctcgtaaagcattaaaaatagcacacatgtgatcaacatgttcatccatagatttgttgtagatcaatatgtcatc

SEQ ID NO: 157204 - DNA, 396 bp, Zea Mays
aaatttattgtgcgcattacaagctctagagggcgaagggcgcaagatttatactggttcaggcagagcgttcctacatctagtcatcagtggcttgcgctaccgacaccattgatgatcaaacttgtagtaggggtaacaagcagtggagagagggaggagaggcacccagatctcttatcgaggtggaagtagagcttagaagatgtgaggtggagtcctggctaagtcttggattggcggggctctgaacttctggtccttgtccacgctcctccttctgttcgtccttgtgggcttgtctccgtctattgatccatttgtcaacctctcttgccttgaggccagcccctcccttttataggctaggagaggggtcagccagtggtggcttcc

SEQ ID NO: 157205 - DNA, 525 bp, Zea Mays
aagcttatacttaaaagtatcatgttcaaaacaaatgggttttcaaaaggacaaaatgttgcaaccccaataaaaaccctaattgagccctataaacaaaaatcaagagaaaggggcaaaagggtatgaaaaatatagaatcatggcttgggccaattataaacattaaagtatactaaataagtaacaacaaagattatggaagcttggccaaaacaatttaaataaaactctaaacaagcttctcaagtgggatttcaatagggaatttcgaaattcagaattctgaatttcagaccttgagccaaagatcaagcgtgttcaccttgatccctaactcaaatcctaatggccccattgacaaaaacgtgcataactaacctctctgtcttgtgccagaagatggcatcgggacgcgtgccttggacacgtcaaaccagagatcttccccctgtgtgcggcagtgagacaaaccagatttctcccctctctatctcttaatccagtcagccaaacctgctagcc

SEQ ID NO: 157206 - DNA, 489 bp, Zea Mays
caaagactgaatgagaacgttctgctcgaaccagtataaatcttgtgtccaccgcacacaccgtctggagcccgaaacgcacacacaaatttacttgtcggagtgaggtttaaaacaccgatactactctaacaaagtttaggggacgaaggatgtaaaataacaataaacaattaaacacaacaattgtcaattgagtgactgacgctatgatgcacacacacagcaggctcactgccattcctagctatgacgcacagttgcaaattgctcactgctaactagctaacttctaacacatgacatgctcactccacacttccacaatccacagaccacacattgacatagttgcatgctctcactcaacacacacagcagacagggaagacaacatgctcacggctcactcggtcattcggtcattccacacacacaacatgctcaggctcagtcgctcattgctcaagtcactccacagtccacaca

SEQ ID NO: 157207 - DNA, 439 bp, Zea Mays
aaagagttgccatatgtagtttggagcttatgaactcaacctagtcgagctctacatggaaatactcctttcttcatggtctatggtttggaggcaatgctatctgccgacctcaggtttgaggcaccaaggctggtcttcgaaaatatagctgaggcagaggctaccagattagaggacattgacgtattggaggaagagcgattgaatacagtaattcagtcagctagataccagcaaaccctgaggcgctatcatgataaggccatacgacatcgatccattgtagtgggagacttggtccttcgccgaattctaacgggggaaggacgacacaaattgtcaccactatgggaagggcaatttgtagtggcggaggtcactcggccaggatcatatcggcttactcaaatggatgacacggaaatagggaattcat

SEQ ID NO: 157208 - DNA, 523 bp, Zea Mays
gctcttgaaaacgataacttcatctttctttggctctaggatagtctcttctccagcaaatcaaataagcttaccctcagcctctccaaaatagcccaacttcatcatcataggcatatcatcttcagtcacagtagatttttcaaaatctagatgactaggcttcgttgggatcagaatgttgtaatctttttcactctcaccatcttcaccctcaaccacagtatgttcagcttcggcattagaagcaccttcgtcagccacaaccaaacctggtcacttcattacttctgaaatcggtgttgtttcagcggcctcggtttcatccccctcacgagatactctagcagttgatcgcactctagccatttcgatggtttttaccgtttaacgaagctaacccgtcttacgaagttaaccttaaacgatgaagcgtttgcttgaaggcgcaatgtagagagcttcggctatgattcaaatttttaacagcacaacagtgcaataacaatgaatgttgtggtaa

SEQ ID NO: 157209 - DNA, 643 bp, Zea Mays
gggaataaccgctagctatactcggggagagagagtgcgggttgcgggcgccgtctcggttcgccgccgccgcatgtgcatctcggcgaatccgcctgcggagaccaagttagcgccagagacgtttgtgggggaaaccgtgcatccattccctactagcgattgggcgtggaaggcggtgtggcgtcggcaattcttcgtcggagatcgcgcttcgtcgtgaagccgctcacatccgcggtcggcgtccggtgctgcctaaattttggtatgacctccaccgttctgcccgccacactcttctctctgttttgcgccaggttgggttaggagtagtatcccgtcgcaggcccagaccccgttgtctatggcgccgccgtgcctcagccttacgccgtcggtctggcgccggtgggagtatggggaaataagggagaagcgtagatagtcgttgattcctcgatgggcgatttagattagatcgtgtgtccccttcgcgggattggctttgaaccgttggatcgcgatcgggcgaccacggttcgatactggttcataaacatgagctatgatctggtccgcccacgcgcgatcggatggctcagagaccttcataacccttcgcgtgtatatttttttaaag

SEQ ID NO: 157210 - DNA, 509 bp, Zea Mays
tttgttcgtgtgcttgaaggcttgccaacattttagaggtaatgcccgagtgatgattgtgattcttgcttttccgagttatgatctggcattttaggggtaatgcccgacttatggagccaacttatacttatgccgacatgtcttcttgagttctgaaccctaaatctcacttttctcctccgccgcttctctgttttcttaattctcgagcctgcccactccgtccgagagattgagatggcccccaagaggaagagacagagtgctgctgctccaatcattccacccattgatcccaatagccagcttccatttgccggtaaccacatgtctgtcatttctgagtccgatcttctacatcttgtggaaactggagttttgccattgaaagagttgtgttcttggtgaatctggcgtggggtgactattccgacagaggacactgtgacaccctagtgtcacctagggtttcttctcagtactaactcaagtgccatcatttcatg

SEQ ID NO: 157211 - DNA, 425 bp, Zea Mays
ggggcggcggtgaggtacctggtcgagggggcaggtcgtcgacggcggatgtgtcccagcggcggcggtgaggtacctggtcgagggggcaggttgtcgacggcggtcgtgtcccggtggcgacgattaggtttggagaaaatagtgggggagatagaggatgagcggcgtctgttttagtgacaacggcgaaacatgttttttggcgcccaatgtgtttggcaatgcggaggctaatgcgtttaagtatattagcgctgggtatatatcgaaaacatgtacatagctcaatggttttacctgttgactaagagaccaagctccaaggttcaagcacctgcaaggagacattttttgtgttttgcctaccattttatattaattctttgttttttatttctctctatgtttttttgcaattatct

SEQ ID NO: 157212 - DNA, 347 bp, Zea Mays
tcccaccagcgtactacgcccaccttgccgcattccgcgcacgctactatgtggaaggagaaagctcagacggtggctcgacacctggcagcagcgggcagacagtagcccgtgaggggcctgtcgaggtgcgtcaacttcccaagatcaaggacaacgtgaaggacgttatgttctactgctgagctgctccaagtttagcattcaagctttcttattttcgtaacttatccttgatatggagctggttgctcttattttcgtctctcggtattcggagtagctaggctatgactggagcatggtcttgaaggcctaacactctgtttggatgaaatcaatgcaaa

SEQ ID NO: 157213 - DNA, 422 bp, Zea Mays
tgcctgaccaagtgcaagtgacagctcattacagagcaagaaacaaggccaacggattacacgcacattccacagcttaggtggcagctcaagaagctcaacctcacgatcactaacaatgtcttcctcctggaacttgcttattatctcattccaaacaagtgcaaaccgttgtgcttccacttgatttgactcaatctttctaaaggatctgctgaaaccataccttagttgtaatcgctgtcagaatttgtgaaaacggctgggcaagaagctctcattcacctgttgctcctctggcatgatgttgaatgacatggcacttgcaaagaactggaacctaagtcgcagctgtttcatgtccttgatctctcccaaatgtgcaaaaatcccacaaatgcacccgacaaagaagaaaatat

SEQ ID NO: 157214 - DNA, 533 bp, Zea Mays
gtgaaatctgtaggagagcgtcgcaagtcgtatgtgaaaggaggcctgaagagcgttgtgacgtgagctgtgctaggagcaactccaccatgagggcaacgaggaggatttgaggtaccgtagcagagactatggagcctcgtcgtcgacttagtgaaactaaagatctctctgatcttagcagtatgaatcgtgacatcctcatgctccaagtgaaacctcatccactgatggtcgggtcaatctagacagtagcatagaacactctgacccactcctcaatgtaacgagcactaaaagtcagtagagagtatagaccaggtagataggtgatatgaccctcaacctctgagtcggccgctgaacgaaaagctatcaaatccaagtgatggtgagccctcaaggctatctaggctgtcagcggagctcgatagaaagactcctatgtccgagtgatgaagagaggagcgactgcaaaatctctctaagatggaaaccgggactccattggcacgtgtctgaagcgatgaact

SEQ ID NO: 157215 - DNA, 768 bp, Zea Mays
tccaacagcatggtgggagagctcctcctcaaggactgcgtgaaactacatacttggaattttctgagactcgaccccgctctttattaaagcagaagaacctctagaagccgatgagtgggtaagagttatggaacataagtttgggctgattcgctgcacggagacacagaagccactatttgctgcacaacagctgagagggcctaccagtacttggtgggcaaatttgtagcggttcaaccggctggacatcagatcacttgcgaggaattcaagctagcattccaggatctttatgttccagagggagtgctccatatgaaacaagaagaattcatccggttaaagcaagggggagatactgtaatgcagtatctcaacaaattcaaccatctagctcagtatgccatagaccaagtgaatacagatctgaagaaaaagaattgttttatgaggggacttaatgatggacttcacggaaaatggcaacatgtctggatcttacctatagtagggttgtcagtacagcactagcagtggaagcaaaaataacgggcatggaaaatcaaaggggtttggaggtgaaaggtcaaatcaaggacctgagaagagaacgaggttggtgatccaaccttttaatcaaaatcgttcttcacctcgcccaccttcctatccattcaagcagcctgttttcattcgtcccactactgtccccgctcctaccaatcagccgagtgcccctggcactcgtttccctgctctccc

SEQ ID NO: 157216 - DNA, 321 bp, Zea Mays
atttacagtgttttgtgccatcgtttgccgcatgttgtagtgagctgaggcctcaaatgggagagtgggagacctctttatgctccaagggtgtgcaggagataaatttgtggtccgagttccaaaatcccacgagtgacgttgtctcccatgcgacgtttaggagcaacttcagtgaagggagaaggatcgtccagttgcaaatcagagcaggcacaaaacactgtaaatacaacaaacatgatgcatatcctagcctacaggtgagctcgcacaaaattttattttagaacttgggggaattacattgagatggaccta

SEQ ID NO: 157217 - DNA, 279 bp, Zea Mays
agatacgtggaacacattatgcacatctgatagactatccggtaactcaagttggtatgccatctccccaactcgcctaaagatcaagaatggtccaatgtagcgtggggacaatttgcccttgactttgaatctcctcatgccacgaagtggtgacaccttgagatacacataatttccttcttcaaattccagtggtcttctccgggtgtcagcataactcttctgcctggattgtgcagttctcattttctcccttatcattcgaacttgttcttc

SEQ ID NO: 157218 - DNA, 528 bp, Zea Mays
atctggtttctcccataggtgctaaccaaggagctttagcaccatctcggttcagctcttccaattgagattgggcgagactgcgggtacggtactcagtgtctcaggcggcccaacaatatggggcgagaccacaagcgcacagtccgtctcaggcggcccaaaatcggatctagaggtggaaaatactgagacatggagggtcatccattggggcgatcctgacctagatacctggggcgagactggtcctaaagtatgtgtctcaagcagcccaagagcatggggctagacctcagacaagcaggtcgtctcaagcagcccaaggacagagccagaggagggaagagcggggatatgaggggccaacaattagggcgatcctggcccatccgaatctagcgacccagtctccaatggctggggcgaaatcgtcctagggggtcagcaacccgatcgtaccattcccattgtcttcggggcccacctttagggaactattcatctgcctcctgggtcccgaccaat

SEQ ID NO: 157219 - DNA, 901 bp, Zea Mays
ggaagttccaagatcagtctagcaggaacacacgcccgaacaactcgtagggttctcagtttcgctctggaaatcagggtggaaacaattatctgatgcaacgctctggacaacaaggccagaggagcaatcaaagtcagaactagcagaagaacaactctcagaccaaccaaaggtctggtgggaattcgcagactcgtcaaggtggcaccgtgaacacgcaggccaaaagcaacaacacactagtccaactcaatggttgtttcaagtgcgctgagcttggccattatgctaacaactgccctaggcgcaaccaacagacaccacagaagaacagtggacagagaactgaccagaacaccctcgtggatctgcgcagaacaaaacgccacagaaccagaatagaggaagggttaatcacatcacagcagaatcagtgcctgaagatgccgacgtggtgtatggtatgtttcttatcaactccatacctgcttcagttttatttgactctggagcatcgcattcatttataactgagtcattcgtggaaaaacataacataccaaagcaccctcttaagaatatgttacacattagttcaccgggaggtgacatgaaggccacacattcatgcctccatgttaatctcaatattcaaggaatagattttccagtcaacctagtggtcttaggatccaacggtattgatgtgattcttggatgcgactggttgaaaagttgtgatggagtgatacaatgtgccaagggaacaattatgttgacaagtccacaaggtaaaagaatccaagttagcacagacaagtcaacaaatgcaaaaggagagacaatggtaaatcacttggaagaaaagcccctggaaaatatcaaggtagtgtgtgaa

SEQ ID NO: 157220 - DNA, 944 bp, Zea Mays
ggaggctccatttgagggagatagatatcccatgggtcatcgtcacatggacacgttccatgggccacttaaacaaaccccgataagtcgaacaccaagatgtaatattaggccgaccttcaggagaagcaggtgctaccgggagaatgacacgctcagtcagaagaattttgaagagtgtggtgtaaagacgtaatccatgcacatatatcgcagaggagtcaacagaattccaagtaacacgccccgcatgcgacaggatagcagatcgttcggcgccaaacttgaagggaagcaaccaccaaaagagtcgtctcgtaagaatagtgaaagtatataggtccaaataagttttcacggtttgtaaagagatatatccctagcctgctatataaggctgtggaggtacccctacaaaaataaccccctctctcaccatcacacccaccagaagaataataggagttttcatccaccgccatacatgactcgcctataatatgtgaactccaagcaaactcaatattcagaaacacacaagacatagggtattacgcattcaggcgacccaaacttgtatgattcccttgtatttcgacaggctgttgcacgtaccatcgagttgcgatcaatgtcatcgtcctccaaaaagcattgtgtgggttacactatagtgcgtagtccggaccaaacgccgacaccagtctacctcccactcatgacctacaaacaactcaggttgcagagcactcatgacctacaagcccctcggaccgcgacacatttatggctgtgtgccagcgacacactcaagacctatcagattaggcctaagtgcgcaggccaccaacagtggtgcaacatgacgagccacaccaagccccaggctacgaagttcaagggccggcatagcccaaatgatggcgctcgggaccaccatgccc

SEQ ID NO: 157221 - DNA, 394 bp, Zea Mays
taaatggcgctcagatccttcttattcactacactccgcacctcagtggctgagcaatcggctgaatttcaccggagcacacacgcagccccaaattccctcctcctcctatgttcttgctccgccgcatgggactccaccgtggacagcactcttcgggttggtagtttctcaattactctctgttcttgcccgtgtatagtctcctattgctctctgtactgagcagttggaatttggccgaagtccatcaccggaacgcgcccttgccttgtaaaacgccgccgtgaaccccctcaccgtcgacccgcccttcgggtcttgttctgcccaaaccaaagtatgtccatggaccctggtgaacccgtgaacctttacccagcctcaatttggc

SEQ ID NO: 157222 - DNA, 309 bp, Zea Mays
gaaagttgtgccactattttgacgatcacaaagacatcgtggttacatgcttcccgataggagacatactccacaacaaagaagcagtggggaggacagccaagtgggtgtgcgaactcggagctcatgacatagaattccgaccccgcacgacaatcaagacccaagctctagtggattttatatcagaatggatcgagcagcagatcctcgaaaaccctgagttagtagaggtttggaagatgtacttcgatgggtcactaaggttacaaggagcatgggctggcatcctcttcatcgcccctagag

SEQ ID NO: 157223 - DNA, 367 bp, Zea Mays
ttggtcgcaataggtagcctgcctgtcctctgagtcgacgcgccagtgaatgccacggtaacccgcgccagtgaacctcccctctctccggtcgccagcacatcttctcaaaattgggcgccaccactgatgaactctataaattgatgccccagtgagctccgctaggttattacgcatccaaagcaccagctctcgcctctgatcgttcaagagagcctcccaatttcgtatttcccccaaatcggtcggaacaccgccgtgagacatctcgccgtggccagtcgtctacgggttagttcatgcccttctgtgtgatgttctagcctccctcaagtctcctgttgctcgtagacccgtttgattg

SEQ ID NO: 157224 - DNA, 437 bp, Zea Mays
atattgcgctggcggtcggagtgggaagaagctactggcgcaagcgattcgtggactttaccgtggcaagaccaccggcgatgaacgggtgggttaaggcgactcactgcgacgtggttaaagggtcatagcgtgttgcgatcacggtggacgacgcatacctcgaagatggttgcttggccacgtcgctggcgcaagtggacgagcgacagattggccacagtgtcccgagttcatccacgacgagatctttttatcgtcgagcataatccattcatctgaggcacgaatcgcgatgaccggtgtgaatccgggcgagagatcgccggcggcgaggtttagtgcacctaggatatttttcagatactgtaccatcagacttctcatcagagcgcctggccgagcgttttgctaagcttagatctctaatttctata

SEQ ID NO: 157225 - DNA, 1147 bp, Zea Mays
tagagttctggatatctcataaataatcatagtccgtgcagtgtgatgaataaatgaataaagtttggcggtgctcatttaattgctcaaatagctacgatcgagtgctgtggctgacgcccatataaaaaatcgtccataccagagatgtactcaagcatgcacccgccagcaaggaaaaaacaataaattaaacaactaccaatgcttcaggcatcatcttctcaacaactcaatatttatttaattttttctcgagtttaatcattgccgtgagtattttgtcattcatgaaaggattatatgagcttttgatcaactataagggccttttaggtaagtggctaaattatagattatctgtataacaccgactccctttgtccacaagacattgtcatggtaatattttgtcctaagtcaaataaacttaaggttgactaataaatttgtccatatttttctccgaaatagtgtactgcaaaaatatgttccaggataatctaataatgtttatttggtaatatagatatatgtatttttttacatacatatacataagtttagacaaaaacttgaatgttttgctcttttaaacatggaatatacaaataactacggtgatttgatacccggtgtcatcgctagcgattttcataatggatggtcaacctaatagtgagcgatcatgcgaataaaaggccatgttgggtggctaacaaggtggcaactaccaatctaatcttgcaaagctaatgtcaccttgtaccatctgctacatggattcccaaccctacaaagactatttggctgtcaagtgtcaaatgtactctccacgaatcattaaccagacaaggactctctaagatacatctccaagactctcaaggcgttgaaatctttgatcacatgggttttcatttctcctgtggttgaggttgagaggttaagggagagaatgagggaggggaagatgcatgtggacagtggactccatgctggattttgccaacgactcagtatgcatgtgagatggatgctaacctaagtgtactatgcagtttaataaagggcgtttgacatgtataattcaatcacattttatgatgatataaaaacatgaaggcactactagtgcccctttttt

SEQ ID NO: 157226 - DNA, 775 bp, Zea Mays
cactctttgttggtcatgagtaaaagctaaccactgatcttgccaatgaatctccatcagaccatgggaagataaccagtccatacctaatatgatatcatagcactgtaatggaaaaaccttaaggttaatagagaatacgtgacccggcaaactcactttgcaatggggtatataatgggtacaagctagcaactgtccactagccactgacttgaatagcctcagggagaggaattaatggaggacccaaggctgccaacggttgactgatgaaagatgaggagcttcctgagtcgaccaacatcagcactttcttagagaaaatagtggccattaacttaatggtctctagggcttcagtgtcgtgaacagcatgaaaggataacaccaataagtccttcggtgattgatctagactaacaagtgggttatcacgtgagtctggttgggccaatagctgccacaactcttccacgatgtgtaagggaactatatcactgcatttgtgagttgtactccaatgaaggccgcacttataacaaagacctttagccttacagtaagccatgagggccgaggctttacgttcatccgtgcctgatttccatactcctcccccactattggtaatcattggttttggaatacgttgaccatctggttgcaccgtcccaaaaaaatttccttgaagaaggggtcgacttagtggtttaggagctagtggagttattccactagatgtcgccaattcttcctgtaacaaagcaagaaa

SEQ ID NO: 157227 - DNA, 319 bp, Zea Mays
aattatccttataacttaacagatcaataacaaagttcctccaaaaaatctttgcatcctattcacaagacataagggaataaaacgccaattttttattacgtatttatatggtttcatatctatgtttaatcacggattttgcagtcaccattgtactcacgccgcccgtcgacagagccctgagccgttagaggctgctcaatttgtgttccatggcatcgcacgggcacatacctagtatatatatattctaaacattatgatacatgtggtctaatggttagtcccaaatttctggagcaggagatgtgggttc

SEQ ID NO: 157228 - DNA, 800 bp, Zea Mays
tgaacaaggagtcctttggttcaagaaccgtctgtgtgtaccaaaaggggaggcacgagaagtcctacttgataaagctcacaactcaccctactccatcaacccaggaaccaccaagatgtacctagacctcaaaaccagatactggtggagagggatgaagaaagagatagcacggtatgtggcccgatgtgacacttcccaacgaacgaaagccgagcaccagaagcctgcaggcctattgcaaccccttccagtgcccgaatggaagtgggaggagataggcatggattttgtaaccgggctaccccagacgcaaaaagggaacgactctatctgggtaataatagaccgtcttaccaaggtagcccacttcatcccagtgaaaactacctttggaggagccacccttgcacggatttatcttaaagagatagtcagactccatggcatcccaaggaagatagtgtcagacaaaggaacccaattcacctccaaattttggatgagccttcagaaagctatgggcaccaagctagattttagcaccgcctaccacccccagacagatggtcagacagaaagggtcaacaaggtcctcgaagatttattaagagcctatgtgttaacgttcgatagaagctgggagtccagtttgccttatgcagagttctcgtataacaacaaccatcaggccagtatcaagatgtcaccgttcgaagcattgtatggacgaaaatgccaaacccctctcatgcggtccaacgtaggggaaaagacactggaagagcctatctttg

SEQ ID NO: 157229 - DNA, 461 bp, Zea Mays
tcgcagtataccagtattgttgcaaataaccttcgtagtgctgacggcatttggtaaatagcggcttcattgagacactcatctattgtgttgtctgcttcaagcagtcccctcctttgtgctgcctcacgaaaagatggtagtgtgtcaccatctactgtccttagatccgcataggaggtagcacccgtcacatggtttaagagaagtcgaagataaaagcgctccccctcagctggataagcagagactattctaccaacctgtccacccgtgtttcgtttcctcctttgccacactttgccttgctgcaaagtgtaccactcaggaaaatcacggtaaaggatgccccgagcctcctcgtgtagcctatttgcctcaaaatatgccgtaagcattgacctatcggcacctggacgttggacaacatgatttactttagcacgctcgtgaaatgacac

SEQ ID NO: 157230 - DNA, 479 bp, Zea Mays
gtccgactgaagtacaccttcagatttagggagaagtttgacgagtcaaacgacgactggctgaaatgcattgaagctactagtgatgaactacttggagcatactccaaagccgaagataatgctttgtccgcagccttcggaggctgagggaggaaaaggctgaacagggtatttgatgctattggcttcgtataccctgattaccgctacccactgtgagggcaatagaaaaagaggaagattgctgcttcagtcaccccagctgagcctgagccgaagagtagaaagttgaaggttctgacccaccggtcgcgttatattgaaccggccgcagtgcctgaatttggcgcagggtccacttcagcagccaaagcaacacaaactgctctgattacaaagagcgctgaagagccgaccataatgccgaagacgcatgcattcgagctagtcgaagataaggttgataaggctgaaga

SEQ ID NO: 157231 - DNA, 623 bp, Zea Mays
agaaggtgatattgtagtcacatgtgatgttcagatgcccagatatacatttatgcggtgctgcttattatttatctcctaaccatatatatgaataagaagtatatatgtgttagagttctaataatcttagctcacaaaccaagctattagaaatgttaaaataggaagctaagtcagagttccggtgagcagggacctgtgaacacaacgatacatgccttctcttcactaatcgcgcgcgtatagattagatcgtacctcgtgtgtgcttagaaaaaaagtacgacaatgttggttcgtgtgtcggccccttgcttattatgtgaaaggtcacaactaataataagttgttgcgcccctcgatcaaacagtgatgcttggtccaagtcaatattctatccaagtcagatgagatgaacctaacattctctcccttgatctcattcttaaacttaatcttttagcttacaatttacattcctccatatatcaatataccaagaccaaggcgttataacaaatattcatacgctattgaacttaatgactacagtaggcctttctatcttaaagcagagaacttatttttgagggagatggttttattgatgagcctttga

SEQ ID NO: 157232 - DNA, 620 bp, Zea Mays
atcaggcattgcatatttacactgctggttgtcttatagaccaaaggtaactttagccctgctttattgaaagaaagtttatgaggataccagattacaggattatagttcaaacatgatgcaccttcgatgccaactctacatgcagaaccaagtgtggtatatctctactggagaattgagcctaaaactctacactaacagtcaaatggcgaaagcatggttgaatacatgcagaaccaagtgtggtatatctctactggagaattgagcctaaaactctacactaataggcaaatggtgaaagcatgtgttcaaccagagtacaattatgactgctgccaaatgatacaccgacaaagcaacaagcacccgggtgtatgtcttttgaaatgctggtagttatcttattactgcttgcaattcttatctcactgtctgcacctttgatggtagtttactagtcattaggggcagggtagtacaggtagggctctccaatccttggttgtacttgtacctgatttggttatatttgtgttgtactcgctcaactttcttggagagtaaaagcatctcaggtttgaccataattgtaggaaaaacaataaagatttatg

SEQ ID NO: 157233 - DNA, 496 bp, Zea Mays
ccggcatcctgattcaagcatgacactcgccgaagacgtctctttttctttttcttcccctcagcaggagaagttggatgattgattcggcgaggacgcttcggacgaatactatcagatctttgaatgtccaaagtttttccagactccaggatgggtgctacagctagtgtttcaacggggaccgaatcagaggaatcctcagccaacatgtctagcatggcacttatttctgcgtcactcagattcaaaggcatctcgaaatgaacctgcctctcgtcatcggggatttcaccaagtgaaacaaccaaagcctcaacctcttcgggagaaggtcgcactctaaggcccaaaccactgtcaccaataggaggatttgacacaaaattgatgaaagccttggaaggaggcagattccaggctgaatatgcaacaggagcaccgatattcgacaccttgcctctaagaatcatttcaagctggcttaccagatcca

SEQ ID NO: 157234 - DNA, 273 bp, Zea Mays
cgggaacccgttggtggttgctgatcactcgatagatgggatgacaaacaaatcagatgatttgtttcctgtacattgatctatcatatctgtacaaagaaatctgacgcagagagagaaagaaaatccatggcgtcggaatcggaccatccgattccaatctactactactactatccagccatccaggtccaagcatttctcactggcactctggcagtgactaccttgccatcagtccatcaccttggttggtggtttccattacgagtg

SEQ ID NO: 157235 - DNA, 557 bp, Zea Mays
gaaaaagctcttgtatacaacaacttcgtgctttctcggcatcaagggtcgcctcgttcccagggaggcacacactaactttactgctaaaataaccaagtctcttcatagattgctgatccttctccctcaaggtggaacgaccaatttcaatatagcttggcttcgaaggtctgtccttcggcaactctggagcaggcctgacgatgacgaagctctcacggatttggagatgggtggggtatcttgtcgtgcttccgaagaggtaggggtgatcagttttacgatggtctgaatcctagtcatctgagtggaccggaaattgtccgagatgacttagccaaagctatcttccaaagtagcggtggacgttaagcttcagaggcacaaaagtttttggtagcaggtagttgagggcggtaaatgtgatccgcacccactcgttcgactgtttttatactgagaaataggcacgaagcggcgcaagtcgccaaaaaacgttcccatgcatcacactcagcttcttctcgtccgtctaactttcagatcaattgttt

SEQ ID NO: 157236 - DNA, 529 bp, Zea Mays
tgcccatgatgatgaaactgggctactttggagaagctgaaaggaagcttgttcgttttgccggagaagaaaccactccaacaccgaaggatgatgaagtagtggttttcaaaagttttttcagggcaggactgcggttccctctgaatgagatgataggagaagtcttgaatttttttgaaatttatcttcatcagctgacccctaacgccattgttaggctcagcgtcttcatctgggcccttcgaagccaagagatgagcccagatgccgaagcattccaccgggtacacgaattaaactatcagacgaaggccagggcaaacggtcttcatgaaaattttggctgctacaattttgcataccacaaggatacgaaggctccagttcttagctaccgcaccaaatggccaaccggctggaagggtgaatggttttatatcaaggtcgatgagaagaagagggggaaactgatgacgatggtgatgtgcccattgtctttaagcttcggaatgaccagacctttgtg

SEQ ID NO: 157237 - DNA, 447 bp, Zea Mays
cttaggacaaaaggccttagtaatagtggggaaaatatgtggctaattaggtaggccctatgggccagtcttaggatttcaaggatgcccttaaaaagcacccttctggtcggtgaggagatgttcttttcagcatgcatgcattataaaacacgaaaggattagaaatgaaaggagtaaaaacttaatctaacccacctccttttacaacccaggctcgcatgtttttctttttccaacgtgacctttacgtctgatcctcttccatagatgacttcacccacccccgccaatggaggagacactcgtttcagttccgatttcctttctcacgagggtttcccttccatcttgtgggaggtgctcaactccgccggttaccctacgccccctttatacacggtgcagctatacggggagcatcgggtcccacgttgtcgagtctgg

SEQ ID NO: 157238 - DNA, 572 bp, Zea Mays
gcacaacaagtgcgtcaatcgaagtcttttactaaaaagacactccgtgcaaaagtcgcccaagggtgcagccggataagcgcaataagtgcgtcaatcaaagtcttttactaaaaagacactccgcgcaaaagtcgcctaagggtgcagccggattagcacaagtgcgcgacaaccagtctctcactcaaagacggccaacaggccacattacaatacaagttgcagttacacacactcagcgagggcaccacatactacatcggctcaaccttcgggatgatgcccgcctccctataattgaacaacattattttcaattcctcaccctcaaaaagattccgcagatccccctcaccaatgctcgtcccaatcggcaaagataatagctctcgtttaccaaaccgatctactcgaagatggtcccgctccatccccatccgacaacgcctaccacttcgtgaaacctcgcccacgctatgcttcgacaccacccttcgtcgccgacacttggtcctcgcactaggaagatcagccacctcgccaacctccacccgcggcgaggactccac

SEQ ID NO: 157239 - DNA, 551 bp, Zea Mays
gtgagaagccaggggctggagccgagcgcaaagcgcttctgcaatatgcacgagctattatacgagacgaaggctaccggtaaagaacaataccacaacaacttcggttgctacgggttcattgctcgctctaatgcaagttaccaggtgccaacgtaccggaaaaggtggctcggggcctggatggaggagtggtttatgttaaaaatgatctgattagaagggaagacatcaaggaaattatccagcgccccctctggtctcgcttcggccttcgaaggccgaaggtcactattgaaagtgacgtcgaagcatgccagaaggcctttagcaatgtttgcgccgtcattggcacaagagatataattcaagagcacctagcctacagagtgtggccacttgtggagagctgggatatgctgaaggagactactgctgaatccagtgaaggtggcctggttctattgaaatataccttcagattcagagagaagtttgatgaaccaaacgatgactggttgaaatgcattgaagctaccagcgacgagctg

SEQ ID NO: 157240 - DNA, 582 bp, Zea Mays
gtttgagcataagaaaagtggaattccatctaacatccatgtccactccaaatttacgaggacggacaccaacactaaggcaatattgtttataagaagcaatacgttgatttgaagcatttaagaatgttattgcagttctaaaatcttcaagatatggttggaaacgtttcaagtcgccgttcctcggcctctgcggctttaacgaactcgtcgtccatggaatcatcatccatggacattgccaccggcgccggaccacccgcgcagtcggcgtctccggctacctcacgacaagcgccgacctgagatctttatccaaagaccaaattgaagcacaatgagtaacggagatggggagatggagcaaacaatctagaaggttagggtttcggacatttacctgcgctgctggagcaccagatccaccgactacgggacaccggactaccggaccgaggatggcacaacacttgagcagatcgagagacgaggggagcggacgagcagttacagaaacgacagggagaggaaagaacagttacggacgagcagatcgagagacgaggggtgcggacgagc

SEQ ID NO: 157241 - DNA, 991 bp, Zea Mays
gtgggttgttttcacaaaacccgagggtcacttatgcaaaacagccgatcaggcgccaacggaccggatttgatctcccattcaatgaattggtaagcatccagaaccgttaatttgaaaatctacgatcaagggttcactatctccagtgtcgctcgatagccgatcaacgaccagggttgaaagtccgaagcattttccccacatttaatctaggtcgtccaatccctattaggcgaatgatctagccagccacccccctcaccggcaaaactaggcgcggcggtgcccgcacaacatgcggcggaggccatcgccggagacgctgatgtcgtgccccactgccccaaacatctattcattaaagcaatatgtaaataaggatggtgcgaactcgagagaggcttcctcaccgtaattagtgtgatacaaccctcttcccacaagccgcgacgggtctcgacgtccagtgaagaattccgctctccaccgtggttgatctcttcactctcagccacgaggacttccaagcaacaccgtgaatctcccagacccaccgtggtgccaggaatgccggttgggacgagttccgcattggcagcgattttctatgtggcttgacgaggactaccactctctcacagcggctaccggtgctggtgaacagggggcaagagctcgtatttatacactgtgacagagacaaaccaggcacaagctatttggattaggatgagaaatccgcacgggcgatctcccaagaactccgctcaatctcacgcagaggatagcgattctgttacggtaggagatcaagctgacagacgggacccacccggcagacacgacccacctcgtgcgcgcgtggatctcggttctggcaagacgacgccagtggttagtgaggtgagcatgggctagttgaaggggtgctggcccgtgtgagattttgggccgacgagatagagttggcctaggcatgtctaattcc

SEQ ID NO: 157242 - DNA, 660 bp, Zea Mays
atcagaagcaatagacaacagaacatgattatccgagttaagaacagagaaagggttagcaaacgtaccttttgtcaggaaggcatctttagccatagctcttgctgtcgctttatctacaatctttatgtcgtcagtagattccaatctgctgctccttcttatgccatcaccataatcaacatccatgccagatgaaaatttttcagagtccattttatcagaaccatctttttggttaccaacaggagacttaagttttttcccttgcgcaggaggaatggttccctcatcatctttagcaaattcttccaagtcttgagaacttagaagatcatcttcactttcatgaaattcatcctcctcattgacagggtcttcagaaattggatttaaatcttcattcactatcctgaagtcagacttctgaataatatttttgccctgagacgatggttcacccattttatccactcctagctcttctttcattttgtctcccacatttctggcttttttaccagttttttcacaagaagggtcatccataccatgcctatccactgaggctctcttaccaaggttgatagaatcatcattccagccttcttcagttatatcatcaattttaaagaaaatatcataaaggtaaggtttcac

SEQ ID NO: 157243 - DNA, 490 bp, Zea Mays
atgcagttaattaatataattcatgacgaaatgaattttatttagtttgaagaattttacagataacgtcaattagtaggtcagatgaccctccccctcccctgtttttgtgtgtgtgttgcattgcattgcagctgtagaaaagtataactgatcgagtccaagtccaagcaataatcactcatagtgaacaggagtaattattttaaatgatgtatacacatcatctaatacgtagagacatccacgatagttaataattaaagtaattcgcagtgtgtcctcgtacatgacacagggtgcgccaagtgcgcgtgtacaaatgaggagtggaccattattctgacagctgtttgtgagaaattcttagcaaacaaacaattaccaaaagtaaaccccacggatcgaagtatcacgatccaatgtcttttacaccggtactttttgggaacaacacagctagaatttgtattatgcaaacgctccagaa

SEQ ID NO: 157244 - DNA, 988 bp, Zea Mays
ataggagaattatgcatacggcaggttgtcttcccaatccttgccatacgtgagaacacaggctctcaacatgtcctcaaggatctggttgactctctcagtctggccatcggtctgtggatggtaagctggactaaagtccaacttggtgccaagagcttcgtgcaacttcttcaaaaatctggaggtgaactgggtacctcgatcagatacgatcctcctgggtatgccatgcagctttacaatacgatcaatgtacaacttggccaacttatcctcaccaaaggtagtccgcactgggatgaaatgagccaccttagtgagacggtcgactatcacccaaattgagtcatgaccattcttggtacggggcagaccagtgatgaaatccataccaacttcgtcccacttccagactgggattggcagtggctgaagtttaccactaggcttctgatgttctgccttgattcgctggcacacatcacactcagcaacaaatctggcaatatcacccttcataccatcccaccaatacttctccttaatatccaagtacattttggttgttccggggtggatggaataggctgagctgtgagcctcatccaatatggtttggcagaaatgaccttgctttggcacgcataacctcttcttgaaccacaaggtaccctgattatcaaccctgaagtctggtgctttgcctacactgttttgagtcttgatccatatcagcttcttgtcttctgtttgggcttccttgatctgatcattgaggacatgctgaatgctaaggttgtaattgagacagtggggcacaacccttaggttcaactccctcatttcttctctcaactctagggcttgagtcactaagtgatgacaatacgccttccggcttagcgcatcagccaccacattggcttttcccggatggtagtgaatctccagatcatagtccttgattaactccaaccatctacgc

SEQ ID NO: 157245 - DNA, 441 bp, Zea Mays
tggagttctttcctgacttatgccaatcgcttggctggtaaggcatagtggttgccctaagatgagtagacgtgagcatgttgcaccgtcttaagtcattgccgacttaagccgattgctccgttagtagggtatagtggtcaccctaagtcgagtaagagcgagcatgtcgcaccgtcttaagtcgtcgccgacttaagccgattgctccgttagtagggtatagtggtcaccctaagtcgagtaagcgcgagcatgttgcaccgtcttaagtcattgccgacttaagccgattgctccgttagtagggtatagtggtcaccctaagtcgagtaagcgcgagcatgtcgcaccgtctaaatcattgccgacttaagccgattgctccgttagtagggtatagtggccaccctaagtcgagtaagcgcgagcatgttgcac

SEQ ID NO: 157246 - DNA, 673 bp, Zea Mays
aaaggaagcccaggtcggttccgaggtctggtccgctgagacaggcgcgcctgtgtttaacgtagtgctgagaggcggcatgcaggagagacggcgccgttacgcggttgtttgaatggcaaggcggtaaacataagggaaaggcgcggaattatagggaatagtttccacatgcaaacgtgattactatgatacgtgggcgcgtaatttatggatcttgcatgggaagtaatggcggcaggtaaaaaatgtagcataatatgttgaaagttgtggcataaaaccgaaacggcttaatagttgcataaatagtatataccgtttggcgtaaatcgttgagtcattgtgcgtaaatagtttagtacggatattagttttacattgacatcgccataatatcgggacggtttcggaaataatggggagaccctgtaaacgtggatgcggttacttgtatagtatctgtgatttcctttcattcgaaaaaagaccactaagcctgcataactaattggagttggagatggccggctctggagattcaccggcgatggaaggagatggcgttcgtcttgatctagagacagagggaggagttgatggtaactcactggtcacaccacctcctgctctactgggtcctgtgatcgccgagatgagcataggggaagaa

SEQ ID NO: 157247 - DNA, 292 bp, Zea Mays
agaataccggtttaggtgtttagatccgagccgttgattctgtagcttgtgcatcggattagatctggcttatttgaaagaatgaccgtagatcgggggatcaacggtgttcggtggaagcggatcgagtaactatcggttttgatctgggcccttggtttctaatccaacggctcagagagaaccgtaccccttcggctagcgcaatttgcaaaagagaccccacagtcttaggtaatcaacccgccatccatcgccagtgccctgagtcttgagaattctttcaccgtga

SEQ ID NO: 157248 - DNA, 783 bp, Zea Mays
tttcataatagcagcaaatcatggtaatggcaataggtcatatacgatacgtaggatcggttaatatgttcttgcattactatataactctgtgatgcatcagacacagccagaaccatagcaacactaacaaaaaacaacctggtgctagttaatttatcaaacagttcacaacttttcttatgctctacactctaattcaacaaaagaactcgacaattcataaaattccaagtcacctctaataaaattaggaagtaaggcccttgatcgtaaaaacaagatccgcagtcactaaatgccttctgaggtgttggaagttgtaaccggactacaaagacactgactttttctcttgttttattgcatgacaaggcaaaaaatttctctatattataacatctgtagttaacgacatgatcaactgtaccgcaacctgctctagtttacacaattattggattcttctcgatttttaaagtaatattcacaacatggcaacatccaacacaacatgatcttctatggactaacattgtatttatgtcatatttggctacattttttgaaatgctgaaacaaaacgccaccatgaaatgaagaggcacatggaagaaatgtaacacgagcaccacagaaatatgcataaccaaggtgcaagcatagaagtagatgaaatctagagagcaaatgagggacctcttgttagaaactactagttctaccatgattatttggcatgtaacaatgactcccatgctacaatgtggaaaacggtgcata

SEQ ID NO: 157249 - DNA, 802 bp, Zea Mays
catcagttgaattcaaatttgaaatttacaaataagaaagaaatgaaacagaaaatgggaaaagaaaaaaaaaagagttactatgcgcatgggccgaaattctccaccagcggcccactttctcctctctgcgcggcccaactcgcacacagctccgtgccacctcacgtgctgaccaaaaggacccagtcgtcagcctccgctggggcgcgtgtctccagatcttgtgtcgcttacatgtgggccatcttggccagctccatcccctccgtctccatctccatctccgtcttcctcgcgctggcatggactgctgggtcagcgcgcaggtaatcttcgctcaaatcgcggaatcagttgtaaccaaccggatagtacggattctgtttaagcctgaaatccacgttccccgggctataaatcgggccccacgacctcttcttctcaccttatccagtccgccaccatcgccgttgcccgcgagagggagagagaaacccgttgttacccgtgaaagagaaaggggagagaatcgtgtagccagcaacatcgaccgcggatgcgacctcgcctaggctttgggcgccgctcgggatcttctctggggcgtgcgcgaaggaagcttctggacgccagggtattgcgcctcgccgtgatccacacgccgcggccggtcagctctgcttccatccacggtgagaactcctgtaccagtctcgcaggcctctgctcttcgttttgcggtggctggagtgaagtttttaggcgggactcgagctttaagtgcggccggtaatggctt

SEQ ID NO: 157250 - DNA, 294 bp, Zea Mays
gaaagaataattatagaatcaacctagattgtacttgagaaagtttctggggaggcagatacgacatctacagttgtgaggcccaaagaggatgcagcgaaagcatcggcttcgaagagcggcaaaggcgaaaccttttctgaaagggaaagatcctttgatattaggcacctaggtggtagtgatcttagcgctgaagagtaatctgagcttcgataatttcctattgctggtggctacggatcggtggcatggatgaagaggtgctaggttgtctttttgaccaaactggag

SEQ ID NO: 157251 - DNA, 522 bp, Zea Mays
cgggagcacacagccgcggagcatcgctcaccgtagctagcattcaactctacctcaagtgcggtaagaaggcctctaccgagttcgctgctatctcttctacgcatagcgctagggaatcgagaattgaatgttgtgggcactggattgggaacgcgctggctataccccgtcgtggtgtgctctacgccgcaggtgggtcagccgatggggagaagaagctgggtgggccgttggatcggcaatggatgggcgaggggtcgcggaccggtgatccatcctgaacgatcgagattaaaacgtcgacaccgtttcgagttgatcgcttccacaacgttgatcttcacgtctagggtcgcgatcgagtccatgttactttgaatcgccaccctcggttccggatctatgggttcatataagcatactacggtgatctaatcggggtcgttcaattctgatcgggtggctgataataaaccatacttcttcggcctggtaatcttgctaaagagaccctgcctt

SEQ ID NO: 157252 - DNA, 964 bp, Zea Mays
acgaaacccgcactgctgccatacaatcagagtgcggaggagaagatcccacatgaacatccatggaagtgttagagggagaaccaactcgaacaccctcgggggctgggttatcgcttgcgctacccatccgatccgggtcattcccagcaacaccctcgggggctgggtaagcgccagcaccatccttgagggccgagttctctgcagcagccacctctaaggctgaaggtccctcagtcacttccatgggagcagcgcaatccagaccagcttcctgatcctcaagaccacgctccaaggtcgatgaggcgcgggacgctacccaggatgaccccaacccggcatcaagcacatcagcacaaacatccatcgcgtcaccatctgtcggctctgacaacagatcttctggaaccatatcctcaagagcctgatcaatgttggccagagacaattcttgtaaatcaacaagagcagacagggctggagaaggaacaccactgctttcgccactagcaatgtagcgtcggttgttctttcgagttagagggatttcatcctcctcctcctcgccaccatcgacaacgcggacagtaaacccattggggtcagcatcatctaggttacacccattggggtcaacgtcgtctaggtcacacccattggggttaatagcaggaaggttacacccatcgggattagtttcagcaaatgcaggcactagcacttcttcagcggcaggaacagaaggaccagcattctgatcaaaactagacactcgacgaagacgtctcttcttctgtttcttcccgtcagcaggagaagcaggctgattggctcggcgagagcgcttcggacgaacgttgtcagacttctgaatatctaaagcttcgctatcctctaggatgggcgctaccgccatagtttcagtagggactgcatcagaggaatcttcagctaacat

SEQ ID NO: 157253 - DNA, 325 bp, Zea Mays
caaggagcataactctttggacggcagaacaccgacttcgacgaggtggagaaggtcagttcaagaaataacggaagcattgttaccatagaaaggaagttgtctgttgggatcaatcggagggatgtctggcatggcagcaccctgttttctcttcctgggcgccatcgcgatcatgcaggcaaaaagctcaagaacagcgcgacaaagagtgggagttcgagaggctagaatgcagcggaggagaaacaaagttagggttcatgcaccaagaaaccgttgacgaagatataagcgagcgcattaagtcaagcgcaacgtgaca

SEQ ID NO: 157254 - DNA, 528 bp, Zea Mays
ttccagaagttcccaatttctgtgccgtccatctgagtgagacgatatgatcccggccgagtaactcctgctactatgaatggtccttcccataagggtgataacttgtgtcgtccctcccccattagaattcggtggaggacgagatctcctactgaaaaggatcgttgtcgcacgaccttgtcgtgatagtgtctcagagtctgctggtaccgtgccgattgaattactgtgttcagccgctcttcttcgagtacatcaacatcttctagcctagttgcttcggcctctgctatgctttcgaagatcaacctcggtgccccaaacttgagatcagcaggtagtactgcctctgaaccatagaccatgaagaaaggagtgttcccatgcagagctcggctaggttgggttcttaggctccaaacgatgtagggcaattcccttatccactttcctgcgaacttttcatttttatcaaagaccttttttctgagtgcctccaatatcatcccgttagctcgttcgacc

SEQ ID NO: 157255 - DNA, 588 bp, Zea Mays
ggaatttcttcaaaaaatggtgacataatttaaaaacatttgaagagcttttccttttctatgtgagtacacaagacacataagaaatgataacttaagatacttgcacttaaaagcatgaatgttaccatcctttggctttcctccatgttgtaggtcttgatttttcgcacaggataatcctttatttcctacaacatcaataccttccccgagatgatatgagttttagacataataattcaaaacaactttgggtcaatcttggatatatatagattattgaagactgatagcttgagttaataaaaattgaattgactctctcaagcaccctaaagcttcataccatctccttttcctgcaaatcttgtcaagcatattttggtacccatcgcttgatgggtccatcaaggttagtcaacaaagatctaggaacccaaaagtcctttgtgttagcgcttggtaaactcattacctttctagcacaagttgcaattttgggttgcctagttacatgtgaaataattgacaagctagaagtggggttgttaccaatgggacaatccttgcattgatgtcccttct

SEQ ID NO: 157256 - DNA, 738 bp, Zea Mays
tgagagggagccgctgttgccgtactcttgggatgccgccacggtcgtgaccggttgggcgtcgcctggcatcagcgtgtaaccacggtgaggctccaggttgtgggacagttcatccagtcgtcggcgtgcgtgtgggtattcactggtgagcacaatttctcgccgtagttgaagggccgccgcgggaccgcactctgccgcaaaccgaccgcctgggtgcgccattgccggtaagccatccctttgttgtattcgccttaatcccatctccctgtttctggtatcggtgttcagatttgggacacctgcgctccggttggccgtacgccggtgtgaccaccaccgtggttgaccaggccgcccccttccgtataccgtaaattcctctgagcatacacctaaattggctcgctagataggttcgctgagttttggtctaggtgtgggaggcgttaattggattttggtacaccgtgcagctcggcggccgttgccggcgatgtctgccaccgcaggcgctctggcgccgccgcgcgcgtggtgttgggagagtagtccacgccggtgttagcgtggtccattgatttttctgttgacggctaagatttgatctagaataccggttcgacgtaatcggctcagggcgtcgatatacggtagaacggctcggatcactccgcgctatcaattgatgtggaccattggttagtgatccgatggcctagaatgcgtaaa

SEQ ID NO: 157257 - DNA, 392 bp, Zea Mays
cacgaccagacaagctccaccaccgctcaccgaagaccgtcgtccgttctgtgaccgccgtcgagcccgctccccgtccgttgcctcggtgagttccgcctcactgctagctacttgggacacccctcggtttgctctttccctctctgtgttgcccggtccacgctcaccagagcacttcttgcgcagccagagcccgcgaccgtcgacctgagacttccctgcctccctaccgttctccaggcgctcctgagttcgcgcttgtggtaagcaactttcccatgcccttaattcgtccgttattgtccttatgcttgggcaattcctcgctggagttgatccgtgccgccgttagcctgcctcaccgtgtcccgcgttctctggtgcccctg

SEQ ID NO: 157258 - DNA, 567 bp, Zea Mays
gcaaagaatacagagcgtccgaggtttcgactaaagccatttgcttcgtctcgaagcctagatggcaatagtgaaccagcattctgccaaaagaggggtaggaaaagaaagaaacacatgtgccaaatagagtacaagcgaatgatagaccaatgcatcggaaatatccagtgtgaagtggagagagattctgactttaagtttggtgaccagatattggatggctgtgtacgtgcttaccaagaagtggattttacgtggccatcttccgctgatagtcaagaggagaaggatgagcttgacgaattgtggaaagaaatggactatgcactggccacagtagcaattcttgaacaaaagcaggtgagtggttttgttttgtagtttgccttcctctttttctatgaacatattcaaccattatttaagatacaaacatatttgttttgttgtcacaattaataaaatgtttggacttccagatgacagattcagaagtcgttcatgagagcaatactgatttaggaaaaggaggagagcactgtcatcatgactgcatgctggacg

SEQ ID NO: 157259 - DNA, 733 bp, Zea Mays
ggggaaggcagtctacctcgagcaacatggtggcaagaagaagccttgtttggatagagccactcgagtagggaggacaaattcataatggttcagatcaaattgcctattgtgttcaatgtcagtcgcctcgtctccgcactaccctggccaaccttaacccctcacctcaacctaccactcctccgacttccaccacacttatcgtcataccaccagcacccaccttagagcctcccacaacttccaccacacttgcagcctccgccactcctaccactgctacaaccactccctcagtcacaccacttattccacccccctcgctcccaaggacgcgacgaggatgatgttgcatcgttagagggacacacgagattgattaacctttgttgtgctactacaactagggtacaaaggttcaaacatgtgcttgctaagagtgggtttccagcatagcgagaccctgcagcaaacccgtgtttcagctcattgacccagaagtcattttgttgatgctgagatgcttgctcacatctctttgaggcctcatcaactcttggatatccaggcacttaagaaagcatatggtctagctcttgaggctcatatcacttacctgcctggtttgtctgcactgcttagtctgggtggtaagcatgtgcagcagtgggtcaaagttttctatgccacagtctggattcaccccaaccgcgagtggtttcatttcaag

SEQ ID NO: 157260 - DNA, 389 bp, Zea Mays
cgaacattacacatcaatgttcgagacggggcacttccccaacctgctgcaagaagtgctgcacgcgttgggaacctacgtccgcccctgtacgaaacaaggcgagtgagcgagcctccccgggcttgctactacatcactcgcatccacgtcagggtgatggatgcaggggataggggattcaggactctgtctgctcatgagtccctgacaccgctatctacctacgctgcttcggtcagcgatgctgccagacggaccctgtggtctctcatccacacctaccgacagcagctgcatgacacgaggttcaggcatcttcctctgcgtctgagtggaggaagccagaccagcatcgttccaggtggagctggtgaggagcgcctcaa

SEQ ID NO: 157261 - DNA, 436 bp, Zea Mays
gccttcccatagtggcgacaatttgtgccgtccttcccccgttagaattcggcaaaggaccaagtctcccactgcgaaggatcgatgtcgtatggccttatcatgatagcgcctcagggtttgctggtacctagctgactgaattactgtattcaatcgttcttcttccaatatgtcaatatcgtccagtctagtagcttctgcctcggctatgttctcaaagatcagccttggtgccccaaacctgagatcagcaggtagcactgcctccgaaccatagaccatgaagaagggagtgtttccaagcaaagctcggctaggttgggttcttaggctccaaaccacatacgacaactctttgatccactttcctgcgaacttttcattcttgtcgaagactttcttcctgagtgcttccaatatcattccattagcc

SEQ ID NO: 157262 - DNA, 562 bp, Zea Mays
ataggatcgtggctcgatggcgaatttcgtctggcggggttagtgcagccgcgaatcggagctcctccgtgggcagggcacagggcgcattgtttcgggattgtgagtcagccgtgtgattcgaagtagtcatgtgttcatggaaaccgagttcggtgcgtgaatggggtggggattcaccgtggggcgcgttgccggacttctccaccgcgcggtgtgtgcgcgccgccgcccggggaaatggaggtaggcgatggctcttggtccgttgatcgagattcatacggctaggattagtttcgtggtattccttcgctgcgtggatgtgagccgttgattccgtattgtgcgcatcagattagatcgggtctcattaaaccggggtcgtggatctcggatccggcggctagtatcgtgtaccgcttcagtgaagttagatctaatctgcgccctagaattctaatcgaatggccaacgtttgtccataccccttcgtgggtcagttttattaaagagcccctgagatttcagagaatcaacccgccatccacgggagctgtgc

SEQ ID NO: 157263 - DNA, 760 bp, Zea Mays
ggaaaacagcaacttgacatccataagttgaaataggtgcttccagaaagagctaatgaaaatcttgtctttgtcggatacaatggacttgggaggtccatgtaacttcaccacctggtccaaaaatacttgagccactccttgggcagtgaaagggtgtttgagtggaagaaaatgccaatatttggtgaatctgtccactactaccatgatagtgtcataaccttcagactttggcagcccttcgataaaattcattgtgacatctgcccaaattccatgtggaataggaagaggctgtaacagtcctgctggatgagtcctttctggttttgcctgttgacaggtcaggcactggtgcacaaactgagttacatccatcttaagtcccttccaccagaaaagtttcttgaccctctgataagttgtgtgtatgccagaatgcccccatggcactgtcatgtaaagctgctatcagtttagttctaagggcagagttggaccctatccagatgcggtcacctttcctgacaataccttgctgcaagctaaacccttgttcattgggactatgcaccaacaactgagtaattaactcttgagcttcaacatctgtctcataggaattcaaaatctcttgaatccacactggttgtacttcagaaagaacagccagctccatcatagcccccaccctggatagagcatcagctactcgattctctacccctttttttgtaaacgatctgaaactgaaggc

SEQ ID NO: 157264 - DNA, 462 bp, Zea Mays
gtcgcgccggctcccttttaccccgacgtcctcttcatccaggggagattggagtcagcacccgtctccgacgatgagcctaccatgcaaagggaagagcctccccagcatgaggcgcgacgatgaaggaacagacaccggaacgtacggcgacatcatgaagctggggaacgagatccggtgtagctcgtatcctgagatgaagcctcagagatgggagaaactcccgatgagcgagtgcaccgagaaaggtgtaactctcgccgccgcgatcagcgataagctcaggagcgggagctagctgagtaggacgctaggctgcggtgagagaaccctctcttcgctcggaacctgtatcccgattttgctcgagcaatgaacaccccgagtgaagttagaggggtactggctcagatagctaacggtctcccgcgaaccccaaacgcggaaggctactggcgg

SEQ ID NO: 157265 - DNA, 303 bp, Zea Mays
ggggaaagtgtcgaccaccgtcgatctgtcgatggagggcagagattagatgatagcataccaattcgcgcgattaaatcgtggccattgatcctctatttgatggcttagggcagatcgggctaacataaaatcagaaccctaggatcttgatctaatggtcagtgttgcataccgcttcgtcacttgggcgatttaatctgggcacctcgtttcagatccaacgaccagaataccctcgtaccccttcgtcgtgtcacaattactagagagcccccgagtaaatcagaaatcaacctgccg

SEQ ID NO: 157266 - DNA, 514 bp, Zea Mays
caaggaacaaacagccatggtttatattctattgttctgaaagtgtgctatgtgtgtaactcagttaaaccaagaacaaacttatgatgctccaaaataacttcttctgtttaatatgaataaatttatttgtggcaaggaacaaacagccatggtttatattatattgttctgaaagtgtgctgtgtgtaattcatttaaatccaagttcgctgttctgattagaaaattgcagtactaactgtgcttgctgttcaataacaaagttctgcatcagtaactgtgcatccattaaccatcactataattacagatagtaaccagtaccaaactgcacatactcaatagctttaaggattcagccatggtttatattatattgttctgaaagtgtgctgtgtgtaattcatttaaatccaagttcgctgttctgattagaaaattgcagtactaactgtgcttgctgttcaataacaaagttctgcatcagtaactgtgcatccattaaccatca

SEQ ID NO: 157267 - DNA, 425 bp, Zea Mays
ctctacactgtggttaagcttagctccatttataacggaagaatgcagcatcgttgccgtagttgccgctagttcagcaccttatgtatcgagtttcctgatgatgttgtacgtagggtgcatgttctattaggggaggcatgaacatgacgtgttaaccaaccagagaacccgtcaaagaagttcctagctaatcctgcagctagcgtcacccttagcgcatggttttatatatttgcctagcattcgttccattcgctgcaccccgtcctgtctatctctgtcatgtgctagctgtgcatgaccggttccgcactactactatactataccacgcttacttttactacttgggaacaagtgaaacaaggaagcagtctaggtgcgggcattagcgcgtgattaaaaaagaagattttgagatg

SEQ ID NO: 157268 - DNA, 459 bp, Zea Mays
cccttttatagctaaaggggggcacgtacaagggtgctgagccccgacatgcgggcccagggacataacagatgtaatacttggagcaactaatgctggtcgctagtgcaatctccttgtgccctgatatctgcggtctgcgtagcgttggcgtgcagcggaagcttccctggcaacgtacgagtgatgatgagcacagtgcactccgcagcacgggcgtactgcctgccaacggaatggataggcacgccgcctgcgggacggcctggtcgccgcctgccaatggagtggacagggcacattaaatgtcgtggcggcacatccctgccagcggaatagacagggctcattaaatgctgaggcggcacatcgcatgtcagcgggacggacaggcagcgcaccttatccgcaataaatgcaggggtcgcgtaacccggaggccttatgttaggctccgcc

SEQ ID NO: 157269 - DNA, 833 bp, Zea Mays
attaaaaatcaattttctaactcatttattcattttaaaacagcactggactgggcctccaattccagaaaacgcaggggctcaagcgcaaatatttctaagacacagtcgataagggatcatggactgcaggttaaaatccagagaacctagggtctttttaataatttactcggccgaaggggtagggataggtctcagccgctggattagaaaccaagggcccagatgaaatcttcatttactgaaccggtatgcaatctggttctttggatctgtgatcaagggttgtgatctattatgtgcacaatttgatcttgcccatatgtcgacaatccaacggccgggacaagtcctccccagtcagtacacaacctctaatctcattcgttggccgccagatcaacggtccccatgattaccccctctttcctgctctccgaccaacccgagacgacggcgccctggttttcatggaggcgccatagccggagctcccaaacccccaatcccgcatctaaactccgatccaaaggtagcaactgacggcggtaatgacggggaattactacggaaggtgctcaccgctgatcgaagtcgtggaaatcctgtccacggaatgtcgcggactcgcagcgacagcgacgaattgggggctcccagatcgctcccgcaccacgattccaccgcgaaagagttccgggtgaccaggcggagcaccacgactccaccccgggtacccgtcggtgatgctctctctcaaggcaccaatttctttcctctctgaaacccgactggacaacacggcagcgccgaggcgattcacgggtgtc

SEQ ID NO: 157270 - DNA, 658 bp, Zea Mays
gaccagcctcctgaccctcaggaccacgctctaaggtcaatgaggcgcgggacgctgcccaggatgaccccaacccggcatcgggcacatcagcacaaacatccatcgtgccaccatctgtcggctctgacaacagatcttctggaaccatgtcttcaagagtttgatcaaagttcgccagagataattcttgcagaccaatgagggcagacaaagcaggagaaggaacaccactactttccccaccggctatgtaacgccggctgttcttccgaatcagagggatttcatcctcttcttcatcatcttcatcaacaacacggacagtacacccattggggtcaacttcagcaggatcacacccattgggtttagtagcagtcgggtcacacccattggggtcaacttcagcaaattcaggcactggcacttcctcagcagcaggaacagaaggaccggcatcttgatcgaagctagacactcgacgaagacgtctcttcttctttttctgcccctcagcaggagaagtgggctgatcggctcggcgagaacgcttcgggcgaacactgtcagacctctgagcatccaaagctttgccggcctcagggatgggcgccaccaccagtgtttcagcaggagcggcatcagaagaatcctc

SEQ ID NO: 157271 - DNA, 460 bp, Zea Mays
agaaaatggcgcctaaagacccctagaacaccctagaaagatttgaacccaaccctaagtcgtttgacacgacttgacacggtttgtgtctcgggatggacaactcagacagagccaacttcacaccacaatatctctcaaccccgaccatatcttgcttggaactcacatggaaaagataggatatggtgcagagaagagaccttacacgggatttttgccgagatctacacgctaaggcgaccaaacaggcctttgaacaccggcagaaccaaaccaccacgtgttcgacgtgggtaggcactcgagaacgcgccagagcacgcccacacgcgcgcccccgcacgcgcgcccccatgcccacacccgtgtcgtgcccacgagtggctataaagcccgcccttatgcacgaccaccttccctgtcaccccctccgcaccgcgcctagctttcccgagcc

SEQ ID NO: 157272 - DNA, 410 bp, Zea Mays
caaggcttgaatcggacagggacttaccagagagggctggccacggagcgcagggctttacgttcgccggagacagagaaagggggaaatcggtgtcacgacggctctggttgaaattggggttggggattgaggctacagggccgtaagaagctgtgttttcattgtgtgcaatcaatttgggcgaagatggagagggcagtgcgaatttgacttcgactgagcttcactggtggagatgaaagcacctcgtcgtggcaccctactcaatttataggcacggtggcccaacagatgacccccacagatagtagcgcaagcgcatgcctaccacgtcggaaagagatacagtgagggagatggaggcatgggcgacaccgcggcaaaattcaatggtcacggtggccgcc

SEQ ID NO: 157273 - DNA, 712 bp, Zea Mays
gtttctgtctccctcctcaagctgcttcatgtccaaattagccaaagaaatacttgaatcttgagaagggccaaagagatctttatagaaagaagtcgccagttggttaatgccatgatcatcatgtgccaaaatatcaccatgataaagagttaagatcttaagtttcctctttttatgcttggctagaaaatggaagtacttagagttctcatcaccgtctaacaagaacttatctctagctttctgtatgaggctaatgttttcctcatcaacaatcttcttgaggttagattccaggtcaagtttcacaaatctatcagcatctgacaaacccgaagtctcactgattttatcaagggtgtcaattttttcaatcagatattttttcagcttcttgtagtgacctacaatattattattccaacctttaagcttttgtctcagacatttcagtttcagcttccacacatcaaggctatgggtcgcacccactgggagagaccaattacttttcactaagttgtgaaagtccagtctaagcttccagcacagctcgtatctaaagtccttacgcgcaatggagatagcatcagtttgaagacaaaggggagcatgatccgagaaggatctattcaaaccacgaacactgatattgttataagcaagatcccagtcaggactggccaaaaatctatctaacttttcaaac

SEQ ID NO: 157274 - DNA, 900 bp, Zea Mays
ttggcatacgctactaacacatgattgctcgtagtaggggttacaagcggacgagagagggaaatggtcccaagtctctaaggattgtgatgctaagggttctacgtatcatgttcctcccccttttatagactaggaaggggtcagttacaaatggtttctctcggaagggatcactacgactgtagaacgagatagctctcactcggtaaacgccttcccatgtgttgttattcgtcccatatcttccttctaaaagactgccggtgaagcatgccgacgacgggagtctgatcatcataagtactctgcctgcctgtctctacccgcgtcgacccttagtcttcgtagcttgtcctcatgtcttcccttcgtcctcttgcgtgctctgtagggcgtcgtaggacttagggttcataggtcatgaataaggctcagacctaggacttataggccttgagtaggtttcaggcctaggacttataggtcatgaatgggaggtggactggctctcttccacaccacggctcagcgccaagcgtagttaatatagcatgagagcagtccttgggtcagacatggaatccacttgagtggctccctgatgcctcgtctaacacccgagctaggttgagcctcgcctgacactaggcacggtgcaggggtcatccgggtgtggattcacccgagcgagttcctccatgcgctctctgactcgtggcccctaggacctagggatccgctcctcaacagtggccccccgagcccctgaggggagtgtgtctcccttggtggatcttcgcttcgatgggtcgatcgatacatatcttgggtttcaaactattgtctttggctggccctgaggggccacctcttccttggggagcggttgcagtttca

SEQ ID NO: 157275 - DNA, 716 bp, Zea Mays
gccgaaagcatgccatccctggaatccttcagttgggagtaacatttggttccactgtgtggtttttgctctctaaatatattgcttgtcatacatatgtttgtggtctcatagatttggattttgagcagcaccagtttcttatttttgttaatgcaagccttgaagcgtatcaaactctatgaactggtatgatttggaagataggaattgtaacttctgtgttgcaaataatctatgaggtgtgagctgctagaggtaaaacttgctgaaatagttatgatctgaaatagtcatgtatcttgtgatattaacaattcctcacattatttgactatttgtattgtagcaactactccttttgcttcgtgtagtactaaatttactgttgcttgtttaaaagaaaaatttaggttccatttgcaatagtagatatgttttcactgtctgatgaatgctgttgggatatttggtttttcttttgtcaaactccaattaatatattttccttgtattgtatgaattgcgatgttcagaagcacaaagatattagtaaagtcgagaaggacatcgttctcaggtgtgttcttatgtttactttacattcgagaaggacattctatttgaagctcaacttatcgtgtaaattggtttcaaagctcaatgagtattgtgatgcttggtatttttgttcttcacacccccttcgccaaggc

SEQ ID NO: 157276 - DNA, 330 bp, Zea Mays
cggttctcagccgtccgatcaaccgcagatggccctgattagatcaaccatcgcctgagccgatacgggatcgaggccataggatccgaatcctacggtgcagatcatatctctacccggagtcatccgatccatccgatcggatctgaacggagccggttactccacccaaatcgttcgccaggttcgatctcggccgcagacacagatctaacggttcccagcctttcttcctcccagcagagccgcgcggtggcgctaccctgatacatggtgagccatgcgccggcgacagtcttcgccacccaccggagctaaactcaatcccca

SEQ ID NO: 157277 - DNA, 477 bp, Zea Mays
gtcttgactaggttgtgttatgtgcttctcttgtcttgctatctagggaatgttgtagttgttcaacctttttgcccataactagccaataggaccccccactccaaacaaccttgtggttagcaagtaaaaccttttaaatttttttttcatgtgcttgttttggtgtttctagcccttgtgtgttttacacttgaatttacacctacacaacttgtagattcccatagcttgacccctaaatcggctaaagcttccttgtacacttgtagtgtcaaaaaaattgttgctggtgtctagttgcgcaaaccctatcaaggccctgtttctttccataaatccttgcccctgaaacttcatagcattcctgttgatcatccagctgatcttgttgcctacctctcctttcgcatggatctggtgatctctttccttgtgaatcatgttgtggctttatcatccgaatctctggatccc

SEQ ID NO: 157278 - DNA, 610 bp, Zea Mays
cccgaggcaccctcagaggcccctcaaagttggacgtgaggtgtctcgaaggaaggggagaaaaggacagttcgggccattgcagcggtggcaattcttcacgatcgtgggatcacgctggcgggcgtaatcgggaattacctccgtcgggggtagctcctctcatggccaggcgatgctgctttttaaaattaccgccgaggccccattcgatgacagtcggctgagcgctctgcttcccaatgacgcggagatcactcgctggctcacggaggccatggaagtttccaagggtgtggatggggtcgtcgtcccatatgtctttccaatcccaggttgccctctaatacgtcctgagctgggctttgtggaattcgtaagtagctttcgtcgctcccttgggtgccttcccttacctcatgagcctgataaacttattttgttgattctatagtccttttcgattggggatccggtgccctaagggcggtttgcgatgatgtctttgaaagttgcctagatggggggttaataggcaagcggaaatattttcaacaaaaactagaaacaaactgggtaaaaccggttcaaccggtgtcaaaaccagttc

SEQ ID NO: 157279 - DNA, 884 bp, Zea Mays
gtcctccggctggatcgacagctgcttcgccctgtgggcaccgcttcaaatcaaggaaccgggagatgggatttgggtcggtaacgactcttctccctcccccggacaagggtacgttcacctctatgaatccaccattgtttgcttctccagttgtacatcaaacgcctgttcagtttcagagcactgatccaatactcatgggggggggctaagtggtgaacttcgtggtcgcttacctaaactgaattttcctgtgtttgatggcgagaatccaaaactgtggatccatcgcagtcaggattatttcgttatgtattcagttgagcctcagctttgggtgcgggtaacgtacatgaattttgttggggtggcggcgcgctggttatcatctctagaagagtcgtcgcgtgtgttggattggcacgagttttgccgcttgctgctggaacgttttggcaaggatgaacatgaggcgttaattcgcaaattattccgtattcggcagactgcttcagtggccgagtatgtggatcagttctcgcagctgatggataatttggtggcgtacgacaagccaatggatccattatattttgtgcaacgatttgtggatggattgcgttcagatattcgtgctattgtgcttttgcaacgcccatcttccgtcgatactgcttgtgttctcgcattgttgcaggaagaggtggcgatgccggagaaacggatggaatttcgtcgtccttcagtaccagtattgaattcaagtttgggaaagcaacctctgcctctaccgttaccaccaaggggtgacaggaatgtttctctggctgatgatgtcaaccacactgaaccaagcagaattcgtgcttctgatgacaaga

SEQ ID NO: 157280 - DNA, 432 bp, Zea Mays
cagtacgaacattccagaaaagatggcctaggtcccggatgggggagtggttttatgttaaaaatgatttaaaggcaagggaggacattaaagaaatcattcagcgacccatctggtcttgcttcggcctccgaaggccaaaggtagaaattgatggcaatgtcgaagctggtcagagggcttttagcactgtgtgtgccttcattggcacatgggatttgattcaagagcatatatccttcagggtatggccacttgtggagagctgggatatgccgaaggagaccactgccgattctaatgagggtggtctggtacgactgaagtataccttcagatttagggagaagtttgatgagccgaacgacgattggttgaagtgtgtcaaagctaccaatgatgagttgcttggagcatactccaaggccgaag

SEQ ID NO: 157281 - DNA, 414 bp, Zea Mays
atgatggctaaaatttcacaaaaggattacttgacttttgtgcctataatcttatctgcttagttgactattattcacagaatcttggtccaaagtttttgcataatcataatagctgagcatatattactcatgattgtgatgtgcgactagttaaaacgcatatatgaccatattcaaatgcaggaccataactaaatgtctgagccagtcccattgacacaaatctcctttcaacatcgcatacatcggtttgtgatgtgtaggcagtccaaagatttttggtgtgtacttgtgcaggcaatgtagtatgtagtgtgaaagcagcaaagaagctcaactcgtctagaaaggtattgcttgttctcccccatctgcgacgcccgcatgttccacccacatgatgcgccaaac

SEQ ID NO: 157282 - DNA, 566 bp, Zea Mays
actaaacccctacctgggcctcggtccctcatattggcccacctgaagaagtcaccccgcgacccacctaacaaatctctccccgcgcagcccatccgcatctctgtgccgacaggtaggacccacctggtcagccactccttccttgcgcggattctttccctgtcattagtgcgtgggatcgccttgtcagtctcccttcagcagaatgtgtccgtcttctccgcgtgccactcgccccgcgcatgccgcgtcgcgcagtgagccatcccgacctgcctcgctagtacaaagccaccagccacgaccactgtggcctccccgttccgtcacatctgagctagaaccgagcgccaacgcaaaatcgatggagaagaaatcgggagagaggaagtagtcgccattgccgcggaccgaggagaggaagagagagattgagagcttgcgagcgacgccatcaccgcactcacatcgtgtgggttcggtttgtcgcggattggagtcttcggtacgacaggaagcaaaccaagacccctgcacgcacatattgggttgcggcgctctga

SEQ ID NO: 157283 - DNA, 624 bp, Zea Mays
gagaagattgggtcagtggcttatcggcttcttttaccagcagctgctcacatccataatgtgtttcatgtggctcttcttaagccttttgtgggtacccctccggtaggtgatccagtaaagttgccatctcttgtgcatggaagagtggatcctaatccattgaagatcattcatgctcgtctcaaccatggattatgggaattattgggacattgggaaggacatacaagtattgatgcctcttggatttcactcgaagaattcaagaaagagtatccggtgttttagcacgaggacgagttgttccagggggaggggggaagtgttgtggactcattcttctacaggaacacttatgggcataggcacaagaaggaaacctccaccaataaggcaaccgagctagaagaataggaaaggaagcaactaactcaggcaaccggactggaagcaaggaaaggggaatcaggcgagtcctattccagttataccaatcaagtagtttcctattgttgttatagcagatagtagagtttcctatttctttatagaaagtaacaagttgattggatatgttccctgccgcctataccataaaggttggctgctagtttgtaaaag

SEQ ID NO: 157284 - DNA, 1016 bp, Zea Mays
ccctccccactcctcgtccatttgtgcccacgccgtgagcccctcctcatcccatcgccgcgaaagagcatgaaccggaagcgagccgccatggacggtcttcaccctgaccatcgatccagccatagggaatgatccagggtggagagcagggcataggggaggtgcgcggactgacccaggggctcggtggtgtctgggacatcatcaattgatcgttgaagtgtaggcaactccgatgtgtcgcccttccccgttgccaaggttctacgtgacttggtagccggtaataagcccttcttcgttttgtgctcgctttcgtatcatgtggcaccagttgatctggagattgggtcacctgtgggccgtcttagacttctccggcgtgaccgccgccgcgggtcggaggaagggggtggagagaagggtctccattcgatctggtatggacgattgagattagaagctagaataccctttcgtctattgaatccaagttgtagatctcagggtgggcagatctagaatgatcagaacgtggatatgccacatgaccgtcgatccctgatccggtggtccctgttgcgcactgagtcgatgatgggcataatctaatctggcccagcgatcctagatcggacgacgtagatcagcccgtaccccttcgccacgggcgagtttattaaagagaccctcggaaataagaaaatcaacccgcagtcctgagtggttataaaaccattgctctcaggtcctttcctttgcaatcagcacccttacctttaccaaaatagaagtcgtcgtccatctgtgcataaaattatataagctagttctgcaaattgattttaggataaaatttaatctagaaacatagttaatttatatttctcacattttaaccttgagttgatccattcaaattgcgttaacttcatattaaaattgcctacacattaaataacaacattttgtcatatttttagagataattaaatgttagtttaacttgtgct

SEQ ID NO: 157285 - DNA, 1025 bp, Zea Mays
agtttctagaattatttctaatctaaaaatcgaaatctgaatttattttataaattccgaaggacacaagggttgcggctaccaattttacaaagcctagggtctaaatcgtgaaaaacaggaccgatccgtaatattaacagtataagggtggacggtgggtttatttaaaagaagtccgagggctctttagcaaaaagacccaaccgaaggggtatgggattacctggatcgttcgatcaacatcggactgctcagatcgttccggccgcatatcctaaccggtgtgccatcctgaccgtacgatcaacgattgatggacccattttactgagccgaaacggtgtaatcgctccagatctcacgcgcccgatcaggatccaacggtgtaagtgccatcttcctccctggtactgtatcccgtggcgcaggcactaggtggcggcgtccgagctcccgacgggtgaagcggccatgggagcatggagcgaggcagagaggttgcccgcacgcatggggagagaggagagatgagagaactcggccctataccgatgtggagcacgccccttggagcagccacagggagcgcccgccattgctgtgtcgtggagaccaacgagcatgaatagcagagggcccggcaggaccttcgatccaccacggcggcaggtatggacagcggcggcatatggcccgtggcccggcacgtagcgcaatggcgcggcgagcgagcagaaccacagcggcggtgatttccgaatctccctcatctcttgcaatggcggaactgggtgcattggtgagaacgaggagactgcgatgcccgatttatactccagtagcgaagtccgagcgaggcacgaggagcgacatccccgacgaggtaatcggcgttctgttgcggctccccttgcgccatagcagtcacccgagaaagtaggagagggagatgatgaagctgtcagcgcggacccacatgtcagcgaggccataagtccaacacgctgaagaaattcactgac

SEQ ID NO: 157286 - DNA, 699 bp, Zea Mays
aaggaaagaatggtttacccaatctgaatttgtgtctgtccaagattgtttcctgtatctttgcgatctgaagagcttgttccatagtttgagggaggtgggactgcactcgcccagcaatctcaggtttcagacttctagtgaattgtgtcacaaaaaacataggattaaagccactgtgatgcatttccaacatgaactgcaaggactcatattcataatagaattcctccactgtccctgtttgtttcaactccaacaaggcgctcagagcacgctcataatcatatgccccaaatttagtttccactgcctgcatcaattgattccagtttggaaaaccccctcgccgacgttgtacttccatccaacgaccggcattttccttcatgtgcatagtagctgtgctcacccaaagatgctctggaacgttataaaaccggaagaagtcctcacacctatgacgccaaacctttggatctcgaccacaaaaattagggaaaaacaactttggcatggccccttggtattgattagatccttcaggaaactcttgttgaaaaactggaatatgagttggaacggttggctcaccctgaggttggggaaacggacgaggttgccgccggtgaaacggaggacgagcgtcgcgggaatcgcgcgagtaggtctccagatccgcctccacctcgcgctcca

SEQ ID NO: 157287 - DNA, 513 bp, Zea Mays
ggcaccaaggcgaactcaatggcgcggaagaggccatgaatccacgggcagagaggggagaacagtggtgagagagtctcgggtgggccggagaaactcgggtgagcgattccagccacggggaggggacttaaggcgcgcttaggccttgactaacttcagcagaggtaggggcgacacagggacatactccggtgaactagactaggctaaatcggccggccaccgcacgagcacagcggaccaccgcggccgagcaccaatgaaggtgaaattggtctagcatagggtgcaatagaggaaaattgggcacggggacgggtgtctcaccttggggcggagctcggggaggcttggagcggtctccggcgagctagatggccgggaacgcgggcgcgggtctccggtggcggctggcggtgagggcagagcgcgagagagggtgaagctttgcgaaatgaggtgaggggtgtgcgcggggcactggcggggctctaaaaagggagctggaca

SEQ ID NO: 157288 - DNA, 783 bp, Zea Mays
agcaagatgagattcttcttcactttgcctgatagcttcgtatgctatctctctgccgccgttcatccacacttgagaataaaatttcccacgaaaggcggtagcttcgcctgaaggttctttaatgtcatttactgaaactaagaattctggctgaattacaaccgtcacatgttcatagccaacgttttcgagtagcgacaaagcccctcgtgcgcctacacaggcacaaaagtccccctaccagttagaactacgtccaatgcttcgatttcaccctcaatccattttatcacactcgggatctccactgataaaatttcgctcagccgagaatgcgccaacactagtaaaagcatttttagcttattagagcattgcatagcaatagtgtaacattcttccttctcttgacaaagctcttgaacattcttttgtaccctggaccgcccagtgtcggatatctcatgcttcgattgctcaacgttaaagttttcggtaactttgccaagtttcttctccagtctcatcacttcagatttatgcaattctacttggacggataaagcgtattctagatcggctatgcattttgcgttagcctctttttccttttcaagctttgaaatcttctgatctgcttcggagaatttagccaaattagcttcattcgtctttagcctttcgactaaagaaagaagaatcttgtctttttcaagggccttgttctgaagcgttataacttctaagtgcagatttcagaaggctattttagtgctctca

SEQ ID NO: 157289 - DNA, 746 bp, Zea Mays
cagggtgaccagaagaagggggagtcctcctcgacacgaggccgcaaacgcggcaagccgcgcaaggcgcgtggaggcgcccaggccggggcgcgaggacgtgctgagggtggtgcccgtggaggtgcccaaggcggcgccgtcggcaacaagaagccggcacgagacgacggctgtcacaactgcggcaagcttggccactaggccagggactgtagacagccacgacgtggccaggccaacgtcgcacaggcggaggcggaggaggaggctctactcctagcacatgcaagcatcgagctatctccagcggcaccggccgcagcggcactcctccaccttgatgagtcgaaagcacgtgctttcctcggcgacggctccagcaaagacatgatcgaaggatggtgcctcgacaccgacgccactcatcacatgaccggccgacgggagttcttcaccgagcttgactccagcgtccgaggctccgtcaagtttggggacgcctccggcgtagagatcaagggcgccggctcagtcgtcttcaccgccgcatctggtgagcacaagctgctcaccggagtctactacatccccgcgttgaggaactctatcatcagcttgggacagctggatgagaacggttcgcgcgtggaggtcgagcacggagtcatgaggatctgggacccctctcgtcgccttcttgccaaggtacgcaggagtccaaatcggctatacatcctcaatgt

SEQ ID NO: 157290 - DNA, 565 bp, Zea Mays
tttgaatttagcaaatagaaatagtagaaaaagaaattggaaaagaaaataaaaagaaggctttccctcggttctatgggctgaaaccggccggcccagcccttcaattcccaccgcgctggcccaattgtgcacgtccacgcactgacagcgcggaccccacttgtaagacccgtcttcctcggagcctggcaactcgcagaactcccactcccaaatttctcgcaacaacttcacggtgggctccgggttcctcggccatcgctgagttctataggattatataagcgcgccgccacctctatcccgatttcccccatgaatccgcataaatctctgcgccgtccacacccctgcgtccatggccgcggatctcgctctccggcgaacggcgctcacccttcgtcctcctccctccggccctgtgaccagcggacgagcccctggttcttccccaagtcgcgagcacctacgtccacgccattcatgcttttcagcagcgctccaagtcccagccgccgctggctctcagaagctctatccttcaccccagaacctttccagc

SEQ ID NO: 157291 - DNA, 425 bp, Zea Mays
tttgagggtggtatgctgagcttcgtattacgtgggtcccaagtgattcttgcaattgctcccagaaacgtgccacgaatggtgctcctctgtcagatacgatagtccttggtattccatgcaatcgaactatctagtcgatgtagatttctgcatacttctccgccctgtgggtggtatgtactggcaagaaatgagctgtcttagtcaatctatccacaatgacccaaatagaatcgtggtgtcgggaggtattgggcaatcccacaatgaaatccatgcaaatatcctcccatttccaagatgggatgggaaggggctgcaaggtgcccgctaccttcaaatgactggccttgactctctggcaagtgtcgcattcagatatatacttagcaatttccctcttcattctggtccaccaatac

SEQ ID NO: 157292 - DNA, 277 bp, Zea Mays
aggcacgaccttctcatcgggtcgggccggtcctaggctggctaaaagctcaggccataggtttggccatcaggcctcgggacttttggccaactatagctcagcccccttttgttaataccctgcactttcccaccattcctgatttttctccttctcatgcattcttttgccccatttcttgtttttccaattctctccatctcttacaccaccttaatatatacaagagtatcaagttgcataccgctttagacaactctgcaatcagcatgcc

SEQ ID NO: 157293 - DNA, 497 bp, Zea Mays
tgaagtcattctttttctagacaagttagaggaacaaagaactctgtttctccaggaaagcaatatgaggatctttataaaaaacatttagccaagcaagctcttgaaataccataatgtttatcggaaatagagatacacgaaacgatgggttaagttaggggatgaatgcactaagttcttcctcgcagctgcaacaaatagatacatacataacctaattgctgccctcactaatgatgagggagtcactatctctaggcatggggaaaagttgtgtgtctctggaaagatttcaaggaaaggatgggagtctctgccactttctctatgtttttcaaccttgaaaccttggttcagcatgtggagggccttgattccctggtcctgaccttctccccttctgaaattgataacatcattcagaatatacacgctgataaagttcccaacctcgatggcttcaatggaactttttaaaatcctattggcatctt

SEQ ID NO: 157294 - DNA, 743 bp, Zea Mays
ctagtgtttcagcagggaccgaatcagaggaatcctcagccaacatgtccagcatagcacttatttctgcgtcgctcgggtttataggcatctcaaaatgaacctgcctctcgtcattggggatttcaccaagcgaaacaatcaaagcttcaacctcttcgggagagggtcgcactctaaggcccaaaccactgtcaccagcaggaggatttgacacaaaactgatgaaagtcttggaaggaggcagattccaggctgaatacgcaacaggagcaccaatattcgacaccttgcctctaagaatcatctcaagccggcttaccagatccacagcaggaatccttctgttggtaacccgggtcgagtctgtgatgccacgatacagataagctgggtacgctctgtccttcagtggctgaatgttcttaaaaacaaaatcggcgaccacaatttcagcagtcagacctttctccttcaacaagcctacctcggcaagcagaaccctggcctcggctatctccaagtccgtgggggattcagtccaacttggagcgcgaacatccggctgtctccccaaccgagggggtagagaattgtcgtgattctctacaataaaccattccaggcgccatcccttgatgatgtccttgagtgggatgtcgaggtactctgtcttcctcccacggcgcatctctaaactcgcaccacccacgagctagtgatgtccctcggtcatcccagac

SEQ ID NO: 157295 - DNA, 1297 bp, Zea Mays
atctgtacagaatttggacagattcagttactgaatttgtaaaaatcataactcctaaacgatcagacttatgcctgtcaaattttaacaccagcaagataataaagttatctaccacttttctatagcacatatctacagaaaatacaattttgttcatcaaacatacagcacgacaaaaacagcgcgtgcagtccaaaacagcaatcaataaatttcagctcctatagaattcacgaatcgccgcgttcgagcgacttgaattactctaacgctttactatttgtttgagttaagacaatcaaattagaaccaataattcgacttgcaaattttattcaagtcatttagtgcactaaaattatcacatacatttaacaaatgcattcaccacgtacatagcatcatcacacacgaccttgacttaatcgcaaaggaagcgatgactacttcggcatgtcaccacttcatcacacccattcatcgcctatgtgcgcaataattcatttcttgcgacacatgcactcaaaatcaatccattctacataaaatacacttatctcttatttatgcgcagacttaacacctttcgggataaagcgtcactataaacacactacacctaattgccttaggaacctattagttcactcgaagacatctattcaagtcataagcacaatcatacacttatttgtgaagcacaatttaaggaacgcctaacgcgtatagactcgacttataattgtagaggaagtgatgactacttatggcatgacatcacctctctaattaagccaagacaatttctacctatattgacccgacactcatgtcgagcacactctattttttgccatgtctcgcatacaaccatattgtggcgtgcactcgagacactttggttcaacttaacgcaatcactactactacgcattcggcatacacgtttgacaacaccgtgctcaggcaaacccacacttccaatctacttatcacatccaaccaacaccacgatgattgcataaaatatatttaacatagactaactcattagtcgactatggaaaccactaagcatgttttacgctttatttattttaccccaactaacacactactttacgacgaagtgctttagcaaacaatttaatacatccgtgaccaatctctacgacgcacaaaaagaaactattgtacctacacatatatccaatccaacaaccaaataacatatcggctcacccacgcacctacgtgtccccacaacacgcacaaggcatcaactgcacaagtg

SEQ ID NO: 157296 - DNA, 867 bp, Zea Mays
cacacacagtctaacatgttcggctctacaaaatgaattagagcgaatgtgctctagggaagagattacacgaggcaattatccagtctttcaaaaggtactttatgaagagcactgttcatctatttataaaggatcgtacagccttgtataaaattacaaatatatccctaagaccagtacatatgatttacaaatgatgcgagggcaaagttgacttctgcctatttcatcttggatacggaatcgtgggcaccttctcccggctctgtccaccttcgtttccatatgttgttgtgacgaagctaacatctttatccttatcttgttctgaaggtactcaatgtcgaagctcctgcaatacttaaaaacatgctagtaaccaatagttatgtgtttttgaggaccttcgaaagatgaaggccccaacagaaggccataggtccctagtcttggtgtaggacagcacctaatccaaagcccgacgcgtcgcagtccaccacaaaggaacactcaaaatctagaagctacaatacgggcgctgatgagagggcctgattgagtgtttgaaatgctaagtctgcgtctagggaccacttgaggccttctttcttgaggagcttggttaatggagcagcgattaatctaaaatccttgataaatttccaggagtagcctgctaaccaaaaaatccccgcatacctcgtggtgattttggaattggccatgatgttactgcctcaaccttgttgttgtccatggtcacccccttggctgatattatgtttcctaaataaacaacagatgtagccctgaagtcacattttgactgtttgacaaagagcttgttggtgtgtagagttttta

SEQ ID NO: 157297 - DNA, 1118 bp, Zea Mays
attttattcaacttctgaactggggccactatttcagaagagtccagggtctatctcataaattttaggtccctgatgcaattattttctaacactagaggatggcgggttagttttataaaagtggaagggctcatttgtaaaacagcggatgagggggtaagatcgcatctgagccgcatgatctgaagtctatggccaagattagatcgcctaaaaccgaaccggtatgcagccatagccctcagatccacgatcaacgctctggattttaaagacttgaatgggctctcacacgacagatctagatcggacggcgcgcagctatccgcgaagggagtacgccatcaagtcgatcacaatggttcactcgaaatccagcggctgacatcccccgaaatccaagccgttcattctaatccaacggccaccacactgccctcaacctcccgacggccagggacggcggcgcccacaggtccgacggctgagaccccactggtgaaccccaaacgcgcacacacgtacaaatcctccgatccgaaaactcctatgcgttgccgagatgatagcgaactcaacggaggagttcttaccatgattccggcaatgaacgaaccgccccacggagtttggcggacgcgcggaggtgttcgcaccacggcgatgaatcccgagggctccggccgccaatccacagcagggaggtccccggatcagtccccgacgcacagcgagacttacagggccgaattcttggacacgacggcggtgaacacaaaaccgggccggcggcggtgctgcttcttctctctctgcgctcggtaatggcggaactgggtgcattgggttggggagaacgatgatactgcgacgcccgatttatactccagtagcgaagtccgagcgaggcacaaggagcgagatccccggcgaggtaatcggcgttctgttgcaatggcatcatgagacggatcttgccccggtttcgcgcaacaggtgaacagaatccgttgaagacgacgagtcagcgatccggccccacgtggcggcgacagtagcacaatggaagcacggagtctaattgggatgcgtggaggtggtttcgcccgcgcgct

SEQ ID NO: 157298 - DNA, 403 bp, Zea Mays
tttggaattgttctgcaaacgtaaaaaatcggaatttggatttcctctctcctcgttcccttccttcgaaagtaattgccttttggaggggtcgcctcgcctcttggacttcggatcctggttccgcccttccacccggtccctgacgggtgggacccctcccttctttgcctccttcggtgaattcgctagggcggtattattaaaaatatccgaacaggcgccagaaacgtccttggagctcgcgttgggtgtcacttcaccaaaaccccaaaccgctccttcgctcttggctctccggcgatcgtctgagaatctgtcaatggcgtaccggcgtgttgacccggagccgttcctcccaccaggattcagcgcctcggtggtccagcatcgtgggatcatg

SEQ ID NO: 157299 - DNA, 585 bp, Zea Mays
gcttctaggactgcgatccgtgcatgtgcatccctctagctccaagtgtaccctagagaggtctagggtagcactatccaggtcggtgttaagacctgccaccacaccagctaaggtgttgaggcgatcttcatttgctccacctggaacaatgctggcctggttctttgtacgaatatgtagaggaagatgcatgtactttgtattgtgcagctgctgccggtaggtgtggctgagggaccatagagttcgcctagcagcgtcgctgaccgaagcagcgtaggtggatagcggcgtcagagactcatgtgctgacagagtcctgaaccctctatcacctgcatccattaccctgacatgaatgcgagtgatgtagtagcaagcccgaggaggctcgtacacttgccttgtctcatacaggggtcggacgtaggttcccaacgcgtgtagaacatcctgcagcaggttaggaaagtgccatatctcgaacattgaagtgtaatgttcagtaacaggccataaccccacgtagtggtcctgttgttcttcgttggcttcctcgttgaggttttcctcatcttcttc

SEQ ID NO: 157300 - DNA, 940 bp, Zea Mays
gaatcaaaccctccccgagtatttcccctaacttaattcgaagaatggtaacctaatttgccctggccacggcgaccgagaaccatgcggacgaaggaacgtgttcccggcgatgggtgatggtccagttcaattgaaggggtcgaggagcttgaggagggcctagggacgctagaacaagcaacagagggacttgaactgacctgagctgcgctggccgcagcgaggtgtctcctacggtgttcttgcgcggatttgggggaagttcaaaattcgcacaccctggtgaatgatcgaggctaattcttggtggctggatgcttaactaccttacggagctcgcggcggggtcaatttatactacgggagggtggtggccgggaatttgaacggtgacgcgcggcggtcagagaaaaggaaagtttactggcgcaatggcttggtgtccagcgtcgtggcaattgctccggcaatcaacggggagctagagtgagtcacggcgatgcggtggaaaagttgagccacacggcggacgccggtgatggcttaacggcggtgagaaccttatccacgggttcggtgagcaagggggaggcacggcgactagctggagtgatgtccagcacaccggcggtgaagattttcataccccgtgtcgttatctatccaccccgggcacgaatcgggacgtcgacggcacgaatcgcggcatggctcatcggtggtgagcggagctgtcgatctgatcccccttggtctactgtaccatcgcgagctgccattagtgcacctgacagtcaatgtttgggctcaattttctctcaaatttccatggcaacctatccgaggctctgcagcaaagttgtagtcctatagatcctctttatctttgttatagcaatcctagtcgaattcctactggatttagctcaaatctgat

SEQ ID NO: 157301 - DNA, 403 bp, Zea Mays
tccatgtgaatctgatagagttcagtccattttacagtctgtttcactgatagagttcagtccatgtgaatctgaaagagttcaatccatttcactgacccagtccaaagttcacagtcagtggccaagttacatggacatctgttcatgtaactgaaaatgaactgaaaatctgggactgggtcagtgcagaaaataaccatgtaacttggtcatgcatggaatgcgcaaggaatgtggtgtcttacatgaagttgttggccatggactgaaatgaagctgttgggcatatttcagtcccagattcttcacatgggttgtttcctcctgaactgatgaactgaaaatctgggaccgcaatgataatgaactggaaatctgggactgggtcagtgcagaaaat

SEQ ID NO: 157302 - DNA, 302 bp, Zea Mays
cgcagagataaactgactcagaatatgaacaacatgtgcaatatccggtcgagtgatagtgaggtagactagattgccaactatatgtcgatatctagatggatcctgtagtggtgaaccatcattcagacaaagttgtaagtgaatatctatgggtgttgcagccgtacgattatcagtcagactagagcgagcaataaggtattggatgtatttatactgtgagagataatagccctttgtagattgtaatacctcaatacccaggaaatatccaagagggcctaaatcaaacatcttaa

SEQ ID NO: 157303 - DNA, 612 bp, Zea Mays
aaagcattttagggttttgctttacacgagatctaaagccaaaacccgctataactttggaaaaggtcaaggtttagcgaggggaaaagggaaaaggaaagggtaacgcccgaatttggcgagtgaagaaaagaaaaaattcaactaaaaaattcggggcgttacagggtcctggctgaatagctggcacaacaagagcctgaagagtgagagaccaaggtaccaagtagccaaagctgaatatgagtggcagcctccctgtaacccatccgtggcagaagcgtccgcctcatgagctgatatagaaacttggccgctgtggtgaagtctgccggagaacatcgcgacccatctgagaagggcagtcggaacaaagccgcgatgtgagctgtatctggagcaactccaccgtgagggcgtcgaggaggatcagaggtaccgtagcacaagctatgaagacgagtcaatgactcaggaaatccaaacagctggcgaatctggctggcatgaatagtgacatcctctcgctcaaagcggaacctcatccactagtgatcagggtcgatccatacagaagcataaaaaactcagacccattcctcaacatatctg

SEQ ID NO: 157304 - DNA, 503 bp, Zea Mays
cagaaaattaagcttcaatggggtatctttttggcttcatcataaatcgattttttctctctaaaatttctgcatttcgaaggaggctaaacatataaaactaccatgtaattaatccacattttccctcctgcgttttttttcatgtgaactaaaccaccttttcgagtaaaatttccatgtgaactaatccacgtttttttcctgccgcgcaagtttgtcatgtgaactattttttataatgctcaattttccatgtgaactatgccccctgatgcgtattttttgagattttattaaatttatgcaatagtctatcacctgcaagtgtgtaagttgttgttaaaaatatcagagtgggtaaaaaattatacataccagggtcaccaaatgaaaaactaagcatgaattatctcatcacttagatatcgtagttgaggttgaatataaaccaacatgggtcgagttggctagtgggtggaagcttaggcattctgctcaag

SEQ ID NO: 157305 - DNA, 826 bp, Zea Mays
cttgcggccagcgcagatcagttcaccggcgttggttgtccgtcgatcggctaccacgtgctaaagcgttagaccacgtcgctgtgaatcgcgcctcgcatgcacggtgatcgccggtgtactaccatggtgaaagccactcatctcgagcgctagtaccctttttcccctccggccgccacgcgtcttcgtgcaattcatcggccgccgctcacgaactctataaattgagcgtgtcgtgagctccgtaggataattacgcatccaaagcactagctattgcctccaatcgttcactagagaccgtgaattccttacttcccccaatcctgtttccgccaccgcagagacaccctcgccgcagccagcttgctccaggttagttcaagctctctggtcgtttgttctagcatccttaagtcctcctcaagctcctcgaccccctaattgaactagaccgccctggatcaccgggaacacattgttcctttgattatccgcgctgtcaccgtggccagagcaaattaggtagccgttcgtgaaattgagaagggaaaaggtccttaggtcttgaatttggtctcggccaaagtagggcgccagttcgcaagtaatttcgccggtataagatcgccgtagtgcggcccagcgccgttcgtcgtcggggattgtaagctgtgaagagatagaaaggagagggccttttcgcaaagcgtcagtgacacagttaaatagtgcgcgggtttcttccgtagttattcaaaccgaggggggttctgcaaaactaccagcgcgggcgcgcgggcgtggtcgttttccttctgtg

SEQ ID NO: 157306 - DNA, 370 bp, Zea Mays
agaaactgaaaaacaaatgacgcgttccatggtaagttttacctctgagtttagggcttgacttatcacttaacaccatccttagtggccagataaatgttatagagtgacttctcgtgtcatatatctcagaactataatttcgaaaacaagaaacgtatgaccggtaagaaacaatggaaacaggagccaaatgttacactggtttcaaaacacatacaaagtgaaccattcaatcatggcagttggtggccatgatcaaagcagaaacagaaacagagtcccagagtgacagggtagagaaattatagagcaagaatgagcacataccaacgacctcacctctacctccaaccccgcacagtcagtc

SEQ ID NO: 157307 - DNA, 618 bp, Zea Mays
aaaaaaatgagagaccaacccaaccaatagagtcttgatggattgcatgatctgcctatccccacctaacctcaaacaaacttttgacctacatcaggtagtctatctcatccatacctatcttaaccatattctccagcccaataatatacactaactcataatcaatgagacaagaccgaagaagatgatcaacttcatcaagaaaggatgagcaccaactcaagtcttcaaggatcaagtgaggtcaccaagatgagtcaagatccacaatcttggatggagtcttttcttaccccactccttcttacccaaaactatatatgctttaaagatatcattcatcttgcataataaagtggctatacccatatatacccaggccttcctaatcacccactattgtctataaaaaatatatgaaactccggatcttaaacttattatggactaaaagacgaatcacaaaccaatccttctgtatccctttccttacaaatctcgaggacgagatttctgttaaggggggtaggatttgtaatactcaaaagtgcaataatgagaattgagataatttcagtaatttgtgtcctctacttatcatcacatgtgatcaac

SEQ ID NO: 157308 - DNA, 406 bp, Zea Mays
gacaccatcctgtgcgtttgccagactacattttgcaaactttacacgacgtcccttagacccaaggcgctcatcaatctcagaagtgttgccaagtcagtgaacccctctagtgcactacctcgtcacagatgggtgctggcaactgtctgtgaaccaaacaccctgctgttcctctctttccacatggtccaggacaccagtaggatgagtgagtcgaagtccttgcacaggtcacttggcagcagagcacaagcctgtatccaccactctgccactgatggtgcacttaattcaagcaaaccctgaaggccgataggacaacaatctaaaccagacctccgtggtgaccacacactcccgaagaagatcaagggtcccattggttgatgatgttttaaacagc

SEQ ID NO: 157309 - DNA, 626 bp, Zea Mays
cgggagagtgtacaagacgccgtggagctggtggccgagcgtttccagcgtgatcctgccgacgacctgtagagacaaagcaggggttccgctgggaagcggttgtaataacttttgattttgtaagatattctaagaaccgctaatgaggtagcattggaacttaaacttatctgtatgttatttgtccttgctgtgtatagcgtcatcaacttccccttggtactcagcccccctaggaggtaggctcgacgtgtcgaggctggataccagtataccaaagataacattggtggtctggcccctaggaggtagtctctaagtttgagactacctacaactagactgggacctggacctgcacacagctttggctttgaagtgttaggagcacacccataggacccatcgtctggtatctgccatcctttgattcatgcaatacgacctgcagtttttagcctgggaagccaagccgtatgcctagaccgagaggatcacagttccaaatactaaggtacccgtcgcagagtgatggagtgtgcaggcttagggtacagaacgaggctaagcagctacatagctccggaccactgcaggagatgagcgtcgattctctagaactg

SEQ ID NO: 157310 - DNA, 560 bp, Zea Mays
ttgacgtttggccaaccggagccccctctcgccgtgccaagatgccccaagcgccgtctctgggtaagtgacctttcctcgtccctcttttgcgccaattccgctttaccgtggggattttggctcgttggagtctccctcatcgggtcgccccgtcttcacggcgttcgaccactgcaacccctccccgagcccgaacttaggcctagggcaccccaccctatccctagagcttatgtcggtcgtagagcgccggattaacccccaccgcgatgggtattgcttgccggagtaaccttgggtttgcccgagggtccccctccaccgtctgcccgtctcagtcttgtctcgccacctagacctcaccatagtgcttgtcgagtcctcccccaacctctccggctacccagaccaaccccccagcaccctagaagcctcagtctgcctcgcctccggcgactgcaccgccgtgtccacaaagaatgctgcacctggcagaccggaggagactaaacccctcgcgcccaatcctaaccacccagtcttgatctgatggcccg

SEQ ID NO: 157311 - DNA, 496 bp, Zea Mays
gttgtactgttggcaaaagagcccgggcgcctgtctgccccgctcaggagctcaatcccccacaagaaaatatgatcgtctagcacatgaagtgcatcctagcttttgcctgataatgattctcactgatgggttggaaagttggtatgcacaagtagaataagatgtggtgttaattcaggtaatacatgttgacatgctaaagagaaacaaggaaaagattgatgtacattcatatgaaaaggctgaaaaggtggagccgagaaggtaaagctgggtatcctcgaagcaagatagccactcaggcaggtgtatgttaattgctaatctcaagttcatcatacctgtggctgttggtgacaaattggcgaaaatctgaagcaaacaaagagagagccagggccaaagaaagaatagatttggcattttgactttgaacaaagggaaaggcaaggaataatcagcagtgaagaagaaaagctatggcaaaaggaaa

SEQ ID NO: 157312 - DNA, 448 bp, Zea Mays
tgctcgatcagggaggtaccctgacgtccaaacgcctagctggacagaagtccctacagatttagagcttgctgagtctaggatgttgcttgcagaaatatgtgcgttgaaggacagaggcttgactgctgagactgttgttgttgattttgttttaaaaaatatccagtctttgaaggatagagtctaccctgcctacctgtacactggtgttaatgaccctacttgaattaccaacaagatttctaaggaggacatgctgagtcgagttgatttgatgctggtgctcccttttcgtattctgcctagaatcttcccccacagagactcttttccaagttcgtatccaacccacctgtccaagacgacagtccaaaccatagagtgtgaccctcttcagaagatattgaggccttcattgctccataccgaaatttccctaaagaag

SEQ ID NO: 157313 - DNA, 1137 bp, Zea Mays
gggacttaggccagaactcaagacaattctggctagccaagacttcctcaatttctctcacctttccaacaaagccatgcaagttgaaagggcaaaggaggaagaaaaagggcacctcaaaagaaagtttcaggttctccgggcacagcagtaggaccggcaccagaagactcgatcattcggacttccacccaaggggccaaacttcagtagaccagttggacccacctcgtcacgattcagccagcagagtcagagctctttccattccccctaagtggcaagcaaccaacccccggcgaatgcatgttggcactgcggtgatcccagtcacttcaagaacaactgtccgcagctgaagccaccaggacccgcctactccaacttggtgaatggccccaagaatacctcgacatccgcccccaaggcgccctcctccgtcagccagcagaacaaggccccgtaccaaggaagggcacgagtgaatcacgtcgatgcctaggaggctcagcaagctccgggagtagtgctcggtgagttccttgttgaatttactcccgctcgattctggagcatcccactctttcatagccactagttttgtggaaaagcatggcattccctctactcctctagagattcccttggtcacccaaaccccagggtccaaccttctatgccagctcaaatgctcccaagtcagaatccttttaagtggggtagtattcctggcagacttaaccgtcttgccatccaaaggaaatgatgtgatcttagcgatggattggttaaccaaacacaaaggcatcatcagttgcgcagacaagacagtcctcctcaccgaccagcagggaaagtcagtctcttgtcaggcacagccacccgccagtgacccaatgatgtttaatctagcaacagaaagtatatcagtggtagaagaattcatggatgtgtttccagaagaattaccaggaatgccaccagaaagagaagtggagttctacatagatctgatccctggaacggcacccatcgcaaagagaccataccgcatggctccaaccgagttagcaaaactgaagcttcaaatcgtagatcttcagcaaaagggatacattcgtcccagctcatcccctt

SEQ ID NO: 157314 - DNA, 815 bp, Zea Mays
ctagagggtccaggagcgtgaccaatcaaactatccaaggtcgaggaacttagagatccggggtcggtagagggccccagacgactaagaaaatgtagaagtgtcttgttgtcaggagtgccctaaggcctcagggtcctcaatttttaggtcgtccttgtggatgacagtggccgaaagaactcttgctttggaggggctcaagatcagtgccctagggatggcatgaccctactttaaccaaagctaaggtaggtttctaaggcatagggccctaaaagcatgagtttggtagtagccgagcatccgatagtttactaggatccttgaaggtgtcatggcagcattcaaaggtatacctttccctaggcactaacaaaggcccctgagtccactgaactgaggtcttataggcaggcccatatttctcacaagatgcctaaacaaaatggattcatcctatgcctagcacttactacgaatctcattgatggggccaccgataggtgacatggaaactaggtccatagggtgagcgagagcgcaaggggagcatgaatcaggatagaaaaagcaacacatcatagtagagtggattcataccatgatttagctattactagggttccatctctaggccttgttgttgtacctgcatagggctagttgttagccatcgttagcttctcattggaagccgaagcgactgtaagagtcacattttgtgtatgctccccttctaatgagttgtgtagtgccttgagcccgcgactcaatccttaagtgagaaaaggtaatataaccagtattttcgt

SEQ ID NO: 157315 - DNA, 290 bp, Zea Mays
aataagccaacgaaggggtatcctcagtttctggccgcacgatctaagatcaagggctgggattagattgggtctctagcgaaccggtgcgcaatgtgggccgtaggatctaagatccgtggcattgatttaaagtgtccgagaccgattctgggtcatgggatccagatcggacggcaagcgcgtgcactaatctatgccatcggatcccaattcaatgtctctgattcaacatgaccaacatatcccccctttgtctgatctgaaacgaaatcacccagatacacggc

SEQ ID NO: 157316 - DNA, 483 bp, Zea Mays
gtttaactgaaaatcgattgagactgtgcagtttagtactatgacttaactgaaaatcgaatgaaacataacagaccagttgtatggagaggatcggtaaacatgtaacctatgtctcagaaataaacttatttcagaaataaacctgtaacctaacccccagtgatcaacaacgcaaaacactaatgagccacccaatccacaatcaccgaggccaggcaacccaacccatcgcattcgaagctgccacccacatcgagtacacacgtatcaacaaacaggaacaggctaaaacctcgcgcacgcccccacaacgaaacccgaacaggttccagaaagaacagcatactcaacacaggaaagaattgcgcaggatgaaaaggtagtgaattacatggctgatggtgggcgtcggatgtactcgcgtgcgtccgcttggtaaactcgtgtgtgacctccctttggccttttaattgtgctcgg

SEQ ID NO: 157317 - DNA, 683 bp, Zea Mays
aattattcgtgacgttacaaatacgtgaaccaactaggacctaagactgactccaacagaggccatgcaaatcgagcagccattcaagcctttggctagcgtctctggtttgcctgtcccagccatatggtatacgctttcaacaacacaggcaaaaaagcagcggtagtatagtccaacaaatggagcagatggtggggtcatgttctcagacacagaaaaaggaaatggctgccagccacagtacaagctattatgattttcctctctctttccatcctttttgtctagcttgtttggctgccctgttggaaggtgttttgtactgctacagtagctcgtggacagctattttagctttgtgggtctatttagctgctatgttggaatcagtctaagaagaagaaagaaaaagcaagcaaaaggaaccaaataaagctgaagctgacgagagatcgagtaccttaaggggtaaggattgaggcaaataaatccaaaaccagtttaccacgagcatgaaatgacagaacgggtagaagctctctggctgacaccaagcacgcatcacacaaacgcacacgtggccattgatctgttcaacaggaaaagagccaaccggccggtcggactaaaaataaggccggccggcagtgcctgtcccttgcagccatcgccaattcgcc

SEQ ID NO: 157318 - DNA, 783 bp, Zea Mays
agcaatgagagggaggtactttcgtgatatttcaattgtgagagctagaggggataataatgttcctcttcccaaagctaacgaagtggtgatttttagaagcttcatgaaagccggactttggttccctctaaacaaaatgttggtcgcagtcttgaaaacttttgaaatctatcttcaccaacttaccccccaagctattgttaaagtaggggtttttatatgggccatgagaagccaaggattagagccagatgccaggcgtttctgcaatatgcacaagccattatattagacgaaggcaactggaaaagagcaatatcaaaataattttggctgctacagcttcgtacatcgggccgaggctagctatcctgtgccgacattttggaaaaagtggccaggctcctagatgcaagaatggttttatgtgaaggttgatctgagtgagagggaagatataaaaggggtcatttagtgccttatatggtctcgcttcggcatcaggagaccggccattgcagttggaaacgacgtgcaagcgtgccagacagcttttgatatagtgtgtacttacattggcacaagagacttggtccaagaacatattgcttacagaatgtggccacttgctcatggatgcgagatgccgaaggaggctaccgctagctccaaccaaaatggtttggtgtatctgaagtatacctttccatacaggagccagtttgataaaccgaatgatgacttgctagatgccagaggcaactagtgatgagtttcttg

SEQ ID NO: 157319 - DNA, 507 bp, Zea Mays
agtcgatctgttggtgttgctctaatacaagtccggctgttatttgccaattggaaaattaggttacctcatcagcttatatccagcagccttgcaatacgatgccggtcaccgcgaggaaagccgaggctgagacctgagagaacgactgaccgaggaaaacgagaagggaagagtggaacacgggaactgtggagtcgaagggatgtcaccgcatcgctgcatcggtgagtcgaagcaaagaacggcgccgggagatgaaccatcagattgctgttctgttagtcgcctggaccctggatcaaagagagacttttgggctgctgccgcttgctaccctggaccaaagtacactgtagtatgcttgttgcggtcttggcatctcccatgcagtttggcaccagtcatttctatgcagggtttgtagaattgttgcagtctggctcacgagctcatcgaacacggcgcaagttgtctaacaagtcgaaccgagctagtttcctagcc

SEQ ID NO: 157320 - DNA, 1206 bp, Zea Mays
aagaaccctaggggggattcagaattgtctctaagtcccccaaaccgaattcaaaacttgtcgcgttcacctagctccttaactcaaactcaaatggtccaatggacaagtttgtgcgcctaatcacctgagacatgtcctagaaaaagttgacacgaaacccgacccatttgatacacttggcacacacttttgtcgcgacccaggagctatgacagacacgacttgacactgccatagctcctagcccgacgtgtatctcggtttggaactcacatagaaaagcaagatcttggtgcaaggaagagatcctacatggaaccctcgctgagataggcactctagggcagctaaacagacgcttaaactcgggcagacgccatcctccacgtgttcaacttgtcctaggcgcgctctgaccgcgcagggcacgccacgagcgtcggttggctcggccgcgcgctccaccccgtggccgtgcctgaatcctcgcctataagatgccccgaccctcggccttgccctcccgcatgcccatatccttccaccggcgactgagcgccgataatcgcctcaaaaccgagcacggcatcccacaagctcactgacgcgacaaccactgtagctcggtcgctccagcccaactccacccaatccagctcctcgaccaacttccctaaaggctaacaaagcttcccagccgctcggacccaacaatacctcgccggaaaagccagaatacctcaccggacctccttcacccgccggagcacgtggatcaagtaatctacccgtccattcttcgattccttgcacacacaccctcacggccacccagtaaacctccatgtgcggtctgattgagctctaccactgtgtaacggccggtgcaggttgcgctgacgagctccgtcgctgggattcgtggctagaccaactccgagcactagagacgacgacccgtacctcgatgtgactatcagagactccccttcctcgcccaacccttcgccggaaccctaccgatgccggcaagtcgctctgccgtcttcttcgtcgtagttactgttaagcgttgtaacacccaaattcagaaattgggattggtagaagaaatgtgagcaaaatacccttgataaataattagactttataattcaccattttaaggtaaatgatcatgataaaataacgatagttaaaata

SEQ ID NO: 157321 - DNA, 638 bp, Zea Mays
aaaaattataaccttgagattcattatcaccctagaaaggccaacgtggtagcagatgccctcagccgaaaacctttcgggataaagggaaccaactttttagaatattggaagaaggaatcagctcaactgaatgcatgtttgggaaacaacggcagcctagaagtcaaaccaatgctagaagacctcatatgcaaagctcaacgcctagactcgaagacagcaagacttatggaaaaagctcgcaaggaacaacttccggacctcaggatagatgaacaaggagtcctttggttcaagaatcgtctgtgtgtaccaaaaggcaggcatgagaagtcctgctcgatgatgctcacaactcagcctactccatccacccaggaaccaccaagatgtacctagacctcaaaaccagatactggtggagagggatgaagagagagatagcacagtatgtggcccggtgtgacacttgccaacgaacgaaagccgagcaccagaagcttgcaggcctattgcaaccccttccagtgcctgaatggaagtgggaggaaataggcatggattttataaccggactaccccggacgcaaaaagggaacgactctatctgggtaataatagaccgtcttaccaag

SEQ ID NO: 157322 - DNA, 779 bp, Zea Mays
cagcagcatggaggcagagctcctccacaaggaccacgtgaaactacatatcaggaattctctgagacccgacccccgctctttattaaagctgaagaacctctagaagcggatgagtggataagagtcatggaacaaaagttcgggttgattcgctgcacagagacacataagccattgtttgctgcccaacaactaagaggacctgccagtacatggtgggcaaattttgtagcaattcaaccggctggacaccagatcacttgggaggaattcaagctagccttccgtgagcactatgttccagaaggagtgctccatatgaagcaagaataatttatccggttaaaccaagggggagatactgtcatgaagtatctccacaaattcaaccatctaccccagtatgccattgaccaagtaaatactgatccaaagaaaaagaattgttttataaggggacttaatgacatgcttcaacggaaaatagcaacatgtctggatctcacctatagtagggctgtcagtactgcactggcagtggaagccaaaaatgctgggcatggaaaatcaaagggatttggaggtgaaaggtcaaattaagggcatgagaagagaaccaggttggtgatccgaccttttcatcagaattgttctttgcctcgcccaccttcctatcccttcaagcagcatgttttcattcgtcccaatactgcccccgcccctacaaatcagccgagtgcccctggtgctcatttccctgctcttcctagttcttc

SEQ ID NO: 157323 - DNA, 717 bp, Zea Mays
gggcaccctccatcgacgcctgggcgggttgcttgggggccaactgagattcccagtgccgtgtgggagatagagtgttagggcgccgccgtactctcccctagaccatcgcgccactcgaggccgaattggtgtgcatggagattcgcctgacgccactgaagccgctcatcgcatcgttggtcgggaagggtccctagtcttcgagcaattcatcgcgggaaccggtcgttcactgtcaggccacaggacggcgtgggtagggctctggttcgcgtatatatctcacagtgagtgccccttcttccatttcgcctcagcctacggatcgatttagggcagtcgcacggtatttcgggtacctggacgtcgatgctttgacctccgtcgggggggggtacttaccggcgttcgtcgccgcggtgcttgtggtgcaacctggccagcacggggaagacgacgacgtctcggccgttagcttctggatggacggcacagatgtgtcggtagcttaaccctccaccgtaaacaatgaggaccatcgatctacacatgtctagctaagattagatctagtgattgagtggcgtcgcgtgatcttgttcgtcgatctcggatcgaacgcgcggggtgaaaagttagttgcggatagtaatgatctaatctggtctgttgggacggatcggacattcaggatcacccgatactcttcaccgg

SEQ ID NO: 157324 - DNA, 530 bp, Zea Mays
acaagagttctataggacaaagaagaggaggataataacacaatcctaggctatgcttagtatagttcctttgtagatgttacaacgggtgaggctgaagggcgtgaagaaaatgatgcttcgacaatacaagaacaataacacaagggttgctagatcgcaagttgggtttctacaaaagggggctttgacagtacaagagctaggtgagtaccagcaactttgggaactaatcgacatgatgggggtatagttttatactcctaactagcatatatcgtgcttaactaagcatgggatttaaattagcaagtcggcttatgaggccttgggacaaacaaatttccccttggaggtgtagctagaagtcttgggcaccattaaaatgcaaattctctatatggctatcactaaaaaattgatgctggataacgaataggctagcaaggagggggttaccttctcctgttgtctgccctactgtatgatcaatccgagtagactatgtaacacccaaaatcttattttgg

SEQ ID NO: 157325 - DNA, 677 bp, Zea Mays
agggcaccggtccgtggtggagtggcccgacggcggcgaagctcaactccggcaagcgattgcgcgaacaacagggtaggacaaggtaaattaagggcatggggtggttggttacctcgagagatggctctggagcacttgagcgacggcaaggacacagcgagggccctggtcgacggcggcagagacacggctgcacggcgagatgtccagtgagcgcgaacagagggaactagaggggatgggggaaaccaaagggtgtcttgagttgctggtaaggaggcggagctcatcggggcaacggacgcaacaggagctcgacggcggccgtggaacggacctgaggtcaaggcggacggcgacagtgctccatgggctcgtgcgcagtgcgagagaggggtacgagggggtctgcataggagagctactgagcgaggggagtgagtgagtgggcgcgggctcaaaaggaggtcgagcgcgtggcgggagtggccgggaaatgcgcgatgtgggcgcgtccacggcggggtgtgcgtgcaggaggtcagggtaggggaggtggttgacaggtggggtccgtgggccagcgagagcgagctcgtgacgagcagtcaacgctgacagggtggacccaccaggcagcgagagggagtgagcatgcgcgcgaagaaatcggc

SEQ ID NO: 157326 - DNA, 451 bp, Zea Mays
tttggtggccggggaaaaaagagattgaatagagttttcgatgccattggttttgtttaccccgactactgctacccgctacggggacgggggaagaagaggaagactgctgcttcgaccaaggctgctgcttcggccactccagatgagcctgcgctgaagagcaagaagttgaaggttctcacccatcggccacgctatattgagccggccatggtgcctgagtttggtggggagacttcttcagctgctgaaccaaaggagcccattcctcctacgcagaaggctgaagaaccggctaccatgccgaaggcgtcctcagccgaactagctgagtcaaaggctggtagagataaggccgaagaaccaaagactgaagaaacaaaaatattagaaattttaagcccttcggcggaagtaacagtgccaaaggcacaaaaaaagtcttgcg

SEQ ID NO: 157327 - DNA, 640 bp, Zea Mays
tttatcacaggcaaaatgcacctgcgatggacatgattagtggataggtattaagcattgacgttatcacaaaatatgattatggctcgagctggagggcgatgcagttcaaaaaaaaagcagctaatgaagccaacataatttagataaccacatgggcaacaacccggtatttaacttcagtgctggactaggacgccatctgttgtcgcttggatgaccaatatagattaagttgccaccatagaaaacatagtacctcgcattggaataggcaacgatatcatggccagagagcgagagatgtgcagaccgtagagaactctacatgccacaaacatagcggagaattcgtttgatcatccgaagacaaggatctctaggaacatgcataaacaaccaagcatgttgaaccctccacctctcaaacccttccctctctcccgatgtcagacaccatatcctacatcgcgatttcatacgccgctggcctatcttccaccaccattagtttgcagaccgccagcaccatgtcctcctacatgattagctaccagactgttagcctcgtcagctcatccaacttcggcgttctcacagcctccctcgctagtgtggcataatccgtcagcatcactag

SEQ ID NO: 157328 - DNA, 624 bp, Zea Mays
ataagtaccgtgtggaggatagatatccctaggtattcatgaatactgaaacgtatcgtgggccgcctgataggcctcccatttgttcgtcctacgggatggaccagcaggttatagtcgggttaggcgagcccgatctaggaaaacaaagattgacgtacgatttaggcgctaccgaagcactaatatctcgggtggcacggttttaagcgcttgaggagccaagcattcgatgataactcggatgagaaggtgatcaaggctccagatatataggactgcaagctgcgacaaaggagataagtgaagtatatagtgatcacaacttgtaaagggacaactctctggtcgtgtatataaggctgaggggggaccccctacaaaatcatctcatcttactccatcctcatcaacagcaaccgagtcatcacaaagctcatttgtaatcctcatactccagaaaccaatacatagccacaacaggaagtaggttgttatgcaagcgactcaaacctgtataaacctaagagcaataccgacgtgcttctgcacgaaccatcgagtcacaatcaatgacgtcatcctacccaaaagcatcacgtgggtaaccccgtggtgcacggt

SEQ ID NO: 157329 - DNA, 410 bp, Zea Mays
gtctgactgcagaagctgtggtcgctgactttgttttcaagaacattcagccgctgaaagacagagcatatccggcctatctgtaccgaggcctggctaattcaacccgggtaaccaacagaagaattcctgctgtggacttggtgagccggctcgaaatgatactcagaggcaaggtgtcgaacatcggcgctcctgttgcgtactcagcctggaatctgcctccttccaaggcctttagcagttttgtgtcgaatcctcctgccggtgatagcggtttgggccttagagtgcgaccctctcccgaagaagttaatgctttggttgcctcactggaagaaattcctgacgacgagaggcaggttcattttgaggtgcctttgaatcccagtgatgcagagataagtgcc

SEQ ID NO: 157330 - DNA, 525 bp, Zea Mays
ggtttgggacaagtgattagaagtaatgtacatacacctcttaccattggcggttgcacatgccattgtattggttgtattgggaggggcttatagccttgtgagatcataccaactatgtttgtggcgtggacaccatcttgtaccagagaaaataaggcccatgacgtttcatccagaaactcaatagtgaagacgacagagagcatctacgagaggccatactagagcattaattttgtgtggagaaggcttgagactatccacggagttatccggccgggagcttagccctcgcgtgggtttatattatatgaggctccaacaaggattgaagagaaacttgtgcgcttcccgacaccttgataaaataataaagtcgtcaacgagagcttgcatctctatcacatttaagtttttgtaattgtattgtgttgacttggttgtgtgctttatcttctttacactcatccacccaaccaataatcacacgcaaaaactctgtagaattatatcgatttttta

SEQ ID NO: 157331 - DNA, 666 bp, Zea Mays
agggaagtcaccgccgccaacgccgccgttgaagggatgaaggacgaaggcatctcggatagtcttctcgtgctggtggtacgatcagttccatggcttgtgcttttcgctcttcttgtgctgtcttgagcgagatcgtttgaacaatgcacgctgttccttctttgcaggggttggtcggtcccgtcggcaagctgcggcccgcgatccagcggataacctcgtgggagcggccgcttgtcactggcagcatccttgccgcagcttcgctgatcatatacaagtgagcctacacacgcatagctagctggtcgtcttgtccatgtgtctaaataaataaatgaatcggaatcagaaacgtaatgcgcgcatctttttccctcgtgtcagtgaatggttcagttacgtgctagctgcgtccctggtgctggccgccggcgtgatggtctgggcgaggcagaggaagataggggagctatgctcggaggtgatcatcgatgcctcttcgtcgtcgtcgtcggacaagacaacgatggatagcatagtggaggcgcagcgaagcctgcagaaagtgcacaggtacatcgtgaccgcgaacgttgccatcctcaggctgtggtcgattgcgctagcaaggtcgccaaaggtacactccctctccccttc

SEQ ID NO: 157332 - DNA, 442 bp, Zea Mays
tggggcctggacattgtcgggccgctaccgacggcccaaggaaacctcaagttcaccttcgtcaccgtcgagtatttcaccaagtggatcgaggcaagagcagtatccacgataacattgaagacctcccagaaattcttctggcaaaacattgtctgccaatttggagtcccgtccgagctcacagttgacaatggcaaaaaattcaacagccaagacttcaaggacttctgcttctccattggcaccaagcttgccttcgcctcagtgtaccacccacaatcaaacggcgtcgtggagcgcgccaacggcaagattttcacggcaatcaagaaaatgctcctcgacgacaagaagggtaaatgggccgacctgctacctgaagcagtctgggcactgaacacgaccgagtgtcaggggaccagattcactcccttcgcct

SEQ ID NO: 157333 - DNA, 380 bp, Zea Mays
gttcgaacagtagtcatatgcgcaacatgtgcaaaagtctcatcataatcaggtccttgagtctgttgaaaaccccgagccacaagacgagctttatatctctcaatgaaaacatctgatttggtcttaactttgaagacccatttacatgtgataggaacaacatgcgagggtaaaggaacgatatcccatgtaccagtgcgttcaagagcagccaattcatcaatcatagctagctgccactcgagaagcccagaagcttcctgatatgtagtgggttcaacaattgccacaccagctcgtggaaaaccatagcgatctggaggttcaatggtaccacggtcacgaagacgatatccctgattaaaaacatcattaga

SEQ ID NO: 157334 - DNA, 744 bp, Zea Mays
gttggattgtgggtggtacatagaggcgaagataggcttggtgccgatggaactgcagaatgctctgaagtcttggctgtcaaactgtttgccattgtctacggtgagttcggacgggactccgaagcggcagacaatgttttgctagaataatttttggacggtcttcgatgttatcgtggatactgccctagcctcaatccactttgtgaaatattcaacgacgacgaaggtgaacttgaggttcccttgagatgtgggcagtggatcgatgatgtccagcccccaacgttgaagtggccatgtgtgtgcgatgagtttggtgaattgcgaaagggtttcctgagcgaggaaaaaacttttggcatgcttcgcatgacctagtgactcgattggctgtgcagattatcgcgagccagtaaaatccctgacggataaccttggctgcgagggctcttggtccagagtgtgaaccgcacattccactgtggacctcgcggaggatttatatgccttcggtttcggttatgcatttgagcatatgttggctgattccttttttgtacagctgaccctcgactatttcaaagtctctgctcctgtgcttcagtcgtttggcctcattgcggtcggttgggtgatagtggccttgcaggtatagtgtgattggggctctccagtcttcggccatgatgaggttgacaattcggtggccctccatgtcctgagttatttgcaaacctt

SEQ ID NO: 157335 - DNA, 779 bp, Zea Mays
cttcaacatcatatggaatatgtcatgtagctacaaaaggagggtcatacacgtataacaccttaaaagtagagcaagccaaagaggagtggtaagaagtattataccaaaattcggcaagagacagctaagctttccactttgtaggttgagcgtgcaccagacacctcaggtacatctccacacattggttaacatgctcactttggtcgtcggtttgtggatggtgtgccatattgagattcaatttagtccccaagagtttgaacaattgagtccataaagtgctggtaaagaccttatccctgtcattgagtatagattttagaagaacatgcaatcggaccacctgatccaagagaacatggcccacatgtgcaacagtgaaggggtgtttcagtgctataaaatgggcatactttgagaaacgatcaaccacaatgagaattgtatcgaagccttcgaacttggacaacttctcgatgaaatccattgcaatgtcttgccatgcaccttggggaactggaagtggctacaataactcagtcggatgcactctttccccttttgatctttgacaggtttggcactgcttgacaaaatcctccacatcagttttcatacccttccgaaagaacaatttcttcagccgatgataagtagcgtgcacccccgaatgacctccaactgcattatcatgcagtgttgccaccaatttggtttggagagcaaaattttggcccaccaaaatcataattatctttcttgatgaccccttg

SEQ ID NO: 157336 - DNA, 1023 bp, Zea Mays
gtgaagttggatgaacttagagctcgattttgagtaagatcctgtgactatttgatagtgaacattgtaacaaagtgaaagctggtttgttaggctacaactttgatatagtgagatgatcgagtcactgcatgaaatttggagcaaatctctctgccattcactctgtcaggctgactgaagaagttcttgatggtacagtaaccaaaaagatctgctgtttcagtgaacttgccgccggtgacccccgcgcgtagattcacgttgccgaattgattcgtgctcattggtgctcggataacgcctcggggtggaaagatcttcaccgctattgagcttaaggcactgttccgccaaccgccgtgtccgcttggctcacggccaaattcagataagttcactggagttagccgcctgccgctcggatgacacgtgcctagacgcaatacttcgtcgtagtgactcgctctagcacatccggtcatcgccggtgagcccgccacggtaaatgccaccaatcgcttgcgccaatgctcttccctctctccagccgtcgcgcgtctcctacaaattcactggccaccgctcaggagacctataaattgagcacaccatgggctccgtagggtaattacccatccaaagcaccagcacttgcctccaattgttcaccagagaccacaaattgctcatctcccccaaatcaggtttccgacaccgtgaaaaggtcctcgccgtggctagctcgatttaggtccaatcttgtcctctgctctcttgtttcagcactcttacatgccactaatgctcctcgacccattcaattgagctagactaccctagatcactgtgaacacttctgttcatccgctgtttgcactgcctccatggacagagtgatttagagctcgaactgtgcaattgatcgagggaaaacgctcgttacgtgttgaattaggtttcagccaagttagggcaccgaccattgcttatcgtggccggtacgagttcgccggagctcgg

SEQ ID NO: 157337 - DNA, 493 bp, Zea Mays
catcagggctataaatcctttatttttaaagatggcaatcacacggttgtgctactttttcaatagaatttcacagaaggtaattgaccgggatgagttagcatctcttcaggaattcgcagtggagacaatatcacagtttgagatgtgtttccctccatcgttctcttgatattatggtgcaccttgtggtgcacttggttccacaaatagaggcattgggtcctatgtacttgcacaaaatgtggacgaacgagcgtttcatgtcaatactgaatggttatgtatcaacatgtgctcgtcacgaggcatccatgatagaggggtactgtaccgaagaggccattgagtcaggaggaccatttttcaatagtatactaaaagaccaggttgcaataggtctgcctccgtcacgacacgagggtagactgtatggaagcggtaggatgggacaaaaacccttcatcccaccggattataatacagtacttga

SEQ ID NO: 157338 - DNA, 304 bp, Zea Mays
tgtcatcatagggatgaattggctagataagtaccaagtaagtatcagctatgataagaggacaattaagttggtgtccccactaggagaagaagtggtagccgagttaatctcacctgagccaaggaaaggaagttgtcatcagatggctattgatagcaaagagccagattcactcgagattatcaaagtggtgtccgaattcccagatgtgttatcggaagacttaccaggtatgccacctgagcggaaagttgagtttgccgtagagcttcttcctggcaccgcccccatctctaaaaga

SEQ ID NO: 157339 - DNA, 341 bp, Zea Mays
cagaagatctgttgccagagccggcagatggttgcgtgatggttgtttgtgctgatgtgcccgatgtcgggttggggtcatcccgggcagcgtcccgtgcctcatcaaccttagagcgcggtcttgagggtcaggaggctggtctggattgctctgcccccacggaagtgactgagggtccttcagccttagaggtggctgttgcagagaactcggccctcatggatggcgctagcgcttacccagcccccgagggtgttgccggagatgatccggctcggatgggtaacgcgagctgagacccagcccccgagggtgtccgagtgggttctccctcccat

SEQ ID NO: 157340 - DNA, 658 bp, Zea Mays
tcgatttgggcagattcgagacacactgttccggtttcaaatccgaagaaatgaaccctgcaaccttagcaccacgaatcctctggttaccaaccaagctgcagctcgattgacctcgccaagaaggtttactcttgcctgtgaaatcgaagaacacccgcaagtgcacggagaagaaaccaaatcacagaaagtattcgattcaactcacggatggggttccacaaccgaatgaaggtgtattgttcttgacagaatgaaactaagcaaacccaacactagaggaggggtggcgactggataaaggagtttgagccgtctatgaccccctagtcgcaaccctagtgggccaagacaagatacacgacccaaagggccaaagacagtggcgcagcactgagacagattctggacaccaacttgtggaatatttttccgttgactcctaatgaatttggaccttgtaccagctctatttgaaagtttatcttcttagctttccatccatataaagatcaccccaaatctgagtccgtatgtgacctaggcggccattttagcacagactgctcctggagcccaaaaacagaaccaaggtcggttggtttgggcctccctcttgacttgtatgtccttgttggtcctacatgcctccaag

SEQ ID NO: 157341 - DNA, 605 bp, Zea Mays
aacttatttaaagctaataaatacttgtttatctaaaagcaaccactattatcctaattcctcgtaaagctagcccatcttagccaaacagggcacttgttgcgtatgttaggcatccacccttgctttcacacaaacacccgattgcccttgctacaaccactgctcaggtgaagaagctgttgaagtagacctctaggacttcgatgagtttgaagactatgtcaatgatctcccccaatcagatgcctatggagggttgcaagaactgaagaacaaacatgaggctgttaatgagcaccccgaacagcccgagcagcagcccgcatgttatgtcgtcacctcgactcaggctcacaagaacaacatcctacaagatgagaaacacggtgttaatatcaaggaaaattgtagaatccataaatagtgtattatccaaacaacctttattacttactagcaagtcattgaggttaatctttatttatgtttgaaaattgaagtacataacgacttggaaatctaagggtaaaaacgacgtagttgttcgatgtttcaagcgttgtcgtagatctcgtcttggctgttggacagctagtaagtcc

SEQ ID NO: 157342 - DNA, 516 bp, Zea Mays
ttgaccccaaataaccatttcccctccatcaattgtgctaatccgggtcggaatctctctatccacgatgacggcggaaagcgagaaaaattcgatgtgttcttggcgatccagggcagtctagttcaattaaacaggtctacgagtagaaggggacttaatggaggctagaacatcaagcaaggatgcttgaactaacctgtaggcgtctggccacgacaaggtgttcacaggtgcggaaaactgatttgggggaagaaagaaattggagctctctggtggctaatcggaggcagtaacggatgctttggcttcgtgatgacttaacggagctaggggtgtgctcaatttatagtatcccagagcggtggctcccaatttggtcatggcgtgctggcggccggagagagggaagagcactggcgcaatagctgcgtgtctttcaccgtggcaggcttaccggcgacgagctagcaatataaagcggcttactgcgacatggtgaagcttcaaggc

SEQ ID NO: 157343 - DNA, 442 bp, Zea Mays
attggaatggcctcatttggacttaatatgaaatttctagggattaaacaagttctatgattatttttacacttaaaaattcatttattaaataaatttcctgattactctctgtttggaccgcgcgcatcataacagagaaggtcggggttaatcttgcaaaattaaccagacacaggattggttcgggtggacggcgggttgattcctagattcttcggggactcattagcaaattgacatgactgaaagggtaccgcccgctctaagccatccgatcccacgcggacgacccagattttatttaacgcgatctaatctactccgttgaactccagatggatggcgtcgagcttagcttcaatgcgacgactggaagtctaatctccaccgtccaacacgtgatcaacggcacacgggcacacagccttccccctttccc

SEQ ID NO: 157344 - DNA, 2238 bp, Zea Mays
caaagagtaatctcgaagaccacaccaaattaaaccgtgccttatatttgggcatgtttgcttctgatttaagcgggtgtttggggctttggactgcggctgattgaatagcccagccggtcagctgcatgcctgcagcctatcctgcttagtgcagcctcttctctctggctgtatctgctgctgacttggtgcagctgctacggtgttggtgggatggctactgcagctgcaaccagctcgaccgaacaggatgacactgtttctagcaatgctaatagtcataaccagcagtccagcacaatgtgtcaccagatagcaatgatactagtcataaccagcagtccagcacaatgtgtcaccaggtcgatgtctaattgtctagtttgctctactaagaagtattaagtagtacattctgcccaggcccaagattaactttttttcatcataacttagtattaagtagcattggagcaaaacagctgaattcaacattcataattcttgcttgtaatgtgtagatagatcggcactcagttcagagataaaacagttcagtatgtccactccattatttccagtaatcaagggaggaagatgcttgtgaaattaactgtgaaaatggatgaaagcttggagctgattggaatatttccagggttaccagtaaattcttacagaaaatctaatgcatcctgatagttcaaattgcacaatgagggtaaaagaaagaatacggaagataatttgatttgatccagataaaaagtttcagtctagagggcataattttttcctgcttcataaggctaaataatttgaattatgatacaatttatgaatggatattcaatttggtgccaaggctttgtcaagcttcaagtatcttatccaacattcaaaaaaatgaaactaattaatttgatagcataagaagattaaagttcagtcaactgtatgcagtgtttggtacagtgttaatatggcaatgagaactggctctttccagtcctttcaagtagcttttgaaaaatgataacagcaggcccataggtttgttctcataggcagttctgcatgcctaaaattatcagacagaacaaatccaagtctccagttgcagtgcaagttcaggccctagcatcaagtttgccacaataccatccaactaagtctggttccttatacccctaaaaattatgtctgaccaaaccaccgttgctataagcttacataaaggaaattaatatatattagatcaacttgaggttgaacaacaaagcattatcaactgaacagataattaagacgggatctccacaggcactaacaagttcatgaaacatattgggagtgtgcttcagctaactttttgatctagaaaaaactagtcttttgctaatcaccatcacctagggtgcacctctatcaaacaatttatctaaacatgactaagcttcattttaagatctggagaagaggcgaacatcaaaattagctgttttagctacacaactgctacgaaactaaatttcttgccaacctgcagctactacctagtcatgaaaacaaaacaaaagagatggattccgcctagagcatgaagtgttacagaaattgctaatttctcgttgtattcccaaatccagttctggaaatcgaccaaattaggtcacagatctcaacaaagactggagaaataccacccaagtcataaacagagcatcacgacgcaataaaatagggcgaccactcaccgtcctctccctcgccttcgtcctcttcttcctcatcctcgtcgacctgggcctcctcgtcgaagaaccctcgcaccccgccgccgcccttcttcctcggccggcccccgccgtcgtcgtcgtcgtcctcgtcctcgtcctcgatggccgagtcgtcgatgaagttgtcttcgcgtgaccgcttccgcccgccgccacccttgccaccgccgcgggaggccttcccgcgcctcgcctcctcctcgtagtcgtcttcctcatcctcgtcatcctcctcctcgtccaagtcgtatgcctcctcctcgacctcttcctcgtcgtcgtcgtcgtggtcgcggcgagccatggatttggcggctaggttttcgagctctcgcggggatgcacgcggaggaaggggaaactcctcgcggcgagtcgtgcgagggaagaggcgaggccgcgcacgcgtaggtgtagagccgagccgcctcgcgac

SEQ ID NO: 157345 - DNA, 384 bp, Zea Mays
gattttgtaaccggactaccacgaacgcaaaaagggaatgactctatctgggtaataatagatcgcctcaccaaggtagcccatttcattccagtgaaaactacctttggaggagccaccattgcccgaatttatctcaaagagatagtcagactccatggcatcccaagaaagatagtgtcagacaggggaacccagttcacctccaaattttggacaagccttcagaaagctatgggcaccaagctagatttcagcaccgcttatcaccctcagacagacgggcacacagaaagagttaacaaagtcctcgaagatctattaagagcatgtgtgctagcattcgatagaagttgggaatccagtctaccctacgcagagttc

SEQ ID NO: 157346 - DNA, 557 bp, Zea Mays
ggcgcggagagtggatttggggaaaaggaaattagggcgctacggtggacgatcggaggcgagggctggtgctttggctttgtaacaacctagcggagctaacggtgcactcaatatatagtgtccgagagcggtggctccgaattttgaaggggaaagctggcaaccggagagaagggtgagtcaccaggagcgctaacatggcatttacaggacaaggacttacggttgtcactggctgacctgcacagcttgcgacgacgtggtgaaacgaccgagagcatggcgcaaccgcgagaaacagtggcacggtggcaacggtcgcgctgccacgtcgccggtgcaagtgagtacggcgacagggccaatagtgccccaagatcatccaggcgcacgatcttttcaccattgaccgttattcgcacgccaaggcgcacgaatcgcagcgtcagcgaggatcgtggcgcggagatcaccggtggcggtgcgctgaatttgatcttgttcagtccctgtaccatcgtaaccgttcatcatagcgcctgatagagcaattt

SEQ ID NO: 157347 - DNA, 812 bp, Zea Mays
agtgcccaaatggaagtgggaagaaataggcatggatttcgtgatcggactgcctcggacccaaaaggggaatgattctatctgggtcatatataattgactgtcttaccatggtagctcacttcatactagtaaagactacctacggaggagacacccttgcctggttatacctcaaagaaatagtcagactgcatggcattccacgaagaatagtattagacagaggaacacaattcacctcaaagttttggttgggactttagcaggccatgagcatcaagctagatttcagcaccgcctaacaccccagtcagatggacaaacataaagagtcaataaagtccttgaagatttgttgagagcctgtgtgctgacctttgacagagattgggagtccagtttgtcatatgcagagttctattataacaacagttaccaggccagcatcaagatgtcaccttttgaagctttgtatggaagaagatgtcaaacccctctgatgtggtcaaacgtaggagaaaagaccctagaagggcctgccttcatcaaagaggcagaagagaaagttgccctgatccacaagaggctactcgaagcccagagtcggcaaaatagttatgcagacaacaggaggagagaactcagtttcaaggaaggtgattttgtctatctcaaagtctacccaatgcgtggagtcaaaagatttcaagcaaaaggaaagctagctccgtgattcgtcggcccctatcctatcatcggcaaaatagggccagcagcttaccgcctttagttgcgagaatccatgtcag

SEQ ID NO: 157348 - DNA, 417 bp, Zea Mays
gtgcctcctccttggtaccacctccgctggtgccatcgatctggacggcgccggtgcacaaacggggacgggctccacaagcccgacggccgacgcgagcacctctgtccctgtgcctggtaaacgttctagaaggagaggtccgacctctaaggtgtggctacactttgaggaggtaactgtgattcaaaatagtaaggaggtaagagtatcttccatttgtcttcacttcaagaataacatgtatgctaaatcttcatctggaactggccatttgattcgacacctcgatgtttgccctgctaagaaagaaaaagatagatctagaaaaactcagtctttgcttaaatataatgcagatggatttgttaatcactgggagtattccccttctgttgctagaactgagctttgtcg

SEQ ID NO: 157349 - DNA, 706 bp, Zea Mays
tgagcacctgatgcagtgaccaacgtccgggctccacccgtcggatctatctacttctgctccctatctcttctccgcttcgggtgctaacagatggcggaattcatggcgcccttcgtaacagctcgcccggagttctcctggatcgctcacctcgcaaccatataagccgagcctgacctccttgatgcccatcgagtgccaacaccgagctgcatcacggagtgagtcagcagcgggagatctaaggggagcggaccgagagcagagagaaaatgagatcgccaccgtggctggatcccgtcctagccgtcgatcagtaccaaatgggggtcttgggtgactcgcctcgacacgctgatggtgtctgccgcctcgccacatggggttaggggtcggggagggaaatccgtcgcggctgcgtttgtgccgccgtcgggccgcctgctacggggccgaggttaagtgtcgtgtcgataccggtgattcttcgtgacccatattcgccatcatctcttgtatgtgttgctctcagagtttggggaactgtggtgcaggaccgtcagcggcggcaatggctttgtcgtaggggcacagcgctgccgccgcatctcggcttgtgttgggggaaaccacatggaccgtccgacctggtgtaagcggtctggattaggagcgcgggcaacgtctcagccgtggggaaaga

SEQ ID NO: 157350 - DNA, 863 bp, Zea Mays
atgctggaaatagtagctggagtgcgtacttgagttgttctactctaggagcaataaagaggatccctgcacctgctccttgtagcctcaatgagccatcaaagtacattttccacacctcgataacctatgggttgtctgggacctgatgttcagtccactctaatacgaagtcaactagtgcctgagtcttgatggtcgtgcggggctggaactctatgtcgtgagctcccagctcgcacgcccacttggctatccttccaatagcttctttgttgtggagaatgtcccctattggaaatcttggaactactaagactttgtggtcgtcaaagtagtgtcagagtttgcgcacagttagaagtactgcatacagcaacttctgaacttgaggataccttatctttgagggcccaaggacttcgctgatgaagtagactggatgttgcaccgggtgcgcatgtccttcctccacccgctcgactactaacgcagtgcttaccgcgtgattcgtgcaggagatatatagcagcagatcttccgctggctgatttggtgcagctcggcgtggtggcttgagtattagtggtgtagtcaggaactttttcagtgcctctaaagcttcctgtgcctctgtggtccactgaaacttgtccacctttttgagcaacttgtagaatggcatgcctttctcgcctagccttgatatgaatctgcttagggctgccatgcatctagtaagcctctgtacctttttctgtgatcgtggcgcttccattctcatgatggcctcgattttttctgggttagcttcaattcctcggtggctgacaatgaatccaagtaacttccctgccggtact

SEQ ID NO: 157351 - DNA, 294 bp, Zea Mays
ggaagaggggcgattttaaagggcaggtatgcgatgaacatcaatgcaatatatagaagtgtcaagggtaaaggtgacaataacaaagagaatagtaaaggatggagctaaggcaagactcacgaaatggagagatggagaaaacaatcacgggcaaggtaggtaaggttccaacataatggtttggtaaaagaaattattaccgagggaagttataaggaattaatgagatcaccaaggatgtgcaaaataaaatgaccgctcatggatcattaggaaacaagggtgatcaag

SEQ ID NO: 157352 - DNA, 1029 bp, Zea Mays
ctgggcacgatatttctcaaaagatcaggggcctaaatcacaatttcccagtactcatattcatcccgcgtggatggcgggttgaatcgggaaaaagacatgggctctttagctaaaactcacggcgaaggggtatcagtggatatcgcctgccagatcagaaccaacggccaagatcatatcgccatgactccgaacgggtacgcgataacaatcgtccgatcagatcaaacggtcagaagcgccccacgccttgatctaatcggcgatcgcatatcacgccatcgacggtccagatctgacccggccgaaactttacgccagctataatcggtatcatccaattccagatcaacgaacacgcccacttcttctccaccagactccgagcactttttttttgtttccccagcggaacagccgtggccgagccatagtcgcggcagcgagcttggcagagctcgctaaccaagcccgagaccacgacccaaacgctactacccgaaacctacatgacgacgaacagtagaagaactcacccctggtgacgtagcaaaaccgaccagatcccgaccaagtcgcgatggcggcacctcccgatgaataatcacgtgctcgcaggttgctccctcgtcggattggggtccatgatgccggaaccaatgcctgtgatgctgacgacccctctccgacggcagaccggccgtgcggatggaaatccccagcggcggtcaccatgtcccagcccagccgtgcgaagctcagcgcttggtcacccgattcccccctgactaggttgacgagatggggcacaaggagttcggctaatatagtcagcagggagagcaacaaccaggcgggatacacgcagacgggactccggttgttttgttatgccggaggagagaatcctggcagaaaacagggctcagttctgttatgcgcgagaagagcaatagtggagaaggggcccacgtgtcagtgccatcacgagtttggagactgccatgcggggtcccactagtcagg

SEQ ID NO: 157353 - DNA, 914 bp, Zea Mays
tcattatcttgatagccttgattttttctgggttagcttcaatgccctggtatgaaaccaggaaacccagcagctttcctgcggaaacgtcgaagatgcatttctccgggttcagtttggtgtgggttgcccgcagcttgtcgaagaccagggttagatcttctactacagtcgacccccttctagtcttgaccacgatgtcatcgacgtaaatttccaccttgtcctggatgacgtccccaaaggtcttactcatcgcccgaacaaatgttggcagggcatttttcagaccataaggcatcacaacataatagtacaacccatctaccgttacaaaagcagtgtgcttcctatcttccctagacatccggatttgatgaaaaccggagtaggcatctaggaaagacaaaaagttgcaccctgaggtagagtccacgatctgatctatacgtggaagtgggtacgggtccttggggcatgccttatttgggctggtgtagtcgatgcacatccggagtttcccgtttgcttttggcacgatgactgggttggccagccacacggggtggtgaacctcttcaatgaagccagtgtgcaacagtttccgaacctcctcacagatgaagtcctatcgttccttggactgtctccgaggcttctggcttactggcttggcgtttggatagatcttcagatggtgctcaatcacttccctagggatcccaggcatctgtgacggctcccaagcgaatacgtcggaatttgccaggaggaaggtgacgagcgcgagttcctatttctctcccagatctcccgcgatgcgggtggtccgggatgggtctgcgtcgacctggatggtcttcgcagtcacctttgagtgccctccgtctgctttggttggtagcaccttcggt

SEQ ID NO: 157354 - DNA, 1022 bp, Zea Mays
ccatccttcttgttgttggtggactcccttgatggatccttcccgtggcttgtagcggacttctcacaagagtggtgtcatctgtgtggagttgttttttctctctcagatttccaaggtgcacgatttgtcaaaaagatggagtaatcagctatgtgtgaagtgaagtagctgacacatgccgttgaagtggtctgatgcgtttaatccctacgtgttcctgaacattagccttgaacagtgataatgcgacgatagggccaacgagtcaccatgcaagccaaggtgcgttagatgatataagatgagaagcagagagctcgggagctcgaacaagagatcgcaattatgcaagtcagctcgatttaaacaattatagatacctatttcataagttctcagaaatttttgtttggttgcatcgcagtgaatttagcaatgtttcagaacaatgacacataacaaagtaaggtaatacggctctcaatttcatctaatattattatctgaagtatgattggccaagttatgacgcatttatatgatttcaacagtaagcatggaccaatttgatttatatagatattgctaggacgaatactgataactatcagggacaagcaagagcatacgtctttttccaattcatcaacttttatcttcgcctgattaacggttgaaatcatataaatgcgtcataacttggccaatcatacttcagataataatattagatgaaattgagagccgtattaccttactttgttatgtgtcattgttctgaaacattgctaaattcactgcgatgcaaccaaacaaaaatttctgagaacttatgaaataggtatctataattgtttaaatcgagctgacttgcataattgcggtctctttttcgagctcccgagctctctgcttctcatcttatatcatctaacacaccttggcttgcatggtgactcgttggccctatcgtcgcattatcactgttcaaggctaatgttcaggaacacgtagggatt

SEQ ID NO: 157355 - DNA, 548 bp, Zea Mays
gtccggaggccggcggctggctgtgcgccgtcgtgtaaagaacccatagctacctaccatactgaaagcttcgcgagaggcgacgggtgccgggagcggcgcccaactctcccacacatcggtggtcttacagttggtattcagagctggatctttcccacgattacttcaccagatcgaagacaggggcgatggcgccgtcgaagaccgaggatgcaatggcgcaactcctcgccaagattgaggaaggcaaccgggagacccacaggcggatggaaacgatgcaagcgtcgatggcaaatatggaatcgacggtaaaaggggtgatgaaggaacacaccgaatttcagaaatggcggccggaagtggagaagaaggtgtgggaaatgaacgaagccctaaaagtcatccaagtcgccatcgagaagcaatcgcagaagcaaccggtggacacctcgtcggcaccgatcggagatgcgtcggcttccgctcaccggggagtgtcgtcgatcgacgcgacaactgggcaacctcgccaccgatttgtt

SEQ ID NO: 157356 - DNA, 1069 bp, Zea Mays
gctgtcttatcagacgaaggcagccgaaaaggaacaatatcataacaattttagttgttacaactttgtgcctcggtctgaggagacttaccttgtgcccacgtttcagaagaagtggccaggttcttggatgaaggaatggttttacgtgaagaatgacctgaattagagggaagatgtgaaaggcgttatccaacgtcctatatggtcacacttcggcattagaaggccatccatcacacatggaaatgaagtgcaagcttgccaaattgctttcaacaacgtatgcacctatattggcacaagagatttagttcaagagcatattgcttacaaagtatggcctcttgtaagcgaatgggaaatgccgaaggaagctgccgctggctctagttagggtggcttagtttatcttaagtataccttttggttcagaaaccaatttaatgagtgaaatgctgattggctggatgctatagaggcaacaagcgatgaactacttggagcgtactcgagggcagaagacaaagctatgacagctgccttgggcgctcgcggcaaaaagaggttgaatagagtgtttgacgctattgggttcgtttacccagactactgctatcccgtttaaaagcaagggagaaaaaggaaagttgttgcttcgtcatctactggtgcgtcgaagataaagaaaatcaaggtcttgactcgtagaccgaggtgcatcgagacgaccgatgtgccgaagttaattgaaagggtggaaactacccctctagccacagagactgctcctgctttgcctattgaagctattgcagacccagccagagagtcagaattgaaaaaggtagcagaaaaggtaccagaacaatctaagatgatggtgacagcactgccgaagctgtcagctactataggaactccgaggaagaggaggatggctagtgttttggacgctgttttaaaatctgtgaaaacgccgcctccttcttctgccgaagcttctgatggcaaaattgaagatgccacagagatgatcactgccagtacttctgctcatgctgaggcg

SEQ ID NO: 157357 - DNA, 481 bp, Zea Mays
gaagaggtcgttgattcgagggagtggatacttgtttttgattgtgacttcatttaaagatcggtaatcaatacacatcctcatacttccatccttcttagtgacgaaaaagacgggtgctccccaaggggatgagctgggacggatgtaccctttttgttgaagatctgagatttggagctttaattctactaactcggtaggagccatgcggtatggtctctttgcgatgggcgtcgtaccaggaatcagatctatgtagaattccacttctctttctggcggcattcctggcaactcttctgggaatacatccatgaattcttctaccactgatatgctttctgttgctagattaaacatcattggatcattggtgggtggctgagcctgacaagagactgacttcccttggtggtctatgagaaggactgtcttgtttgcgcaacttatgatacctttgtgcttggttaaccaatcc

SEQ ID NO: 157358 - DNA, 483 bp, Zea Mays
tggagaagctcgaagataacgggtcgacgtagaaccgagatgcggcggtgatctccggtggcgcgacgacgttccaacgtaaccactgtggtagagttcaatcaacaatgtgtataagcaataggaggtgttaaggagctaagaacaatgaacaggatgtagagaaaagaatcacggtcgcctgtccacgggagacctgcccacggcggtgctctgcccgaccgtgaagacgacgacgacgtcgggagctctggtggatgaaacaagacgaggattggtttgtctgatgcgcaaagaatagacagaacgagtgcacactccaatttatagagagaaacaaggaggttggctaattttggccagaaagagagacgacgccgtcggccctagaagatccccgaagccgagcatggcatctctgttaacccaaacgtaagcactcatgtaattcgacaccttcactgcggcgtattccagtaaagc

SEQ ID NO: 157359 - DNA, 758 bp, Zea Mays
ttgagggcgcgcacgaaccagtctcggacggccataaaaggggtcgtagccggggcgtcgcgacctattccccgttcccaaccaccccaagtcaaaccttgcgccgccgtcaccaggaaaacaccgccgccaccaggaagcaccatcgccaccgcggacaaccgccgatagcacgaattagtccccagccaggtcatctagggcttgtgccgatcccgaagaagctgttcgcgggcgcaatcggtcggtggtgaccggtgaccgtgtgaatctctcgccgaagttagcaatctgtcgtgcgtcgcgggtgacttcattaggctcccctcctcggtgagtaagcaccacatcgtgttcgcccattctttacaattgtgtagcacccaacagcatagagtttagggcgctaaatcaccgtgcccggaagtccggcgatggcgcgccgccgtgctgagtcccggaccacagtagtcgtgcgtggtaagaggaggagacgatgtcgcggccgtcgatccgatcaagcacggcttagattagacgaccacgtatccattcgcgctgtgagatctgaaccattagctgaagatcgtgcgggcggggtcggtaggagttactttaaatccggatcctcgatcctggatccaacggtcacagaagcgtaccggttcgcggggtctgtgatttaatctggacgctcagtcagggatccaacggccgatatcccatgatacccgttcgcccagacactattgcataag

SEQ ID NO: 157360 - DNA, 589 bp, Zea Mays
cttgacggccttcaccatgccgacgaaatccaaatcactccaagcatcacagtagccttcgcttacgtcttctagctcgaccccccttcaaagtgagatgtcacgacggcaaaggcctggcagatcccttggcagaaggattccttctcaatctcacgtagctagctagtgaggccctcaaagcgggagacaattgactcagacccaggcaaaggaagttctccaaagcgcccatgcatggcgctcaccacctctagcaggagatgcctctccttttccagctccttcaggtggctttgcacctcgacaaagttcccctcggcggcgtcgaattccccctgtatggatgatcggataagacacattctatgagagggggaagtgggcagtggacgcctagcttcaggaaaaactatcgaaaggtgttaccttgcaaagaggctaggagattctcctccttcttagtttgactgcccagctcctccaaggccgcgactcgagcctcggtgacctctttccctcgctataggatacagaggtgggagtttgctttcatgctctcaagacacacaagcgtcgccgattctgc

SEQ ID NO: 157361 - DNA, 1096 bp, Zea Mays
ttagcatatattgtcttataagctgatcaaggggtgctaaaaggagctaaacatgggccaggaaaccccatttcccaccccataccctccaaccctattctctctccgtattaggggcatgcgtgtctttttattctaaattttattagagtagtccaaacacacaaggagctaaacttagcattttaattcatatgctaaagtttagtatgaagctaaaatttatcccgtaaaattgaaaagggccttagtttgttgtgtactgagcccagttcgggagcacggcccaaacggatctccttctcaaccaaccctgctactctcacagatcacagtctcactcgagcacccgcgcggcgccctacccaacccacgctattctcggcccgctcgccaccgctgcacgcgccgccgccgcatctccagcccccgcgccgctcctcatcttacctgggctagctacagcgacacctgcgtgggtggtggtgtccgactacttcattactcactggccgtccattgcagccctaagcgcggttcccttccagctccgctgcggggagcctggtttcgctcgtgatgtcgccggccgccggagagcagctctctggagcccaccgagagggcagggccgtggaggcgcggagggtcttcataggcgccggctgcaaccgcgtggtgaacaacgtctcgtggggagcctgcggtctcgtcgccttcagcacccagaatgccgtcgccctcttctcccccctggtatgccggccttttcctgcagttttgattaccagatgagtatatctcacttgttcgtgtcacccaaatcgtccaaacacgtgttcgtgcgagcagagaggtgagatcgtgacaactctcccggggcacaaagcgccggttaactgcacgctatggcttcccacgaagaaggatgtgctccatggtgcgtcacttttattttgttttgctttgacattttttatatcaaaatctctcctctaagtttaggatttataactgctttatttactttggagcttgctgaaacgactcttccctgatagattcttttttttgggttctttgagctttgtctgga

SEQ ID NO: 157362 - DNA, 720 bp, Zea Mays
catagttgttaaggtaggaatattgtcgttgacatcatttactttatttccactggggttcatcatctagtcagaggataaaagagttagtgagacagactgcataagaggcttgcgtgacattaagataaagagcttaacacaacattttgattcccaagataagattagtcaagaaacaagggtggtttcatatttctcctagcttcatcatactttgagagtttacaggtgttatattccttaacaaagatcttttgaaccttatagatttcagagcatgatatccaaataatctttctgatccaagagtatttctttgagcacaatttgagagaaaatcttgagcagaattttagggcaactagagtatcacattgcttcagatgacaccatactttattttctttataaagattgtttaaacacaataggtgcgagagattctccaaatttattcatatatcacttagcacaattacaaatcttgagaggggcaacactttgacatttttttcgtgagacatactccttcttctagctaaacgatatattattcttccttgtcagatgtaccaatctgagctggaggtcggttgtcttcaactactattgtttctccagacggagtttccaagcacatggttttctcagtatgttggattaccgccttagttctttgtaaccaattctttccaagaatcacatcctttcccattg

SEQ ID NO: 157363 - DNA, 964 bp, Zea Mays
ggccactagagcgacggaagacgtcatgacagcatatttacccattgtcctagggcaagacacgcttcaatggctccaacatttgcctcgacactgcatcgatgactgggatgacttcagtcaccagtttgtcgcaaactttcaatccctttcaaacaaaccggcgtagccctaggacctcaagtccatcaagcgtcaaagcgatgagaccctctgctcgttcctcaggcatttccagacaatgaggaaccgcatccccgacgtcatggaggcaactatgatcgaggacttctaccactggtcaaacgactcgatcttcatccaggctatcctccagaaggcacccgccacctcggaacaactgttttgggaggccaacatctacatcaccaccaacaagcgatcctaggacctcatcggcaacacgaaacctgcacccctagcaccaaagaaagacatgaaccagtagcaggacaagtattgggacaagtggccccaggaagaagtgcatggtgctggcccgccgatgactcggctccgtggcatgccacgtggtagtgcacggacgttggacaagatcctcgactcctagtgatcataccacaaggagatgcgccacaccatgtgaaactgcaggggcttcaagaactctgtcggccacgtccgaccattccagcatttgtcgcctcccccaccgcgaggagacctgcagagcaggttcaatcgtagcaacaggataggggcagtgcggagccttccacgcattgacagggaggtcaatgttatcttcgagggccatgggtccctgcagaacaaaaggcaacagaagttcactgatcggcaggtcctggtggcaaccaagaacgccctgaccccgtatcgcttgtcagaacatgccatcacattccgccgagccaactagtggctcaaccttgatcaccctggcatgtacactctgcttgtt

SEQ ID NO: 157364 - DNA, 554 bp, Zea Mays
tggggatgtgtcggctcctgatgtggcaggctagggttactcggctcctgtgggcacggtcgagagtgcttcagcccccgagggtgccactgaagacaacccagccccgagggtactactgaggatggcctagcctcctagggtgctgagcttggctcctccttggctacttccatggacgttttgacggatcatcaccggttcaatctaaggaactagtggtgaccagtcctcctactgctcttgtcggtccagtcactttagaggtcagtgacccggatgctgggaatccgctgcatgctgtcggagctgaagtctctctgagtgttgccttgggcgtgagctctgatcctcctttgggtctcgagtctgctcttaatattgcttctgcctatactccaccattagatagcgcgtcgatgcctccggctttgggatttcccttgttcctttctaaccttcaggtcagctattgccctgtgttacttatgtcggcaaataggctctttagctaacttttgtgtttgcagaatgttctgaactctgtgtcggcc

SEQ ID NO: 157365 - DNA, 649 bp, Zea Mays
acattaagaatcaatttctgtgattatttcctattttcccaagtctctggattgggcctcaaattttagaaagcgcaggggcttccacgctaaactcccacggactcagatctcatgcacttgaggacagcgggttctattatctaaaaatataaggtctcttttgaataagtgccgaggcgaaggggtattagcgaaaactggccgcccgatcactgagcaagggcctagattagatcgcgcatcgtcgaaacggtataccatcaggatccctcgatttccaatccgacgcccgccattgcgttgcgtctcccggactcttcgtggtctcatgaaacggtataccaccaggaagccacgccgcgcccggactcttcgtggcctcatgaactgaaggcgagcggatgtctacgatcggcgatgtgcactcacgctctctctcctccgcgctctcggcaacgatcgattcttccgcggtgcagacctcgtgatctagcggatgcccaatgtgaggaggggaaagagtcgcaggtgcctgagtatttatcccagagccgccggtcatagagaaacggaatccggccggaattcacgccgcggcagtgatttcgcgtggcaatctttggttgagggaagaacaccgacaagc

SEQ ID NO: 157366 - DNA, 879 bp, Zea Mays
ctacctctgtcaactggatcaatcacccaatgcttgcgtggtacagtacaagaaggccatcagtacgacttgacaatggttgctgctcgtagttgttatcctttttttttaccgtatcactgctttgccccttgtgtatatcaacagtaaaatctgaatgtgtgtgtgtgtttgtgtgtttactttttctttgtatgcaatggccggtgtaggttaggggccttttagcggagctagcggtggtggaggacgagatattctacttggagaagaaggtggacgacctgcgcctgaggctgcgccgggagcagaagtggacggaccactgcatcctccaccaccagcagcagcagcagcagcacaaccgccagcaacggcactccgtgtccgtgtccaggagggagctccagctccaacaagcaggcgcccagcagctacccaggctaccgtgtccgggtccgggcagcgacgaggctcccgaacgcgagagcaaggcttccgtcggatccgcctccgccaaaggtataggacgtactgacgtggtcaagtgctcggcaagagcacccgcgtgcggagctcgttgtgtccgacgcagacgctgtctgatcgacgcgccacgcgcgacccatcatggtgttttggatcatcaggagatgagacagagcacgtcgtcggcaggaggagcagccactgccactcgtcgtcgtcgtcgtcggagaacccgtaccggccgacgcctcccgagcggaagacgtactgcatggcgagcagccccaacaggctctcggaggagctcgtcaggctgacggtgaccatcttccacaagctcaacaagacggcgacggcgacggcggcggacgcgggggagctggatctgga

SEQ ID NO: 157367 - DNA, 1058 bp, Zea Mays
ccgtgaagtatgataggtacttttttatttgatatctcgcgttattcgatgagttgtcgcagcacatcttccaccttgcgtctcacgaggttatcaaagggctaccgatcatcaaccggatgtgcctatagggttggcttgatgatgttggtgacaacgacatcggtgtgatctttagaaccagccatctagcagccgatttttagtagatccaaacagccttgtgtccgtagtggaccggagttgtcaaaaagtgtgttggatttgatttggtaccaaatactagaaagaaccacctgacggtccatgaccccgcgtcaagagtagatctttgctcgcgtgccggatggtctgtgtgtgcgtagagggtcttcttcttcgcgaagaaccctagaactcgccctctgggagggacccgtcggggaggatagttctaggaggtgctcctggatcggcaggccactcggtgcgtccctaagcggcgtagagttggctagagatgaagtaataggttgaggaaaactaataatagggctaaactaacgctagattactcctactcctgatgaatggaaagaacaatgcaaataaggtaaattcgataggtagatttgattggatcgatcgtggaggttcaacagtcgtatcccttcatctatataaggagaatgtctggacccattacaagtcggttccctagcaaataccgtggaatttacctacaaattccgcaagaaatcagaaactctaactgattctgttcacgcgcggaccatccgtgctgccaccgcgaaccgtccggctgtctattttggtgctcaataggacacatgaggtattttggaagaaaaaaaaacaaaacagcttccattctatgcgatacgttctcatataccgctaatatatattatcgttgttgcactctgtcataatgtacatgcactgaactttgttccagttttgggtgtgcttactgctgcttccagagtgtgctaacttctgaaatcacagaaagcaacaaataaaacttaatcatctctgcactcctcgaaatccta

SEQ ID NO: 157368 - DNA, 835 bp, Zea Mays
cctagtttgactccaaaaagttggaaattagtggcagctttagacaagtgctagttgattggaagcacaactgttggttcatgtaactgtagacaacatcctgattcctgattgttcaccaacgctctggttgactatttctgatggtgtagtttgactggatgcctttgatatctagaagcaattgcatgtgtggagcaagttcacatgaacaacaagaggttacttacctattggaagtctatttgacacttttgcattagcacaacgagagatggatgtgttgttcatggcaagtgtagcgacatgggtgatgagctccctcctcgccaagctcgctgagctgctcagagaggactacaagatgtagaaggcatgaggtgtgaggtcgtgttcctcaaggacgagatgagcagcatgaacgcgctgctggagaggctagccagctcggatgcgcttgatccgcagaccaaggagtggagggaccaggtgagggagatgagctacgacatcgagggttgcgtcgatgattacatgccctagctgcagaatgagatgcagaggcacgatggaatcttatgattcttccttgggtatgtccagaaggtgaaggatctcgttacctgtcacgaggacgccgagcagatttaggagctcaaggcttgaatcattgaggctggccacagaaggaagagatacaagaatgatgacgcggttaattctggtgtcgccaatgtgatccctatggaccgtcggttgccagcgctctatgtagaattgggtagccttgttggtagcgatgctcctagagatgaggttatcaagctactagatg

SEQ ID NO: 157369 - DNA, 317 bp, Zea Mays
gcccatcggagccagatcactaccggcaacaccctcgagggctgggttgcagcttgtgatacccacccgagctgtatcattaccggtaacaccctcaggggctgggtaatcgccagcaccacccttgggagctgggttttctgcaacagccacctctacggctgaaggatcctcagtcacctccatgggagtcgggcaatctggaccaacctcttgacaccgaagaccgccttccaaggtcgacgatgcgcgagatgctgcccgggatacctctaaacccacatctggaatgtcagagcaaacatccatcatatcac

SEQ ID NO: 157370 - DNA, 459 bp, Zea Mays
gatcactataccctactaatggagcaattagcttaagtcaaaaacgccttaagtcggtgcgacacgctcacgcttacacgactcagggtgatcactataccctactagcgaaacaatcaactcaaatcagaaacaactcaaagaaaagcaacccgctcacatattcaagtggctttcaacgccttgctaatagaacaatcagttcaagtgtagcacagttacacgtgcgtgaaattcttgatacattgtttcgctaaaaagtaccaactcaatgaaaagtgttttccatccgagcaaatcactgtgcaggagcatttttgcaaaaaagcctcagctgcaggagtagcagaagaagaaggtcgactcatgacaacaggtgcagcaagaacatcggcaacaatgtcttcaggcaccacaacaccaagcctcctcatcaggattcgcccggcgcgaacaacc

SEQ ID NO: 157371 - DNA, 639 bp, Zea Mays
caactgccttcgtctggtagtgcaattcataaatctggcaaaagaattctgtgctaggctccatgccttgacttcgtacaacccaaataaaaagccccattctcataattgcattaggagcgagcttgtgcaagaaaatatcaaatctcttcagcaccccgaccaccaccttatgcagtggaaactgaagcccgcattcaaaaagcttaagaacatcaccatttcatctttcctcggctccgatatggtgtcctcgcctccaagatgaactaagttaatgtcatttatgtaatgcatgttcttcaacacttcaatatgatctgctccaattgtcgatttaccgaagataacatgacttggtttcgtcggcctaatgtcttcactatctccttcaatgtccaagtcttcgctatcatcatcggacccatctgttgcactagctagacttcccccaacaactttagccaagagggcgctctcacctggcaccatctcagcagcacttaaagctttcactatgacaatatctaaagccactttctctcctggcatctctaccaagctagaacctcactcacaaggctcgaagcatggttcaaagcaaccatcgaatgcggaggaaatttaacagcaaagcac

SEQ ID NO: 157372 - DNA, 360 bp, Zea Mays
cgctgcctgcgcgtgcgcccgctcggccgccccgagatccggcgggacccgcgcgagctcccgcgctgctcgccctgctccgccgcgtccccgtcccccacctcccgcctctacgcctgcctctcctgcgccgccgtcttctgcccctcccacgccgccacgcacgcctccgcctccgcggggcccggccaccagatcgccgtcgacgtcgaccgcgccgagctcttctgcgccgcctgcggggaccaggtctacgatcccgacttcgaccacgccgtcttcctcgcccagtcctcctcgcttctcccctccacctccacctcctccgcctccgcctccgcctccccggccctccgcaag

SEQ ID NO: 157373 - DNA, 572 bp, Zea Mays
gtgccctcccttttatagctcaagggggacacgtacaaggatgctgagccccgacatgtgggcctaggggcaaagtggaaggaagttactaatgcctgcaacgtccgggtgatctctgagcgccctaatgcccgtagtgcatatagtattgatatgccgccgctgcttccatggtacgcgcgagtcatgatgagtgcagcgcatgcgacagcatgggcgtactgcctgccaacggaatggacaggcacgccacctgcaagatggcctagtcgccgcccgtcagcggagtggacagggctcattaaatgctgaggcggcacatcgcctgccagtggagtggacagggctcattaaatgctgaggcggcacatcacctgccagtggaatggacaggcgacacgccttatccgcaataaatgcagaggccgcgcggcttagaggccttacgtcaggctccgcccgctggcttacgtcacgggcagcgtgccacgtggcagcatcggggctccgcctgagcggggagcagaagtgtacgcgacatggtccggaaacgtgtcagctccggacccccg

SEQ ID NO: 157374 - DNA, 392 bp, Zea Mays
caacactctggcttcagatatctcaaagtcagatgggcacgtctaccccttcgacatccagctcgtcatcttgggctcgcgggttagctctgaccatctttgtctaattttatctaacccccctaactcagtctccgtcttacactgtctcacgcaattcatcacacaaccatctctttcactcggccagaacgtgatccgcgacaaatttgacaaccacctctcgcgttatctccgttgtatatatacggacaccccacattatcgcataacccctcgtctccctccctggatccaaatcatgcaggagcagccatctcgtctcggtggttaccaggcccaggtgagttgtctccctgtctcccctctgttgtgccttccctctgtttccc

SEQ ID NO: 157375 - DNA, 473 bp, Zea Mays
aaagtagattgtactaataccttttggaggatgcgggaacctatccccgtacatgaccaaagtatcatgtagcactctagtgtcatgcatcgaaccaggccacccagtgatgacaaatttgtacttcatatcaaagtcacaaacggtcatgacactctgcgatgtgtacccgtgacgaccaatatatttgggttgctctaacaaagggacagagcgggaaagtggcttccatcgatagctcctatgtagtctagggtgaatattagtgaaatgggcatccttcggcttaatcaggtcattggacatcctatatattgcgtcaaggacttcactaaatttctggcttatagtttccaaagagtggccaaacttgttccttatctgtctaaatgattggggcccgcatgcccacaggaaaatagcaagcgcctctttcgtactaactttgtgacttgctacgaggccataatcgt

SEQ ID NO: 157376 - DNA, 561 bp, Zea Mays
gagctttcagaagtaagttacaggccgagtgaggccacatacaatgtaggagtagatggttcttactattgtcaacaatcgaccatatcgtgctctttaatcgtctccttatctatcatagtattagtatttagtacacacttgttggctccggtttagggtcaaatactaggggtatatctcctgacggtagtccgtgacgacgcagagtgtcgtcttctttgcaggaaccatagatctcgcctctcgggagggatccattggggaggagagttccagaaggtgatccgaggtcggcaggccactcagaatgtccctaaacggtgtagagtcacctatagatgaaagaacatgttgatgaaaactaatactaaaactagattacgactagtcctagagcgagaaagtaaaggaaaagaaatgtagattgattgaatcgattgtgccgtgcgccaatcgaccgtacccattcatatatagaggtggactcgttacatatgtacatttttatcttgtataccttagcatcatttagtagtgataatcttctcacaaatttca

SEQ ID NO: 157377 - DNA, 1737 bp, Zea Mays
ccacaaagtcgtccaagaactcatgcaacatcctattcattgcttccataaaagcagcaggggcattagttaagccaaaagacatgactatgaactcataatgcccatatctggtgccaaaagcggtcttcccagtatcctcctcacgaatcctcaattgatgataaccagagttcaaatcaattttggagaacacctgggaacccctcaactgttcaaagagaacctcaatacgggggagtgcatatttattcttgattgtcacttgattcaaagcgcgataatccacacatagccgcttgcttttatccttcttctcaacaaacaatactagggaagcccatggagacctgataggcctaatgaaacccttagccagcagatcatccaattgccacatcaattcaacctgctcctttggggccattcgatacggggccttatgaatgggctgcgtacccggaattagcttaatctcaaaagctgcatcgcgctctggaggaatgcctggaatctctgccggaaacacgtcagcaaagtcacacaccacccggatgtcctgcacccgcaaggcagcctcaccctccaccaccatggagaaaaagattcccgacttccttgactggtgatccagaagcaattgcgccaacaaggataacgtgaactttggggaacttcccaagaataccacctccctacccgacggtgcctgcaataacactgtcttccaaaaacaggatataactgcgtgatactgggataaccaatccatacccaagataacattgaatgcccccaaggaaatcacaaccagattggctgaaaagacctcatcagcaagaatgacggaacatccctgacaagctgaacagctactaatggagccattagcagaactaaccaaaattgggtgacccaacctctgcaccgaaagaccagcccgcgacacaaaatcctccaaaacaaacgaatagctagcgccagagtcaaaaagagcatgggccacaaacaaatcaactgaaatcgtacctgtcaccacgtctccttgctctctgccatccgcagtgggtagcacataagcttcggaaatacccgcagaagaggaagatcccggagtgaaattaacagaagaaccccactgagtcgtcgggtgaggcagacgcggagctccaaactgatatggcataggagtagtcggtgcaggagtaggcgcagccagatattgaggaaaaccctgcaccggcacgaattgagaagtcctaggcacataaaactgctgcggaggaagtggaactgaaaattgctgctcagtgcttgacatcatgttgatagtgccctaagaagaggaagaagtcactggctcccatctgagcttcccattgggattcctcctacacaccacatccttgtggtcttgactgcagattgaacacctgccgttccactggcactctgcacggcgatgcgcatcaccacaacggaaacacaccagccctagcccgggcttaggaacagcctgaaacctctgagtacttcctcccgaagtacccgagtcagaggatttgccacgatagggatggtggtgctgatgctgagacttgcccctcttgtgggctggacctccagtgttgcccctcctcgcgtcctggccacgaggctgatcaacacccgaagacttctgcgactccatggtatactggtgttgcatctccacacccagtgcttgctccactgtag

SEQ ID NO: 157378 - DNA, 514 bp, Zea Mays
ctagggatgaaaacgggacgggtacccggaacgggtaccggatacgggtaccaaaacgggacgaattttcggatacggaaacgggtattttatttggcgggacggatacgggtactacccggatattggctcccggatacgggtaggatacggaatcactattacccggtcagtacccgaaaatcccgggtaggatacgggtattattcgggcgggtacccggtttctggatttagcttgggcctacttcctattggctgttgggctgcttgatcggccggcccatcatcaagcatcaggtgtttaggcctttagggttaggcaggcatccaatccaggcatccagccgccgagcgccacacgcacacccagccctcaaggccagccggccaggagtcacccagccgaccgccggtccgccgtgacgccattcccggccgccggcgcccgccacgaacgtcgtcccgtctcctgtgctcccggccgccgcctcccgtcacgagcccactgccca

SEQ ID NO: 157379 - DNA, 339 bp, Zea Mays
atgtcatcagatactaggacagggaatgcaggattataggagcttggcatgagaaggcaaggatagcttagtgctgggggtgttgcttcagcaggaggtgttccaacagctcagggattcctgctttacagccttgaagccgcataccgtcgtcgcaagaaagattcacactgcaagtatcttgcatatgggactcgtttattgttgtggaactagcatctttctctccctcttgaaactcgcatctttatctttttacggctgctttaactcgagaagatatccttttcgtggtttagcattagcccttacgacatgtaccgtagaaagacatcaaac

SEQ ID NO: 157380 - DNA, 713 bp, Zea Mays
cttaaacaagccccaccttgaagcctttctaccgttgatagaaaaagtagaaaatagactagcatcgaccacccacttcctgtctctggatggccgctatagatggttaacactgtcttctcatcactacccacatactacatgtgcactctcaggctccccaattcagtgatcaaacaaattgacaaatacaaaagacactacctatggagaggtctggatgtcaatgcaaaaaagtggcacagactgtctaggatctaatttgcaaaccaaaaaacaaggcaaactaggggttcttcacctagcaacttagaacaaggcgccgatgatgtagaacctacacaaaatgctcaatagacttgacattccatgggtagatattgtgtggagtaactactatagtgatggcacaataccgttagaaagaaagtagggtcattttggtgaaagatgtcctaaagaatattcacactctcaaagaattagctcaagggaacataagagacagtcacacaactacgctctggtatgactgatgggctggcatgattaaatgagatgaatatccagagttgctatcatacgccataaaaaagaatatattgtgaagttggcaagaatgatgagccagccctaagagatgttccacacaccaatgtccggtgaatccttccaatagttccaaaatctcgttgtgttgttacaagaagaac

SEQ ID NO: 157381 - DNA, 484 bp, Zea Mays
cagtagctcccattcttctgtataattttgttgttgtgcattttgtaatgtgcatcggactgacatagatcttgctattgctgtgcttcaccgactaggatttgaagaggttagcgggtctgttgggcaatgcatgatcttcatgggatggtgggagtataactgatggctgctgctattttaccgcaccagtttctaccgctatttcttctcatgacacttgcagatattcagttgttcattagtttcagttgcacaagtttctgttccacaagttttagtgctccaaagcctcatacgacgcttaagtcttgattttggtagcttgctgctacacttattccttaatatagtgttgtagttctattttggagatgcatgtactatgactgtgtgacatgcacatactacttagtaagggatgatgctggctgtttagatttatctagctttgtgcattataaggatgtctattagcattgcg

SEQ ID NO: 157382 - DNA, 484 bp, Zea Mays
ctttctcttttgtacatttacatcagccatcaggaaccttgtgttactatttgttctttccacgtctagattggcacgtcgatgcgtgcgcggatgtttccgcgcgattggatcgattttttcaagtgaggaaagattgggagttgatatagggattagggagttgttggaggcagtttttttcaatcttgctaaaaaatctagattgacagtggattttggaagctcttggagatgctcttagctacagaaccagtgaagtagaaagcatcagtagcactttcttgacttcaaataacagcaatcacataaaataatagaacagtggaacaatattaatgagttgtttttggcatcttgtgttgttatgatttgattcatgttgtaatgccctttgtaaaatcgcttcaaacatactccctccgtccatttttaattgtcgctcactttccgagaagtcaaacatacgcaactttagctaaat

SEQ ID NO: 157383 - DNA, 753 bp, Zea Mays
ctccgaagctttccatctatttgcacttcgagtactagcttcggcgagtgcagcttcgcagatggctagaatccgctccactgctaagttgatcacgcctacctcttcggaggcacgctaagatacgttgctgatctccgaagctatgagggcttcgtcatcatcgaggcctgctcaagagatgccgaaggatagcccatcgaaaccgagctatattgagattggcggctctacactgaaggaaagagacctgcaagcaatgaggaagcttggctattttagcaacacggtcaacgtgcgcctccctggggaggagacaacgccgaagccagggaaggacgaagttgtcgtttataagagttttttcaaggcaggactttggcttcctatgtacaagatgattttaaaggtgctacaacggtatgaggtatacatgcatcagctaactccaaatgcaatggttcgcctgtgcgtttttatttgggctgtacgaagccagggaggtcataccgatgctgatgcattctgcaaagttcatgatttgcattatcagacgaaggctaaggatgaatcaggcctccataacaacttcggatgctacaacttcgcatatcgaaaggacacaactggtcccgttcttgcataccgaaccaagtggcatggagattggacgaaggaatggtgttatgccgaagttgactcagaacaacgtgaagatttcaagggtatattgatgagccctttgaaggttag

SEQ ID NO: 157384 - DNA, 1101 bp, Zea Mays
gagcccccatccccagtcctaattcaccaggtacaggccgattagcatattatcaggcccacacacaacccatcaccgctaaaccctttctttacaaccaacacagcagacgatatatcacacacacacctatgcttctgacatcatcccgtcgcctggagtttgattgtcccattcaaaagcatcagcaaatttgttcttgagcacatcatagtcttcccaggtaacttcatcagcgaaatgcgaccaaaccaccttcacttggaccactggatggctgcccgggcgcaccaatcttgtttccagtatattcacaggtctcacatcagcaccagagaggtccactatctgagacaaatctgagtacacaggggtagaagaaggagtaaaagcattgagttgcgaaacatgaaacactgagtggatctgggatgatggtggaagttccaatttgtaagccaccagtccaatcttctgaagaatcttgaaaggaccaaaaatatttcagagccagtttaggacatggcctgctgacaactgtagtctgcacatatggctgtagcttcaccaacacaaactcacctacttgaaattcccttttagtcctgtgtttgtcagcctgcagtttcatcctattttgagctgaggccaatttttgcttgagcaattcagaataggactgcctttcagtaacccagtcattaaccgactattccccatcaccagcaacaacaggtgcagcagaaaacacaggctcatacccatataaagccttaaaaagtgaacatcccaaagatgagtggtaagaagagttgtaccaaaactcagccaaaggaagccatttcttctacagattgggtgaatcagatattgcacacctcaaatacatctctaaacactgattgactgtctcactctgaccatcagactgagggtgataaactgtggtgagagccagtttagtgttgagtgaggaaaatagagccttccaaaaacagctagtgaaaactttgtctctgtcagaaaccagtgatctgggtgtgccatgcagtttaaccacattatccaaaaacacttgggccacctttgctgcagaggaag

SEQ ID NO: 157385 - DNA, 685 bp, Zea Mays
cttcgtcttctgctgtggaggtctcggaaatattgaaggtaatgactgagtctttcccattcgcatcgctaagtcctctggggttggaactgactagcctcttatagaaaaaggaattctcttcggctgctaatgggagagacgggggccagaagaaacaacacatgataaatatagtggaagacattgaacagaccccaccccaagcctcgacagacaaagctactaaatcgactgatgccgaagctaccgctgcagccgaagacgaaaatatcacaaccactttgtccaaaattgacagacttatatctgacgtggttgcggagaaggaggtagccacaacagtttgagacaaggggaagaaaattgaagaagcctcttcggaaggagtgaattttgacttacgacacttgggcggccaacagctctccgaagaggacatataagagctaaaagaatttgcaatctccagcggctaccagccggggtcaatgctctttggcggggtcgatgaagaagttgtgggattcatccgtgactgtgccagtgctaaaattataagcaccctgtctaagagtattgggttcctgaagctcgaaaaggacatcggctgctacagatgccagtacatcatcggcagcttattttattcgaacttcaaagtaagatcctttttgcatgttac

SEQ ID NO: 157386 - DNA, 314 bp, Zea Mays
ggaataggagtgtacgtagggtacatgcatccaatccaacgcagcaacatctccaagcaccggaaaatatcactagaaaacaagcccaaaacacggccgcgaaggcgcaaaccatttgcccacgcagacatggtatagcggtatggctacgggctacggcatggcagtccccagaagaaaagaactacgccgcgctctcttcactctcctccagtgagtctccacccacccaccgagcctatatatccctctgcatcctcccttccctcccagcctatcctacaacacctcccgcaacagaagcatacgccgtg

SEQ ID NO: 157387 - DNA, 797 bp, Zea Mays
ggaatatatttaaaataattgcatccatgctgtcatttttattgaacatttgatcatgagtttaaaattcaaaacaaatttggattagaaattggaaatgaattaaaagggaaagaaaagaaaaataaaaaagagagaaaggaatagtggttgggccgtttccacgccagggcggcccaactccccactccgcgcggcccagctcccctaacccgcgccgactgactgatgtgtgggcccgcctagtcagtttcttcctttgccgcgcaggttgcatccagtggctgtcttgcgggccccctttgtcaggtcgttcttcccaatcgaacgacggactccatgggcggggatcccgcgacacctcaaccatctaacgatcgccaaattcctcggtgcatgcgcccgacctcagagaataaatattcggatcgtcttgccttggctcattacctagagtcgtgagccgtcgtgaagccaccgttgtcgtcgtgatggggcccctgcgccgctgccgacccgccactgtaaggaagaagcagcgtggtccattgatcctcccctggacggctctgattacatctgggaggtaccttttcgcgcaacaaatcgcaaccgtctgatctggatcggaccatccatgtagcgtaccggttcattaagcacccaatctaatgcgcaccatcggatcgaaatctaacggctctggatgcttggtaccccttcgccgagccggtttaacagatgagcccctcggtttattctatatgaacctgtcgtcctatctggtatagtagggc

SEQ ID NO: 157388 - DNA, 813 bp, Zea Mays
accgggcgggctcatggggcagagagaaagggaaggtgcgcgactgagcgcgaccaagggctcggctgaactcaacggcgagggtggaaagggatggctggctcaactgactcaaattcaaatatgcccaactcaagcatatgcatcaaacaaagaccaaaagttggggttcaacatgatgcaacatttcatatttcctttgggttttgtctactagaaaatagatacatctccaactaaaacaataactctctttctaaaggagaaagaaatgggttaagagagaagaggactaacacctaaatttgaggataggagcaaagaaattttatacccccaaattccgggtgttacaccgaagcgtacccaagttgtttagcaaatacaatagcttcgattagttgttttgcacccataacctttccggctgaatgatggaccctgtatcaccggcctccaagctcctggtcaaatgtgccttctccaagtggtctgtcatcctcaatagccttctaggcctgttcgaagatgtcactatgatcgtcgaaggtgtcacagttggagtcatcactgctggaggcactagttgagccttcgggctctttggcattgccacatctgcaacaggtggcatagaatcattcgacaccaaggtcgtaccagcaatatccttatccttggcgtcgtcgtcttcgtcgtcatcagaaaaaaatgagctcattactaaagccatatgttcctcttcttcttcattgtctaggagcggttcgagagcagtaactccttgagccttcaaagcaatggcctcctcga

SEQ ID NO: 157389 - DNA, 691 bp, Zea Mays
tgatgaggtgttctaagggtagagttaagggagaaaataaaataagggggggtttaggaggttagggtttcaaaccttgggttgggatttttgggatgttacaaacctaccccacttaaaggaatcccgccctcgagatttagactggatttgagaaaagataagggtattccctcctcaaggagtcctcactctcccaggtagcttcctcttctccttctctgctccactgctctttgcagagcttcacctctgaggtgcgggtctttctgactgctgaatcaagaatcttcaccggcttctcacgatactgaaggtctttctgaatctgcactgcctcttcttcgatgtgactttctggtgcttgcaggcatttgcggagctgggatacatgaaacacattgtggatgtcggacatggattccgataattcaagacggtatgttgcgggtcctaccctgccaatgatgggatagggaccgacgaatcgtggtgctagcttcccttttacttggaacctcctgacaccacgcattggagaaaccttgaggtagacgaagtctccttcctcaaatctgagttccctccgcctgttgtccgcataactcttctgccgactctgagcttcaagtaaccttctgcggatcagagcaactttctcttccgcctccttgacaaaggcaggtccttc

SEQ ID NO: 157390 - DNA, 302 bp, Zea Mays
ctcgacggtatagtgcaagctttgtccaacccagcagacgaccaaaaaaattgtcgtcgttagcgagctgacctctgtggtcgttaaacattgaatccagctttccccgcacacaaaactgattttggcgcgaatacgtgcctctccctgcgcacaaaactgattctggcccaaccacctgaggcccatccagctgcctgcctgcctctgaaacgaaacccacgcacgaggtcgcacgttcctctcccgcgggcgacggtgcgaccttcaggcttcaacacgcgcgacggtgcgaccttcaa

SEQ ID NO: 157391 - DNA, 933 bp, Zea Mays
gtgaaggggtatcgcgggatcttggccttcggattagatctggacggctaaggcttactatttctgatgcgcgactcacagcagctggatcgtgaaccaacggcaccgattttatgactgaacggttacaccccaatctaatctcagcactcgatcttaaaatctacggtccaaacgagatccgatcgaatcagtggctaaactctaatccgagccgtcgaatactgaatcaatggtgcccagacgtcttctacctcgcgactagccccgcggcggtgacgtgttccccgcggcggacgccccggcgagtcactgaccgccgattcacaggcccgcaagcctacccgagaccaccagcccaaccctaacgacatagcgaacaccagggtagggttcataccgtgattcgcggcgcggaagaccctggccacggcaaaggggcggcttggcggcggtgaagcgctccggcgagcaattcgtgaccaccaggggacttgcttcgcccaggaggtcccaggccaccttcagtagtcgcccgagatcaccccaatgccttgcgacggtcgattcgttgcccttgtaagctccaagctggcggcggctgtatccctctacacggcgcgcaatggtgcagcggatgatttggagagcggtttacgggtaaagaaggggggtcgtgcccacgtcttaaggattggagagtccacgcagcgagagagaggaaagcggaatggtggttaaatccacccgccgaggtgaacgcaaggtcggggcgctcgcggtattctcgagaggttgaagacgagttccacgcgggacaacactgaccaatgggtcccacatcgcggtgacctgccgtgcgcctgcccacggaggtccaccggccagccaagacacgcgcgcacaacggataccgacatgtgggcccgcctg

SEQ ID NO: 157392 - DNA, 399 bp, Zea Mays
cgcagggtgaagctagtaggccgccgccgctaatcttgaccggggtggcatgcggtgccttctggggggtttcagaggaatctccaagggcagtgaaggttggaggagagaagtcagtgggcgccgggtgaccgtggtttcggaatctctcgccggagccaggaatcctcgcggagtcgctaaacctcgtcgtcgaccctctgtaccgatctatcactagtacaataccataacctgactacacgtgatctcctattcgtgtggcgactcttgggctgatgtttgggcggttgtgtgtggcggtagtagtaccaggttatggcgccgccgcggtgcccctgcgccgtcgctgggtatggccaggggaggaagaaagtggtctggtcgttggatcagtgg

SEQ ID NO: 157393 - DNA, 309 bp, Zea Mays
accatgtcgagcacccactcagtctgggcatgctcgagatgaacttacaaggccatggtaaactatggtgacacaaagcagaaaccttgaaggcaaagggcgcagaaagctcgaaggcgaaagggcaccgtgagtgggagaaaagcaaggcatggctgctactcgagggatgaacccctttttaaaggcagattcccctgctcgcgccccgaagcgtcataggcaaagtctcccccgatgcgcaccagggttcccatcctatgacacgggggcccgacctcacatgtcatacagctggtccgctggtcc

SEQ ID NO: 157394 - DNA, 416 bp, Zea Mays
acgttctgtatgggtacactgcgtagcccttctttgtccagcttttactttgtttcttatgcaatatcaatattagtggtagtacacatgcaatatcaatattagtggtagttcacatgcatatcaatattagtggtagcccatgaggcccctagcgagcggaggtggcgagctcaagctgtcctctctctctttctatgattcatagacactctagtgggcgcgcttgtgcgagtggtgtggattcggacagggagcaccgagttcaggatgttttaaagccacggcagcgcaggactaggaccgtctctttccttgagtcacacgcgagcagactaccccgcagctcgcagtaggcaggcacatccctacttgaaacttgatagataaagctagtgcgaagcagcctattactc

SEQ ID NO: 157395 - DNA, 448 bp, Zea Mays
ggttggatagtatatacaaggtgaaagaaaaatgggctgaatgttacatgaaggatgtgttcacattaggtatgagaagtacacaattgagtgagagtctaaatagtgagctgaagagacatttcaaatctgattttgatatcattcgatttcttaagcaatttgaaagggtggtggaagataagagaaaaaatgagctaaatgctgaatttgaatcaaggaagaaaataccaagaatcaaaatgaggacacctatgctaatccaagctagcaagttgtacacgccagttatattcgaggcttttcaaagtgagtatgaaaggtccatggtagcatgcacctcggcattggacgacaacaatagctatcttgtggcaattggcagtcttgatggaaattttacctttgagaaggagtacaaagtttttggtaattctttagagcaaac

SEQ ID NO: 157396 - DNA, 346 bp, Zea Mays
ggcggttccctgcgcaaacaacggacgctccggctgccacggtttccgcgagaaccagcgcctcgcttggcggcatggaccggcggccacgggcctcccaagaccatcccaagagaatgaaagcgagccatggcgacgaggcagtgagcactgagctgaggatctagctggggcacagcagccatcggagttcaaagagcttctatgactccagacaatccaggccaaatcatggatttttactgttcttgggttcatggatccaaccatcagaacccatttccactttgtctaatcgacgaaaggcccttggtgtcagctagtatttgaactttaagatcagcta

SEQ ID NO: 157397 - DNA, 280 bp, Zea Mays
gcttcagacacaattgatttcccaaaatccagatggctgggcttcgatggcataatgatgtcataatcaatttctccttcattaccatcaccctcttcaatatctacctgctcggtttcagcagcgggtgattctttgtcagcagcgccttcagtcacaatcaatcccgaccgcctcataacttcggagatcggagcagtttcagcagcttcggcttcctctccgtcgcgagtaactctagctgttgagcgtaccctggccatttgatgttgaatttttt

SEQ ID NO: 157398 - DNA, 627 bp, Zea Mays
ttcctctcttttcttgtgagccatatctgaagtatgtatctcctctggagataatggaacaagaaccaccttcttgtcattgtgaatgaaagtgtatttgttagaccgtccaaaatgcaccgagtccacatcaaattgccagggccgaccaagtagcaaatggcatgcttgcatggggacaatatcacaatccacctctccatgataatcaccaatggaaaatgacaaacgaatcatggctgaaaccttaactgtcccagaattattcagccattgcatatggtacggatgtggatggcgacgtggctgcaaaccaagcttctcaacaagcaaagcactaacaatattattgaagctcccaccatctatgatgaaacggcacacttggccttgcactttgcatcgggactgaaataaattatggtgttgtccttgttcagctgcaacaaactgagtggaaagaactctcctaaccaccaaacaaggagatggtgtattcattgtacaaggctcgaaatcaggaaaatcaggaagcaactcatcaaaatcagcactagtaatctcgtcagaagatggagaaataacatcttgtaacatgtcattgtgagcaaaagttggaataggttg

SEQ ID NO: 157399 - DNA, 299 bp, Zea Mays
cccagccattatatgatatgacgatgaactaatacctagggcagccactgcccccacaacccctgtgtgatatgtcaatgcccctaaccatggtcaaaccgtttgagtataatctcataccgtccgatcctagaccggaccattcaatagcccaccacggaccattcgatgacctaccatagactatctggtgtacaacacatagattagtgcaagatgtacaatgtatatacattctctgcaccccaacaacactaccctcctccaccttcggcccaccaaaggcaaagcattcccac

SEQ ID NO: 157400 - DNA, 430 bp, Zea Mays
cccagactcagtaaacaccccgacgggatggcgggttgattcaatgaaaccctagggtctcatatggaaaattacccgagcgaaagggtatcagatagatctggccgttggattctaaatcaacagatcagattatctgaatccgtaagcgctgctagcccatgaatctaagatctacggcctggattttattgaagcgcgccctgattccagccaccagatcccgatcggagggttctgatcgcacgcgagggactctacatctaggatctaatccgcccgcccattgtccgatcaatggctggacacaacgtccccaggccaatgcccacgccaaacccgacgctaccctattcccagaagaaacaaaacgaagcacggagggccttacccaagggtgacggcgcagatagcggttgcggcggcccgg

SEQ ID NO: 157401 - DNA, 841 bp, Zea Mays
ctgggccaaatctggtccaggcggctcaacaacacaggaaacgcgcgcccgcgcccgcgcgcgatggcagatttgcaccggggccctcgtgtttttgtctaactgtgaacaggttcagccactattcttacgggtctctgacgctttgcaaatcggtccaccatattctaattctttacaggggaaggtccccgacgacggcagcgcgttgaggagctccagcgagccactgtaccggccgattgaggcgatgaccagcgctcccgagcgacagacaccaaattggatctaccctaagcctttcccccaactcaattgcattcaagatcaactatggagctctggccacggtggccgagaacatcgcggcttggcgatcgcgttcccggtgatccctggtggcccggttcaattgggtgggtcggtgagcatcacagacgcatgagaatgcttagacaagggagcagaggggaagagctgacctgagttgggctgaccacgacgagatagagttcacggtgttctagaaccggattggggagaatccgaaattcgtgcttgctagcaaaggatttgggaggcagatgggtgcaacagctgcttgagtacatggcggagctgggggcgcggttaatttataggccgccggtcgtaaatggatgaggatcggggagcttgggattgcgctggcgaacatgccgtgcggcggattccggtgacagcgcggttatcgccgtttaaccggagcctgccacctcagtgatgttctgacacgtcgccgggggcttttaccgtgaccgccgacgaccaattcgggccacagcggcatccttatcgccgg

SEQ ID NO: 157402 - DNA, 681 bp, Zea Mays
ggtagcacgagctgttgagcacacgatcggatatgtccaaccaggtatgccatcggcccaacgatgcccctttggccctttgcactccctcagattacatgttgttatcgatgacagccacgaatgttgaaggcgaggctccttcctcctgcttgatggcgatgacgaacattttaaggcgccgcttgagggcgacaacatgcctcttaaggtgtcacctctctgccttgccctatcggtggcaaagcatgcgggtactcctgcgcctgccatgccaagcgcgttggagttggtgaggtggagctcggcgatggtggtggcaaggaaatcgaggaaaccgaaggtgatgtagctcctagctgtgaaggtctcgctaccggtgaaagcggatggctaagccatcagagtgaaagatgtcgcttggcacactaacataccccctacctagcgcgccaatagtcgtggtttcggaaatcggggacatagtagaatgtgtgttcgatggggggaagctagcgtggactcactctgaatggtgaatcaagtgactcgagaagccttatactggttcaggcttgtgccatacgtccaatgtagtgctgatcgttgtattgctctagaaaactgggagcacctagagggtgtgaataggtgatcatgcaaaaatgacttaaaacaaca

SEQ ID NO: 157403 - DNA, 555 bp, Zea Mays
tcgccggtgagaccactgagcatgacggggaggcaaaagtggtgtctcgtgatcgtggagaggtggtgaagttcatgagctaactgaattgaagcttaggctactagagaggggagagggaactcaccggagcggagggagagcacggcggcgctggctcgattgagcttgggggaggagtgagggatggccgaggctagagtgaggagctgggggagctcggggcggtccttttataggcggccggggagaggggggaaggaggaggtggcgtgcaccggcgaggcgcgcttgagacggtgatgatggcgcacagtggtggtgacgggatggcttgggcaggcggtggtgatgggatggctcggtcacaggcgctaggacgtgaggcgccaattcgactgctgggcgagtaatggagaggagacgtggcggatggtggccggcggcgatcgcgtcgatggccaatcacgggcgagagagagagagagctgatgagcggaaccgggttgtcagtggaagggcgggtgcgagaaagaaagggagggtgcagctaac

SEQ ID NO: 157404 - DNA, 285 bp, Zea Mays
tcccccgcgcgcgccttcagccctggatgaccgacagggtgcccccactgtcagccgctcaatcactcacgtacacccgccttctttccgcgctgcgcgcgcgttcagtcaatggctcatgggccccacattgtcagctctatccctcccctctcaaccacttcctcggttgctcggctgaaaactcgccggtagacccggcaacaagaccgcgcagggcccgtcgcgaccacacctccctgcggtataaaaccctcctcgcagtgttacaacctccgctccttc

SEQ ID NO: 157405 - DNA, 555 bp, Zea Mays
gcagctcagatgaggataatgcaacaaatggcggacactatggcggatatgcgtgctcagatgcagcaagaatgctaggagatgcgccaagaaagagaagagatacgacaggagttgcgccaggaacgagaggagatacgccaggaaaggagggtgcaacagcagctgcaacagcaaatgcaacaacagcagcaacaacaacaagtaccactgcctccaccaccaccactagttccaccccgagataagcatagagagttcatgagtcataagccacctacatttgcaagctcttctgatccactggacgcgaatgattgactgaaatctgtggaaaagatgttgaatattgcataatgcactgatcgggagaaggttttatatgcttctggacgtctgacaggtcctgctgctgactggtgagattcatatactgctgcccatgatgctgcggatactattacttgggcagagttcagtacacagttcaggaattatcatataccagctggaatgatgaagattaagaagaaagaatttctgtcgctgaagcaa

SEQ ID NO: 157406 - DNA, 303 bp, Zea Mays
ctgccttgtaacttcgtgtgccctcccatttatagctcaagggggcacgtacatgggtgctgagccccgacatgtgggcctaggggcaaaacagagggaatacatatagaagtatccaatgccagtgtcgcccagaagatctctgagcgccataatgtccgtagtccatatagtattaatatctcgcggctgcctctcggtaacgcgtgggtcatgatgagcatagtgtatgctgcagcatgagcgtactacctgccaacggaatggataggcacgccgtctgcaggatgacctggtcgccgc

SEQ ID NO: 157407 - DNA, 368 bp, Zea Mays
ctagtaatcatggtgtatgcatatgatgaataaaatgcttcatgagatgaggtcttaggagaaaataatggggggggttaggagtttagggtttctaaccttgggatgaaaactgggatgttacagcgcccaaatcaacagaagggattgcaaggaaagtggacgtcgagctcacctcggttgggcgtggaagggccgacgacgcctgtctcagggtgatggcctcgacctcccactgcatcatcgtgaccgcgttgttgatgtctaaatagacgggggatcccaaggtggggtcccagggggtggcgcggaggaggcgccgaggcggttcgagacgtgaagcatgaggacatcgacgccaaccaccc

SEQ ID NO: 157408 - DNA, 639 bp, Zea Mays
gcagaagttcctgaagtcctggctgtcaaactgtttgccattgtcgactgtgagctcggacgggactccgaatcggcaaacaatgttttgccagaagaatttctgggcagtcttcgacattattgtggatactgcccttgattcgatccacttggtaaaatactcgacggcgacgaaggtgaacttgaggttcccttgggccatgggtagtggctcgacaatgtctagcccccagcgttgaagtggccatgtgtgggcgatcagctttgtgaattgcgaagggttgcctgaacggggagaaacttctggcaggcttcgcacgacctcgtgactcgattcgcggcgcagatcatagcaggccagtagaaaccttgacggatcaccttggcagcaagggccctaggccccgagtgagagccgcaagttccgctgtggacttcgcgcaggatcagaaggccttcggtctctgtgacacatttgagcatgggttgactgatccctttcttgtatagctggccctcaataagtgtgaaatctcagcttcggagtttgaggcgcttggcctcgttgacatcacctggatggtaatatccttgcaagaacagggttattggggcccgccagtcttcggtcatgatg

SEQ ID NO: 157409 - DNA, 395 bp, Zea Mays
gagaatatgagtatcatttagattatgtagatcatgtagattatgcacaaaaaagataaaagagtttataaactttaagatatagaaagtaatgattttttactattgtaactattcatccaattatgtcttcacgttaaagatgtctaaataggcggaccgtgtcggcccggtctgaattagctagcgggccgtgccgtgccggcccacggcctcaagcgaaacctaggcacaacccattagattaataatcgtgtcgggccggtccatggcccgacgggcctaacggacccataacaacatatgtcgtttaaatgataaaaatatcttaaaattatgcatatttgaggatttcaaccttatttgttagctctaaacatttatttacactcaca

SEQ ID NO: 157410 - DNA, 487 bp, Zea Mays
cgcaaatttgggccgacatcgccatggacttcattgagggattgcctcgcttccatggcaagtccgtcatcttaacggtcgtggaccgtttctccaagtacgcccacttcattgccctaggacacccctacaccaccacctccatcgcacgcaccttctttgtcgatatcgtctgcctccatggattcccaattccatcgtgaacgaccaggacccggtcttcaccagcgccgtatggcgcgacctcttcaaaatggcaggcgtcaagctgtgtatgagcaccgctttccaccctcagacggacgaccaatctgaggtcgtcaacaagtgcatcgccatgtacctacactgcttcaacggtgaccgcccgcgctcctaggtggactggttaccgtgggtagagtactgctacaacacctccttccacacagccctgcgcacgactccgttccaagtggtttacgatcgagaaccaccgatgctggcc

SEQ ID NO: 157411 - DNA, 1357 bp, Zea Mays
cagagactgaatgttgtataacagtgaagttgggcaacctttgggctgggattcggctatgatccagtaattatttggccatggtcgctatagcaaggttatagctagatcatagggctacaactttgacacagagaacaggtcgagtcactacatggaattgggagcaaatctccctgcaagttgcgctgttaggctgactaattgaggatccaatggtacagtgcactgaaaatatccaaatccactgaacctcgccgccgacgagccgtgcgctcggattggtgccaccgcggtgattcgtgccaagcgcagatggataacaaagaagggtaagaatcttgacgctcggattagctcgggcttgctcatcgttgtgccgccgtacccacttgaaccgcgattggtcagaatcatcatcaccggcgttagccgctcaacggtcgtacgccacgtgccttggtgtcttaccacgtcatagtagcttgtaatacacacgtccggtgatcgccggtgagtttgccacggtgaaagccaccgattgcttgcgccagtgcccccttttctcttcggtcgccaatgcgccacctcaaattcacgggccaccgctcaagggcccaataaattaagcacacccttggctccgctatgtaattgtgcacccaacacacccactcatgcctccaattactcaccagagcccccgaattgctcacttcccccaaatcggttttccgccgtcgtaaggaaggtctcaccgtggccagtgcgctccaggtctgatcttgtccttttccctcttgtttcagcacccttacgtgcccctgatgctcctcgactcgttcaattaagctagaccatgctagatcgtcgggaacccctctgttcatatgtagttcgcgctgtcgccgtgggcagggtgatttagagctcaactctagcaattaagagaggggaaatggtcgcgtaaggttgaattcggtgtccaggaaaggggagggctagtcgttgcttattctagccagtacaagctcgttggagctcatcgtagcaccgtttgccgtcgaggaccacgggttgtaaagaattagaaagtggagggcctcggtgtaaatgtcagtgacccattgaaatagtgtgtggggttcttcgctagttattcaaactcctggggacctccgtgcaaactgtccactgcgggcgcgtgcgggtgcgtttgcctgttcacgggctgacttgggccagtcccgacccaatactattcacacttttcccttttctttttcttccaggattagagaattatggagtatttaaaatagccaaaacctatactcctagaattttataaattgat

SEQ ID NO: 157412 - DNA, 519 bp, Zea Mays
gcatctctaccttctgtcgtcagagatctcgcccttccgcgtggtcccaagctctacagatggtggatagccagagattttgcccttccatcccgcccttcccaccatccttgccccaagccagagattcgcggccatccgcgataatcaatcagcacaaatcgacggccctggttttctgttccttcaatcaccttcctaagtcgacgccaacctaccatcgacggcgaggatggaggtccttaaatatgtccaaagcgaggctgccacaccaatccccatcctccactaacgaaccaatatcttacaggtactctgcatgtgtgtgaagccgtctccgcctccaccaccctcggtatggacaatcgattcctcttcatctccctctcgttgcgtcgtctcctgttgcgatgtggatcgtcgatgcgaatggaatgcggtgtgtggtgtaattctggtggtttttgtgacctacgagtcatctccttaattccaatctggtatttattagtatgggtg

SEQ ID NO: 157413 - DNA, 751 bp, Zea Mays
cgtagacagtgatctaataaatagaatttaataatcatatctgatgaatataatttaataaccacatattcttcttgacacatattttgctcagtgctgcatgcatagtgaaagagaaacatcaaaagcatatcactgcatatcatactagcaagatcttggcggtaccgaccgtgttggggctgtgaccggtcgatatcgcctgtcgtgctgctaccacagtcggtagcggccatgggttgccacgtggcatgatctaatcagtttgttctatttttgaattatttttttaaatctggaacatggtctataaatagaggagaattgcttgagctcattcacatagccctcacttcaaatttcactaccacctcatcattctcctctcacactcgtttcattccaatcaagcgttgtaatgatgtcttcatccagcttcgacatcgacatgacaaaaaaagagttgttcgagttgtcacaactaagtataatgcagcagacgatggatcttacctctgagtcttccacgttgagcaggtgagcgaggcaacgttggatatacatctgccatgaccatgaagctgcccacggttggttgatgcgacgcttcaccaacccatgcgtctatcctccgctctactttcgtcgaaggtaccacatacgaaggagcctcttccttcacatcttggagaggctgggtgagcactcccccacttgactctttgaaccgatgcaatcaaccacaatagtt

SEQ ID NO: 157414 - DNA, 804 bp, Zea Mays
acagcctgtcgaaaaccagggtcaagtcttccactagggtcgaccctctcttggtcttgactacgatgtcatcgacgtatacttccaccttgtccctgatcaggtccccaaaagaattactcatcgcccgcacaaatgttggcaaggcgtttttcagaccgtagggcatcacgacataacagtaaagcccatccactgttacaaaagcggtatgcttcctatcttccctagacatctggatttgatggaaaccagagtaagcatctaagaaagacaaaaggtcgcacccggaggtggaatccacgatttgatctattcgcggaagtggatacaggtctttgggacaagccttgttaaggctggtgtagtcgatgcacatctgaagcttcccatttgccttgggggacgatgactgggttggccagccacactgggtgatggacctcttcgataaagtcggtgtctagcagcttctggacctccttctggatgaagtcctgccgcttgatggactgtttgtgaggattctgactcaccggcctggcgtcagggttaatcttcagatggtgctcgatcacctccctcaggatcccaggcatctgcaacggctcccatgcgaacacgttgacatttgcctggaggaaggcgacgagcgcgagttcctatttttcctccagatcacccgcaatgcgagtggtctgggaggaacccgcgctgagctggacggccttgacgaggacatcgtccgctcccgatggccgcacctttggcaccttgctaggcgccttggtaccagaggtcgac

SEQ ID NO: 157415 - DNA, 445 bp, Zea Mays
atcaagttgttctagacacaacctagaacctcgtcgtaagcccacattgcgggacccgctaggtaccgcaacattgacaccgaacaagctacaatggcccgtatggagagcggacatgacaaaacgccagattgggagtacgacagcgcacgccccatagacaatgccagggggactagagcggcccaggggcaacaagctaaaggacccctgattagaatacgagtcccaactgtaaattcctcccttgagcaataaaagggcggaacattcttccttctacacacaagcacacttgctgtaacacgctcctgagcaatacaaggatcaacactacactagactagggcctcgtcctgaacctgtataaccttggtgtctcagttcccagctcagatcctcatgatccagtattcagagtgagtccacgcttgcatcgccaccg

SEQ ID NO: 157416 - DNA, 781 bp, Zea Mays
gatgactaccgacaacaccctcaggggctgggttgcagctcgcgctacccaccaaagccggatcactaccggtgacaccctcgggggctgggtaaatgccggcaccaccctcgagggctgggttttctgcaacagccatctctaaggctgaaggatcctcaacacctccatgtgagtcgggcaatcttgaccaacgtcttgacatcgaagactaccttccaaagtcgatgatgcacgagacactgctcgggatacctctaatcccatgtctggaatttcagaacaaacaaccatcatgtcatcagtagtcggctccgatagcatatcctcagggacgacatcatcaagggcctgatcaaagtccgttatggatagttcttgaaggctgacaagaacagacagagctggagaaggaatatcactatccccccaactacctctgtaatgccggctattcttacgaatcagcgggacttcttcttcctcttcttcgtcctcatcaaaaatacggacaacagccggcgcacggtcacacgcatcgggatcaacttcggcatggtcacacccattgggatcaacttcggcatggttacaaccattgggatcaacttctgtacggtcacacccattggggtcagcttctgcacggtcacacccattggggtcagcttctacacggtcacgcccattgggatcagcttcaacacggttacacccattgggatcaacttcaacatggacgccaccattgggattaacctcagaaaggacctctgctggc

SEQ ID NO: 157417 - DNA, 533 bp, Zea Mays
aaagactatccgtacaaaaacctattacaggtgcagccggaccgacataacaaacgcgctagatcaagtgcacaagtcccccacgggcacgtccggatcagcgaacgcacacaacctcatcatacaaatcatcataccaattaaagttacacacatacagcgagggcatcacaccttacattggttcaaccttcgggatgatacccatctccctgtagttaaacagcattatccttagctcctcaccctcaaagagacttcgcaactccccctcacctacactcggcccaactggtgaggacaacaattcccgcttgccagccctatccagacgaagacgcccaccctccacctcactcactctacgcttcgccaccgtccttcgccgcctgcgcccagcactcggaccaggaaaaacttcagcattcatcacacgcggagaagcctccgccgcagccacatccaaggccgcaaaaataatccaagtcctcatccgaagactcttcagtccacacaaccgaactcccagaatc

SEQ ID NO: 157418 - DNA, 501 bp, Zea Mays
ggtcgtagtcctttccttcctcttcgtcttgcgcacgtcaatagccgcgccgctgtttttgccacccctgtgagaagagaaaacggtgggagcagtggttgtttcgccgccgccgcaggagatcctccactcgtcgacggtagggtctgcggtggggtggtcttgcgcttctcctagctggggaagggtggacgttgccgaaccgttggggattcgtcaccagggccgacctaattgctcgtcgaagaccggtctcactgtgaaccacaagattccgcggccaggtccgcccgtgcgtctagcagtggtgagataccttttccgtgtttcggcgtactctactctacgttttgcagtcattggcgtgggtaatcgggtcgagaatgagggaggcgtaatactccggtgagagcgccgccgtgcgtggaacgccgccggccagtagtgggaaagaaggtgggcgagttcgtgtgagccattagatcgtccagatgtgactcg

SEQ ID NO: 157419 - DNA, 524 bp, Zea Mays
aaaaaatttgaggagcatgacaatctcttttcaattctttggataagaggcaggaactgctgaattctgggtttcgcaagacccaaaggcaatccaagataagtgaacgacattgcaccaatttggcaattgagagttcttgagaggatctccatcttctcaggagtaacatttatgggatacatattggatttgttatagttgacctttagaccagtggaagatgcaaatgaatttagaattgcttcgggcaggcctccagtatcaaaagagtatcatcagcatattgcacaataggaaaatcctgttcacaaatatcaggtagaggaagctgaagcagattcaaatgtctggccttatttataatgctctgaagaaggtcagtcgccaagacaaacaacagtggcgaaagaggatctccttgtctaactcctcgtttgcagtggaaggatttcccagggactccattgagtaacaccgaagaagtgccagagtgtagaatgttccgaacccagttaatccac

SEQ ID NO: 157420 - DNA, 363 bp, Zea Mays
ttagggtattaaataattgtttaggtttggtccatttgtttccccaaaattcatttagaaagtaggccccaaaatatgataggagtgcacgtgatttcaccattactgtgaataaaatcatacaatgtgatggtgtatatgattagcaaaatagtttctatataatgtgatggtggatatggatgccgattagatgtgattggcggccatcgtgtcgtttgtatatctgcgtgtcggccatagtgctgatacttttatttgcaggttttgaaaacctcctcgtgcaggggaggtgctgccgaaattttctattgatagactttggttatatatgttatggaagaccgtaagtggatgtacacg

SEQ ID NO: 157421 - DNA, 495 bp, Zea Mays
gtacctgattgaaggagcatctcgcgcatagaaggaagaatgtcaagaaatgtccatctgttccttcagacataaaggcatactttcaacttaacatagataagacaaaggaaaagaagagttctaggttcaggcagcagctgagggcagatgaggcagcacgaacccattttggggacgatgagtatgaggatgaacttaaagcggctatgcatcagtcacgtgtagagcacgaatttagtcagagggctggtgcaaggtatgacaggggtggtggatcctccagccagaggatatctcgagggccacttgataggatgatgggaaggagtagggaacaagtacctgagcgtgttagagactacaatcttgctcaagcctctcgaccaaggcaacagaggatagatactggtccctggacaagtaagggaaggagctcgaaaaagattcttggtagggcttaggcaaaggcttgtcatgctattggcatcccgg

SEQ ID NO: 157422 - DNA, 656 bp, Zea Mays
gaggccgaagcctttgaggagattttaaatgaccgtggggacgtctgtgccttctcagatgcgaggggaattgcggctattttggagaagtcaggttgtgatcatgtgaaagctttggcccaagccgaagctactttatctattgatgacacgaaagacccctcggccgaagcgagcttagttggcggaaaattctttactgacatctgggaaaatggcggccgagggatggcccacgagataataaaaaagagcgaaaaggatactgacgatgcaagggaagcaacgaaggcagctgaaaaagctgcggaactcgaaaggcggataggtattgcttaatagcttttaactttatttttcatttttgtgacttcgtacttatttacattttctaccgcagtcgaactatctcctcccccggagcccttcgagtcattgatcgagccagaggcaaaggaaccagcagaaattattaaaatggccgaaagcattttggacgaagtcgttactcaactgctgaccgaagctgcagacaaagttttgaaggaagaataatggatattgtaaaaacattgctagaatattaatgtaacatttgctggactatgcttgtaatatttggtgctcatgtaatgtataaatggttttgtaattca

SEQ ID NO: 157423 - DNA, 590 bp, Zea Mays
gcaagtcaaagagcttacgccagagaaggcatctctctaggagagtctcagcatagtggaaggcgaggaagccaacacccgtgaggcctatcggaccttgaagatagactttgacaagaagctaaaggtgctcgcccccaaaaagaagatccagaagaagaccactaaccaaggatgccagacagagaagaagaagaagaaggcccctctagccctacctccccccagaatagatgactggtccgacgaagaagatgtatccctagccagcctcgacgaccttctcaaggcatttggggacaccttagacaaggaactcgctagtaccttgaagaacgctctcgtgtagtctccccctgtagtagtcttatgcttgtaatgtgatggtgtaatgaataaaataacttggttgaaaacaatttgcatgtgcatgatagtgactctcttccctggcagatggcttcggataaaaccacgcctaccgcctcagggattggagcaggtttcccccgaagagctgaaggggaagtcgttagagaagaaagtgaaacccacctccccgcacctccacccctacccttagacctagc

SEQ ID NO: 157424 - DNA, 333 bp, Zea Mays
ggaagatatttcgtgcagtggccaaggtccgattctaagaggaagacgccaaaaatggccgcccaatgccaccttctggtgcagtctgacatgtgcatagctctgctctataaatggttgcatcagctcttctcctctccccacgccacttttcctcctcccctctggttcagcgcaggagcatcctctcctccccatggcgtccctctctccagcaacatcttccccatggatgccccctgctccgagctcctcccatggcgccctgctccatgtcgttgaggacgagcagccgcattgtcagtctgcgcagccaccgtccagctcctcaag

SEQ ID NO: 157425 - DNA, 355 bp, Zea Mays
ctggaccgtggatcccagatcctgtggctacgactagatctttctatttgaaacctaggtcatcagatccaaaaccgagggcctagattgcatactgattcgtaaagtctgggatctaatctggcgcatcgattgccgatcagacggcccacgtagacggataccccttcggcttgcgcgtattacaaaagaacccctgtgcttatgagaaaccaacctgccatccacctccactgcactctgtgtctacagatttttaccccgagccccctgctgttctcagatattgaggcccaatccagtgcagttcaaaactgaataaataaattggaaaataggtttttaatataaaaat

SEQ ID NO: 157426 - DNA, 743 bp, Zea Mays
acgctccgagatggtccttggccttcccagacttcaccagcatgaaaaaatggtggaagagagaggtgcacagcgccacccccacgaacatctcgcacaggtgggcgaagatggccgcctgaaggatggagtggggtgtgaggtgctggagctggagaccgagatcctccaacagtaacatgaagaagggggagatcggcaacgccaacctgcacgagaggtaggagacaaagagcacaaactcccccgcgacgagatcaccaagggggggggggaagcgccgacccggatcctccaggcgtgcgacggcgcactccatccgagcaggcggcgcaccgtgtggagcctcctcttggtctggtagcgctcgggatgaaccagtgaagccatggctgctacagtggcaaaaaacagaggaaggcgagtgcaacaaaggcgtagaggactcagaggagaaaggacgcaacagttgaagaaagtgcgaatgcgtaactgctggccgcggaatgagtcccctttttcaaagaaggctctcccgctcgcgtcccaatcccatccaacacgcacctcgtgctcgcagtgacccagtccccgacatgggggcccagatccacatgtcacgcacctggagaactagcctccgagtgcgtagaagacggaccgtccccccggaagcaaaccatcacgcacgaccgcatgtcgcctaggggccgctgaaggatatttttaacttaggcggcggc

SEQ ID NO: 157427 - DNA, 519 bp, Zea Mays
cagaaaaccccaggcatggacggcgggttgttttcaggtaaaccgaggggctcctgtgcaaaaaggcctgggcgaaggggtacagggggatatcagccgcaggatccagaatcgagggctaggattagatctggcgcccaacgaaccggtatgcgctattggccgtgggattaaaatccgatggcccagattctatgaaccccgatataaccacaaccgcatgatctgagatctatggctcccgcttgatctattctgtgccgtccgatttccatctaacggccaaccccttttcttctaccacgggcagaccagaccaccgcacaaacaccgccacggcgaggtctcctaccaacggagctaatctccggacttcgggcacgagacccaaattcaaccggtcctcaagctatgggtatgaaagcgggtctgggtgagtggttcgtaccgaggattgtccacgctagcgagctgaccacggagaggaggaggttccgccctgacgcgcactccggcgtg

SEQ ID NO: 157428 - DNA, 443 bp, Zea Mays
tataaatatggatcactattgtttttacagcttgacaaactgctctcgtcgcatgtctttgttgtcagagggtttgacagactcaaacaaaactccaccaaattaagtaccttgtagatggtcttagactcagtagaaatgatattgttcagtttactctagggatcaatgatctgtaactcggatttctcataatgatgacccgccgcacacaggtatcactattgtttttattagcagccatatggatcaattctttttacagcttgacaaactactctcatcgatgtctctgttgtcagagggtttttgcttatctcttcactgctaggattttgatatcatcgtagccaatggaagcatttcatgctagcacttggtatgcacgattattacttaccattcatgatttttatgtatgatcatgacttttatatcatttc

SEQ ID NO: 157429 - DNA, 485 bp, Zea Mays
gagtgatgcagccgagttagtccagagatgtgaagcttgccagttcttgtcaaaacaacaacatttaccggcacagcagctgcagaccatacctataacatggtcatttacatgctggggactgcacatgattggacccttcaagaaagctaagagaggctatactcacgtgctagtcgccattgataagttcaccaaatggatagagtataagcctattgtttctttaacctcagccaaggcagtggagttcatacaagaaataatattcaggttcgagataccaaataacatcataaccgacctaggatccaacttcaccagctctgaattcttttgtttctacgaataacggagtatctagatcaagtatgcatcagtagcacaaccaagagccaatggtcaggtggaaagggccaatggaatgatactggaagcactcaggaagaaagtgttcgacaaaaatgaaaagtttgcaggaaagt

SEQ ID NO: 157430 - DNA, 339 bp, Zea Mays
gctaaataggggcgagggtgcgtgatcgaggcgacaggctaccagacctggcgaacgcggcggcgccccatgcgacatttctgttagagaggatgggtaggattctgaccaacagggcccacatggtagagagtaagatgagagcggggtggctataggagctgaccagtggccccgcaacccggtgaggcatccaagcgcgcgagcccgaacaggtagcgactgatgcgtgggtccacgacgccaatgagtaagcgaggtagggcggctgggctgagtgcagtgaacgaagtgggcccaggtggagaataggctgaaagggaggtagccggcccagac

SEQ ID NO: 157431 - DNA, 853 bp, Zea Mays
cgtcagtcggtcgcgctccagcagtcctaagaacaacgagcacttgggccctttcttcttgcaactaatccaggtccaaccccgggttggtgaggtggacaatggatcctactgcattggaactgctatgacggtcggccgaggcggaggcattggtgcaaccacacgtctaggtggtgcagcagcagccggacatgacacacggatgagtcgggcccctaagtgcaggtgtgggccgcacaaggctcaattcgtgactgaatgaggtttagccatgaccgtctccagggccgccctggatctcaacaagggcttcttctctgtcggggcgatggtgtgggacaacggggcctccttccccacactcgctacgtggtgcagggcacccctttggtccatgatgcgtgagaggcatccaaagtggaaaacatctccgatgatgaagctgaagacggtgttgaaaacaatggccctgtagctatcgtatatgaatgttgcgctctctgcctagcgcgccagcaatcggagtttggtaccaacgtcacactacggggtataccacatagtgcttttgggaggatgatgaggtcgatcgcaactcgatgggtcgtgtgaggcacgatggaacacaataaactatacaggttcggaccgctcaagcgcataataccctacgtcctataagtttgtggatgtgtattgctcggtgattagaggttacaaagggttcatgttgtagaagatgactatgcttctgaggtctctctcattttcgtaggggctcctcctctaccttattcccgaccgagaaagagttacaacgcatggcccgatacatgatcttcgtccaccc

SEQ ID NO: 157432 - DNA, 356 bp, Zea Mays
gtttggccactttttgttatttggaccaagtggttttggcgccagcaaaggggtgaacacatctgatctttaggctagggctgattttgggacttagagaaaaatggatggctctagtgtgctctccacttaggggcttgatttggggtttttgttgggcctttttgtaatacttcccttactacattttgtagatttattaatgtacttcatctttggtaaaggtttcacttcatgattaggccatttgcataatcttttcccttttatccaatgtttggggtttaatcgctcaagacgggaaattagggttttagaatctttttcatgggtaaaaaatgcatgaaggctagggc

SEQ ID NO: 157433 - DNA, 302 bp, Zea Mays
ggaatacgcatagggcagacctaggtgcgagtttgtgaggagctgcggcagacaagttcgggtagtatttgcagccgaacacccgtagatgctcatacgccgaaggagtgccatgcatggcaaggtgcggcgtagagaaggcaagggtcttggttggcaggatgttaagcagtcctgttgctgtggagagtgcctcaacccaatacgagggggcatagatgcctggaacagaagggagcgaacaacattattaatggaccgaatgatgtgttcaactttaccgttctgaggtgaggtgtagg

SEQ ID NO: 157434 - DNA, 337 bp, Zea Mays
taccccccttaacaagaatctcgtcctcgagatttaggaagaacgagggaaaagatggggaaaatctatgcgaagctcttctctctcccaagtagcctcgtcttctccatggtcactccattgcactttgaacatctttatcaccttatttcttgtaactcgagtcaatgtatcaagaatcttaaccagatactccgtgtaagtcaaatcaccctgaacactgagctcctccattggtaattgttccttagggacacagagacacttcttaagttgagacacatggaatacattatgcacatcagatagattatcaggtagctcaagttggtatgcc

SEQ ID NO: 157435 - DNA, 427 bp, Zea Mays
aacatcaacaatttctccctcctgaccatccattcccccctagacatcaagaactttacgaaaggtgtcgtagtgacagaccgcccacctgcaacgatgactgatgccaaaatttgtcaacagatagatgggctcgtggccaatacagaaggtggttttgtgggatatggtgagcagcatatgtggacacaaaagtttggcttgactcggctcccctattatgatgacctgctccttccacacaacattgacatgatgcacactgaaaagaatgttgccgaggcactgtgggcaacaattatggacattcctgataagtcaaaggataacataaaggcaagagtggatctggcagcgttatgtgatagaccaaacctagagatgaagccgccaagtggcggaaagacgtggagaaggcctaaggccg

SEQ ID NO: 157436 - DNA, 283 bp, Zea Mays
ttagcgtgcagatcttagcaaaacacccgtgtacggtctcttctctgcaccaaatcctacctttttgatgtgagttccaagcaaagatatggtcggggtagagagatatgggggtgagaagttggctctgttcgagctgtccacaccaagacaaaagccatgccaagtcgtgtcaaatggcttagggttgggtttaaacttttccagggtgttctaggggtatttgggcgccattttgtcaattgggccataaggtttttagtttgggaacaaggtgaacatg

SEQ ID NO: 157437 - DNA, 1207 bp, Zea Mays
ggtgaagccattctccacctgatcatttgtagagataaaacgtatatctagcaattgacgtataacttcatcacgaacaaagtgataatccacctcaatatgtttcatgcggccatggaaaaccgggttggaagcaaggtactttgcacccatgttatcacaccgccatagacgtgcagtttttggacttaagatgtgtaattccttgattaaattacgtagtcatattaattcaacagtagcatttgccattgctttgtattctgcttcagtgttggaccgtgacacagtcggttacttcttagcacaccaagagatgagatttgagccaaagaaaactgcaaagcccccgattgacttacgatcatcagtacacccggcccagtccacaacatagttgaggtggacttgtgaatcttgagaccaatggtcaaggtaccttgtacataccacatgatgcgttttacagctgtcatgtgtgtagacgttggtgactatagatactgacatgctttgttgatagcaaaagaaagatctggccaggtgagagctagatattgaagtcctccaaccatgcttctatacagtgtaacaacctcatgatcaagtggagtgccaacatgtgctgataacttctcaaaggttgacattggtgttgccattggcttgcaatgagacatctcaaacttctgaagcaagtcaataccatatttatgctgctggagtaaaagcgcatcaatacctaagaagtaatgaaggtcaccaaggtctttaagagcaaagtcctgcttcaaatcgtcaagcaaagcatcaatagcgcctggtgacgagcttgtaactatgatatcattcacatacacgagcacatacatagtgaattttccacgatcataaataaacaaagatatatctgcctgagagggaacaaagccaagatcctgtaattttatgtggaggcgagagtaccatgcacgtgatgcttgtttaaggccataaagagctttgtccaacttgcagtgatatgatgggaacagaggatcctcaaacctaggagatttgcttcatgaacacttcttcctctagaacaccatgaagaaacatgttctgcacatccaattgacgaagaatccatcctttggataccgcaacagaaaaaacaagtctgatagtaacaaacttgactacatgattgaacatgtcgtcatag

SEQ ID NO: 157438 - DNA, 646 bp, Zea Mays
gcgggggcgagcttcttcagtttcttatcatagtccatttttagggtgcggtaagcttcgcgggtattggtctcttccccttcggccattgagaggctctcttgaagggacgccttttcttctgaaagttccctgactttttgctccaggctttccacctgggaggttagggaggtgcaatggagggcgaggtcatcatattggttatcaagggtgtgaaggtatccggccatgtagacaatggtgggatcattttcaataggatctcctcctgatagggcctggagtcttttcctccaggtgggggtattcttgttgctgggtggaaagtagcgaaggggggtttcaaagatcactttgttgtagttctgacacagttgtcggagggctttttcgggcaacattttggcaagtatcggggaaacggtatccggtaacagtgacttggaaggaaggatggtttgggtaatttcggctttctcccaggtagactgccatagagcatttctctattccgccttcgatatgctccgtccagacgtatttcggctttttgcggattcccatgcgaagcgcacagcttcgcaggagatgcgggaacccttccacctctgagcagtaggatgtcctaatggccagagagtct

SEQ ID NO: 157439 - DNA, 411 bp, Zea Mays
ccacaataaaatccatgctgatgtcatcccatttccatgaaggtatcgacaggggttgcaaggcaccaactgactttaagtgacttgcctttatcctctgacatgtgtcacattccgatatatacttggctatctctcttttcatcctggtccagcaatacatgggtttcagatcacggtacatcttggtgcttcctaggtgcatggagaatttggagaggtgagcctcatccaaaattttcttcttgaggtccctatttttaggaaccaccagtctgtcttcaaaccatattatccccttgctgtcttggcgaaagcacttatacttctccactttctggttaagattttccttgatgatttgcactcccttgtcaccgagttgggccataataatctagtctaacaagg

SEQ ID NO: 157440 - DNA, 631 bp, Zea Mays
ggcgaagcacgggcggttggagtgggtcacaatggtggggcgaatttggcctgcgggggcctatggcggccggtccacggcgcagtggcgggtgcccgcggcggcgaagccgccagtgaggtttccgaccacgacaggggggcaaagtggtgtcgagtgatcgcgagtgtgtggcggagctttggccatagcttaattaaacagagagacgatagagagggggaagggagctcaccggagcaaggcagggggcacggcggcgctcgcttgaacggctcggggaggagagcagtgaggatggctggtgttgtgtggcgaagacggtgctcgagcgggcccttttataggcgctcgggggagggagggggatgggggagacgacgagcaccggcgagctcgccatgggtatgggaatggcgctaacgccgattgggacggctcggacaggctgagggggtgagtggtcggctcaagcacagtggcggggttgtcgcgggggctggcgggcattaatggcgaggcgacgaggcgaggggcgctcggcggcgatcgcgccggtgagggatgggcgagggagaaggagctgacgggtggggtcgggctgctagtgagagaggttcgcgcgagggag

SEQ ID NO: 157441 - DNA, 633 bp, Zea Mays
cttagaaaaggaaaagagaaaagaaaataaaaagaaaaagggacagaaagcttacctgggccctatactgcattccggcccacctaaccctcatctccgtgtggcccaccttgccccgcgcccgcgccgcgtacgctcgctggccagtggccccactggtcagtgccagccctcgcgtccacgtacctcatccaatcgcgcgcctggcatcgctaacataatgggcctactcctcagtcgtcggctctacgtcgctgtccggtgggtccaagtggtcagatccgccctcaatggattgctgaggatggcgggcacgccgccggcgcaaactccgcgcccaccttgctgatgactgcgcagggttaaataccgggtcctaggggccaccttgcgcacctttcttgaacctcccgccgccacaatctgtctcgtccaccattttggccatagtgtggcgcaaagattccgccaccattcaggatcgacgtccctcgccctcatccattccgtggacagctctaggtgttcgggttgccgcgacgggcattgcgaagggaggtgcggtggctacgaacaactggtgcgggcagaatttctcgccgtagttgggtcttcgccacgggatcgcgccat

SEQ ID NO: 157442 - DNA, 547 bp, Zea Mays
tctcgtgcaaaattgtgaggacccctcgagggggtgcacccaatgaatcaactctgttttatgctaaaagatgaacaaagctgtagcacagcgcatcacaaggcaatcaggtcactacaccctcgaggggtcctaagtggatactgccaacttaagccgattgctccgttagtagggtatagtggtcaccctaagtcgagtaagcgtgagcatgtcgcaccgtcttaagtcattgccgacttaagccgattgctccgttagtagggtatagtggtcaccctaagtcgagcaagcatgcagattggtaataaatagttcgagcacccttgagaatgagatctttttattgatgatgtattttccgattacagaatacaatgctgccccgatagcttttgaaatctagctaggggtaaaacttcttgagatgctctatattcgatgaattccctattttcgtgccatccatctgagtaagccgatatgatcctggctgagtgacttcttctaccatgaatggcccttcccatagtggtgacaatttgtg

SEQ ID NO: 157443 - DNA, 761 bp, Zea Mays
ggccgagccggtgcccaggtatcccaatgcgtcgcggctaaagctagaggcagctgaggatacggtgaaacagaagaggagattactcacccgccaagcggccatggtggcccgcgcaccacacggcgcggcggcaattctccccgcatggcattcattcatccagccggcttggcgacgcttgaattaatggccgaggaaggtgtggcggggggtcacttttatactcggggaagacgatcctgacggatggggcccgccagccaacgtctccgagccgtgacctgcgcgcgaggtgagttccaggatgggacgaaggttggccgatgccagcggaccatagcattggatcgaggacagaccgagctcgaggaagtccctgtgccagcgatatgcgcatgaacgcaggatgtggagtttgtgcggctagcttgcatgcttatgtcacacatgcgtcatgatgacctcaattgcggcaagagaataaagaaaaagaaaatggacgttgacatgggctgcaagtaaagcatattgggctggattagtgacgtccgaacatagattattcctatttctattgggattagtgagcatattaggctgcacgtggtaggagaaatacttttcttctctttttttctcttttatgttttattcctatttctattttcattttctaacttaaattcaataaagttgtgaattacaatttcaaacacaatgcacaaacgattaaaacttagcatgatatgtaaagtcac

SEQ ID NO: 157444 - DNA, 632 bp, Zea Mays
ctgcctgtatgccactttgccctgcgtggatttcatccagtagctgccttcatgtagccgaatgaatacatttatgaggactcctcctcacctcttctatatagcagaccccctatgatggtatagtgggctgattgccttgcgatgcgttctgccgcggccttgtcgtccgattcttcctcgttttttatgtatctgataattggctctctccagtctttgggatatgtttctgcttggcgtatagtgttgctttcttcagcatgctctatggtgacgcttggttgttgtacttcttggacgaaaattctaggtggaacctaggcccgactggaccccaattttgacaacgcatctgatgctgcattgtgatcccttgccatgtggtgaaattacaaaccctcgaatttgtcttccagcttccgcaccgcggcgcagtatttgttcattgagtcggttgagcagtctcagtccttgtttacctgactgatgactactagtgagtcgtcgtataccattagccttttgacgcctagcgaaatggcgatgcttagcccgtggattgaggcttcatactctgcggcgttgttggaggctggaaacaagagctaaagcacatacttgagttggtc

SEQ ID NO: 157445 - DNA, 1900 bp, Zea Mays
ttccaaatcagatatccgcctctgaagcggcatcggattccaatgtgtcagagacagagctctttctgggacagaggcaccttgtgatctcagctgaccagccatctcgtcgaccaaagcctggtattgaaaacaaatgagtgcaaagacagtattttgcctggagtatagccagatcgggaaaagccaaattacctgaaggttggaaaataatgaaggaaacccaaaatcatgagaagtcaggtggtggctcgacgaaggaatatcaaccggggcaatctgaagagcatcatcagggatcaactcaacatcaccaacaggaatcagaactctagcgtcaggtgcgccagcctctaaggcgactttctcgtttaaagcatgtgatgttgccatgtcatcagcatgtggaggagaggatccaacatggacatccatggaggtatgagaaggggaacccgcctggacaccctcgggggctgggtcgcagcccacactgcccatcggagccagatcaccaccggcaacaccctcgggggctgggttgcagctcgcgctacccactcgagccggatcattaccggcaacaccctcgggggctgggtaaccacctgcaccatccttgaggaccgggttctctgcagcagccacctctgaggctgaaggattctcactcacctccatgggaattgagcaaccttgaccagcttcttggctccgaagaccgcactccaaggttgatgaggaaagagacgctgctcaggataactcctatcccacatctggaatgtcagagcaaacgtccatcataccaccatctattggcttggatagcagatcttcaggaaccacatcctcgagagcccgatcaaaatttgctatggacaactcctgcagaccaacgagagcagacaaagctggagaaggaatatcactactctccccactgactatgtagcgctgactattcttcagaattaaggggacttcctcctcttcttcttcgtccttgtcaacaacacgaacaatacacccattggggtcagcatcagcagggtcacacccattgggttcagcatcgtcaaggttacacccattagggtcagcattggtaggatcacacccattgggttcagcatcgtcaaggttacacccattggggtcagcatcagcagggtcacacccattggggtcagctccagtaaaaagttccactggtacttcttcatcagcaggagcagaagggccagcatcctggtccaaacacgacactcgccgaagccgcctctttttcttcttcttcccctcggtaggagcagatggatgactggccgggcgaaggcgctttgggcgagtactattagatttttgagcattcaaggtttttccaggctctgggatagttgcaacagctatggtttcagcagggaccgagtcagaagaatcctcagccaacatgtccagcatagcacttatctctgcattgcttgggtttataggcatctcaaagtgaacttgcctctcatcattgggaagatcaccaattgaagcaaccagagcctcaacttcttcgtgagagggtcgcactctaagacccaagccactgccactagcaggaggattggacacaaaattgaaaaaagacttggaaggtggcagattccaggcagaatatgcaataggagcaccaatattcgatactttgcctctaagaatcatctccagtcggcttaccaaatccacagcaggaatcttcttgttggtaacctgggttgaatcagtgacaccactatacaaataagccgggtacgctctgtcctttagtggctgaatactcttaaaaacaaagtctgcaactacagcttcagcagtcagacctctctccttcaacaaaccaatttca

SEQ ID NO: 157446 - DNA, 523 bp, Zea Mays
gagagagagaggtttgctagtttgctacgcatagcaccggttagttgtgctataaacgctgacagccgtcggatgcagccgccgatgaaattgcccccgctagcgcgcattaccggagtcagcgctagcccaggatttgcagcagttagcgtgtggcccacaactccgttagcatgcgccgttctcatatgtacgtagttttccctgctccgttgtgatctgagtttccctgctccagttcgatcgacgtttcgtccaggtgcaggcgtgcagcatcggtcccccatggaagccagtgtagaacatgcccgcaaagggtaattatttatatcataattattttccttttttagttactgactacttgttctaatctccagttgacgaatgtaaagacaaagacaatgtagattttgatgatgattctgaatatgtcggtctgtcgactaaaatgattgttgtattctgaagcaagttataaagatgctcatgtatttttttatcttatcttgtggccccttat

SEQ ID NO: 157447 - DNA, 810 bp, Zea Mays
taacttggcgaggacgctttgggcgagtacccttaggctttcgggtgtccactattttgttaagctcttgtccgaccataatagccatcggttcagcatgggtcgagtcagaagattctccagccaacatactaagtacatcatctatttctgcatcatctggacttgccggcatctcaaagtgaacttgtctctcaccattgggaagatcatgaaggggagcaaccagagcctcaatgtcttcaggagagggtcgcactctaagacccagaccactatcactagcaggagggttggacacgatattgaaaaatgacctatgaggtggcagattccaagcagaataggcaacaggagcaccaacatttgataccttacccctcaggatcatgtctagtcggctcaccagatcctcagtaggaattttcttgttggtgacctgggtagagtcagtaataccactgtacaagtaagctggatacgtcctgtctttcaaaggctgaatattcttgaaaacaaagtcaggaaccacagcttcggcagtcaaacctctctccttcagcagacagatctcagcaagcagaaccctagcttccgtcacctccaaagttgtgggagactcaacccaactcggagtgcatacatctggctgtctccccgaccgaggggggagggacttgtagtggttttccacaataaaccacttaaggcgccaccctttaatgctgtccttgagaggaatgtcgaggtattctgtcttcctcccgcggcgcatctctaaacttgcaccaccaacgagctggtgctgcc

SEQ ID NO: 157448 - DNA, 575 bp, Zea Mays
gaaataacgtggctgaggtaagaatctcttgtttggcaaaggaacacttggtcagtttaatctgccatttgtccttcctgagcagctgaaagactgattcaaggtgagacaaatggtgagacgatgtagggctgtatattaagatgtcatcaaagaacaccaggactgatttacgcaacagaggtgctagagtttggttcatcgccccttgaaaagtagcaggagcaccagaaagaccaaagggcatcaccttgaattcatagtggccttagcgggtttgaaaagctgttttgtgttggtcagcagaagacatacggatttgatgaaagcctgctctgaggtccaaggtagagaaccatgcagccctgtggagttcgtccaaaaactcgtctatcactagcatcagaaacttgggtttgacagtcatggcattcaaatgcctatagtcaacacaaaaccgataggtgttgtcctttttattcaccaatataatcggagatgaaaaggcactagtgctaggctgtatgatgccggtttggagcatctatgctatctgagtctcaatctcggttttg

SEQ ID NO: 157449 - DNA, 779 bp, Zea Mays
aaaacccttaattgaagagttgaaggagatttggaaagaagttgaaacatacgatgttttaaaaaaacagatattcaaacttcgagttgcgtatttgtggtcggtgcatgacttcatggagtatgctattttaaccggttggagtacacatggtagattgacatgtccatattgtggttctgatacagattgcttccgtcttgctcatggtggaaagatcacttacttcgattgtcatcgacgctggttgcccaggaaacacccctttaggagcgagaagaaaactttataaagaacaccatggtcaccaaaggaccgcctaaatgtcttaacgcagcagaaatatatgctcagctggacaaccttgtcctaaatgaaaagggggacaagtacgaaggattcagagtggaccacaattggacacatatatgtggtctctgggagctcccttatatgtcatcattgattcttgtgcaacattaatgtcatgcaccaagaaagtaatgttgctgaagccctcatacacacttgcatgcattttgaaaaaacaaaggacgatctgaaagctcgaagtgatctagcaatgctttgtgacagaccaacccaagtgctcaatgacaacggcaagccgccacgtgccttgttctatcttacctctaaagacaagatcgaggtaatgagatggatggaaaaaaaaattaaatttcccgatggttatgctgtgggcttgaaaagagctgtgaatttgaaaatgggaaaactaactgggttaaagagcc

SEQ ID NO: 157450 - DNA, 792 bp, Zea Mays
ctgagcatgttggtacgaatgtcaaggtactgaacataaacttgtataccaatgtgaacttcaaggatgcatcaactcttagttgatctttgcgacaacacctacttggtgcaccaaatctcaaagatgttcgatagtagatatatggggtgggttacaagatcaaaagttgtaggtacatgcatgaaggacaccaagatttagatagattctggttctcgatgtgatatgataccctacgtcttgtatggggtggatctattgatgtattcttcaactacgatgtgatctgatgcccttaggggttcccatgtccctcttattttatattccaaggagagacagacgaaatgaccaactttcatctcgcaaccgagttaagtggtatggttccgacatgaaatggaggcaacatgtggcatcatcacaaagggtctgtcaatgtgaagcaacctcgtgtggagcacgtggccattagatggaaatcacaggagttatccatttcgccctggctaagtgcatatgctctatgtatgtaggggtagtttagactagtgaaataaccctttataaatagatggtggccattgtggacaaccatctttttggttagcatattagtctcttgtttacaaaaccctaatttctattttcttagtttagccgagatccacatatgttttgaactcgatgtctgtgcttttgtattcttcatcgcattattcaaaggtagggtggccatatccatccacagagtttgtcaaatcatgttcttagtttttggatgtgctg

SEQ ID NO: 157451 - DNA, 537 bp, Zea Mays
ttccatttgagagacagtcatcgtcgttaagtttaggccccttgtccttgtccatttgattcttggtcctgtcattgttagcacaaaatagagacaaaaaggcaacaaacaatgtgaaccctacaactatctctcagggtggtggtggagatggtggaatacaaattatgaagcgtcttaccccgctcttacaacgttcttaccagcactgcaggtggcaaacggtgaccggtgtgactgtccaacgagcgtgggtgtgattgcaaaagagtacctgttctgctcgagagaaaattggagctatgggaaggctaactaaatatatatatgtggcacacaagtcagtaacagatagcaatgctgaataagtgttccaagtactcgtcctagttgctggcctagaaaatgtaatagaacagttggaccaaagcacaagaaaggaggtacaagtatctagtgggaatgacagttctgtaaatagggcaaatttttcagcactagtagaaatcaaaggcgcgcttcaaaaggagtaccatc

SEQ ID NO: 157452 - DNA, 543 bp, Zea Mays
gcgtgcttgaaatcaaaccccaatgattttaatagctgtgtgccagccacggttgacgcgtcttgttcttgagtagtcggagcagaaggcggcccttcagtagcaaggcgacttcttttcttggcgatggtctttttcacacgtggttttggtggatgacgaggagccattgcgtcagacatcgaggaattaccgacactagtgcatggcatgacagcagttccagcagcagttttgggagtagtagatgacacaataggggttgcggctgctgcatcactggtagcatgtggtagccagttctagttcaaggtgtccctttgtgaggatcaccggtgggttagcgttagtcactcaacaattaagccatggtccatggaagaccacaatcatataagattatacaagtagatacaaagtaaatatggagtgggaactatgttctcagttctcaccttcctgtgtcgccgtcgtcacctgaactttgaggcggtgaggaggaagtcatggtgcttacggcaatgggctgtggctggagctagg

SEQ ID NO: 157453 - DNA, 560 bp, Zea Mays
aggatgttgcttcagccgcctcaagcgagcctgcgtcaaagaggaaaaaggtgaaggttcttactcaccgaccgcgctacattgaaccggccatagtgcctaaatttggtggtgagacatcttcggctattgaagccaaagaacctgcccttacacagaggattgaagaaccggctgcaatgccgaaggttgacaagattgaagaaccgagaaccgaagtgacaaaaatatcagaagttctaagcccttcggcaggagtggagatgccgaaaactcaaaaaggtctagcagcgaccccaaaagaaaaatgatgatcaacgtactagatgtgctggagacgataaagacttcaagctctactctagggaaaactgtcgaagcttcaaaaacgcagactgagacaaaactaaccaaagccgaagctgcaaagagccaggccgagaccgaagctgggtcttcagagcccgccaaggagaaatcattggaaaccggagaaaaggaaacggaaaaagaagctgcaaaacaaattctgcctgaaaaaactgtcacttctactcccg

SEQ ID NO: 157454 - DNA, 632 bp, Zea Mays
ccccaccctagcttagttgtaagtactacgacaaaacactttgtccgctccacccccataacaaaacttgggctcaatttactcatgacgctatttcaattgatccagtatatctcctaatgagatttgtccttttgtttctctgcatacaagttgagttttcacattcaaattccatggggtgatagaggacaaaaatgttcatagttgcttttcatgaaatttggtatcccaaatattaatttagtattagatggtcttaacctatgaagaatgattattaaaaattctaatgtacttttcggtatatgatagatgtcgtttctcatttgtcactccagaaaatttgaactttaaacataagcagagaaacaagaaatatgaatctcattaggaggtagattgtaccaattgaaatagtttagatgagtaaaatgatccgggagtttcttaaagggtaaggtagacaaacttgattgttggggattgtaaaatggacttcttatttaaacaagttatgtgaatcaaaatgataattgaagtcttgaaccaagcacttgactagatcaatagtttgctagacagcatagaagctataagtactatctatccattaaatagaggccaaattg

SEQ ID NO: 157455 - DNA, 620 bp, Zea Mays
gtgggaggcagcgttggaggcggcaccaaaaccatcaaagccaaagagatggagccgcagcacggctcgcttcccaccccaaagagttgggggtgcgtgggatggagccgtggctcaacccgctgtccaccttcacgaggctggtgatcatccttccctccgaatgctagaggaagaagcgggaaggagcgtcgcctccacggacatcccgcggaggtaggcgacgatggctgcctgaaggatgaagcaggacaccacaggtagaggctgggggctaagcccctccagcagctgcacgaagaaagatgggatcggcagagccaacccgctggggagtttggaaacaaagaacacaaactctttgacagcaaggtcgccgagaggagagacaccagcacaagtcctcccggcaaatgccagcacaccccatccgagcgggttgcgcgccaagttgagtgccacctcgggctggaagcgctcgcaagggtctagcaaggccatggtgactacggcaacgcgaagcagagaccttgaaggaaaaggggcacggagagctcggaggcgaagggacgccgtgagagggagagaagcaaggcatggctgctattcgagggatgaac

SEQ ID NO: 157456 - DNA, 1278 bp, Zea Mays
tcgcactcctagctggaccgagtcccccacagaccaggaggtggctgaagcaggggctctgctagctgaagttggattgttgaaagagaggggtctgactgcagaggctatggttgttgactttgtcttcaagaatattcagccactgaaggatagggcatacccggcctatctgtaccgaggcctagctgactcaacccgggtaaccaatagaagaattcctgctgtggacttggtgagccagctcgaaatgatactcagaggcaaggtatcaaatgttggcgcccctgttgcatactcggcctggaacctgcctccttccaaggcctttacccattttgtgtcaaatcctcctgctggtgatggcggtttgggccttagagtgtgaccctctgccgaagaagttagtgctttggttgcttcgcttgaagaaattcttgatgatgaacggcaggttcactttgaggtgcctttggatcccagtgatgcagagataagtgccatgcttgatatgttagctgaggattcttctgatgccgctcctgctgaaacattggtggcggtacccatccctgaggctgacaaagctttggacgctcagaagtctgtcaatgttcgtccaaaacgttctcgccgagccaatcaagcctcttttcctgcttaggggggagaaaaagaagaagagacgtcttcgtcgggtgtctagcttagatcagggtgcccgtccttctgctcctgttgctgaggaagtgttgtgacttaatttactgaagctgatcccaatgggtgtgactcgtctgacgctgaccccaatgggtgtgctgtccgtgttgttgatgaggatgatgaagaagaggacaaaatccctctgattcggaagaacaaccggcgttacatagctagtggggaaagtagtggtgttccttctcctaccttgtctgccctcgttggtctgcaagaattatctctggcgaactttgatcaaactcttgaagatatggttccagaagatctgttatcagaaccggcagatggtggcgcgattgatgtttgtgttgatgtgctcgatgccgggttggggtcatcccgggcagcttcccgtgcctcatcgaccttagagcgcggtcttgagagtcaggaagctggtttggattgccctgctcccatggaagtgactgagggaccttcagccttagaggtggctgctgcagataactcgaccctcaaggatggtactggcgcttacccagcccctgagggtgttgccggggatgattc

SEQ ID NO: 157457 - DNA, 341 bp, Zea Mays
gtgatgaattggttgggccgtactccagagcagaagataacgcattatctgcggccttcgggaaccggaaaaagaagagactaaacagagtttttgatgctattgggttcatgtaccctgactaccgctacccgtctcgggggcagaaaagaaaaagtgcggctcctgtgaaggatgttgcttcggctgcctcgagtgagcctacgccgaaggttcttactcaccgaccacgctacattgaaacggccacagtgcccgaatttggtggtgagacctcttcggctaccgaagccaaagaacctgtgcttacgcagaagactgaagagccgactgcaatgccg

SEQ ID NO: 157458 - DNA, 271 bp, Zea Mays
gccgcacagccaccggtgccgaacctggcagaaggttgatgcaatgatcgcgatggcgcggtggtggcatacctgaaggctcagcgaacaccggcgtgaattcctccaataaggctggaaaaaggtcatcagagctgcacacccgaactgatggtgcccgcgatccggctacgccggtccagcaaacacgatggtcgtgatgccagaacgacatggtgagtgcactgaaatcccagaggatgggtccaagagaggccaaccattctgtccc

SEQ ID NO: 157459 - DNA, 310 bp, Zea Mays
cacaagcatagcataacccattaagtctcctaaaatccctaagttgtcttgctcttgtgagatctgcccctggtccttggtcatctactttctggacaaccacaggttgtttcacatgcataggcaaccctggtcgttgtccctgaaatttattgcactctaacacctcctgttgaatctgagccaagtgaatagcgcggtccaccgtagaaggtgtttgaacctgcaccacatcctgcaattcatacttaaggcctctcacaaaataggtgacaaagaaggtatcatcaaactccgagttatgaacagc

SEQ ID NO: 157460 - DNA, 505 bp, Zea Mays
ggacttgaagcagaagtattggtgatatggactaaagaaggatgttgcttcacatgtagcactatgtgatgtttgctagagggtgaaagcggaacatcaaagacctgctggttttgctgcacccgcttaagatacctgagtggaaatgggaagagattggcatggacttcattgtgggattaccccgcacatctgctgggtatgactctatatgggtgattgtggacaggctaactaaagtagcccactttattccagtgaagaccatgtattcaggagccaagctagtagagttgtacatggcacggattgtgtgcttacatggtgtgcctaagaagattgtgtcagaccggggatcacagtttacttctcgatattggaagaagttgcatgagtgcttggatacaagattgaattttagttcggcttaccatcctcaaactgatgggcagaccgagagaaccaaccaagtactagaagatatgttaagagcatgcgctcttaa

SEQ ID NO: 157461 - DNA, 1026 bp, Zea Mays
agttgggtcatggagccggtacagaacccctttggaatgtgtggaatgaccctgtgagggtctcccatgaccgagggttgcctttgtcatggcgaggttgactctgttgtggccgtcgttggcacgacaccttctttaccttattggggtactgttatccttcagactggaagggtaagcagcaatcaatgatgagttggtgatggtcgtaggcagagcacgatgggtgccaaggacagctaccctggacccatgggtcccaagctgttgatctgtgcagccatgaacttgtgtcgtggccgacgagccgggtcttagcgatggtcgagggcgaggttaggcgacagtcgcttggctgccgatgatggagaggtggttgaagctcatttctatcctactaggggtcctacctccctctggacccgaagggcaagcaacaaccttttgctccttgacgcccgaaggcggtgcttaggggagagagtcggcagctactctgaatggcatgcggcagagccttccatcctgactcagcctatcccgagcaccataggcttgagcgtgacgggttaggtctctacgcccgccttaacccctacaaatgcacatggttagccttcatgagggtttcccatggccaacagactacctcgtaatgacgaggtcggtgtagccgtgctatcgtccttcaggctcgaagggtaagtaatagctcgctctgctttggcagtagcaagggtagaacttggaggaggcgatcgaccaccgcatcgaacgccatgacctagaggccaccagctgacacaacctacctcaagtgccatgggctcgtgtcgtggccaacgagttgagccttggcaaaccaaagcctggtagtaggtcgttgtagtggattgtgctggtcttagcgttgccctacccttgaaacaccataggcacgaggtttgggtctcaatcgttgttgtgggtgatgcagtgtgggcctatcgcgggatttggcctcgcccttgtaaggccctcggcggg

SEQ ID NO: 157462 - DNA, 407 bp, Zea Mays
cagaaatttcgcgcagtcaatacctttttctgcgcgcttttactgcgcagtttgaccagaaaccggttgaaccggttgaaccggttttagaaccggttgaaccggttttctgtgttctgaccggccgactccacccctattttctccctctcccctcttctcttcttctcagtttcactttccagccgccgccgcccacttttcttcctctctctccttcacaccttctccactccaaaaacccacttgtgccctctcatctttggaagatttgttggagatccgttcatcccggcgttctccatcattttcctcaatcttgttgggatttcttgactaaatctccggatcgaggtattgccctatttcatttctttttactcgatcctacgcgttcttgattatct

SEQ ID NO: 157463 - DNA, 523 bp, Zea Mays
cgcgcttcggctcatggtggttgcatggttggttgccatgcaagagataagacacatgattgttaggcaggacgtggaggaaatagatctacgtgtttcgcgcgctcatgatggttacatagttggttgcacatgcaagagataaggttgttcagcgagatgtaaggagaaaaacacatatatatgctctatgtgtgacgtacgtccatgtccataggactgtagtagcttgatttcgaagaaatgtaagagtttttttaagtgataacgcaggtcgaatgttgaaactagtagtttgtagaagtggagatagtgctattctggagacctatctatctgggtcggcagtgaaacaactaaataataaaaccggtgtttcgcacaagcagtgcatttctgccattaaaacattctgcacaataaagttaaaaacgaagttatactcgtgaccaaaatacataacaacaataaggttagcaataaaaaaaagcagttttggttacacatagtcagtgaaagtgat

SEQ ID NO: 157464 - DNA, 293 bp, Zea Mays
cacgggtgcatagtttagtgtaagattcagatcatgagattggagaacaaagatgtgcaactagaacagctgttggcaggctggttgatacatgctagattgctagtggaaggaagagttgacttcagcgttcttgatacttcacgacaggttggtttgtttctcctgccttctgtacgttaagcatttagaatctgaatcctgcaattccaagatgtccacatgccttccaaatttcatatgcattggcaccttaccatatgctgaacaactattaattgcaagtgcaaatc

SEQ ID NO: 157465 - DNA, 313 bp, Zea Mays
gtcgagcgttacggcgatagagggaccctatacaccaacaatactagagaaggggacgactagcggatgccgctacgcatagcctaagctcaacttgcatacaatagactattccatgagaccaatccaccgctccatcgttgtcccttagagttcgacggagctccactaccacctaccctctatcctgccaccacaaccaacttgtctatgccacctagatcttcatcatcatgcttgtaaggctatatttggcctcctccatcacgtgctggtgatccttgtccatgggagcaccatatcggtggtctcc

SEQ ID NO: 157466 - DNA, 345 bp, Zea Mays
caaaaaagtacaacatatttatataccttctggtggctgggggaacctgtccgcataagttatcaaagtatcttgtaatactctagtgtcatgtacggatcctggccatcctgtgacaacaaatgtgaacctcatatcgaagtcacaaacgaccattacattctgcgatgtgtaaccgtgccgtccaatatatttggcttgctccgaggccgggactgccgctggaaagtgactaccatcaattgctcctatgcaatccttgaagtgtggccaaaatctcgcctctcgcaaacgagaatgaatctcgatgaaatttgggtctttgggcttaattatgtcagatga

SEQ ID NO: 157467 - DNA, 309 bp, Zea Mays
ggaaaatctactcttatttcttcttctctcccaggtagcttcatcttcactatgatgactccattgcactttacacattttgatcactttattcttcgtaacacgagttaaagtatcaatgatcttgatagggtactcagtatagtcagatcatcttgaacactcaattcatccataggcagttgctcttatggtaccctgaggcacttcttcaactgggatacacggaagacatcatgtacatccgctagatggtcgggtagttccagttggtaggcaacttcccccacccgctttaggatcatggag

SEQ ID NO: 157468 - DNA, 703 bp, Zea Mays
gtttgaatatggatatgagtatgggtaagctcttggatgcttggaacctgtttctgcttcaaaaaagtaaaaaactgtttaactttatttttctttttgttcacagcaagcagccttttcacatgacagtacaaagcacaaaatattttggcagacagtataaccaaacacacttttagtgcgagagctattttagtcgaaggctcccacgtatatgaggtctaggattaaacgaccaaagccagccagcttaaacagtttgcaacacgcaacagaatatcagcgagctgatcgatgccaaagtgtcaaatggtggtgttattattggtagttcaaaactcagcaagcagtttgataaacaaaacaactcagcaatgtgacacgacactatatatctatgagagaacagaacctcaacatcaacgccgccgttggatagaataaaattacaaacctcaaccgccacatcagcatctatgtaagctagctagagtttgttatatacacagggaaggtgaggaggaggagggtcaggtgccagcagcagctcaaatccatccgactactagtataaatgaagaatctcaagtcttccctctcctctcctgtcctctcccccaccgcacccgctcttctctaatgtacacttcggtattcaaaatgctattacaccttagggatctcaattgtgcagcgataacac

SEQ ID NO: 157469 - DNA, 612 bp, Zea Mays
cctccccttatgcttgaatcattacctgcaacgcgtaggaagcctcttcggggtgtattggaacgtgagggcaaagatgatgtgcgccggtgttggcgtcgtcgcgaatccagggcggcgccgccgcaggggtgtcgcgggttagggacgactttgggaccgtccgatttatgttgtgcggtggcgataagatgtgcagaagcgttttagcgatagcgatcgtggatcgttggatcttcggccaacgtgcaggattacacgagcgcataacgattcgagtgttgatctgggccgtgcgtttcggatcctacggccgttatggcgtaccgtttcattacagtaaagatctaatcttaaccatcggttggtgatccaacagccctggatgctagataccccttcgccgtgggagttttgcgtaagagccctcgtagaatcagggattcaacccgccgtcctagcattggtaggctgagtcttaggataatttgcgctgagacccctgcccttccccaaaattggcgcacagtccaaggaaatagaaaatcagagaatttgatttataaaatgaatttattatataaaaacaattcagaatcttgttaaatccat

SEQ ID NO: 157470 - DNA, 648 bp, Zea Mays
agaaggaagaaagtaatatttgcataggtagtgagaataaacatagtactcacttgtatgctttgattgttgaaagatccaattgaacgtaatagaaggaaaaaagtaatatttgcatatgtagtgagaataaacatattactcacttgtatgttttgcttgttgaaagatccaattcttgcgaccatacaccttagcgccaacacaaatagctacagaggcacgttttgagcaaaagaaaaacaaagcataaataaattagagtacagccacacaaatagacgtaataatagacgactgatatcaataaaaagcctaaggcattgcataagagaagtgcattgaaaatagaatataattacataaatggagataataatagaggattgatatgaagccaaaacatccaggttttaagtaatatacacataaatagtaatccgaaacatccgaattgtatgacatactacataagaagtaacggaatacagtcactgaaatgaaggcaataatagaggactgagatcaataaggaggcctagccagagcattgaagagaagagcagcaaaaatagaatacaaccatgtaaatagaagcaacaggactaatattaagctgaaacttttaggttttaagcaagatcgtca

SEQ ID NO: 157471 - DNA, 1131 bp, Zea Mays
gtttggctagatttatagaaaataatattaaaatttgtgtatccaaacaggcttactaaaaaatgtatggtttgattaatttgatggtgtatatttgtatcatgaatattgatatttttgtgtgtcctgtatagaaaggacaggctcagtgctactgactcccactgccccacatgaacataagtctaaaagaaataaccgaggcatgttttatccttgcattttgtagaggatgcgtccgacctaaaaccttttctcaccactatgtcaagcctatcattttttctgtgtcattgtatattctaagaagataagatttcagaatggccgtacctccatcctgattgtcttttatatataatgactaaaacatcaactgtattttcgtcaggactgttctactagctcctacgacatactccgtatacaattgcctggctacaggtgatttcagattgaactgtattgttggcacttattccaggcaggctctgagcctatctccagcagatccactatttcaaactccaccctgtaagttccgcatctcctattttaccttatctactagagagtctgacatacatagcattattcaataatgcgttttttcaaaaactattattcaagcatggaattccaattattacaaggcaaagcttgtgctttaatttgttcctccaatacaatcgacggtctagagagtagaaactcagataccatcagcacagcagatccgtgttgggcactaggcttcacgggaaagacaaccaagtcttatcttaaaaacaaagggactcgtgtaccgttctgctgattttgctccttcaccagacagcacctaacctggtttcttaacaaggtggcaagccaaccaacaagtgatccagatctgactgggtgccaacacctaacacaaacaatatacacctaacatgcaggttgaggtcgatatcaccgaacgcaatataataggaacataacagcaaaaggggatagagtaagcagtacctgctcttttatgcttggaacagatgagagccaactcaatggttgtggacttgcggtggattatttccagggtcaacaaactgcagcatgttagtggaatacaagtgggcaactactttc

SEQ ID NO: 157472 - DNA, 1114 bp, Zea Mays
ccgcttgtccccaagccggtgcattaggaaagcgttccttcagcgacgttgtatcttccaaggttgctaatgcggcatccatatcgaaccagacaaccttcacctacgaaatggtggagccaccatgttggagcagtcggtgctacaaaatctgaactagaatttgcagtgcatcagtgttggctggtaagtcccgaacgatttgttgatgacgcgggatcatcgctttcagttgcgacacatgaaaaacaggatgtatctgtgaagtagttggcagctggagcttatatgccactggtccaattcgctgcaacattgtgtatggaccaaagaatcgaaacgctaacttttgattggcacgtggagttaccgacgattgcacatacggttgcaacttcaggtatactgaatcaccaacttggaacaccctttccgaacgatgtttgtctgcctggcgcttcatgcgctcttgagctcggcccagatgctgttgtatcatatgagataccacctctctgtcctgtaaccaagactgcaaatctgttactgaaatagatgctccaggttgcaaaccaaaatgtcttggtggatgaccatacaaaatctcaaagggtgagttgcctatggttgaatgaaaattggtgttataccaaaattctgtaactgccaaccattgactccatttgcgaggacaggcatgcacaaaatagcaaagatatgtttcgatgcactggttaacccgctctgtttgtccgtcggactgagaatggtaggctgaactcatgcacaattgtgtttctgttagcgtgaacaattgttgtcagaaagaactagtaaagactctatcgcggtctgaaactatagtggctggcattccatgcaacttgtagacattgtctagaaacaacttggccaccttggatgctgaaaacggatgtgctaaaggtagaaaataattgtactttgagaatctgtccaccaccactaatatgcagtccatagtactagacttgggtaatccctcgataaaatccatcgagatcgagtgccaagcatgaggaggaactggtaatggtgctagcagtcccggataacgagctctgtcgggttttgt

SEQ ID NO: 157473 - DNA, 747 bp, Zea Mays
tgtcaatacttgctggattgcttgtttcctttacctcttgtgccttgcaagaaacaaattataaaaaaaatcagatatacatggaactaaaatactgaatgacatgctaaaaaaatcagatatacatggaactcacttgttcagaattttgatataccttcggtgcttgtacatgcaatatatttttgctttgtccttttttcctccccttgtgctttccttcccacccaaatttttgtctctttgaacttcttatgcggacctcttttttctttaattgtgcattactcaatgtatcatttggtacaacaatatcaacctgagttgcattcttttcagcattagaaggaccactgccattttatcctggaaatatttgagcatgcttccagcttgaccatataccatctctcgttgtcgcttgccacgcaaatagtttttatggtcacgaatggtgtaactcaaattaagcggcccacccacttggcgacatgctaattcatgtgatgcttttggtcctattcccgagtcatcaactgtttcaatttcaaaagcttgcaaatctgaaattttcctttgtgacaccatcaagtggaatgtttctggcaagtgaaggttatggttgtgttctaaattcaaatcataaactttgtatccaccaaactctttatcttttacaagtcccatacgcacttcacaatctgttctagtttcagcttgatgacactttacttcataccccttttt

SEQ ID NO: 157474 - DNA, 348 bp, Zea Mays
ggacgactgaaaacaaccattctgagtgtcgccacgtgttcgataccgtgttgcagtgctcggccacgcactggccactctctgggcgcgccccacactctgtcggctccaccatgcgcatgcgcctagccgtgcccgagagcacctataaatccctcccagggtgcgtgacagtccactccacaccccgcctcactccctcacgcaagtccccaactccgacgagctccacaccgctcgccagtgccgcccgaaactcgctgtcgtggccagcccaccccgaccaccccatcgactaaccaagcacaccagaagcttcccagcatgctcccacagcttgtagcctcg

SEQ ID NO: 157475 - DNA, 847 bp, Zea Mays
ggccgtgagccactccatcgcccccaggcctgcagcctgttcgacgaaattcctgttagggacgtggtcacctgctcagctgcaatttaccgacatgcgaggagcgggctgttccatgagtcagctgagctgtttgttggcatgatgagggcaggtgtgtgcccaaactcgttcaccttggtcggtgtgttgcttgcggctgctggtctgggtgacgttgtgcttgcccagtgcattcatgggtgggctgcgaagagtcggttggaatccaatcattttgtttcaagcgcactagtggatgcatatgcgaaatgtgggcgccccatgaatgcattggcattttttaatgatttgagggatcctaatgtagtttcctggaatgcgatgatctccggattagtgcacaatgttttgtttgttgaagcagtattcgtgttcaagaggttgtgttgttgctttgggtcagttcctaataatgctgtgaccatgattaatgtcgctcaagcgtatgctggttgtggtgaccttggaatgtgcaagagtgtacatgcttatgcagttaaggccggttttgatttggatgtcttggtgacaaactcaatacttggcatgtacttgagttttggagatattgagattggaagagagattttcaggaaaaatattgttcggaatgtggttacttggacaatgatgatgggtttccttcttaagcaggtgcatgctggtgaagttataatgctctttgttcagatgaggtcaaatggcatagttcctgacagggtagcaatggtcagtttggtgcaagcttgtgcacttctgggtgatgcaaggagaggaaaaatgg

SEQ ID NO: 157476 - DNA, 778 bp, Zea Mays
ggggggattaacactaacgcgagtgagggaggcgaggacgcaggggagggagaggggagactagggcggcagggtcgtagaggagagggatgagagattatccaaataatattgttcattatatttcagtaggtaagggagagaagttatccactgatctgaatcattcgttttgatggtgtgtgtagtctgggtgtattttgtttggtggatttagtggaggttatgggtgtggaggtgatttgattgtgtgggttttgcaaagtttaaacttgtggattatatagtggtcggtgtttcaaacatagctccgacaagtaaatttgttcatgcatattctaggttccggatggtgtgctcagaggatgcgagatttatattgcttcgagcagaacatccctacatccagttttctgaggttcacgctacaggcactgttgttgctcaatactcatggtaggggttacaagcgggagagagggaaaaggagatcttaagtatctaatgcatggctagacctaagaactacgggactagagctcttcgctaagccttgggcgtcgtggtggttcgctccagcctccatggtcttccgggtcttctggttcgtaagtttttcttgtgtgttgtgtgttgtcctcttttatagaccaaggcgggggtcagttaccgactccttttcttagaagaagttgctgagctacagtaaaacgagacattctaccccggtaaaatcatgattgtcgccttatgccctagtcatctaggcttccctagc

SEQ ID NO: 157477 - DNA, 514 bp, Zea Mays
catcagttgatcttcttttttggtataattgcccaaaatttcgttgcacatagtctcaatcatctctagccactcttggcaaggctctttgaattgtttctcaaacttaaagcgatagggcaatcgaacaagttcatttttcttctttgttcctttcagcttcggcatactccattcactcaacgttggagataccctgttgaccaagtattcttgcactaaatccctggtgctgatatgttcagccaccactctgaattctgctacggccagctggcatggtgaccctggcttcatgttgcacaagggtctggtcatcctgaagcttaaactcagtgggctcatgaccatcgtcttcaacttctccctcttcttctcattggccttgacataaaaccacgcgctcttctagccagttggccacttggtgcgatatctgaggtccggagccttcgtatccttgcgatacgcgaagttataacaaccaaaattttcatgcagcccgtcttctctg

SEQ ID NO: 157478 - DNA, 583 bp, Zea Mays
cacatcattcccaagtgcagtgggtggcctcctaatgccgaagcgagaccatatagggcgttgaataatccctttcacatcctccctttgactcaggtcatttttcacgtaaaaccattcctgcatctaagagtctggccacctcttccgaaacgtgggcacaggataactcgcctcagatcgaggcatgaagctataacaaccaaaattattatgatattgttcctttccacttgccttcatctcataagacaactcatgaatattgcaaaagcatcttgcatctggttctagtccttggctcctcatggcccagataaaacccccactttaataagagcttcaggggtaatctaatgaaggtatatctcaaatgtcttcaaaacatcgactagcatcttatgaagcgggaaacaaagcccagccttcatgaagctcctgaagactaccacttcattgctttctggcagcggaacggtgtcctctcccccagccctcactatagacacatcatgaaaatatttccccttcatcgattcaatttgtccttacttgatggtcgatttcccaaaaacaatgtggc

SEQ ID NO: 157479 - DNA, 1598 bp, Zea Mays
tgtgcgtgctcgactgcgtctgcctttgccgcatgtgttgcgagatgacgaggacgaaaaggtcttccagaatttatgagcagtttttggatttggtacagatgctgtgagctcgagctggagcaccgagaccggggctgcctgcgacgcggtaggtgagcgccgcccgggagtcggttatactacgactttcgccgcatacattcagccgccggccgccgcatacggcatggattagattattagataaagatcggatgagtaataagcagtgcaaagttcatgaacctgaaatatgcatgcatacacctgctggcgatctcggccgttgacggagcatgcatgtggtgtgtccccgttccggatggctcgcacagatctactgtctactactagctcccagagcagagcaggcagagatggttggcggttggcacaggtagagaggcagccacgcagtgcagagccgtggtagcgatgcgcgaggcggatggacaggatagggaggggatagcgtaggggccaagtgaccactcgtcggctctggcctttcggcgcccatctcctcctcatctcatctccctccacggtccacttgtttcgttcgctgtgtgacagtagtgtgagagattccagatccaacacctgccgaccccgtcgtgatcctgtccagcggctccagagacagagaggcacgaacacatgccaagctcccagctcctcccctcccccctcacctcacctcaggccctcactcccccaggtactcaatgctctttctctctttcagccgccgctgctgcgttgcgtcgtgtgggagctgagctagtggcactgggtgctctcgaccgcactaggcagaccagacgttgcgtcgtgccccatattcgccgtcgccgtgcctttcagcatctatctgggagtgaatgacttgggctgggtgacggatagctgaccatctcagctctctcgaagaacaagatcgtaggagaacctcctagtcctttgcccctgtcgacactttatatgctggtgtggtgtccatcctgtcgctgctgggggtgccaattgccatgcccattgtttgttcggtcccgttcaccggggatcggatcggatcgtctgtccagcagcactaccagttcggttcagatgcaatggaatggaatggaatgcaccaccgcgcgttgacgctggtcgaataaggaggctaatgctgcctcgtctaattcagcggttacggcagaaggtaccagttgccaaaggtcggtagaataagtacccaccatctggatccacccctccaaacttcagtgctcttataagagacctaaaacactttatcttcgtctacactctagagctctcaacgatttcaaacactttatatcaattttaagctataaatccaacatgagatgggctaactttagactatttatgtaaagctttagctgtatagtttagagctaaaatgtagagggggaaaacataaacaagctagccttaaaaattaaacttgaacgattattgaatctgggagatgtgtatatctcgattccaatagaagaaaaggatcagaaaaaaaatgcaccgac

SEQ ID NO: 157480 - DNA, 296 bp, Zea Mays
acgaatggttgctgctatgtgcaacagtaaataaatgcaaagatatgggcaagacactacaatttggatggaaatcatttattcaaaaatcatttgcatcaatgctgctttgtagatatgtaactatgatatcctcactaaatttgtgttttagcccctaataacatgcataataatttgtaggttattttgtagcccaagtcttctgtatttatttcagttttactttattatgactgcttggaataggtatgaaggtatcttttgttacaagagataaatgcaaccaatacatc

SEQ ID NO: 157481 - DNA, 943 bp, Zea Mays
gttggactgactggaaaaatggctgacgacggtgaagcttgtttcacggtggcggaaagagatttgggggaaaacgcgaattcgagctcactggtggatgattgtggccgattagcggtggctagttagctggcgacctcacggagctagtcacgggctcaatttataggagggtaaggcggtggccgtgaattttgaggaggacgcgcggcggccggagagggagaagaaggcactggccgcatgagtgcgtgtccacagtcgtggcgagctcgccggcaatgatttgacggtagtaagaagccacggcgacgcgatgggaagttaaagccacgtggcgcaaggctaggaggcggcggtcaccggcgttcttatcgatcaccgccgcggtgacgcatgtacggtggccggacttgtttatggccggagttatccacggcgaggatatttatgtgacccaaagtgctgtccaaccaagccgagcccagatcacggcaacagcagcatgaatcgcgacggtaggtcaccggcggtgagaaccgttgcactggcgatctgatcttctttgttactgtaccatggggagaattcagtcaaatgcacctgacagccacggtttagggccattgttctcaaaattttgcattacgatttggtcatctctctgcaccaaagttatagagctaaagttaatctttaactttgccacaaagcttactatcaaatagtcactaaatcccattcaaaatcgagctcaaagttcatcccatcacactgctcctggaaattcagttcagggagggactgacagcccgactttgagcttaattatctctcaaatactcttaacaaccatgcttaccaccttaagcaaagttgttctccttagtttgctctatagtttttatgtggtgacctagggcaaaaaccctatgctttgaaa

SEQ ID NO: 157482 - DNA, 745 bp, Zea Mays
gaattggctaatatgttcatgtgtgcttttcccaccttcaccagaaaatttagagaagtctggtattctagttccgtgtggatatggcacgatgtcgaatcggtggctataaggcttccgatacgattgccctgtacctgacacactaacaccgagtttgaccctgaacatcccagctaccttgtctctgatcctctccgccatgtctggcgaccatccattgagtttgtgggtgcaaatctcaggttgcttgacatcactctgtcggctttcctcccaggggtgtttgaggtgtgtgttaggtgtcctattaatgtcaccagctcctgccctatacctctcaggctctctagtggccgaacaatatgcaaccctatgtccatgaggtggtatggcatgattataatgcgttgctggtggggcaccataatgttgctgcgatgaatgtgggaactatgtgtattgcgcaactctcggctctgcgtacacatatccggatggtctagcgtaagaggtcggatggtccgcgatcgggccaaacggtccgaaggtatatccagattgtccagccgtatatggtgctacctaggtggtctcgtacccagaccgtctgtcgtaaagaactggacggtccgtgatcgggccgaatggtccagggctgtactaggacggatcggtcatatatggcgcgacttgggcggtctgcgcatggactcgtgtagagtcggatggtccagcgtaatac

SEQ ID NO: 157483 - DNA, 652 bp, Zea Mays
atgattggacccttcaagaaagctcagggaggctatactcacgtgctggttgccattgacaagttcaccaaatggatagagtacaagcctattacttctttaacatcagccaaggcagtgggacataatattcaggttcgggataccaaatagcatcataaccgacctaggatccaacttcaccagctctgaattctttgatttctacaaacaacagagtatccagatcaagtatgcatcagtagcacaaccaagagccaatggttaggtggaaagggccaatggaatgatactggaagcactcaggaagaaagtgttcgacaaaaatgaaaagtttgcaggaaagtggatcagagaattgtcgtatgtggtttggagtttgagaactcaacctagtcgagctctacatggaaataccccgttcttcatggtctatggttcagaggcagtactgcccgtcgacctcaggttcggggcaccgaagctggtctttgaaagcatagctgaagcagaagctaccaggctagaggatattgatgtgctggaggaagagcgattgaacatagtaattcagtcagccagataccagcagaccttgagacgctatcatgataaagtgatacgacatcgatcctttgtagtggcagacttg

SEQ ID NO: 157484 - DNA, 1654 bp, Zea Mays
ggcctatgtgcaaaattagtccacttttgggctaaagtgcaaaaaccaagccaaataagtattttaagtcatttggttcacaaatatgtggacttaaaggccaaaccctaagttttggacttaaatgcaaaatggacctcatttgagttctatactaagtctgaaattcagggttatagacccaactttggggctgtgtagctttcaaaataatgagaattcatattaggtgaccacaacaagtttgtagcccaattataggagaacaactttgtttaaggattcaagccatgttcttataagaaatgtggagaaaatctcaacccaagttggactgtcaggctggttctgtctgaacatcagactaacagattcatgccctcaacttcaagcttaaattccagcttgatccaatgggtttttgtggcatcatcatattacaaagttgcagatgatgtattgctctacacttgttctgcagaacctcggatgagttgccatatgaattcgagagaaaactgggctgtcaggttcatttaactgaaactggccatggtacagtaaagggtaactgaagaagatcccatccctttgctcgccgccggtggtccatcaccgttgatcaccgctcgccgtgattcgtgcgtcgtggccatcggataaacatgcctcggtaaagatcctcaccgtcggtgagctggccaccactccgacggcctcccctaccttcccatctgctttgcggctggagcgataggctcgccggtgaaccgccgccgtccgaccatgcgccgcgtgtcttaaccgcgccaccgtatcaccgcgaccccctccaactgtccatcgatcactggagttactgccacgccataggacacgtattcaccgcgccaggcttcttcctcatcttcggccgccaccgcgccatcatcaattcaagcgccaccgctcgctccgcctataaattgagcccccggccagctacgctaggtcataccaaagccatagccaccactcccgtctccaattagcccccatagccagagaatcactcacttcccccaattcagtttctgtcaccgtgaaacgagcctcaccgtcgccagccatactccggtcagttcccgtcttctgctcccttgtttaagcgttctcatgcatctgcgatgctccccggcccctttaatcgaaccaaatcgcctgggatcgccgggaacgcaacactttaaccgccatgctcacggccaccgtggccagagctacgtagttggttttagctgcaattaggttgggggaaatagtcagggtagccccgatttcatggccgccgctcggagaacccagccatagccccaatcggccggtccagaacctcgtcggagtgctccccgcgctgccgtcgtcgtggacttgggcgtgtaaagaattagaaatccggggggctcggtgtaaagcgtcagagacccgttggaatagtagttgaacccgttcgcagttagataaagacgcgaggaccccggtgcaattctgccatctcgcgcggacgcgggctcgcgcttcctgcgttgttgggccggttcaggccggaatcagcccaacactattgaatattttcctttttctttttcaggaaaactttagaaatatgtagaaa

SEQ ID NO: 157485 - DNA, 391 bp, Zea Mays
gtggagggtgtcggggatcttcctggtgagagtactgagcataggcagcgaagggtggtgtcgaaacgcagtgtgggtgagttttcgcgaagtggtaggtgccgtcatatggagatggagcacggtcgtcttcgagtagactggattggtaaacgagaattgttgaccttgccgattggggcgagcataggtgagggggatctgcgaaatctttttgagggtgaggagttgaggataatgttgtttaattacagggagatgggtatcatcctgaaggttgaaccgatgtaatatatgatgccctcgccgtgtgtatgtaactgtaatttgtattgtaatgtggcctgttggccgtatttgttctcttgtgctgatctggctgcacccatgg

SEQ ID NO: 157486 - DNA, 781 bp, Zea Mays
tgatattatattggggctaatgcaatccacataattatatacataaaccttagaaaactacaagggcagcttcacttcatctataaaagtcaagcgaacagcctagtccattcacaaaaggcaagcacgatcaattgtcatgtgttcaaacttcagttttcttgaggctgcaaacaacaaatacaagaatgtgactccataaatattccatatgtcatgttccatccaccaaaaaaggaattggcatctgagttcactgtatttcacaaccatttaactctaaagtgattgattgtcatcaaggccaaattgtatatggggatgtatacgacacatgcaaagttaaccaaaataaatctttcactcgcagccattgttgagcggtgttttttcttaacatacaaatatttgatatggtacatattaaactgtggtcagaggacattcgtagctttccgcatagttttacttttacttatgctgcatcggtaggtacttaagcaatgatgagaaaaataattctgaaggtaggtttttactatgtaggccatctcatttacataacatagttcaagtgaatctatcaccatttcctagccctgtttagatatctacatattctttgcagttgaaacaagcacatatggatatggaggcattatgcgaaaataaagccaagccagtggaacccaacatagtcggcaaatgagatatttcctatgtcattttagagaaaaagaaaaaagagacagcaacaccttaacttaggggcagatccaca

SEQ ID NO: 157487 - DNA, 1136 bp, Zea Mays
gtctttttcgacatgttgcatctgagtttttgtttttgtgggggcttttgcaggtatattacatggctccgcctcgttaaaaacctcaccccccgggaggaaaagagtgcgggccggaatggtattgtttggtggattacaagggtgcgtgggccctgagggttaaacaaaaaatttgcggagattatcaatgttccaggagtgctctaagtcttcgtcggagggtgttcatagcctgtacgcgctgggggacgccttcgtcttgacaatgaatggaccctcccatttcggctctagcttgccccgtgactctgtccgggtggttcggacgagtacgaggtctccttcgttgaactctcttgggacgaccacgttgtcacgccagaccttggtttgagcttggtatttgttgaaggcctgcatggcgaggacgcggtctccgtcgatgaggtctttagacgttggttcgtcgatgtcggggactactgatgtgcttgttcggggcgacccatgctttatctcctgcggcgtcatggcctccgatccatataatagacgaaaaggtgtgaatccggttgcccggcattcggtcgtgtttaaggcccagactacttcaggtagttggttggcccatttacccttcttgtcgtcgagaagtctttcttgatggcagtgaaaatcttgctgttggcgcgctcgacgatgccgttggattgcgggtggtatatcaaggcgaaggcaggcttggtgccgatggagaggcaaaagtccctaaagtcctggttgtcaaactgtttgccgttgtcgactgtgagctcggacaggacactgaatcgacaaacaatgttttgccagaagaacttctgggcagtcttcgacgttattgtggatactgccctggcatcgatccacttggtgaagtattcgacggcgacgaaggtgaacttgaggttcccttgagccgtaggtagtggcccgacaatatccagcccctagggttgaagtggccatgtgtgggcgatcagcttggtgaactgcgaagggtttcccgagcgtgaagaaaacttctggcaagcttcgcatgacctcgtgactcgattcgcggcgcagattatcgcaggctagtaaaatccttg

SEQ ID NO: 157488 - DNA, 713 bp, Zea Mays
gccaaatctatagttttggtggatcagatccacggtagagcgagctggtagcattttggaggaaaaattgaacctatatctatatttttttaatctagagttgacgaaactctatccgtctgatttggtttggtttgccaggtgcgaggctcaccatctgctagtcctgctccccccgatcgatcgagaaatccgtgcttgaacagagtaaaacgattcaggagcagctgaaactgcagcgagcagtctgtgttttccaggtccagctagcgccatggtgccccccttcgggcgtggaaagcagtgccgcaagctcctgctcgctgaaaatgagcaccacccatacgtatgtatgatctcctgcagaagcagaacagtggacgggactgtcgaagcgcatgggcagcggcggcggcgacgcgcccatgcgtgggcagcagctccgatccatggcgcgcaccacagaccgcacccacaggcttgcgtttggcaggcccaggcggggcggcacgtacctttgctcttgttccacgacaggacagagcaggggagtagattcgtggctttaaaaacccatggacggacggacggacggatcgcgccccattgcgttggctccggcgccatcacgttgtttactggtgtgggggtaaactcgcaacccccctccctccctgccacggaattcaattccgatcgcatggcctccgccc

SEQ ID NO: 157489 - DNA, 771 bp, Zea Mays
tcgacctaccatcgtcagattgatggacaaactgaaaggactaatcaagtattggaggacatgttgagcacttatgcccttcagcatggtattagttgggacaagagtctaccttatgctgagttctcatataataatagttaccaggccactctgaagatgtcactgttcgagactctatatggcgggaaatgcaggattcctctacattggatcagactggaggaagacagatctttggacctaaacttattcaagaggcagaagaacaagtctgtataattcgggagaatttgagggtagctcagaccaggcaaaggagctacgctgataatagaagaccactggagtttgaggaaggtgatcatgtgtacctcaaggtgtcaccacttcgtggaatgaggagatttaaagttaagggcagattgtccccttgctatattggaccattctgagtttttaggcaggttggagagatggcctatcaactcgagctacctaataatctatctgatgtgcataatgtatttcatgtgtctcaacttaagaagtgtctccgtgtccctgaggaacagttaccaatggatgagctcagtgttcagggtgatttgacctacatggagtaccctatcaagattcttgatatactgacttgtgtcgcgagaaataaggtgataacgatgtgcaaagtgcaatggagccaccacggagaagatgaagctacttgagagagagaagaagagcttcacatagattttccccatctctttc

SEQ ID NO: 157490 - DNA, 695 bp, Zea Mays
gtaagctgtaagcaaacaacttcttgtctgttggataatttgattgtttgaatgttgatgtttgtcacaaacttgcaggtgataatgatgccaaatcaaagggaaagaggacgaagtcacaaatttgtagatttaaagagctattttagccggacttctagtattacaaacccaagtactcatgggagtggagttggccaagaggtggacaatgaagaggtccaatatgaacaagatgtcagtggaacaggtagtacagtcaatgagtttcatatggatcatattatctctgatcccggtattcgcattccaattgatcaatttgctcctaatattagaagtgaagataggagggcattcatagaaaaaggtccaacacaacctattggtcataattttcctaaagcacatgataaaaggtcatttcaggaacattggtttaagcaacacaattggttggaatatagtttggtgaaagatattgcttattgctattattgctatctttttagagatgattgcaaagatgagaaattcagtcatgacactttcacaaaaacgggcttcaagcaatggaagaatgccttgttgatatttataaaacatgttgggggtccgagtagtttgcacaatcgggcaagatcgacttttgaggattttgataatcaaagatcaagtttaaaacataaagtcat

SEQ ID NO: 157491 - DNA, 577 bp, Zea Mays
ggccccaagaaaagaagcacctttctttgtgatcttgtgcaaaggggcagcaatggagctaaaatcatgcacgaactggcggtaaaatcttgcaagtccaagaaaacttcgaatctgcgtgaacgtcgtcggtgtagcccagccctgaatggcttcaaccttgctggtatccaccttaatgccctgcggagtaaccacataaccaagacacgagacacattgcgtgcaaaaggtgcatttgtccatgttaccaaacaagcaagcagcatgcgaagcataaaaaacagcacacaaatgttctaaatgctctttcatagacttgctataaataaggatatcatcgaaatagacaacaacaaacaaacctatgaaggccgtagaacttcgttcattaaacgcataaaggtgctgggagcattagtcaagccaaatggcatagccaaccattcatataatccaaatttcgttttccattcatcacctagtttcattctaatctgatggtaaccgctacacaaatcaaccttagataaaataacagcaccactaagctcatctagcatatcatcaaggtgtg

SEQ ID NO: 157492 - DNA, 686 bp, Zea Mays
gtctgggattgagcgggtgctcctgagatggctgagatcgacgatgaacaggagagcacgggacagagacggcgctagcaggaagagctagagggagagggctcgttgggcagagaaagcaagggagacttaccctaaagccaaggtaagcgtgcggcctcctggcagctacttgggccacaccaaagaaacacagcccacgcgacctatgtcgtcgtcacggcttgcacatttttatgaccataccggccaaccaacatagcttctaccggcttataagccttccttcttcagagaaagcaatcgtggtcaaatgctcctgccagtgtcaaattgaggcaactttttgcgcgagcagacgtgggttcggtgtgtgcaaaactaagggtgtctgtcacgtgggcgcccgtagtctgcaatgtgggcccaacgtccggaatgtgtgatggcttgcacgataggaatggctgaatgggaatggaggattttgtcacatgggaccgaagtgccccaagtaaggagttgctcgacgtcccgcgtcacagaaatgtgatggtttgccggacagcagcggcggagggagccattatggcttaattgtgacatcagccataccttacttttagtaactctcatatcttctactataacaacaaaataagatgtggtgtggtggatatgttgtc

SEQ ID NO: 157493 - DNA, 1208 bp, Zea Mays
gaaaaagcacaataagtgtgcgacaccacccatagggtgcgaagtcttccacgaagacatcgtccgagcaaaagtcgcctaagggtgcagccaaaaaaaagcacaataagtgtgcaacacaaccgacaaggtgcgaagtcttccacaaagacaccgtccgagcaaaagtcgcctaagggtgcagccggaaaaagcacaataagtgcgcgacaccacccacagggtgcgaagtcttccacaaagacactgtccgagcaaaagtcaccaaagggtgcagccagaaaaagaacaataagtgcgcgacaccacccacagggtgcgaagtcttccataaagacaccgtccgagcaaaagtttcccaagggtgcagccagaaaaaccaaagtacgtaacaacactcgcagcgtgcgatctcccctacataagccaccatccgagcagaagtcgcctaagggtgcagctcgataagtacaacacatgtgtagtcacctatcaagcgcggagtcacctacgaaatgtacacgtccatccacaccaaaatcgcctaaacttgcagcaaactcgcaataggcacaacaaattacatagcgcaatagcaaatgaacaaacaagcgacgggctcaaaggcaccatcgcacagcacaatagtacacactatacaacttttaccccacaaacatggacatcacagttctattgcgaagagggggagggcagcgttttcacagaatatcgcaacagaatagcgaaggaaacaaattgtcacataggctcctcctttgaaataagacatgcctctcgaaaattgaacaacatcaacctcaactcttccccctcaaactggtcctgcaggtccccttctccgatgcaccacccagacgtcgatgaaagtagctcgcgctgagtaccccgatccggtcgtggaccacttcgaagacgggtcctctccatacccattcggtgatctcttcttccacttcacgaagactcatcgatgccttgtttcgacacgtccatcctttttcgtcgcgagtctcctactctcgcatcaatcgaggtcgccagcacctcgtgagggacggatcacagagactccgacgcagccagatccaacgctgcaaaataatctaagttgtcctcaaaagattcgtcaacccacgagaaagggctccccaattccccttcctctgaagaccacgacccaaaac

SEQ ID NO: 157494 - DNA, 587 bp, Zea Mays
aaagagaaaggggaacacactaactgggccaccagccccaaaaccggcccatctcctgttaaccccgcgctgccagccatctccaccacgcgctacccgctgaccagtgggcccgcttgtccatttcgtgaccgcgcgcgcgcctgcgttgctccaagccgatggcaggtggacccgcgctaccagatgccatctccctcgcttaagtatcttacacgtgggcccggaacgccagtttcttcttccgctcgagctccgtaacagacgttgtcttctccgccgcaacagaatagtgcatccagccgcgtgaagaccgggaaaatcgcacgccttgctcctgccttgtggcccccttttcgccgtgggtctccatgtcagcacggtatgccgcgcggtcagcgtgattccgctccgctcgctcgttctggcataaccgcatgatcgagatccgcggcaagccagctaccccaccgagatcctctcccctatgggccatatagtctagccgtgaagtcgaggactaacctagatgctccgccgccgcctgcgctctgctgtcgcacactcactgccacgccatccccttt

SEQ ID NO: 157495 - DNA, 549 bp, Zea Mays
tggtgaaaacaaagatgttggagaagagtcctcaagtaactgttttcttacaatgatacaaatgctacagtacaacaagtccaatatgtaggaggatatccactactcttgaaactgacctgaaactgaaagggcatcagaagaaaatccaattttcctagtccagatatctatcacaaaccgttgtgctgctgtcctgtgaaatctgacatcattggcatggcggcgagagcgccaccgtgtgctgctgcatgacgagcacggagcccatctctagcgactcgtgggacgccaggatctctcccacaggccctatttcgctgccggcctccgaccaccactccagcccggccatcagctccaccggctgccgaccgccccgccccagcaccaccagcgagaacattccggccatcccttctagcgtctctaccacgtccgcggggctctccaccaccttctccatgtacatggccagctctcgcgacgcgtagttctcgtagaaccgccacaggaaccgctcgtccacgtggccttccttgaacggca

SEQ ID NO: 157496 - DNA, 604 bp, Zea Mays
cgggaggacgaggcaaaaagggcgcccactgatccctagcatcatatatactggtgatggtccggcgtaagacgtacatatgcccggccgtgttgtttgttggtggcgaggaatgcattctacgtggtacggtgccctacagctgtgtaaggaaaacgtggcatttgaacaacaagcaattggcaacgaaaaataaagggaggaagatgtgttagggagtgcgagcatgtgcaaggcactagcaatggcgtgagggaaatggagaattaaaagatgctgttctagatggtctttgggcaccagcagacagcagtgtatgcgtacacaacgcatgcatgcatacatgtcatccggtggcaggtggtagcaaaatgcattctacgtggtacgtaaggtgtttgttgccttgtaggcgctctcgtgtgtcatcattccctatacgtgacaaccttgcatgttccacgcatgcatggaacacacatggttcgacctttgagaaagagatgccgtgtgcggtacatagtatgtgggtgttcgcctttgttcaacatcgccaatgtggttttgcatggttgatatgtcatttctatatttatgtaacacc

SEQ ID NO: 157497 - DNA, 698 bp, Zea Mays
ttgccgttgtcgaccgtgagttcggatggtactccgaagcggcaaacaatattttgccagaagaatttctgggccgtctttgatgtgatggtggatactgccctcgcttcaatccatttggtgaagtattcaacggctacaaaggtgaacttgaggttcccctgagccgtgggcaggggcccgacaatgtctaggccccagcgctgaaggggccacatgtgggcgatcagcttcgtgaaccgcgaggggtgtcccgagtgtggggaaaatttctgacaggcctcgcaggatctgacaacccgatttgcggcgcagataatggcgggccagtagaaaccttggcgaatcacctttgccgctagggccctagggcctgcgtgggagccgcaggtccccttgtggacttcgcgcaggatttgaacgccttcggtctcggtgacgcacttaagcatcggctgactgaccccctttttgtaaagttggccctcgatcagtgcgaagtcccagcttcggtggtggaggcgcttggcctcgttgctgtcgattgggtgatagtacccctgcaggtacaaggttattggcacccgccagtctttggtcatgataaggttgatcatgtggtggccctcgctgtcgttggttatttggagcccttcagggctgcagacggttggcgtgccgatgacgtgatagaacac

SEQ ID NO: 157498 - DNA, 838 bp, Zea Mays
gggcactattggtagcaaggacaaggttgaatttgataaaagtgtggagcaaactgtgatggtcttctctcttgtgtggatggcgggttcatattaataaaacctagggactttttactaacatgaccctggctgctacaacgtgggtcgcccaggatcggaggatctgggaccaagggctcatattaggtcacgaagcggtacgcgatagtggccataggatttcaaatcaagcccctagatttaattactgcgagatccaactacgaccctccgatcggctatgcacagcccaaattagatccttcttaaatcgaagcagtatgctatgtggaccactgcatcggaaatctgcggcctagattttattaggcccaatctacttacacccgtctgatctgaatcgaacgacatatgttacacctacccaaaccagtatccggatctgattttgaccgcccaatgaataatcaacggaggacgctactccccctctctcccagcccgcgcagatggcgcgcggcggtgccgcccagctccgcggaagtgaagcacaccggagaagcataacttgctccctggtgcgttattctcctcaccgataggtgctacgtgatgagggtggaaccacgaattatcgagacggtcactcaccggtcgtgaccgtgcaaacagacggatccgcgacgggggattgactccggcgagccattcaccgtggatgaagcctcccctgcacaccggcgaggtacatgaaggatccccacaccttgagaaaccccaagggccatacatctatggggcattacccgtaattgcacaatctcgcagggcagcc

SEQ ID NO: 157499 - DNA, 585 bp, Zea Mays
tctcaatctcgtcggcgaactgagcggaagcgagatcaaagggaaacagaggaggtctggaagcagaaagtaaggttagggcttagaatgcacaggcatgcgacgacgcggtacaaatggggtattcccaggtcaggcaccgattctaaaagtgcccagtcatcactcggctgttacttctaaaacgccgacgtgactcgatgtaactcagctgttatttctaaaacactgacatcatcagtcttcactcggccgttatttctaaaacgccgacgtggctcgatataactcggttgttacttctaaaacgccgacatcaccagtaatcactcggccgttatttctaaaacgctgacgtggctcaaaaggactcggttgttacctctaaaacgccgacgtcgcaaaaaaccattcggctattacctctgaagataccgacagtaaatcagccattttttctacgaatatgcaggcggaattaaaatgcgactcaacaattccaagtcgttactcgagcattacctccgagaacaacggctacattaagcacaaatacaatcgatcgaccgactgcaaaaggaacgg

SEQ ID NO: 157500 - DNA, 723 bp, Zea Mays
atttcatgtaacaaccggttcaactctctgtatcaaagttatagcctaataaaccagctacaactttgctacatcgtgtacccacaaaaagtcacgagatcatgcttagaactgagtcccaagttcatgcaatctcactgtttatttgacttcagactttaaatagtctgacagcacgactttgggcacaattttctccaaattttccataacaacaatgtttaatcccttaaacaaagttgttctcctaacatagctctatatatttgatgtgttgaccctaggcaaattctcaatagttttggatctacagagccctaaagtcagccctcctatactattttcagacttaaccaatagagctccaatagggtttttttacaaataggtccaaaactcggggtttaggttgcaatttcacacacatgtgaaccatatgacttaaagtgccttactttcatggtttttgccctttagtccaaaagtgcactagttttgcacttagccccctagggtttttctagggttctatttagggtttcttgcactcttagggtttggatcccacttaagttcatccatggtgacactttatgactttttcaattgaaatttgaagttttctattgtttaggccttgtttgctctattaaacccaatccagggttgagtaccctactctagggttttattcacaaaatgtcatatcaacacaacttgttt

SEQ ID NO: 157501 - DNA, 1080 bp, Zea Mays
attgttataaaagtttggccaaaataattgattaaaatcttcaaaaaaggccatccaagtggaagctctctagagaaaatctgaaagccctcacctagaacttgagcacgttcaccttgattgctagctcaaatccttaagtccccattgacaaaattgttctacactaacccctctgaaacgtgtgtgaagatagcatcgagattcgtgccctagacacgccaaatctcagagttcagtagtgagacaaaccaaacttcatccctccatatcttttgatccagtcaacaaaacccataagcctccacacacaaattacaaaggaatgttagaggaagagatctctcaacaggatcatggccataatcgcgaagatttggagccaatccgcgcttgaacttgacctctctctgcgctgcctcgtgctcgacgtcgtgcccaggcgctagagtgcacactggcgatcgcctgcgcaaaccccgagcacgtggcagagccatccctcggtcgtgctcgcccgcgcctttaagaccactccagacgcgcctcacctcactccacactcacctttgctggccagacagcacccttagctccggcgagctcagcgccacccgcccgagccacccgagtgcttgccaccgcggctagccatttctagagaccctcagcctcaaccgagcctttggacagcttccccgaggagccgtgaagcttctccaagcaaggatcgaagccctgcctcaccggaacagcaagatcatcgtcatcggacttcgaccgcccgccaccgcgtgtagaccgagctatccggtgagccattcttcaattcctcgtgcccatgccttccctagcacctagtgaagctcactaactagtttaattgaactctaccgccctggataggttggagccctcgccgccgacgagctcccccgtctgcgcatgtggaccggcctactccgaccattcctggagacgatccgcacatcggcgtgaccgtcacgacctcccctatgccctcgtccacctcaccggagcaatctcgccaccggtaagcccctccgccctttcctccgc

SEQ ID NO: 157502 - DNA, 642 bp, Zea Mays
ggattgcggggaatctgttgaggccagctgaccgccctcggggaatataaaccccagccgtagccctcaggtcccaccgaatcaccatgaggtagagagagaagtcagggaagcagggatcgcacggggagccgaccttgagccgccgtcaacgactgccttgcaccccctcgttctggtctggggaagtggtcagggagattagtggggatgccaggggtctatccacatcgagcatttgtgtgggggaaaaccggcgccaacgagattcctcgccgtcgcgcctggcgcctctatgccactgaaccaccgtgccccgtggtagacccattcaccgtctccaacgttcgatgaggccctatccactcttttcggcttgatgtacactgcgcttagcaaaggaatcgggggccctaacctgtcgagtggccgtgaatttctcatcggggccattcctccgtcgcgggtccatgcttggccgtggggagggcataccatcgcatcgtccacagtgtggagggctttgcgacgttcagtaaggtatggagtagcctgtttacccgaaagaatggggatccggacacctgggcggcatttcggcgtactctggcgaggcccctgccgtggaccggggtggtgttg

SEQ ID NO: 157503 - DNA, 1418 bp, Zea Mays
cttttttttaaaaacacaagaatgcatatgtatccaggttatgagatttaagcttggacgagatctggaacagaccgaaccaaacgagatcggcttggatatttcagactaagttgaatctagttgaaaacagataaactccacccgttccgaatattgggatctggacgagacacaaatggatatacatacagttcttgcagtaggtttgggcgaaatgtaaacggatcggactaaagcgacttttgggctacacatactaattttccgcagctacgaacagagaaacgaattaattacaaatactcggtttcggctctaattatctcagtccgatttaattttgcatcaatactttttgtggtcgagttctaataatttgtttgcgacaaaaatcacaagactgagttggggtttccaaatacgtattcgcttagccgatgaattctaaaccacctcacgactcgctatttcctggaacaaatacgttctgcatttcgcgaaaactttaggaagagtccagatgggtaaagacgaaagcgatgtcgaatccaggataagcggagacggttaagaaacagagaccgttattatcaccgatatcccgtgtttaagtccatacttgttgttgaacgggatataaacacctggggtgttaaaccggctcccgaggccgaaaacgtgggtaccaaactagagtcttgaaaaatggctgttcgcctagaaaaacgtgtgcaggtcacgggagaccaaaaactgccttaccggctcccgaggccaaaaacgtgggtgcttgatcggagtcatgaaaaatggttgttcggacaaagacagttcgaggtatcatgtattcatcccatttaggactaccgttacagtaatctttaccggctgtttggtttggggagtcaccccgtctggcatcagtgcgtcctgcatgtgttagtccgattatttctagaggaatgagtggatgccgtgaatatactggaggagggtgtaatcttatggcagacaggttggttccctttagcaaaccaaacaatctatcgaggttcggacgcaggattggatgactcctcacggtgccattccgtgaaccaaacacgttgtacattaccatgttttgttactaactcatatacttcatgtgctcaggcggagtacatgaggatcgacaccgacagctacacgatggcctgacatatggaggcgtacctgttgtggctcttcgggtgggtcatgttcactagtactcacggtaactccgtgaggaaggacatgatccactacgcgagggcgatcacgaatgcctcccttagccaggtttcccagtactggggtaatgtcgtgctaggcgcgacgtatcggggcctctatgatggctgcataaagaccgatcctttggccatcttcac

SEQ ID NO: 157504 - DNA, 466 bp, Zea Mays
tggctccgcctcattaaaaacctcacccccaggaggaaaagagtgcgggccagaataaaactgtttggggaattacaagggcgagttggccctgtggagtcaaacaaaaaatttgcgaaggttgtctatgtttcaggaatgttccaggtcttcgccagattgtgttgttagcctgtacgcgctgggggacgccttcgtcttgacgatgaaagggccctcccactttggctctagcttgccccgggactctgtccgagctgtccggacgagtatgacgtctccttcgctgaattccctcgggatgactgtgtggtcgcgccatgcttttgtttgagcttggtatttgtttagagcctgtagggtgaagacacggtctccgtcgatgaggtccttcgaagtaggctcgtctacgtcggggacggctgacgtgactgtccgtggtgacccatgttttatttcttgcggg

SEQ ID NO: 157505 - DNA, 620 bp, Zea Mays
tgtttgaatagctctctgataagtcgctccagcgtttttgaggccgaacgacatggaggtatagcagaaagctccgaacggggtgatgaaagctgttttttccttgtcttcttttgccaaattaatctgatgatacccagagtaacaatccaagaaagacaacacagaacacccggcggtcgagtccaccacctggtctatcctaggaagcccgaagggatcctttggacagtgtttattgagatccgtatagtcgacgcatatgcgccaatccactttattctttttgagtacaagaacaggattagctagccattcaggatgcaacacctctctaataaatcctgccgcgaccaagcgagccaactcagcacggatggcttctctcttgtcgggcgtgaagcgacgtaatttctgtcggatcggccttgcctgggggtagaccttcaatttgtgctcggctagttctctcgggactcctggcatatccgcaggttgccatgcgaatacatctcgattatcttgcaggaactgaacgagcgcgccttcctatttatcatccagactggaactgatgatagcaattttgcgctcgtcggcgaacccgagattgattctct

SEQ ID NO: 157506 - DNA, 395 bp, Zea Mays
cttgctaaggataaaacttcctgaggtgctctatattcaatgagttccccacttccgtgccatccatttgagtaagccgatatgatcatggccgagtgacctccgacaccatgaatggcccttcccatagcgacgacaatttgtaccgtccttctcccgttagaattcggcgaaggaccaagtctcccactacgaaggatcgatgtcgtatagccttatcatgatagcacctcagggtctgctggtatctagctgactgaattactgtattcaatcgctcttcttccagtacgtcaatatcttctagcctggtagcctctgcttcagctatgctttcgaagaccagccttggtgccccaaacctgaggtcggcaggtagcactgcctccgaacca

SEQ ID NO: 157507 - DNA, 392 bp, Zea Mays
ccccaatccacttcgatacatgtggatcgggatggatactagagcatccaaataaaacctaatcaagatcttgcacacagtgccgctaccttgtgtcatagtccgcaccagtagatgggtaggctatcggtaggatctttccttggcaccatgacgccatctacgctcactatctcactaggtctcactatgccgttgcaacgcggcaatggctgccgcttgctgccgctgccatgtaccgacgcatcatcgtcagccctcgctaaccctcgcatgttgtcacctcaccgtcaccgtttcgcgttggattcattgacatgtgacacgccacactgatgcaccgaagcggccgctctgccctagcacactgccaccaccggcctacctctttg

SEQ ID NO: 157508 - DNA, 560 bp, Zea Mays
aattgctaatgatagtagttgttgaatatgtctagttgctcctaatcctgaatatgtccaattgcaaacaaataagatgctttaccagccctaatgtagctcctaaacctgaataggacaaaaactacatcatagaaatgcatattaaaagaaataaaaacaatggttcttgtcatcgttaattgttacgtacattagtttttttacttattcaatttttaaaacgtattcaggggaggcctcattgctgccatcgacagcatgagtgtgaaccaacaggcaagggatcgaacgagacaaactagatgcagtgaaaagcaaaagatagattagtactggatacctacgcgttgaagagaatgaacgcgtcgattagcctgaacccatccttccacccatcagtaatcgtcagcaatagaaattgagatacatataagatctagcatctgtcggctcacccgatgcagactgcatcactcgacgcacagatgaacactaggcatcgtgtcgttcacgaccaccggaggcgggttgagagagacgacaaatcacagggtcac

SEQ ID NO: 157509 - DNA, 369 bp, Zea Mays
gacggagggaggtattgatgaaggtgcacctactgccgaggctgaacaggctgacatcgaagaagaaaatgttgatgaggaagatgaagactacaacactctgatcccatcaaaacccagccacttggactttgaaaaatctattgtgtctgaggctgatgtacccatgatgatgaagctgggctacttcggagaagctaagaagaaacttattcattttgccggagaagaaaccactccagagcccaaaaatgatgaagtagtggttttcaagagcttttttagagcgggattgcggtttcccttgaacaagatgattggggaagttttggataattatgaaatctatcttcatcagctgacccctaa

SEQ ID NO: 157510 - DNA, 790 bp, Zea Mays
ggcggaggggcgtgagccctccgccaccttcggatctgacaccaccgccaccgccaccagcgtcagaccgactgtcgtcactgcaggggcagcggcagcaacaacagcaggagtggcagcagcagcagcaatgacagcgggcgccccgcttccagggtctctagaaggttcagggccccaagtaagtttagactcttccaatgttcttgtgagtgtagcttttatgccgacaggtcttgacccgtcctttgcctgttagggcctcctcctcttctgcttccaaggatgctcctcccccgccagtcactatgcccgctggtggctctggttctcagcagcacacatctgctgggaatgtcactggcgatccgtcagcggctaccgcagcctcatcaacgtcggcgtcaagcacaccactagcagtggccgaagaggttcctgcagcgtttgcccccaccatgcagggtgacgcgggtgctgaggtgccaccaacagctattgcagatccaacggtggcaataccgtcaaatacaccatcggcggtaggcgtgggggtgcgtccagctccatctcgccgccaactctggaggaaccagaggttattcttgggcgaccgctctggtctggcatcgagccagaagcaacaccgactcccctccctcaggtgttgtcccgcgctcatcatgctctccaggaaaccgaggcggcgatcctgcgggagtgggaggcgctcgagaccgagcaccagcgccttggcgactggtgcacccaactggaggagcacactaag

SEQ ID NO: 157511 - DNA, 688 bp, Zea Mays
tcaacgccgctgaggttgccacgacggtggacacggattcacgtgcgccagtgccttcttctacctccgaccgccgcgcgtccttcttcaaattcccggccaccgtcgatgccctctataaattgatggcgcgggcagctgcgctacatcatcccgaaaccagagcctccaatcccaccctcaatcgttcgccagagcgcacgaatttttaattccccccaattcggttctccgccaccgcgaagaacagcttcaccgcggccagcccctttccggtcagctcatcctcctctctccctcgtttgagctttctcataactcgacaatgcttgccaacccacgtaattgcgctaggagctctctggtcgccgggaacacgacgatctagccgcactgctcacggtcaccgtggccagagaaaaacacttgatcattagtgaaattaagttaggggaaaggcttgggatggattcaattaggtgttagtcgctcggagaccctagtcgttgccccaatcggccggtacaggtgctcgccggagttcggttgcgcgcgacgccgtcgaggacctccctctgcgaaggaatcgaagtttgaggactcttctgcaaagcgtcagtgactcaagaaaacagtgaaagaacccgttcctagttagccggaacaccgagggcttttctgcaaagta

SEQ ID NO: 157512 - DNA, 674 bp, Zea Mays
cccggaggtgggtttggggtaacatcccttcccccagaagttctggctgcgtcctgtcctcgagtcctggtcggcatctcaaagaaggagggggctcaaaaaggtctaactccccacccagcgcgcgtcccgcaacgtgagatggtctggcttccgcctcagcagggtgtgcaggctcactagggtgtaactgtaagtataatatatggacttcctcatgcaacgtattgcagtaaacctgcaggtcatcgacagtcgagctaagttctttaattcgggcctgagcccttgcttccttagcacatattagcaaacgagactgtacagcccagtcaagtgctaagtctcgatcagcgagttgatcctgcagatgtcggatgtcccttctcagttcattgattctatctccgtcggtgacccaagcatcggtcctatgttgcagtgctgcttgaagtcgactcacacgggcttcaagatctccgatggggtcgttacttccactgctgctgctttcatgtcggggagccaattgatgccgaggcaccccaattggtcccgtagacttgcgtgccgttagcctggttcatggcggcatcttttctaagggggaaaatatgattcttagcatgatgcatgtataattacagaatcaaccttagtcgattcaaccttct

SEQ ID NO: 157513 - DNA, 337 bp, Zea Mays
ggaaaagaaaaaaatgagtgggcggaagagttgaagtttgatccagtactctgcaaatgtggtattaaagctaagtatggattagttccttccgagcttggtgttggctatttttgtggacatatggtagattacgaagaggttggtatttatttattgtttgcactagctttaatgttacacccgtacttactcttttttgtaggagacgaggaaatgcagttgggagagttacgacgacaaaggagaggtgatgcgcacaataaagtccaagagactaatgggacagaagatgcgttgtggatctcagctcgtcgattcgtacattaacgatcgc

SEQ ID NO: 157514 - DNA, 529 bp, Zea Mays
cagtagtttttgaacttggggatacttctttttagagggtccgagaacttcgctgatgaagtagaccggatgttgtactggatacgtatgtccttcctccacccgctcgactactaacacagtgctcaccacgtgagtcgcgcaggagatgtataacaacagatcttctaccggctgattcggcgtggtggcttgagtactggtggcgtagtcaggaactttttcagtgcttctagagcttcctgtgcttctgtggtccactaaaacttgtccaccttcttgagcaatttgtagaatggcatgcctttctcgcccagcctttatatgaacctgctcaaggctgccatgcatccaataagccttggtactttcttctgtgatcgttacgctttcattctcatgatggcctcaattttttctgggttgccttcgattccacggtggctgacaatgaatccgagtaacttccctgctggtactccgaaaacacatttctctggattgagcttccaccggtatcgcctcaggc

SEQ ID NO: 157515 - DNA, 642 bp, Zea Mays
aaaagattaaaaccctttgaagcaacaaaggctaaaaggatcataatggcctcgaaacgggcaacaggagcaaaagtctcctcataatcaattcccttttttggcaatacccttgggcaaccaacctcaccttgtttctcactaccaacccatcctcactctgtttgtttttgaaaacccatttggtaccgatgggatggcagttagaaggaggtggcaccaaaacccaaacatgatttctttcaaaattttcaagctcctcatgcatagcattaacctagttaggatcagataaagcgtgtccaacatcccggggctcaaaagtagcaacaaaagctgagtgagcaaaatgagactattgtgacctagagcgagtgactcgctcgtgaagctccccgatcttctactgaggtgggtgacaacattgaatgtgctatggagcctccctcgatgaattggcctccccctcaacagcagcctcaactcctccagtctcagcatgagctagatcgagtggaccccaagtggtggaagaagtggggtcaggtccgtcagctgtagtagtggaagcaggctcgactagggcagtcggtggagtcgactcgagagcaccccaatcggcttcgtcgtgctcctcctcca

SEQ ID NO: 157516 - DNA, 812 bp, Zea Mays
cgacgactgttctggcgctattactgtggcaaggtgtttcctgccgtacaagagagaagaaacatcaaaaggtttgtagatcataagtaccatctgccacaatgaaaactgtcctaggtattactcctaatggatattatgatccgtgatccatccatctaggtgcaggaacagaacttgtggcctaatgttggggctgaaaccattaatcttaccattcttttgattgttcttccaagattcgccatcttccaagtctccaagatagagcactcgccatcttccaggattaaccgtcaagttttcttcccttgctgctgatagagacaacctcatattcagtttgaaatctgtccagccaaggggaaccagtgtctgcacaagttgacaggttagtgactaatatagtacatgtttcagatttcacattagtttacaggttacacataaaaacttaacatgtttcacagacagaacaatagttcaaaggtttcagatttcacataggtctcacatattcacgcccaagttcacaggtacacagattcatagaatttacacataagttcataggtttctgtgatgttcactggtacacacacaaaagttaacaggtttcacagactcaaaattggtttagttcacacacaagttcataaaagaagcttcagttcacacaagttcataggtttccgtgatgctcacatgagcagcccctcaccaatacaggtttcacagatttaacactggttcagttcacacacaagttcacaaaacaagctttagttcacacaagttcataggtttccctg

SEQ ID NO: 157517 - DNA, 563 bp, Zea Mays
ctgctatgttagaaatgccttacctcgtgtcagattggtaagtcttgttagttcgtgctatgtgtttgtcttgtcttgctagctaggtggtattgtaattgtttaaccctctttgccaataaaaattgttgcctgttttgcccataaaaagacccctccaaacaaccttgagtttagcaagtgaaacctcctaggtaaaaacaaatcctacttgtgttggtattttctagcccccttgagtgttttacctttgaagttaaacctccacaacttgtagaaccccatagcttaactgctagccaaactaaaacttccttgtgcacttattgtgtcaaaaaaaattattgttggtgtctagttgcgcaaaccctatcaaggccatgtttctttccataaacccttgcccctaaaacttcatagcatttctgctaatcatcctagctgatcctgtttgcctacctctcctttcgcatggatctagtaatccttttccttgggaatcatgttggctttgtcatccaaatctctggatcccttaatgattctgccccgttatctggtta

SEQ ID NO: 157518 - DNA, 509 bp, Zea Mays
ccgcaatttctcgcccgatgtccacctcaaactctacgagctagtatttcttgcttagccttcaacccaaaggattacgaattccacaaacgccaacaggctctccttgcaagcctctctttttaagttacggggcacttgtcatgcacatgggcgaccgagctcttccatttatatctctaccactcctcatcggtgaccggacgaacgccgggagaaacaggccgatccgtagctgcctgcacacatcggtgatcgttcgatccatgtgcgattgattgatcagggaggagcgagtgatataatgccttgcttggcgcaagagttccacccgaagctgcccgcggcgaaccactactgcaagtccttgtcgtcgctcatccgggagacctacgcgcactgccatgtcccctgcgtcgggatcgccgggtggagctccggcggggacagcgacgacgacagcgtcctcgacgaagcgcgagataccaagcaggtaaggactggctgat

SEQ ID NO: 157519 - DNA, 525 bp, Zea Mays
gttcagcccccctcaccgccggtgatctcacgctcggatttgcgccggcgtcgcgattcacgctcggttgaacatggataacgatccttggtgaaaaatcgggcgctggggatgagcttggaacactgttccgccctggccaccgtacacacttgcctcacgaccggtcctgatcacctcgccgaagttggccgcctgccgctcgcgttccacgtgcccaagtgctctacctgtttgttcatcaccggtggtcacgccatggtgcgggccacgaatcatttgcaccagtaaccttcttcctctccgaccgccagcgcgccatgctaaattcaagagccaccgctctcaggtcctataaattgagcatgctatcagctcctctaggtagtcgcgcacccaacacaccagcccgtgcctcagatcgtccaccagagcgctccagtttgggatttcccccaaatcagtcaaaactccgcgggagtgagctcaccgtggctagctctctacaggttcgttcatgtcttc

SEQ ID NO: 157520 - DNA, 560 bp, Zea Mays
ccacactctataagcaatatgctcttggaccaagtctcttgtgcgatataagtgcacactatgttgaaagttgtcttacatgcttgcacgtcactcccaagtgcaataagtggcctcctaatgccgaagcgagaccatatagggcgctgaataatcccttttatatcctccccaatcttcacataaaaccattcctgaatccaagagcctctccattttttccgaaatgtcggcataggttaactggcctctgagcggggcatgaagttgtagcagctaaaattgttgtggtattgttctttcccagtcgccttcgtctgatattataattcgtgaatattgcagaaacatctggctctggctctaacccttggctcctcgtggcccatataaaacccctactttgataaaagcttcgggggtaagttcatgaagataaatttcaaaagtttttagaacttcaaccatcatcttgtccaggggaaccgaagtccagctttcatgaagcttctaaaaatcaccacttcatcaccttcgggaagaggaacggtactctcccc

SEQ ID NO: 157521 - DNA, 910 bp, Zea Mays
gagaagaacgacggaaatcccaagtcacgagaagctaaatgatggctcgatgaaggaacatcaccagggatcaattcgacgccactaacaggcatcagaactccagcatccagtgcgccgacctctaaggcgactcctttacttgaagcatgcactgctagtacaccttcagaatggggtggagaagatccgacgtggacatccatggaggtatgagaagaggagcctgctcagacaccctcgagggctgggttgcagcccgtactgcccatcggagccggattaccaccggcaacaccctcaggggctgggtcgcagtttgcgctacccacccgagccacatcattaccggcaacaccctcgggggctgggcaaccgctagcaccatccttgagaattgagttctctgcaacagccacctctaaggctgaaggactctcggtcacctccatgggaattgaacaaccttcaccaatctcttgactccgaagaccgccctccaaggtcgacaatgcacgagacactgcccgggatacctctaatcccacatctggaatgtcagagcagacatccatcatatcaccatcaacgggctcggatagcatatcttcagggacaacatcctcgagagcctgatcaaaatttgctatggacaattcttgcaaaccaacaagagcagatagagctcgagaaggaatatcgctaccctccccattgactctgtaacgtcaactgttcttccgaatcaataggacttcttcttcttcttcttcgtcctcgtcaacaatgcagaccataaatggcatagagtcacacccattgagatctgctgtggtggggtcacacccatcgggttcagcatcgtcaaggtcacatccattgggttcaactcttgcagggtcacacccat

SEQ ID NO: 157522 - DNA, 409 bp, Zea Mays
atttggaaaataccttattagctattcatatttattttccttacttaaaaagttgggctgaggtgttctctatttttgtagtggggctctggtggttgtaagtccactggacttttattatccattttgggtatagttttgcaactctaataattgattttctagttcaaataaggctaaataaagcattctaattaaaactgatctggactaatggtctctctatttttcctaggttctctgttacataggtaaactaggaaaaataattttaatcactgttcattaatttctaatgcctttctgatttttcctaagttttgggcaaaatagctttaaatgattaagcacatcacatttttcaatgctggggttcctactatttttaaacagtgtctaaatgaggttt

SEQ ID NO: 157523 - DNA, 524 bp, Zea Mays
ctagaaatggatctggaatggattccagctcgtcgtctctcctctctgcggctcgtccgtacatacacagtggttccaagagaagaagaaaaacaaacatatgacgacgcgacatgggcaagcaagacatgttcaagtgttcaacttcgacaggccagccagccatggtcagcctgtgatccattgatccagacttgagatctacaagcatacatgcatactccgtccatcattcatgagaagtgcagtggttcccaaccatcattctgcaaagactagagccaattcctttatgttgttagacacgtataacaatccattgtacttatgatatttatgcccctcctcttttctagtgtttggtgtaacacatcagtgaccttcgttatgttttccataaggagtagaataaatacagaatcaaaagctacgataatccaaggtgcacctctagcatcaccaggagatcgaatacctcagtaacagaccgatcaattgcaatactacgtagaactaggcctcat

SEQ ID NO: 157524 - DNA, 544 bp, Zea Mays
ggagaagaggaagccacctgggaaagtgaggactctctgaggagggaatacccttaccttttctcgagccccgtctgaatctcgagggcgagattcctttaagtgggggtaggtttgtaacatcctaatttctaacctaggtttgaaaccctaatctaaccccgccccttcttattatctatcccaaaactcccttagattcttcccatcatatgcatacactttgtttgaatatgaacacctcacttagattttattttccagcacctagattatctactaaataaattgttcaaaaggaaaagaaactaaaatggaaataggaattagaaaataaaaagtaaaagagaaaaccctctccccctagctgggctggatctagcccatgccgcggccgcctccccctcacgcccgcgcttctcctccctttcggcccattgccggcccgctctcgcgcgcgcgcagccgctccgctccccctctctctctcgctgacaagccggccccacctgccagccgctctctctcgcgcgctccctcccac

SEQ ID NO: 157525 - DNA, 547 bp, Zea Mays
tcggtcaaagctaaaaatgtgtgagaatgacaattatattaggagatggaaggattaagttggagcctcccaagcataaaagcgttaatatcagtgctacaaaagttggcgccaataacggctgacatgaccattagcaactctcatcaaacccagaattacataacatttcccagatctcactcttttttgcggatgatgtgcacattcatggtgcacttcttggtcttcagtggctcaaagaggcagatatctcccagctgcaaatagttgtcacgagcaaactgtgcccacccgttgcgaagccttttggattcgcctcgatctttccaaacctcaatgcaatacatcacttgccagctcttgccatgacactgaagaatcaacgcaccgctcttggatggaagacacacatcaggatattttctggagaagacctgattacagagggaaatggtttctcagtgttggaagttagcctgtaaatttcttcaaggagtctaggaagctataaacagcctgctcgctgaaggacgtgcaatcgaaa

SEQ ID NO: 157526 - DNA, 351 bp, Zea Mays
atcgaggtttgatggacagggaactcttggggtgtgtcgccgttgggatttatagctatggcaaggggcaatcgggtctgagagcagagagaggcgagatgctagagcgggactccatggcgttgctcggtcgagtttgacgcccacagtcggagttgatggtggcggcgggtctatatgctccaggaaggcagagtccacggaggttgcaaatcccgaccttagcgcgatttggggaaaaatccgttgcggtcagcagaggcgagaagaaaacgcggcggcaggtgcggcctccatggatttggttgaatggactcgggatagggatgggacttaccaacgggtcccaca

SEQ ID NO: 157527 - DNA, 464 bp, Zea Mays
attgttacttccccttaatgaagaatgatattgccttctctgtgccaattgttctgcttcgtaatcaattaacttctgccgtgatattcattgctcatgatgctctctatctgttacgtttgtagcataacttagagttcttgaatcattcctccgcccaccttatttgtgaagttgatttccttggaatagtaagaaaataactcggtcatcatatcgacgcttttagaggtagctgccgagtgacttgaagacgacgtcggagttttagagataactgccgagcgaccaaagacgacgtcggcgtgtcagaggtaactgtcgagcgactaaggacggcgttggagttttcagaggtaacgccgagtgacttgaggatgacgtcggagttttagagataactgtcgagcgattgaacatgacgtcggagctttagaggtaactgccgagcgactgaggacgac

SEQ ID NO: 157528 - DNA, 394 bp, Zea Mays
ggagcacagcctaaacccttccaggacaaggatcaagtgaatccagttggttcactaaaacctggtctccagtgaaattcaggcaggaataaaaattgtagaacatatgatggttgttcgtttaaagcaggaatagaaacacttgtttcacaacaaactggtattatctcgtgatgctttgttgtctcacctcatcaagattcgatccagagggcacatgactaggattggtaccgagcctatgaaggaaggagaaacttcaaatcgaaccatattcgttttaaattcagatagaaacgaacagtccggaatgaaacggtcaaagtccaaaccaggctgattgtttccatctggaacgaggacaggaacagactgaaccgctagaaatgaacac

SEQ ID NO: 157529 - DNA, 536 bp, Zea Mays
acgagtacgtagtatttttcgtgtcttctgaatattttcaatgggatatagctgtaaaaaaagagacatcattagctagtataataaaataaaaattaatacaagaattatgcagagtgctggtttgcttggtcaacacaaattgtattctacatgaactaatcgcagtggggaggtggtgaaggtatgctctactggtgttagcaaatcacaaaaggacaatagtctcatgatcatgagaagacgtcaacatgtcgtggtggtctgatcggcaaggaaaagaagacttagcatgggtctgctcagccagatctctggcttatggtctgctcgggtggtgatggcctgctcggcggccatggcgttgccaaccgcaaagatctggccgcatgcggatttggtgtgggagggacacggagccacggaggaggcgcgacgcgggagggaaaaacatgggcgcgacgacgagtcagtgtgcagatggtggccggagccggaagagatgcgacgggggcggaagagatgcggcgggcgcg

SEQ ID NO: 157530 - DNA, 569 bp, Zea Mays
caacacgccataccgagcgtgtgcctgtgcacgctggtaggtgacaaagggcccatgacgacaggagaagccacgccacatatgaccgcactttgagaatatctttggaacctgtcgcacaccattacgaagatgtcagcgatggactcgctacaagagccagagcaggggcgaggataacgccatgccgagagtacgactacgctcgaccctatgtaggacccaacatgccaaccaggtgagcagatctctctctccctccctctctctctccagtagaatacatgtcccactgtaaggtcctacccttgagatataaaaaagaagccccctccttcgcctactcatgagcacactagttgtaacacgcctctcggcaatactacgatcagcactacaccagactagggtgcaagcctgaaccagtataacccaccatctcaaatccatcgcttgagtcccagcggctctccattcgaagtgagtccatggtagcttccccttcgaacacaaatcttcttgtcccctcgtttccaaaacaatgacaacaccagaccgagtactgttca

SEQ ID NO: 157531 - DNA, 1133 bp, Zea Mays
tttgatctgagaacaaacttgccacaaaaattcgaatttgaaatttggaattcaaaaataaaaagggaaaacagaacagaaaatgtaaaagaaaaagaaaaggaaatgggactgttgggctggaatcagcgtgttttggcccactttccaacctccaccgcgcgccccagctcaaagtcacgcccgcgccgacaggtgggacccacgtctgggcgcttcttccccgcagatctcgccaacggaagcaagtccgtccaaccttggccgccacgatttccgggtcaccggggacgccagctagagatggttttctctgttgcgttcaggcctcggggtatataacccaccctagacacgcccagttctccgtcgaatttgggcgaaccaccgtttccgccgcgcgccatggccagtacgacctagacgtccgccgccatcgactgcacccacacgctgctgacagggtccgtgtgccgtggccggagcttctccaagtcttcacgaaggcgcttgtggacatctgggggcatgatcggcagtcgtgctgaggcaatttctcaccggagcctcaacgccgccgcaggctcgcactccgccgtggacggcatcgaccggacctctattgtcagtgagaaccacccctccctattccctatgttctgcgcttcacgtaggacccttaggagcggggattggggcatctgcacaccggcacggctatcgccggcgtgccctccgccgtgcggcattagagcgccgccgccctggtggtcgaaatgagggagcatgccatggaccgttgatctgctgagtgacggccatgatcaatcgggggataccgttccagtacataggatcgtggccattgcgggcttgatgaacggctaggagtagacctcggcttcataaaatccataccctcgatcgttgatccgatggtccaccaagcgtaccgtttcggcgccctccagatctaatccgagccctcggctagtggtccaacggccgaggtttgcggataccccttcggccctgtaacattgcgtaagagaccctaggttattacaaaatagaacccgccgtccagagctacagcgctctgagtcttgggaatatttatagaataaccccta

SEQ ID NO: 157532 - DNA, 766 bp, Zea Mays
atggggcacagaagttgccctaagatgggtgattacgaacatgccaagcgtgcagtgccaatttaaattagcgtcaatttaaaccgactgctccgctagtagggcatagtggtcaccccgagtttagataagagtgagcatgtcgcaccgtcttaagtcattgcgaacttaagccgattgctccgttagtagggcatagtggtcaccccgagttaagtatgcatgagcatgtcgcaccgccttaagtcattgccgacttaagccgattgctccgttagtagggcatagtggtcacctcgatttaagtatgcgtgatcatgtcgcactgccttaagtcattgccgacttaagccgattgctccgttagtagggcatagtggtcaccccgagttaagtatgcgtgagcatgtcacaccgccttaagtcattgccgacttaagccgattgctccgttagtagggcatagtggtcaccccgagttaagtatgtgtgagcatgtcgcaccgccttaagtcattgccgacttaagccgattgctccgttagtagggcatagtggtcaccccgagttaagtaagcatgccaattgacagtgaacaatctgagtgcctttgaaacctttttattgatgatatttttcttaatttacagaatacatcgtcgtcccaatagcttctgagatgtagctaggggtaaaacttcctgagatgttctatgttccatgagttcccaatttctgttccgtccatctgagtgaggcgatatga

SEQ ID NO: 157533 - DNA, 590 bp, Zea Mays
gcggggagaagaatccgcgatgcctgggttagggttggagcgagcggcgaaatgccctgactccatccagtccaggaaaccgaagaggcaaaaggagcaggcgagcagcatccttgggccgcacaggcaacagtagacgatagcccaccgagtccactacgcacaccaccgggaccatgcgcgacaggagcgggggcacacggagaagaaggcgccttggcccagggtgcttttcgccttttttcgccatcgtccaccaatcagagatagtgcataggataaaaacctctcatctatcggggaccactgaccaacaggcgagaaggggaaccgtctaccctagaagcgtccgcctcaggataaacccaaaggcagcgagcccggggttttgcatggaagagctagagaggggtcgtgcgaaccagaggaaagccactcgagtggattcctcgtctggctgaagactaacccatcgtaagtggttgattgcattagctatgcctaacactgagccacagtagaggaccggtccgcctctcactcttgacctgcgaatccctcggcctgcagcgcactcatgacctacaaac

SEQ ID NO: 157534 - DNA, 430 bp, Zea Mays
tccggggacggtcaaggcgacccaacactcgctcccctccccgggaccaacgacatgatcatcgacatgaggatacatgtggagtctccacgctcacccctcgtctgtgtttatcgcaaagttctagtccctctccgataaaccggcgcagccgtgggacctcaaatccatcaggtggcagaatgatgaaactcttcgttcattcctctgaagatttcaaacaatgaggaaccgtatccccgaggttgctgaggtggctgtgatcgaagatttctatcggggatccaatgatccagttttagttcgagtcatacttcaaaaagcacctgccacctctaaacaactgttcagggaggcggacgtctacatcaccgcggatgagcgggttcaagacctcattggaagtgcaaatcccgtaccaccaacaccg

SEQ ID NO: 157535 - DNA, 885 bp, Zea Mays
gtcgcggattggctagaagtcatggctgggcaacacctcgtcggtgccattgctgatgtcatttgtgttgtcgtggagggagcgatggtgcccagggcggtggcggattgcctcctccagcgggtccaaggcgcatcaaatagaatagctcgtcggccctgcatgtcagtggcgatagagacgacaaggccctagatctgcttgcttctcccacagctgcctcccaccatcaactacgacacgttcatcgtggcgattccgagcttgcttcttccgacactgcctcccgtcgtggctcacaaggacgaaaagaagcgtggcaaacaggtcggatgtgcacgctctagataattgggggagactttccctcacgtaaatatgcgggacgaatcgccagagaaatgtcgcagcaaaaaaaattgggaaggttgtgggatctgttggaggcggagaaaatggagcccccccccaaatgtttttccagtgagttttggtgtcgtttttatagttgctctaactatttaacatccctaaccactccttttctctctcacatgcacccctcctcacacacacatctaaggctattcctagtcatgattttatttgaattttgtttttatcaaatgacctgtcattcgacaagtacaatgatatgacaaggatttaataaagagagatagggagggttttatgtgaggcgagagcaagtaacgaaactctatactaggaatagcctaacccacttagagcaagtataataagaggttgtaagcaggctaaatgttgaggtgtgaggtggaggacagaagaggagaaacaagttgtaaaaactttgtgagagagataagtaaggtcctacattaataatgaaatgctaactag

SEQ ID NO: 157536 - DNA, 1423 bp, Zea Mays
ctctactttggggctctatatctcctaagttataaagtgtttgccctagatcaacacatcaaacctatagagctatgaaaggagaacaattcttattaagtgaccaagcactgatgctgtgtaaattttggagaagactagacccaaagatgggctgtcagactgcttggagtctgaattcagactgacagaggaattgcatgaacttagggcttgaattcaatcatgatccaataagaattggactagggatgctatagcaaaggtgaagatggtttgtagtgctacaactttgctgcagagcattggttatgttgccatggcaaatttggagaaaacctgccccaaacatcgactgtcaggctgactgaataggattctgatggtacagtgaaccggataggatcaaattcagatcacatcaccgccgacgagctatgcacttggattcgtgctcgccgttggcgattcacactcggatcggttggatagcgtttggggtcagtaaatatcccgccgtggatatgctccgtccactaaattactccgaccaccgtacccgagctagccacggcggattcagatgagttcgccggtgacagacgcctcacggccttgcgccacgtgccttggcacatccatcgcatcgccgtgactcgcattaaccctccgttcatcgccggggagcttgccacagtaataggacaccaatcgcgcgcgccagtaacttcttgtttctccggccgccgcgcgtcctcgtctaattcaccggccactgctcgcggactctataaattgagcgcaccgtcgggtccgtagggtaatcacgcaccaagccaccaagtcttgcctccaatcgttcactagagagctccaattccttacttcccccaaatcactcaagaactctgctcggtttgacctcgccgtggccagcgcgcctcaggtccgctcatatcctctgccctcccgttttagcgttctggtgtgcccctaatactccctgaccaactcaattgagctaggatcccttagatcaccgggaacgcggttgactgtccgcgatgcccactgtcaccgtggctagagcaaattaggtagccgttagtgaaattaatttagggaaaacgatccttaggtcttgaattcagtttctaccgaagtagggcgccggtcattaagtgaatcggccggtgagagctcgctggagctcggccatgcgctgtccaccgtcatggacctcaacctgcgaagaaatggaacatgaagggggtttctgtaaggtgtcagtgactctagaaacagtactgcgaacccgccttcagttattcataacatccgggacctatttgcaaagtctacgcgggcgcgcgcgcgggcgctttccttctgtagtgagctgacttgggccgctttcagtcca

SEQ ID NO: 157537 - DNA, 362 bp, Zea Mays
gggatacgagaaggaagcactcaagagatcatgattaatgggcttcttagagtcacgagatatctaatgacagcaataaaatccacagaaccaaaggaatacactatttatagatgaagttagtaaaacatcgtcatgatccttggagaagggggggtatgagaatgaccagaaatgagagatttaggcaaatcaacatccgatacttgagaacaagttatagcagataaccagaaagcggggcagaatcattggatgatctagagatttgacggataaggtcacaacatggttcacaaaggtaaggattaccagatccaggtgaaaagagaggtagtctcatgagatcgattcggatgagc

SEQ ID NO: 157538 - DNA, 752 bp, Zea Mays
atgatatatcccaggatgcaatcagttggaccggacctccacgaggaagcgccggacccctgtacacacaacccggacccccgaatacggtccgggactcccaagtagcgtgccgggtcccttggatggggtccggatccctccgagtaaggtctggaccacccataatgaggtcccgggacaggggatactctggccaaagcaagggtacggtactgacacgtgaccaggctttatcctgtgcacctgcgctccccgctcaggcggagacccgatgctgccacgtggcttgttgcccgtgacgtaagcctgagggcggagcctaacgtaaggcctctggaccgtgcaatctctgcatttattacggagaggacgcgccgcctgtccaccctgctgacaggcgatgtgccccctcagcatttaatgtgtcctgtccactccgctggcaggaggcgccagggccatcctgcagacggtgtgcctgtccaatccattgtcaaacagtgcgcccgtgttgcggggtgcactgtgtccatcatcacttatacgagaagcttcccctgcacgccgatactacgcagatctcggatgtcaggacgcaagaagattgctccagcagcgaacattagtagctccaagtactacatccgttatgttcctaggcccacatgtcggggctcagtacccttgtacgtgccccccttaagtataaaaggggaggcatgcagcgtaacatggggacgcactccgac

SEQ ID NO: 157539 - DNA, 373 bp, Zea Mays
ttgattttgaacaaccctgcatatgtacagccacatctgtttggcatttacatgtccacattggtagataggatcatagcaatcagaataacattgatcagatccaaagtaatgtaatgtgtgattaagacacaaagcagtaatgataatttcgtaagcagtggagccaataaagttctagaccaactataggttgtttataaacatagaggactcttaacggaccaggctcttgaggaccttacaaagtacctgagacggcagagggaaggaggtgacgaggttggcgcagtagtcgcctcctctagagacgacaacaacgtcgagacgatgccgaagagctcagagccctaccagcacgcttcctccagag

SEQ ID NO: 157540 - DNA, 768 bp, Zea Mays
aaacaatgtatagtttaaggcgaaacacagggagtagtccttaccggcgatagtggtgcaggactctcaacccacgagaataggctatccgcggtgatgactctgctccgacgagcaattgtgttgaacttgcgagctcctaagcgctaccacacgcacgcgtatactccacggttcttggagaaggttattagccaatcgtagagcgctgattactggcggagacgagctatggcggtgatggctccaagtcttctctgctctcagtgtcgtgcctgtttgagaggaccagggggtcgcaagcatggtttatattgtcttctaggatctgtgatggccggcagattacgcggagttcaaccacccggcaaacgtgcggtggtcggtgatggcggagtccaatttgcaaggatctcggcaagcagttgggggaagatagagctgacacctcgggcccacgtggcagaggctggcgtgaggcaagcgacgactgacgcacggtcccaccaccaggggtagcgggcgcggccctaagcacgcgtgggtgaaagtgactggcaatgcgggcctgacgcgtgagtgacatcatgcggcaactagagatgagtgtgtgtgcgggcgtagcgcgaagttgggccgacagcagaaggatttcggaaaaagggatgggccgcgcggagatgagtaaagatggccaaggaaaattcggcccagggcaaggtttgctattttctgcttttctttttatgaattctttttcaaactttc

SEQ ID NO: 157541 - DNA, 297 bp, Zea Mays
tgctgccttagtgtatgaaaggcatcctcacacttctggctccattcatacttgactcctttcttcaacaattcagtcattggcttggcaatcctggagaaatccagaataaatcgtcgataataccctgccaatcctagaaaactacggatctgccgtactgtggtaggaggtttccaatccatcacttcttgtaccttctcaggatcaactgataccccatcctgagagatggtgtgacccaaaaattatatctccttcagccagaaatcacatttggacagcttagcatataga

SEQ ID NO: 157542 - DNA, 575 bp, Zea Mays
gcgaatatcaaaaacttcataaccgtttcttcacttcccttggtattggacacacgtgtatcttgtccacacactcaccaacaaaacgggtcagcagaacgcaaacatcgccacattgttgaaataggcctcactcttttagcacatgctgccatgcccctcaaattctgggatgaggcctttaccacagccacatatcttataaacagacttcctactagggtcattgataacttgtcgtctctacaacgtttattcattgctcaagatttttggttgtgcctgctggcctcacttacatccctacaatcaccacaaattatcctttcgttctaaaccatgtgtcttcattgggtatagttcacttcataagggctataaatgtttagatatgaattcaggtcgagtctacatttctcgggacgtagtttttgatgaggctctatttcctttttctagtccttcatcccccgttgcggaatcatcccagggcagtacgagtgctatttggaacaataatcatttgcatactttgtttcctgctaacactgtggctatagaccggtatgctgtcc

SEQ ID NO: 157543 - DNA, 663 bp, Zea Mays
cttggcgtcctttcacattttggactgtggaagtacttgtatcactatcgccctgggatggtgggggtgcgagtttggagatgcaccgtggaaggaaaactgactaccttgaaatcccactcaaggatagtatcaaaggatggctcttggtgtggtttattgttgagaaccacggaaaatctctccccccacggtcagggagacagccggatgttcgtactctgagttggaccgagtcccccacggaccaggaggtggctgaggcaggggctttgctggctgaagttggactgctgaaggagaggggttttactgcagaggctgtggttgctgattttgtcttcaagaacattcagccgttgaaggacagggcatgcctggcctatctgtatcgaggtttagctgacccaacccaggtcaccaacagaagaattcctgctgtagacttagtgaaccggcttgaaatgatacttagaggcaaggtatcaaatgttggcgcccctgtggcatactcggcctggaacctgcctccttccaaggccttcactcattttgtgtcgaatcctcctgctgctgatggtggtttgggccttagagtgcgaccctctgccgaagaagttagtgctttggttgcttcgctcggagaaattcctgatgatgaac

SEQ ID NO: 157544 - DNA, 1225 bp, Zea Mays
ggccgacgaatcgtggagctagcttcccttttgcttggaatcttttgactccatgcattggggcgccctcgagattcagaatgggtttgagaaaaggtaagggtattccttccttaatgagtcctcactttcccaagtagcctcctcttctccttctctgctccactggaccttacagagccttacttctgaatttcgggtctttcgaatggctgaatcgagaatcttcactggtttttcttggtactacagatccttctgaatctgaactgattcttccgtgatgtgactctctggtactttcaagcatttgcgaagctgagatacatgaaatacattgtggatatctgacatggactctggtaactgaaggcggtaagctgcgggccctattctgtcgatgataggataggggccaacgaatcgcggagctagcttcccttttgcttggaatcttttgactccacgcattggggagaccctgaggtagacaaaatctccttcctcgaaactgagttctctccttctgttgtctgcgtaactcttttgccgactctgagcttcgagtagtcttttgcggatcagggcaactttctcttctgcctccttaatgaaggcaggcccttctaggttctttttccctacgttagaccacatcagaggggtctagcacctctttccatacaaggcttcaaaaggtgacatcttgatgctggcatggtaactgttgatgtacgaaaattctgcatacggcaaactagactcccagtttttgtcgaaggtcaatacacaaactctcaacaaatcctcgaggactttgttgactctttctgtctgtccatcagactgggggtgttaggcggtgctgaagtctagcttggtgcccatagcttgcagaaggctcaaccaaaattttgaggtgaattgtgttcacctgtctaacactattcttcgtggaatgccatgaagtctgactatttctttgaggtatatccgagcaagggtggctcctccgaaggtagtttttactggaatgaagtgagctaccttggtaacacggtcaattataacctagatataatcattccctttttgggtctagggtattctgattacgaaatccatgtctatttcttcccacttccatttgggcactaggaggggttgtagtaggcctgtaggcctctgatgctctgccttagttcattgacaagtatcacaccgg

SEQ ID NO: 157545 - DNA, 769 bp, Zea Mays
gtgggccctgagggttaaacaaaaaatttgcagagattgtcaatgttccaggagtgctctaagtcttcgccggatggcgttgatagcctgtacatgctgggggatgccttcgacttgacgatgaatggaccctcccatttgggctccagcttgccccgtgactctgtccgggtggtccggacgagtacgaggtctcctttgttgaactctcttgggacgaccgcgttgtcgcgctaggccttggtttgcctgcagggtgaagacgcagtctctcttggcagcgagggccctgggccctgagtgggagccgcaagttccgttgtggacttcgtgtaggatctgaatgccttcggtttcggtgacgcattttagcatggtttgactgatccccttcttgtatagctggtccctaactagtacgaagtccccggcttcggtgcttgaggcgcttggcctcattgacgtcactcgggtggtagtatccttgcagaaacagtgttattggggcccgccaatcttcagtcataatgaggttgacaatgcgatggccttcggcgtcgttggttacttgtaatccctctgggttgcagacggctggtgtgccaatgacgtggtagaacacatcggagggcaaggtctcgcctctagccgctgccttagcaaacgcgtcggcctcttcgttcctggcgcggtccacatgctgtaaggtgaagcccttgaattgtctctcgagactgcgaacagccgtgagatactgcatgagtgcggg

SEQ ID NO: 157546 - DNA, 679 bp, Zea Mays
gtcatcgaggatcagcgctggcttttcgtcggcatctatgatggcttcaacggcccccgaggccccggacttcctggtcgctaatctctaccgcttcctgctgcgcgagctccgtgggatcttctacaaagaggccgatccgaaatccaagcgactgtgctagttcctggcggatggcgaggatgaggatagcgaactcgacttctcgggctccggccggttcgcgctatcgcttgccaggctcaaggaacagaggcatcccttgtgggcccatgcggccgccgctggcgatggtcaaagcggcagggagtgtggagttaagaggttgacggccgcgccggcggtgagggatcacagggcggtactgagcgcactggcccgggcgctagctacgacggagtcggcgtacctggacaagaccagtcactcaatgggatcccacctagagctggcagtgaccggagcttgtctggtcgtggttctgttgagggatgacgacgtgtatgtaatgaaccttggggatagccgtgccattgtggcgcagcgatgggacgacgaagattgcttgattggaagcatgtgggtggaggacattggtgtgggcttggagaccgagacaaggatccctgggtattcggcaattgggctcgaggcattgcagctgtcgactgatcatagc

SEQ ID NO: 157547 - DNA, 757 bp, Zea Mays
tgcacccacggtcaagattaaatctagcactttaatgaaccgggattcaacctcagccacgggatcccgatcccacggtccaaacgccatcaacccccagatccacacgattccctacagatggcttggattaaatcactacgaagagttatcccaggatctaatcagggccgtccaatcccaaatctacggacgcggccccatcttcttcctcccgtcattcagaccgatggccatgcgcagcgcagcagcgctcgccagccgcggtggcgccccgccagtgcaactcgttttccctccctagtttaatccacaaatcagaagggtgctacacggagtgggcattaatgcaaacaaggtggggtaaatcttaccaacgtcaacgtcacgagggtgtgggttctcgccatgccccggatcttcactgccggcaagaaattgcggcggttcacggctatcatcaccccaggcaagaccacacacatgtacggtgatcccaggagcttcatcgcgggtgcttcaatttcttcgaacgcctgcgcagagggattgcccaagcagccgcacccgcggtggacttagctccgatgcgccaatggttagggaggagcccaaggcttggttggttaaatagggccgagtacataggatgaccatcccaaccggtaaacgcgggcgagaccgaagcgatcccggcggctgcaacaatccccgcggaaaccgcggcggagagattcaccgccatgcacccgagggc

SEQ ID NO: 157548 - DNA, 369 bp, Zea Mays
agcgcacttcggatcggaaatttgggcgtcgggtcgtctgatggttgtgctccggcgggagctccaccgtgtggcggggcgacgtcgttactgcccgggatcgagtggggagaaaggctctggatcattgatcctttgatcaagggctgggaatagatcactgttgtacccctttttgtagattagatccgatccttcaattcgtagatgcacggttacgacttaatattggcataccagtttgaccgtctgtagtgagcccttggatccagatcaaatggctatcacaacataccagttcgtgtcttattcgtggtcgtcaatccgtgatctgatggcctggggtgcacccacgttatgagctgagaa

SEQ ID NO: 157549 - DNA, 616 bp, Zea Mays
aagagaccccccttccaacctccaagagttatactagctcttcaaaaaatatgcctgttcacaggacctcaaccaaaggaaagtcgagtcacaactaaagccaaggtttcgcgatccagcaggatgtggatcagggccccatagcaataccccccgccaagagtgtggccagcaactccaagtccataatatcgcaaaccaacaacaaccagcgaaggccacccccagtgccaaaactacccttcacaacaaggccgcaccggcaacgcaccaagaggcagaggtagaggcccctagcagcaaaggaagttttactgcatcttccatgatgaagactcagagcacccaaccaaagattgctcggaaacaaaggaaaccaaagatcggatggccagagccgctccggcaaacaacgagagagccatcgctcacacctaccaaccaccccctccacaaccacacccataccaccgctcgcactatcaaaacgaacacccacactacccctagcaccaacagaactacaatgatgctttcccccagcggccacacctacaacaccaagaaagactagccctaccaccccctcagccataacaagcaaaccaacaacacc

SEQ ID NO: 157550 - DNA, 587 bp, Zea Mays
gttgctgccgcagagcatagacggggctgacaaagcagaaggtgaaatggaaacaagcgcatgtcaatagtttccgtgaccggggctgcagccctggggtctgaatccgccgctgactattagttctaaaggttctaaacaaggcttagacatgatttgattgtatttatcctttgcccgttctccatggtccacatcagttccatgatgtcgggttactttggcatttattctgaccgccagagctattgtggattgtcaactgtctagcttgtcagcctgtttttgtgataatcgctttggtgaaaactgtccaaagtcaacgtaaacaaggaattggtcgattcatcactatagtagtcactttcaagattctaaaccatatggatctcttcatctttctctgtatataatctctgtgatacttagatttagattcttttcatagtaagaaaagtttgtaaggaaaaattgaaacaaacacgcccctcgtctctccattcgcccttctgctccccacaacaaacgcatcgattggctatttggctatggcttaggctatatgcaatggttccctctaaactttg

SEQ ID NO: 157551 - DNA, 1114 bp, Zea Mays
ctccgagcttgtcgccggacaaattgaaaaagatttctcaatcaaggagccagtccatatgcaatacttattagctgtgcgaagcctggagaagcagttcaaagggttcacactacaacatatagagcggagcaaaaatgaagaggctgacatgctagcaaaagcagcatcaaaaggcgacccctaccctcaaatgtgttcttccacacaatagacacaccagctgtaagaaatcccgaaggcctgcaaatcacaaaagatcctgaaggccaaagaattgtaaacctaataatgaccgaagactggcgagcacccataaccctctatcttcaaggccactgtcaccccactgaccaggccgaggccaagaggttgaagcaccgaagccgtgacttcgcagtaatagatgggcagctatacaaaaaaggaatagatcaagctatgctcaactgcatcacagcggtcgagggcatcgaactcctctgagaagtccatagaggcatatgcggttcacactcgagacctagagccctcgccgctaaagtcatgcgctagggattctactgaccaatcatagtgtgcgcagcgaatcgtgtggtccactcgtgcgaagcatgctagaaattctcacctcaagcgggggcaccttcgcaattcacaaagctgatcacccacatctggtcgttacaatgatggggccttgacataatcggatcattgcccacaacatgacgtaacctcaaagttgtctttgttgcattagaatatttcaccaagtggattgaagcaagagccatatcaatgattaggcaaagacatcacaaaagttcttctcgcagaacattgtctgtcgctttggagtctcctccgagttgacagtggacaacggaaaacaatttggcaaccaagattttctgggagttctatgcttctatcgacacgcgggcattctttgcatcagtctaccacccacaatccaacggagttgtggagcatgcaaatggtaaaatcttcaccacaatcaaaaaagactatttgaagataaaaaggccaagagggtggagcaattacccaaagcagtgtggccgctcaacacaactgagtcatatgccac

SEQ ID NO: 157552 - DNA, 271 bp, Zea Mays
tgaatggccccacctaaacagagtgtgctcaaatttagtcgtaccacttaaactggacgactcttatacttagttacttatcagatttcagtctgaaactttgccacttgatatgagcactgcatactccaatccatgctgaaaaatatgtgagaggcctttggcttgtaccaatatatttcctttctattcaagtattcaccagacttgcactgcactgcaccatgtgtccatgtttagctacggctctcacattcctccctcttttgac

SEQ ID NO: 157553 - DNA, 544 bp, Zea Mays
ctccggcgtgggattgctgttgtctggggagcggatgcccctgctcggcctcgggcgcggggtaggagaagaactccttgccgtgcgatcggattcgtgcggctgggatttggtttgggttgtgattcggccaaatccgatatccgccgttggatcaaacgtggatgggcgggattataggattgtataccccttcgttcgggccgtcgatctcaaatcggacggatccaaggcgatcgcgtgtatttaaaatgtaaaccgtggatctctgatccaacggcttgggtggcgtaccagttcaattaagcctggatctgatctggaccatggatttctaatcggacggcctgaaaaccctggataccccttcgcgggtatcttttgcaaatgagcccctctgtttatttaaaaacaacccgcaatcctcgggtgctgttctttgagtctaggaagcattgcgcagagccccctgcagtcctctggttttgtgcgcccagtccaaggagttaagaaatcagataaaaggaattagaaaatgattttt

SEQ ID NO: 157554 - DNA, 865 bp, Zea Mays
aacactgagcatcgaagcaaagaaagcgaggcagaagcagtcaagaaaatttacctcataagccatcttcttcgagtcaagttgagcattcaaagaagaattcaaggtgcaggcactgtaaaagaaggcagagacttggatcaggtcagcctggctctgggtatacttctcctcagcatcggagcaccgctgagtcaaagctggtaaagcagtagagaagagcgcaagatatgagataagaaaagctacaaaaagaaaaaaggaaacaacagattcactaaccaaggtaggaggccttcagatcttctatctgtttttgaagcagtagagggttccactgcatcaaagatgaaacttggtcggggacaggagcgccacaagatttcagttgggcagacacataatcgaagacatcctgcaatttcaaaaatcggcaagagaaccagtttgctaacatgaacagtaagaagcaaaagtcgactcacttggagattggagagaaataggggaagacccaaagctggaagcatcgacacactgcctattgaggggcatcagcaggaacaatgttgagagcacgactcggagacgcctcggcttcatcagcaggcagcgggttcctatcatccggatcactagcctctaaggtgaccggaccgacgagagcaccatatacatttgtcaccacgagttcctcagactgaaccagtggtgatccaatgtgaacgtccatagaagcagccgaagaggagcctaacccgacaccctcgggggttgggtcgcccttagcaccaccctcgggggctgggtcctccttagcggctattggtcacttgttctcaaatgctatgagataagaacaagg

SEQ ID NO: 157555 - DNA, 739 bp, Zea Mays
gatatattgattgaccttaattgagtttgtaaaccctatgctgcaaaagtacacatatgagctaggtcacttgttcactagcctgcatggctgcatatgtcatgtgcacttgagccaaactgttggcaagtacattgcataaaaatctagtgcaggtatcagccaccaggcggcttggatgattagtttatttatctgttgtttaacttcgttagttgctgtcttttagaattccagccattttttaattccaaccattttttgttctttacgttaatgtagtagggcagtaggcatccaatagcagttggtttcctttatttttcttttctcaaagaagatagagtaacctccagtgatattttatggcatgctactttttgggcttttgtgcctcactctgaagtctgaacagacatgtactaggggtagaattcattatcgcagcattatctcacatccactgaaaatgcttaaatcgacttcgccaatcaatcaggactggattcatttatttcagttcatactaccatagtgacaacaattaatataaaaagcttaaaattgtttaaaagcttaaatctacttcgccaatcaatcaggactgaaaatgcttaaaattgttgtaggattaaaagcttttgttgcaatcaaaacataaggagtcatgaaaaattctcaaaatttatagttatactccattatttactttatcaatatattaaattttaagttctag

SEQ ID NO: 157556 - DNA, 653 bp, Zea Mays
cctttggccctgttatttcaccgcattttggttctggggaagtgctcgattggtgtagcctgcgcgtctggaaaccttctgtgacctttccgggtgcgattgggggccggcgacgtcggaatcgctcgtcgtagctcaagcgccaccgcgggtccgctctcctccgtggccagctccctccattgccctccagctgcggtgagtagctccatcgtattcgaatcaccctcctcattgcgaatcagggccttggtgcgtgcggggagcatcgtggcctcggtctggcgtgctccggcgatggctccgccgcgcgtgtgggcggcgccgtcacgctctggcgtcggtagagaacagagtcatggggtccgttggattcaggatgtagggatgggtttagatctgggagagagtcaccgtgggccgttgatcgactgatgatcgggctggatcaaattggggcatagcgtttcgcccaggggggtttaccaccgtggatctttgatcctgcggacatcgtcgcgtaccgattcagttatgatgccgacttttaatctgggccgtccgatttctatcctgcggccacgaatccatcataccccttcgcgctgagtgttttgcataaaagcccctggatttctaataaaccaacctgc

SEQ ID NO: 157557 - DNA, 369 bp, Zea Mays
gtcagggtcttggtggtcgagccacttgcgcttccgagttggcctcgaaatatgctaaggttcgattcattatcgccatcattgtaacgagggggtggattatgcacgctcggcagtttgtcaccataataagttgttgtgaagtttgacacctcctctagaatgtatgcctctgcaatggaagcctcgattttgcatttatttctacatttcttttgaatagtctttagacatctctcgattggatagcaccaacgtccctgcacgggaccccccattcgtgcctcataggggagatctagaatcaaatgctgcattggattgaagaagccgggtggaaatatcttctcaagcttacacagtaacacg

SEQ ID NO: 157558 - DNA, 632 bp, Zea Mays
gttgaatttgtaaaattggacaccttgaactttggtggggtggcatccgaacaaacttgtttggatagggattcgtgtagctgatcgccttccatttggtgaggatccgaaactgattgttaagattgttaaacatagaataaattacctgtacatggaatgcctgcatgcactccttccttagatagctagaccacattcctgtaatctcgtgcatgctttctttcctacgatagctagactgcctgccagatatgcacgcataaaattctccatgtacattacctatataaaggaatagcacaaccctgagaagcagtgcattaggcctaaccaaacatggtatcagagccaaggttttaatgtccacaataccttcttctcccacaaattcctccaccaccacgtcctcctccaacatggtatcttctgctgctcacattccaattcatcaagtcgtcaccattcgtctcaccaaaacaaactttcttctctggcgtgctcagcttctccctcatcttcgtggtgcccaactgatgggttttctagatggctctaatccggcaccaacacagcagattgcctcatctaccgatgcaaatgccagggtcatccccaacccagcatatgag

SEQ ID NO: 157559 - DNA, 315 bp, Zea Mays
gttataggaatggtctgcagctgctgcacgggcaagtgttgctgttttgataagaattggcacgcattgcactggactaactcagcagcatcactcttcacggttggccagtagaaaccggatctgaaagcctttcccaccagagtccttgatgcagcatgcacaccgcattgcccagcatgaatttcatctaatagctatctcccggtggctgagtggatgcatttcatgaggactcctcctgcgcctcttctgtacagcaagccccctatgatggggtagtgggctgactgccttgcaatgcgctctaccaca

SEQ ID NO: 157560 - DNA, 335 bp, Zea Mays
ccacgtgatgcttttgggtaggacgtcatcgttgattgcgactcgatggtacatgaagaagcacttcgatgttgcacaagggtttatacaggtttaggccgctttggaatgcgtaacaccctacttcctgttgtggctgtgtattggtttctggagtatgaaggttacagcaagtgagctttgcgattgctcaggtgttgtcgatgaggatagggtgagatgagataattttgtaggggttccccttcggccttatatacacaaccatagagttatccctttacaagttgtgatcactaaatatttcacttatctccttctttgtcgcagcttgc

SEQ ID NO: 157561 - DNA, 670 bp, Zea Mays
aagctttgctcattctagatgcctattctggcttttgtttggctttttgtctggcttttcgtcatttgagtgagcttctcttcttccttcttctactgatttatgttcatttggtggtgtggttaatgcactcatcaaggcagagattgtgaacacaaggttgatttgtctgattgtgaacacaaggttgatttgtctcttatggttcaggttgatgatgagtgattctcaatgggtagcgtcttgggttgactcatgtggactaatcgacacgtgggtatatgtttgtgcaaccatgtatctcagcttgtggtgtgcacgtgcagtatagggatggtggtcgatggtgaaggtcaaaatcatgcgggttcataccgatgggctaggagcggcaaaggacgagcattgagtcttgatcgggagactagagaagttgggtgactaattgtggtgagtcacacttaggacacgcaccagcgcgaggatgtggcagagtggatcatgtcgtcgacaaggtcgaggactagcgagacacatgtacaggacatgtggcttgcaagttgtgcgctactaacgttggtttggtggttgagccttaaaaccacccatcgctacggatggttggttttcgccgagttttaggcctcaaaacttagcgggcgcagttcta

SEQ ID NO: 157562 - DNA, 499 bp, Zea Mays
gttaccactacaagtctacaattgacaaaacacctagaattatgcggagtatagggctaggggagcggtaattgctcgtcgtcgtatgaacatcgccgcttcgccgctccgtgttgtgggcgtgcttagtgctcagccgagccataggggaagtgtcactagtggattcgttagggtttcggctctaaataactcgaagcgggagtgagaatggtggccctggtatgcagccggggttcctccgatgatgtgctgccgcatagggagggtggcgccgccatttgtgaccgcaggcgagagggacgaacgggtatcgttgatcggcagatcaacggtgcatattagaaaacccggtgcccactcgcaatatttaatccagaccgctggtgaattattgggcggttctaatttgcatgagtcggggcgcgatcctagccgtgtatcgcagatccaagggctagcatcgtgtaacggttcgcagagtgatcaaactaatctg

SEQ ID NO: 157563 - DNA, 551 bp, Zea Mays
ctcaaaaccttaactgataaactcttcacatgtttcacctagacatggtctagtgttgtctggctcactaggaaaccaaagacgcttctggaggaggttgatctttcgacaccattagaggagcgcactgtcgctctttaccaagaaatgaactacatcatccaccattccatggtacaacagtcagagatcccaatcaactccatggagggagttattgcacgagtggctagatcgattctagacatgaactacactaccctagggccaacttttgggtccaattagggcaagaaataattctatgcttggccaatagagccaacacatattagtgctccttagggcactacgatcaaattccttgcccaccaccctaatttgccacacaagataccctccattatctatgttcatccttcaacatatatcctggaggtcaattttccagtagtgttgcatccttggtacaaataaggtaagatgattgttcatgatcctatcacacaagactgatatccttataaatgtagcatatcccaaattataag

SEQ ID NO: 157564 - DNA, 677 bp, Zea Mays
tgatataattgatcagtgtattatctcccaaattagttcacacgggtcgtgactgtctgtgtctagacctccacacgcatcaatacctcgaacaccacatcctcccccagattcggcaagctgaccagctcgtaccctccggcctcagaacctggtggtggctgctcgcctatttctgcgtcttgtggcaactgctcctctagcagcgttagtggagcttgcaaggacgaagacgaaacacattagttagtagacactaatgttcgtaaacaaatctgaaaaatgcatatgttcaattcatatgtagacatgaagaacaatgtgttttaacttagttcttctccataagttctaagcaacattatttgaaactaatttgctagtattttaaaaagcatatgacctcaaccagattgaatatcaggaaccttagaacacacctgtcaacagattggaaaaacttcagcaattttatgttctgttacattcaaattgagatttttttatacttgacaccaacagatcaaggaaaaaaatactacctccggtttttagttgacatttttagtgtaaaattgcattagctagcgtcaaagaaaaaacagaggtagtataatataaccaaacacgatagctcgaatacatgcagctcaatatcgaagacagactatttgtca

SEQ ID NO: 157565 - DNA, 622 bp, Zea Mays
gtggaattgatctgcctcccaatcaacacacttggagggtatatagacaaccacagcaacaagaacaagtagagatggaccctccaccaccgcctccaccagcaggagttgacccactggttgcagctcagatgaggatgatgcaacaaatggcagacactatggcaaatatgcatgctcagatgcagcagggatgctaggagatgcgccaggaacgagaagagatacgtcgagagctgcgccaagaacgataagagatacgcaggaaaggagggcgcagcagcaacagcaacaacaacagcaacatcagcaagcaccactgcctccaccaccaccagttccaccccgggacaagcatcgagagttcctgagtcataagccactgacatttgcaagctctcctgatccactagatgcagatgattggctgaagtccatagagaagatgttgaacattgcttagtgcactgaccgggagaaggttttatatgcttctagacgtctgacaggtcctgctgctgattggtgggattcatacactactgcccacgatgctgctgatactatcacatgggcggagttcacgacacagttcaggaaccatcatataccagctggattg

SEQ ID NO: 157566 - DNA, 381 bp, Zea Mays
attccttgtaactctagtcaaagtgtcaagaatcttgatcggatactccgtgtaagtcaaatcaccctgaacactgagctcttccattggtaactattcctcagggacacgaagacacttcttcagttgagatttgtggaacacattatgcacatccgatagactagcaggtagctcgagttggtatgccatctccccaactcgcctaaagatcaagaatggtccaatatagcgaggggacaatttgcccttaactttgaatctcctcattccacgaagtggtgacaccttgaggtacacataatctccttcctcaaattccagtggtctccttctattatcagcatagctcttttgccttgtttgagctatcctcaaatt

SEQ ID NO: 157567 - DNA, 655 bp, Zea Mays
gtgaccttcccctcaagaatcttaactaaccctaaacaagcttgtttaggtttattaagactagatttagcgaactaagaggagaaaaaacccaaaccatccgtagttatccccacaataggcatcataggcttgctatgcctaggccagacgcatctagcagccacatgagtatcctttctatagatctcacaccatagagacttagagcggtccctagcgtggtgaccctgttccccgcatttttggcagaaaaatctcctccccaaatcatgatcagccagcggagacagaatcaaatgtttacggttatcttgaacaaccatctcgcagtggataaagagcccgcgaaatcacccttagggttcatccttctaggggagccttcaagcgccagcttaaattcctattttcccccattgttgtggctcttgaaccatatccttgttgttgcctctctcccgttttttatcccagcccttagcttccatcttcctgaacatcaacaacgaacgcggaccaacggatccaagacgaggccactcctcggccgacgttgaacccaccgccaatcccaatggaaattagagcgaaccacagacagaatcgaccaaagtgaggaagagagagcggcgaggtgggaaatagacaaccc

SEQ ID NO: 157568 - DNA, 659 bp, Zea Mays
gccatccatccccttccgagttccgccccactcttcccctctccagcttcctcctttttgcccccctaccttccaaccatccaagaaacccacacaaggccaacccacgcccacgccgcgccgcgccacgccaaaaggagcccaagaagctgtgatcctgctgccccggaagaagctgcgcagcagtaccaagtagtacgaacaaattggaccggggtagcgcttacttcccgctgcccggtggcagcagcagaaactcggccatggagggggaagcggtgcccaagaacgagaggaaggccggcggcggcggcggcggaggcgttagcaatgacggtggcgcgagcgcgaatgcgaggaggaggtggaagggcggaggcggcaggcatcacccgatcatccaggcctacccggcgctcctgccgttgccgctacacgcgcgtcgcaacggcatcatcgcgctgccgctgccgccgcccgtgctggtctacttgcaccagccgccgccgccgccgctgctgttccccaaggtgccggcgtgctacgggaagcccaccggccccccgctgcttagggggccgccgtggagatcgaggaagccgccgccgccgccgcacgccgtcaccgccgcgctgctgccgctaccgcacggtaaagcg

SEQ ID NO: 157569 - DNA, 459 bp, Zea Mays
attaggataaacctcccgtcataacacgaaattgacacctggggtgtcacaaggacctgccacgtctacgtcgtcgacaccgctcatgtgtcgcaggtgagctcctgttccatttgtctgccgatgtcggtatgttttataagcggttgatgatttcgtggacgaactgtaggtgctcggattggattctgtgtgtaggcattgcttgtttcatgcagagaacactgcctgttctgattgcttctcatgctgctgtacttttactgctttggagctgggagacaaaatggttgtgcataattagaagaggaacacaggggagtttgtactgaagctatcctccttttctgcacggattttgtatgtaataagtcgtgacatggctctgaggctctgctccaccctagaatctatactccaaaactttaaggtgtagtgaagtctattgttttctcatat

SEQ ID NO: 157570 - DNA, 373 bp, Zea Mays
tggcgagtcggccaggaaggttgaccgcgcggggagttaggatatagaagtgtttgactgcgtggaaagtgggcctaaacgggtatttctggaacgtgggtccggatgaggtatttacgctaaatcgatattgttgcataaacagtggattgaaatagcgtaaacatgttttgactgtggcagtagtggttgatcgcgtggaaagtgggcctaatccgccttttctggaacgtgggttcgggggtgttattctgtttacgctaaattggttcgctggcataaatagtgagcgaacgtgggcttaaacggatttgttggtgttgttggtcggggctctccacagttatatagagcctagggctcttaatagatt

SEQ ID NO: 157571 - DNA, 768 bp, Zea Mays
tacaaggtgagctaccgtcggttcgctcacattcttggattcactgacaatgacatttctggtgataagatcaaaatccatgatttccgccaacccaccaaagatgaagccagagatcttcatctctctgagtctggaaaatattgggagtccaccaacatgcacaaatattacagatatatcaactccctcagcagaatgaccctcattcctaaaggggtaaccagatgaatattcttggagagagcaaggtcttgctctcattcatgaagcccaacagctcagagagcatcaacatctttgatatgatctggcagaagattatccatgcttcctgctttccacttaagggatgtctacatgctcctttcatcatgaagacgattgaagttgtgacgcagttccgatatgaaaaaggtactagacatcaatcttatacccctttctggattgatcccaacaatccagcagggcgcttgaggaaagccccttccagctcccgtgcacatacttctgttggtccttctgctggtcctgctgctgctgctgccggtgcctcgcgtccctcccctggccgcggatctcccacaccacgtggtcgtggtcgaggtcgtggccgagggatgggtgcccgcttggcccatgggattgcgacatttttctctatgtgtcggaatatttctgctgatgtgcatgagctggcaaggcgtcagcgggagactgacgacaatcttcgtcgtcaagcttccactatgggtatgccctttg

SEQ ID NO: 157572 - DNA, 493 bp, Zea Mays
cacacgtatcctcctgtcaatgatcacgccgtcgatcccagggaggggagcgagtgttaggtcacctcgaccgtccccggactggactgttagtggaggctgctgctaattcaatcctggtcgtgcggctgtgtgtcgttacaccatgatcgcggtcgtattcctcccggtaccttatttcattctcatgccgatgattgcatgaagaactgatgttgctccgtgcgcctcgtcggctgttgatggcatgacgtagatcgtttggtgggtgggcgagaggtagaagatgattggccgtctgagtaagcacccaccgatagccctccgcgtctagggttcgcgggaggccgtcgactatctacgctaggacccctccaactttgctcggcgtgttcaatgctcgggcaaagtcagggtacatgttttaggcaaggagcgaattttcccatcgaagcctagcatcttgctcatctagctgccgctcgcattccag

SEQ ID NO: 157573 - DNA, 383 bp, Zea Mays
gaagaaggagacttagtacttacaagaaccatcagaacaaagtctcggggcaagcttgaacccaagtgggaggggccctacatcgtcaagaccaaaacatcgctgaatgcttacaggctcacctcaccatccggtgaagacttagagcattcgtggaacatagagaacctacataaattctttgtctagtcccaaggctagaacgcctttgtaactctcaaacaatttcaatcaggcccgcactcttttcctcccagggggtgaggtttttaacgaggcagagtcatgtaatatactaccacaaaagccccccaaagaaaagcaaagtcaaactggcaccacggctacgggtgtcgaaaaagaccgcaacaccggccttcgac

SEQ ID NO: 157574 - DNA, 1301 bp, Zea Mays
ccacaccgtccggtgggtggtaccagaaaaccagattgtccggtgctccaagtgatcgttggtcccaggccgacgtgtctactagtcattggtcggctggcacattggattgtcccgcgctccgtgcggactttctgatgatttatagcctacgcttgctgatttttctccagagcagccatttggtcggaccgtgcatcgaactgtccgatgcacaccggactgtccggtgggtggcatcggaccgtccggtgctacacatagtagtccaactttctcttttctatttagaatcttttttgctccttttggcttgacttcgtaaagtccctagcacttagaaaaatatgattagtacccaaaataattgactaagtgtccggagcttacccttttcacttggtaccatatagatttgtattatgccctatttcaagctcaatttgcttttatgtacctatgatcattgctcatgtaagatgatgtcagtataaatataatgtgttgagcatttaatcaccaaaacgaagtagaaatggcccaataatatatttccctttcgttggcggtgtaggtttttggaaagtatagggtcagtttacaaaaaccagggacccgtattaactgatccgtacggaacctagacgacgggttgaataaataaaatcataggggctcttatgcaaaatgccatggctgatctaatgtgtgcacaaccagagcccaaggatctgagatctacggtttgggatcaaactacgaaggggtatgctcccgttctaatcgtggtcgactagaacccgatcgacggcgagtctcattgacggcacacacatcttctcccccaacccaccaggattcacggtggcgcgcgcgtgctcccgatggtgtctcgccggcgttcaaccatctcatgtctcagagcactaatccacacgcaaaccggtggtacctgaagtggacgcataggcaaaaaggcttggtggggtgcttaccgtcgattatgccatagaggtgcttgctctcgtcgtggcgcgggtccacggagggtggttggcaccggagaaaaattccgagcccgccgaacagtaagtgcgcccatagcttcatgcgtacatcttccatgggatctgggttactccctggaccaagtatgaaggccgctttagcgacgcatccatgtatcattgccaacggcgatctctctcctccctctcggctttctacacccggtcgaaggtgacgacgcacgatagccagatgggtgcggcaactggttcttatacccgggggaggtgacg

SEQ ID NO: 157575 - DNA, 831 bp, Zea Mays
cataaatcctgagcccgtgaccgccctgctccctcgccggacccagtgaacgaacgccgagaacgccgccatggattccgctgagagtcttcacctgattcaatgcatatctgatcccttccccgggattctcggagaccggttcgaccgtggaatttccgggatcctgtaacaacctggatgccgatagaagcaaactggcctcgggcgcaagcctatttaatcgttcccctcccctgtggcatattcgtgaccgccatggatggatgcatgaccgggtgggctgcgccaccgctctgcggacccgccagggcccttgtgtcgtgccgagaagctccgccttatcttggggatgtgtgctgtggcttcgccgtgcggaaccgacgcccgggaacttaggaattcgtcgacaatagccatcctctgccgcgaaaatgtgctgcgtcgtggccagggtacctgtgggcatgattcgcggtatgttgacttctactatactcgcttaagtcgcctccatgtgtaggaccagtactccttcgaaatggaacacatggggggcaatccgcgtactctccggcgcgcgccgccgtggatggacctatgcgccgccgcggctcgagctgggggtaagagatgacgctcgggccgttagatgcgcaccgtgcggctaggattagagacggggagaaaacgcgcgtgggccgttgatcgtcttatgatcggcccagatttgatgagtgggtaacgtttcggttggggctctggtgtccgtccgatcaagtatggacggctctggttgactccaggttacctcttcgattgaattgaaat

SEQ ID NO: 157576 - DNA, 1067 bp, Zea Mays
gtagtagactggtctttgaatggttcagacccctgcagtcggtcccgagcccccaggttcctggctttctggtgccggtctctcgacgaccagcaccatgctcactgcttctgcgaccgccgcgatgtataaatatagcggttcctctggttccggagctaccaatattggtaaggacaccaagtgctgcttcagctcctagaaggttgttccgcctcttcggtccaagagaaagacccggacttccgtagcagcttaaagaaaggcagcgctctctcagccaaccttgaaatgaagcggctaagggcagctagcgatcctgtaagcttctggacatccttgactcggcctgggggcctcattgcctcgattgctctgatcttctccgggttcgcttcaatgcctcggtacaaaaccaggaatccaagcaacttcccggcggaaatgccaaaaacgcatttgtccgggttcagcttcgtgcgggttgcccgcagcttgtcgaagaccagggttaagtcttccactagggtcgaccctttcttagtcttgaccatgatgtcatcgacgtagacctctacattgtccctaatcaggtccccgaaagtcttactcatcgcccgcactaaggttggcagggcgtttttcagaccgtatgacattacaacatagcagtacagcccatccactgtcacgaaggcagtatgttttctatcttccctagacatctggatttggtggaaaccagagtaagcgtctaggaatgataacagatcgcacccggaggtagaatctacgatttggtctatacgtggcagtggatacgggtccttaggacaggccttattcaggctggtgtagtcgatacacaaccgaagttttccattcgctttggggacgatgactgggttggccagccatattggatgatgaacctcttcgatgaagccagcgtccagcagtttccggacctcctttcggatgaagtcctgccgctcaacagactgtctgcgaggcttctggcttactggcttggcgtcggggttaatcttcaggcagtgctcgatcac

SEQ ID NO: 157577 - DNA, 737 bp, Zea Mays
gttttaatacgtcaaagctatcagtcacgcgcgtgtttcttttgtttcttgtgcgcggtgtgtgcgccgttggattttgccggtggtcattttttagttgtctgatatgtgttgtttgtttttgccgctgaccagtgggccatattggcatagtaggagttcactgttttgagtttttgggtatcgcgcctcttcactttccccatccccttctcgaaggcgtgagatagatggtcgagcggagcttcccacggcgatgctgctatttgccgacgagctctccccccccccccccatttcttgtgctccttttgttgctggcagccgtcgggctctccgggggcggcgatttttccctgctgctcgtgctactcgtcttgctagttgtcggtgggctctccgactgtgtttttgttgctgcttctttgacgcttagtggtggggcgggctccccggtggcgatttcctgctctcgcgctggtccatgatgagttgttgtggagggggaggtggctcttacaggatccatggttgctgtcagcggagaatttgtggtgaattgggtggctctacagctccagcccgcggcgatggggctctggtgtgtgttgacacggttgattcggtgagggagctcttcgtgtatctctctgtttttttgctcctcgtttttgcaacatgtgccgcgtgggttaggcaactagagtttatatactaacctttggagtaaaaaccgg

SEQ ID NO: 157578 - DNA, 646 bp, Zea Mays
cagcaaccgaggttcagtaaaacacacacaaaattttcaaactcctcaacacctattcagccacctgcgaaggcccggccgcggccgtggggtcttcggctgccggttcggccaccaccctcaaggcatcttcgcccgtcggcgtaggggctgacgaagggtcttcaccggccacagtaggcacgagtacagtcgaggagccttcatcggcatctgagggcggcaccggattgacctctacagcctcgggcggcgcactggccagacctccaaggtcctcgacgtcctcggcatgcgccatctgcagcaacaacacattcattcagcaaaaccacacatacccacacatataaccacacaaaaaataacctttacctgctctatcgcccagtcggaccgctccctgaccgccacccgaccgtgtggaccccacatcctatcgaagagtgcccccgctgactgcttcaccatagggtcttcggccctgaagatttcgcgttcaaagttctcgtatgcttggtcgaagaactcgtagtgcctgcacccctcgtgggacaatgcattcatggccccctcgcaggtcacaagggaggcgaaggacatgaaacccaccataatggtcgggagcaccaccagctccgcctgc

SEQ ID NO: 157579 - DNA, 616 bp, Zea Mays
ttcggtttcagcctacgatttggcttcagttggagcgactttctttgcaggagcagggctcagcgcctttgtagtctctagtacaacatccagcacattcaccatccttctcctcttgggagtcgcggcagaagccttttgcatctttggtagtgttgcctctattagaggactcaggttttctggcatttttgtcactcttttcacatgtggctctttggccttattatcttcagccttggctggctcaactgtagttatcttcggtactacacttggctctacagtactttgcataattggaactgtttcttttgctttggcagctgaataagtaccttcgccaaattcaggtatcacggctggttcaatataacacggtcggtgagtcataaccttcatcttcttgcccttcggctcagcagtgatggccgaagcagcaatttttcccgaagcagcaatctttctttttatcccttgccctcgcagcgggtagcaatagtcagggtatacgaagccaatagcatcaaataccctgttcaatcttttcttattccgaccaccgaaagttgcggacaaggcattgtcctcggccttggagtatgccccaagtagc

SEQ ID NO: 157580 - DNA, 375 bp, Zea Mays
atttaggttgacatttgtttttccacagcaatcgatctgcttttgttgttcaaaaagagtggtgctgatatagttacattacacttgcctgtaaattccagatcttctcgtcttgtctggttaaaatacccgtcaattgcctccttgccgccagtaaccagacgacgcctccctatattcatcattcaagaaaaagcctgtgtggctccgccattacgcagaatcctctgtgttctccaacgcatctctcctttcccccttacagaagagcaacattggtcgagcactcgagccacacttcaggcccacttgtcacctacgtatctagggtgtggccttgctcatgctacttggcccagttttagccgacaggcc

SEQ ID NO: 157581 - DNA, 727 bp, Zea Mays
cactgacaaaccagttttcgtgggtctataactctctaaccagtgctcgaatcacctcaagtctggtacacgatttgtagagtatacatcaaggaacaaatcttctgcagtgatccgggtccgaatccaaacagaaaatgccaaaaacgttcgtgcaatgcgtgccttcttctgtcgctgtgcagactggtgctctggcaggcagccgcccacgcccaccaatgagcaaagctcgcacctgccattgccccctcctgtctgacccttctctgcctcccccatctatataaacagcgccagggcactccccaacgttctccattccttctccacgctcccagcgctgtccctcccattctcgcgagctcccgtccatggccgccgtcgttctgctcgcagccgtgggcagcgctccaccagccacctccgaccgagctacgaccctccagtagtgcgcactggccccctcgtactccccctccatttccccgtcgtcggagagcatcccattgccgggaatcgcgaaggcctgatgtgcttctctgtgcaaatcgcgtgggggacatggtgcaggaattcgactaaaagcacggggttacgtgcaaagggcatgactcaggtgaatagtgcagccaaggacttatgtgctgaagtttttctttttcgaatttcatttcacagatttggtgtcgaactttagaaaatcgtagtaaatcacagaaaaatt

SEQ ID NO: 157582 - DNA, 957 bp, Zea Mays
ctggatgtgaccgttggggaattttatggtgttactgtgtgtcgcatttgcctgtctataaatacggaggtccatgtgggggcaaggcttctacttgtcactttctgtagccaaaaaacgttgctcagtcgttgctcactttctcgtcggtggtgctgttgcaccggcggtgagatcgacaccactgtggtgaatgctagcccatttgaagaccatcagtcgtcgtcgtctctggtactccaccatgcctccttctgcgagtggcggtggtgcggcgccgccaccgagcatcgccgcagcaccaacaggcaacgccttttctaccgctagagttagccatgctggtgggccaggccaagttaactatgagttgggccattcgaagacgtcgtggcgtagagtgaaagagatggagtccttgggtttttttccctgttggatgtgcctgggccgctggagcggagactagcccaaggacggacgacaaagtcttggtttttgagagtttgttccttgctggtgttggccttccctgccacgattttctgactacggcccttgacaagttcaaggtttagattcatcagctgaccccaaacgcagtggtggctctgagtaagtttgtttgggtgacgaccacatttggcaaggacccatccgaggaagtcttcgccaagcattattgcttgcattggcagaaaaggatgacggtcaggcgggtcgatcagtttgggagttgaacctttaaaacaaaggagaaagttgttgggttagcccctatgccaaaaatgaatgggttgggtggatggagaactgattctatgtgtactatgtgggaggtgaaggctagcctcgacccaatacaatctctccatttgagtttgaggccttccctctcttcgttgttgatgacagtgaccgaggggaccgcgccttgaggattactgcagttacttg

SEQ ID NO: 157583 - DNA, 406 bp, Zea Mays
gtggaagtggatatgggtccttgggacaagcctgattaaggctggtgtagtcgatgcacattcgaagcttctcattcgccttggggacgatgactgggttggccagccacattgggtgatgaacctcttcgatgaagccggcatctagcagcttccggacctcctttcggatgaagtcctgccgctcaacgaactgtctccgaggcttctgactcaccggtttggcgtcagggttgatcttcagatggtgctcgatcacctgcctggggatcccaggcatctgcgatgactcccatgcgaacacgttggcatttgcctggaggaaggcgacgagcgcgagttcctatttttcctccagatcacccgcaatgcgagtggtctagggggaattcgcgcagagccggat

SEQ ID NO: 157584 - DNA, 441 bp, Zea Mays
aacgtttgcactgacattccggatgtggggttagagttatcccgagcagtgtctcgtgcctcatcaaccttggagtgcggtcttcaaagtcaagaagctggtctaggttgctccattctcatggaggtcattgagaatccttcagccttagaggtggctgctgcagagaacccggtccccaaggatggcgccaacagttacccagcccccgagggtgttgccggtaatgatccggcttgggtgggcagcacgagctacaacccagcccccgagggtgctgccggtggtgatccggctccgataggcaatgcgggctgcgacccagcccccgagggtgtccgagcgggctccccttctcatacctccatggatgtccacgtcgggtcttctcctccacattctgattgtatggcagcagcacgtgcttcaaatcaggaagtc

SEQ ID NO: 157585 - DNA, 435 bp, Zea Mays
ggggggatcagttatctgttgaagattcagaaaagctgaaatatctacccttgatatttaccctccttgccgtgaccaacttgggaatcagatgaagattgggatgaagtgctggcaggggcattcagattggtgcatcactgaaatatcacctgtgcaaatatcctgtacagtgcacctcatccttaacccctcttttcttttgcccatggataatcttcaccctgcgtgactaggctctatgaatttgcgtggatcttctggagggagccacgactacatctcgtgttcatagctatccttgtgcaagatcaaaaatctagtcccctgatcttttcactgcctatataaaggacagccgggggggaaggcaagaattaacccagtgatctttgcttcgaccagcaactaaagtgagcagcttcagttgcagta

SEQ ID NO: 157586 - DNA, 620 bp, Zea Mays
atttcgtttgcatgctctattggatgtaccagttagagttgcagtaactatggatctatcagatgtttcatgtttgcataaggaaataggatagttcccccctcatgtgtttaggcattataaaatggattggattggtcaaaggactacaaaacacatgaacattggctgtcgtatgtgtcccattcaattcgatccgcggcgtggcattatcccttcgagttctgattgcgagtttgagtttgcacttgcaattagtggtttcagattttcgttcattccaatcaacgaactaaatctcttcgtttcttcatttgggtggttgtaatcatggaggtgtttttagatttcttcagttcatttactacatgcttattagtatggacacggcaatagcttcgtgttctacaagtgcgcgtttgttttcaatttctggaaatcacttggttggttcaattagattttttgcttgcaaaggattttgggttccagttctttggcgaatgaaacactactgtcaatttttggctgactatgaggggttggagatagaggtgaggtcgttggtatgtgctcatttctgctctataatttctctaccctgtcactccgggactctg

SEQ ID NO: 157587 - DNA, 632 bp, Zea Mays
aggcggtcaaataagaggaaggcccgtgcgcttgagacggggtggttaacatgaccgggcggtcaaataagaggaaggcatgtgcgctcgagacggggaagggggaggatgccatgagggcatctccaaagttgaagaccaaagcagtgtcgaagggcacatcgaaagctcaggatgctgatgtggggcccactgtggtgcttgatgtcaacgattttgacatctctgatatgggtctgggcacaaaggtagggacagagtttacatctccgtcaggtgcgagtatatatattttattgtgattgatattgatggggttgtttttaaactcctagcaaacatagggggtgtcttggctaccgtgtgccaccgaaggggaccttggaggccatgtatgcttcactgcgtgtaagactgactccaacagaggccatgcaaatagagcagccattcaagcctttggctagcgtctctggtttgcctgtccagccatatgacacacgctttcaacagcaaaggcaaaaaggcagcggtagtatagtccaacaaatggagcagatggtgcggtcatgttctcagacatagaaaaaggaaatggctgccagccacagtacaagctattatggctttct

SEQ ID NO: 157588 - DNA, 736 bp, Zea Mays
agacgctgaagtagcagttttcctcttccccttttgtttccgaataggaaaacagtagtcagggtagataaacccgataacatcaaaaaccctattcagtctcttttttcctcgagcgccgaaggtgactgtcatagcttcgtcttcagccctcgagtaggctccaagcagctcatcacttgttgcctctatagcatccaaccaatcatcattcggctcgtcaaaccgatccctgaaccgaaatgtgtactttagataaatcaggccactttggctggagccaacggcagcctccttcggcatttcccatccactcgcaaggggccatactctgtaagcaacatgctcttggaccatatcccttgtgccgatataggtgcatatagtattgaaagctgtctggcacacttgcacatcatttccgagtgcgacttaaggtcttctgatgccgaagggtgaccatataggacgttgaatgatgccccctatatcctccctctagtctagatcgtttttcacataaaaccactcctgcatctaagagcccgaccacttcttacgaaatgtaggcacaggataactggcctcagaacgaggtataaagctgtatcagccgaagttgttgtggtactgttctttcccagtcgctttcgtctgatacgataattcatgaatattacagaagcacctggcatctggttctaacccttggctcctcatggcccttataaaaacc

SEQ ID NO: 157589 - DNA, 599 bp, Zea Mays
tgcaatcccaagatgtcagctccatggtcacaaaattccaaaagattattatagggtagaagtgtcgatagtcatataaagatatgaggacgacatgctaaagattcctaggccaaagttattgagacacttggataggctatcaaaaatttcatcctttagccttgaagggatgtccaattggttgagccaccaccatcatccactcataccctccccctaactcaagaatcatcacatgttgaaactattgccaacaaaccgtcatcaccacctcaatcttcactaggtaccgagtctcttccttttgacctgccatcaccacctcctcatcctttttgtaaccgaccgtctccgccaccgcatcgccattaagggctccaccttatccacctcctcctctttgaaacccactatctctgccaccagcatcaccaataaggaatccaccttctccacccccaaaagaccttgaacaaacaaaaaaatctataccaaaattggtttccccgttcgatccaaagaagccaaaattgctggcacaacaaatttttattaggaattgcatagagtcgcaccttatgaattattgatttagg

SEQ ID NO: 157590 - DNA, 343 bp, Zea Mays
atgggatggagctagtgagagaattgtgtcgatagtagttggcttcaccaccggactaaaaagcctcatcatagtcaacaccaggactccgagtgaatccccgaagaacctgatgagccttgtacctatccagagagcaattcgccttccacttgtgtgtctagactcacttgccactcgccatattatcaccagggagcgtgacaccaaatctcaggtgtggttggcaaggagggcctcatactcttcctccattgcacaacatccgtgagagttggcgagtgtgcgatagatggaagaaggcacgaggaaaccaacgagaaggatgttgagtggacaaggt

SEQ ID NO: 157591 - DNA, 346 bp, Zea Mays
gtgtaattgtctatctatggtgtaacctattggtaggtgagaagtgggggagaggaacagacctacacggttcaaacgtgacacacgacacacaaatatgatgctttaaatgaatagagactactacaatcctcatgcattgtgatgacacatcaattatatttgatggtatagtgcaacgtctattcgatacgcgaggacctagtggcaagctagtgtgatggaccatccccacaaaaaataaatttaaaattaaagaggacacgccccacaaaagatacttttaaaattaaagcggacatatgacccacagactagatattaaactacagatactataatttat

SEQ ID NO: 157592 - DNA, 475 bp, Zea Mays
tttagcattgttcgcttcacattgcagaccagagaaagtaggagggtaaagcctagatgcttttgcagcatttttacgctttctcatagtcttgccacggtagtatgataacggcacctgcatgaaaagcagaggccttttcttggtcggttctcgctccacttggatccgatggtcaccatactcggttgtgataagcagacaaatccaagttgattatgttcacaaaaaaagccttttttatccgtgatcctgtcggatcattcatcctccgtcctccctgtgtaccaaacaatatatccaacgcaatctgtaagattttcactatgaaacagacaaactgttaattgcagcaagaacagggagaatttctgtagatgctttgagcacgagcacgagcaccacaggcacagctagccactggcacggcattttggtgtgagtgtgataatgacctgacgctatttgctccaac

SEQ ID NO: 157593 - DNA, 792 bp, Zea Mays
aaaaaagggaccgttcagatgagcacaaaggtagggaaatcatgtgtcgggactgggaccatgacgaagatgaagactttcaccagcataggcagcagggcactcgtcggcaccgtagtctctctgggtgggcacgctcctcgcgatgccgtggtggtgtggaggactgttacagctcgagtggaagaaacatgccatccactcctttccgtcggaggggggatggaatgggtcagacagcacgctggatgcccaaggtaaagaacaaagtagtctcttttgcagatcctatcgtctcagatatctggcctacagatgtttctaaaggacagcctgctgctgaaagtccttttccatcgggcgacatggaaaataccactcaagttgtgcgggagactcatgctgctgcaaattccaaggtaaatgctccatatgtctcagttattgctgatgctttgattcctccatgggctgctaagggggctattccttctccggtccctattgttattggtagtcaacctacaaatgatgcagagcaggtagatttatgttacaaggatgcacaagttgagtcaaatgttttcaatattcaatcaaatagtcagtggaatgatgtagtagacgaggatagacaactgattttatctagtaatgaggttccgactgctagccacaacactccaggtcatttcactcccctgccaatagaaaatcagcttaactcaaatgataacctgcagatcttcattgagtcaatcacaaacataccagaaccacccctaatccaat

SEQ ID NO: 157594 - DNA, 1002 bp, Zea Mays
tgtcgccgctgccgccttgattgaacagagggacctaatttattacacgatgaaatcaacctaaacacaaactgagtgaagtagaagctagggtggtagtaggtggccgaactgagtgaagtagaagctagggtggtagtaggtggccgaccgacaagcaggggccggtcggtaggcggccggtgagaaagacgttcgatctgttgccgtggtgcgccttgacggactcctgcgatgcgaaggccagccggcacgccttgcacgcaaatctcaggcggctctaggccctgatcggctctaggttcgcctcgtgcgccgacttgaggcgccgcctggggagcgcagggtcgtcgtccctaccctcgccgcccatgcggccgccagcccgtggtgcgggacgaccgggccagccacgctcatcgtcgtggcgatcgagagggttcggagctgagatacctctctctcgattgagatcgagagaaggaatggatcggagaccgccgctggggatgaggggagagctatttaactttagccttcactagatagagatggggcttgtgtaacgtatgctgttgacggcaccaccaccagagcatgcacgccggcgtgagctagcaacagaagcaagggccaagtgcttctcacgtcactgtccactgacatcacacgtttgagttaattttcaccgtcctaaacattcctttctttctaaaaagagaaaacacgtcatgaaatatagaagaagagaagaaagtgatgtaattgtaatgtgaaggagacctaataaacatttgatgggaaaaaagagtaatatactttaacacattaaaatccacaacacaatacatactaaccaattgttcgacaacaaaccaacaaaatcatcgatcatcgagtttatttgtttcctccgccacgtggcggtagatgacacgagtattccgtttttcctcgcattgagcatctatatatcttgctatgtgtagcgtcaaaaaaaaa

SEQ ID NO: 157595 - DNA, 454 bp, Zea Mays
tcttgcggccttcttgctgctccaaatacacggtctttcccttgacctacctaaaggggcaaggaggatcctcgtcgtctcctccccctggcaccaacacgaattgagggattaaatgacgtggaattgagccgatacttcacgaataggtttataggggtaaatatgagtgaagtgtgtgcttggtttgaatttaggcgaagaaaatggaatttgggcactcggctcggaaacgattgctcgaaacggggaaatgagtgaaattgaagcctggtatatcggatgggtgtgaaatttggtgaatatgatactggaggtgttgtgaaggtgcctgaaaaatttgggttcaatcggagcatttttggctggtttgggcatttcaccgagcatgtggtgtgtggaggtttagggtttcggtgaaatggctatttgaggtggtgaaaccctcccgaag

SEQ ID NO: 157596 - DNA, 276 bp, Zea Mays
cttacaagagcaagggggaagaggggtagagaagaggcttgtgggcacaagtggcaccaatgggaagctcatcaaagtgacgaattgggtggaggaggactagaagaagaccaacaaggaagaagaatatgatggcggaaagggagaacgagagtaggagcaaccgtgaaggaagtcgggagaaagttcagagagtggtagattgaagggagtattgggaaggaggatttaaagtggtgtggagtcctagtagcggcaatgacgagagagcggcta

SEQ ID NO: 157597 - DNA, 677 bp, Zea Mays
tttaagtttcggtaagaatgtatttgatgtgtggtttgctgtgaggataatttttaaaatgcggattatgtgttggggaatgcatcgataggtgtctacgtgaaaagtgtatttgttttatgcatgtgatcggcgattgtgatagtcgatgcaaatgaagagtatgattaatcctgttagagtcactggtgcggttgatgtcttgtgcttaatatggggacacgtatgtgcgtgtgtgccgtggtgtattatagtgatggtggcgtaagatatttgattgaggtgtgcgggtatatgccgtaatatggttatactcgcgacaaggaaaaaatgtatgcgttggtaacacgacgcttaggtcattgttgtataatcaaataaaggatgtattattaagattgagttaaaatgcggggtactagtggtacgctaggcaggcggtgttccaaataaataaatcggttgatgtggtagttgtcgtgcgtgatttattgttagtgagtagtggaattacgagttatttgagaatcatgttggaaactagtatgcggcgagtaactgggttcgtgtggtgaataataggtcagtaggtattgttggtgtcattggcaaatggggatgatttctgttgtgcgataaattttgaaaggcaaagaacatggtagtgtgtcgatcaa

SEQ ID NO: 157598 - DNA, 547 bp, Zea Mays
cggcatcacggtcacaatggatgtattcttaccggcattaaggtgcggatgaagcttggccacggcgcacagcgaagcctgggtgacggcgaagaatcgtggtcaccgggatctcccttcctccctgccaccgccccccgacgcgatccggatgcatgacatgagcctcctgaccgcgcaccaacccccgatggagaacacccgtggtgaatccatgcggcggcatcactcaaatctctctgtgcttcgttaatggcggacgcaattagaaggtggtggtgaggaagcaacggtggccggtcctggcggtgattgtggtcgaggctcggagtggatgaggtcgcggtctgggaacccacctgcccccccccccccgatggcgatgggacgacaacaacacgcgcgagttcttctccccggcgcccactgtgcttcagctcgccaatggtccaggggagagggattcggcggggttttatggagatggttagggctgcagactccgtccgagatccgaagctcccggcggcggttggaacggccagcg

SEQ ID NO: 157599 - DNA, 2169 bp, Zea Mays
gtgtaacatttcatattggttccagacactacaagtttgacttgaacattagtttaacagatcatgattggctgatgtctacaatccagaagcttgtgctcggttgctaaaggaattagcatttttaacaaactatctcttgctgccttctcgtagtatgttgcacttgcacttctctcatgtgccgctcactgatatctggaggcaatgatatctagaagggtaggcttagtgtagtggtgagagctgtctcatcgagtcacctggtggaacgttcgaagcagtctctccatatttacgggtaaaggtttgcctcagtttatcccttccccatacaccactcgtatggaagccttcggcactagattttccctttaatgatattttaataaggttttcttcattggagaaagtaacacatgtttcatttaccatgatcttgcaaatgaacacttagtcaacactaaggaagcgttaaacagtttatgtcaagctcagcattcatgcagtacagccgctctactcttatacttgaattgaattactgaaaccaaactctgacctattatattgaaatattactttgatcgttaactgtttacattttttaatatactttcctgacttcggacaggaacatagagaataatattttttctggaccggtgcctgcgagcttgcttaacataccaaacttcaagtgagataccttcttcctttcacatttaccttaatcagcttcattaaacctccacgatgttgtctgtagcattgttatttcatctattagacaaatatataatattatttagataggttgtctcgtctatatgaacttgttaagcgactaatagtatatcatcacagaaaggacgggaatccattcaataccacatctgcatctccgccttcaacaggacccgacccaactctaacaccagcacctaacacttcaaattcaacgcccccagcaccagcacccccatctccttcaagagctactcccccgcctaaaacaacctcaaattatcctgaaggatcaactacccgagacagcacttcatcatctaggaaacacaatacatcaaccctcaagattgttggttttgttcttgctggagtagtgctgtttattgttatagtcttcctagtattattttgtctatccaagtaccaagggagacagtcgagatacgatcgtaatagaagtcagctgggaggggtgcatcatagggttgaaccgcaaatcaagccacctccagtgcaacaaagcaatgatattaaagaaggtaaacctttcatcccactattatatagctttgtgtttattttttgcgttcatgtaattggtttatttgataagttcaggcgagacaccggacaggagggtccatcaactaagttcatctgcagcaggtataaagtctttatgacaaagtgcatctaagttatattcaccaactacagatgtcagaaagtttgcgtgctattgtttacagctctcccaaagaagtctcctgaaaaccaaaaggagcacataattaattttgatcaaacagattcagatctgtttcatgtttctctaccacctcctcctccaccaccgccattaaccccaattgaaagagttgctgcaaatctcattgttccactagaaaagcgatatattcctccaccaaagacaagtagctcgacttcttccgcgtcattctctgttgcatctcttcagcaatatacagatagtctcagagaggagaatgtgatcagagagagtagattaggaagggtttacctagcagagcttcctgatggcaaggtacaaactaagtattacctgtcttgatgaaagagcagtcattatgctcagcattctgttcaagtattaagctagtatcattgtattttgtgtagttattggaggttttaaagattggcaatgctaatggaagaatatcagtagatgacttcctagaacagattgaatgtatctcagatatcaagcatcctaacattcttgagttagtcggatactgtgctgaatatgggcagaggttactcgtatacgaacacttcagcagaacgacactggatgatgcaattcatgatggaaaggatactgaaagtgcactgtcatggaatgcccgcctccaggttgctcttggttcagga

SEQ ID NO: 157600 - DNA, 635 bp, Zea Mays
gtcgccgctcccgccggtgcggccacaccctttcaccagctgtgctagtggataaaccgcataggcgcgattacctcatctcatcgctacctctgctaccttacattggaccaagtcttgtgaggcttatcaagtgtgtactgcttctgctgcatcggggtaagtgatttttctgattgtttctgacatccctccccctcctccgactggcttggctgatgggttgttctctttccatggccacacacagttgccgctgttaggcccaggtccttaaggggagcgtgaggtcgttatgtatctgtctggtcgtcgatatgctggtgtttggaacccaagcagagcagccctctctctggtccccttggcatcgcttgccagtacagttcgtagtcgtcatcagcgttgttcggtagccggtccattctccggcctttggtggtgatgatgacaaaaactggaagccgtagggataatagagagaggtcgtgctcaagtgatttattacaggatctcagaactaggaacacggcatatcttcttggcatgcataccaagtggagtatgagtacgatccacaatccaggtgcttgtctgctagtaaaagtgtaaaaccgtcaggtggtgaagctctg

SEQ ID NO: 157601 - DNA, 1070 bp, Zea Mays
gttcaggggcccccacgcaagtgttcccaagactcagaacaacatccgcaaggacggcgggtttatttttcagaaatcagagggctcttttagaatttgtcacggccgaaggggtatcggattacctggatcgttcgatcaacatcggatcgctcagatcgtaccgtccgcatatcctaaccggtatgccaacttgaccgtatgatcaacgatcgacggtccctttttacttagccgaaacggtgtaattgctccagacctcacacgttcgatcaggatccaacggtgcaagtgccttctgcttccctgataccggatcccgtggcgcaggcactaggcggcggcgtccgagctcccgacgggtgaagcggccatcggagcacggaagagaagcagtgtgctgataaactcccccgcgatgacgagctccatcgggtcggcagtgttgtcggtggaggacgagggcaccaaagcgttcggctagacgataggtgatggcgcgggggtctttggccggctcgggattcatggcggcatggaggtccaccacgggacgcgcaggctccccgccatggcgaagaccacctcctcggactgcccgtgaaggccccaggccaaaccttgagtcccaagcggtcccaaacgcgtagatcctgtggcggcggcactcacaactctctctccctcggtttgatggtggcgctggaaacccaggggggtccttggtcctggggtttgcagcggagccaccgggccacgccttttatcttcgagtgcagggagaggaagaggattacggaacctagctggcgcgaggatcggcaggtagttcgggcgggtcgttatcgctgcgaggaatcggtgaagaagatccacagggcgcggtgactgacgtcgtggctccaccggtcagtgacccaacgaggggatggaagcggtgtgagggggaaaggcttagcggctgccgtgtggggctgggtagtcggcgccaaggattgaagttgggctgctgcgcgcgcgaagtgaaatggggagatgggccgaactgaggttgagccggcccaagcagc

SEQ ID NO: 157602 - DNA, 352 bp, Zea Mays
gcatgtgttcttaattcaaatgaaaatttgaagaagctaagtgtagctcggttggtcgacagtatgcatgtacgcccacaaccgatccctcaagtccaagtcattgtcgaggcaaatttttgtatgtgttcttaatttaaaacccttctatgttggtcatttttttaataaatatatctcgtttcttaggcatacttctctttgtgcgcaatatatagaaaatggtgactaactatcaaccaccgtcaaatttactcaatcatttccacaacacttttacaacatgctgcttataactagcagatatgaatgctcatatgtgaaaagtaaggatatgaaacttataccaaat

SEQ ID NO: 157603 - DNA, 1213 bp, Zea Mays
aattaaacaaggtgcaggttgctgatcctatttgtcctctaggaaatgccagtgaatcagacgttgtgctgaagagcactataggcgagaaaaccacaatgggactgaatcgcagcaatcagtcatctggaaaggaagaatatctggtcattgatcaggaatcttaacatctgaaataaaaatacctgatcaataatggttctttattttcacgctgatcaggtgaatcaggttttacattcaacaaaatccaaatgacaaatcagagatgaagaatcgtcaaccgtccctcgtcgtttctggcgaagaaccatcatccttgtagccccggggcgactcatttgtgttgccgccggtgtttgtgctcagcatcctgggggattcactagcaatttcgacgccgctgtttgtgttcagcatccgcggcggttcgtggtcaggggtgccgccgctgtttgtgttcagcatccgcggcgattcgtggtcagaggtgacgccactgttcgtgttcaggatccgtggcgattcgcggtcaggggtgccgccgccgccgctgttcgtgttcaggatccgcggcgattcgtggtcaggggtgacaccgccgccgctgttcgtgttcagcattcgcggcgactccgtctgctcagtgggcgactgcggttcggcgcctggatcggccgcctggtgctcctcttcctccagcacaagccgggacggcaggcacttgcggcgatcttggtactgttcagcctccaactccacgtcgtcggcgttgacgtcgtaatcgtcgtcttcttcctcgatgtcgtcgtcgtcgtcgtcaaggttgacgacgtcctgcatgttgagctggtagtagtcgacgatctcccgcaggaaccggttctcgcgggcgtacaccgtgttctcgtgcgccaaccgcgtcttctccgcgagcagcgtctccagctgccgccgtatctgatagtaacacgagcaacggcaggagtgacatacggtatgcgtacttgacctcacctcaccattatattcgccactggttgcagggcgaggccggtcggtcgatcgggcacgtaccaggtcctcgtcggcgtcgtggttgccatcccggagcagccggttctcctcctccagctgcgcgcaccgctccttggagaaggccaggtcggccttcaacgtcttgagctcccgctgcagcagcttcaccttggcg

SEQ ID NO: 157604 - DNA, 477 bp, Zea Mays
cactataaagtccatgcaaatgtcctcccatttccaagatggtatgggaaggggttgtaaagggcctgctgccttcaagtgactagcttttatcctctggcaggtgtcacactcagatacatacttggcaatttccctcttcattctggtccaccaatataaagttctgagatcatggtacatcttgttgcttccagggtgcatggaaaatttggaaaggtgagcttcatccagtatcttctttctgagctcagggtccttgggaacaaccaatcgatctccaaaccataaaattcccttgctatcctgtcggaaacacttgtatttttctgccttttgcttgatcatgtctttgataacctgaacacccttatcctcaacctgtgccctgactatttgctcttgcaatgtgggctccaccgagatataatttaattcaccggaaggaacaacttccaggtttagcttgcacaattc

SEQ ID NO: 157605 - DNA, 497 bp, Zea Mays
ggatcgatggctgggatccgatggacgaaagggtatgtggtggcgtgatctcatccaaatcctgaccactcctttgacatctaacgatcgatgtacatcttcctccccactctagcacccgagcacccaggaacacgagcacggcggcgcccctcgccggagtaaccatgttccgtgttccggccaccaaattgattagacgaggtttgctacgcgcctaatagaggattgtgaggcacggggaggcattcataccgtagttttgggcgctagtgatactctccgcggcgagcagcggatcgacggcaccgactccactccgacgacgaattgcgctcaccccgagctaccccacgtccggacaaaacgcgcaccggctaccacgaaagctggcaactcaccctgcatgccatccgaggtcccggcagtagcacaacacacgacagctcgcggatccgaggtgaagaggggcgccgatgagaaatcaaaggttctcc

SEQ ID NO: 157606 - DNA, 476 bp, Zea Mays
tgtccacaatgacatcagttagctaggaaaaaccttagatagatgggttttctctgctctctataatctgtctttgctcaacccttctgtcccttccattcttccatacccatacagatgtcagaccttggaatgtcaactacaagtgatgtcactaaatgcaaagaatgtggtgtgttgacaagtcaaaacaacactataaatgaaacagctgatgaacagaccttcaagacacaaaaggatgaacaaccaaaccaacagacaagtgaccttggaaaatgttgttgttgtgagtgctatggaattccttgtcgccagattagtacaaacgaaagtgaaactacaaaacagaagaaccggattttgtttcctggcataaaaagtcaatggtctccccaagaacgactaatagcagatgcactgtcagacgatgaattgccaggtattccaaaaagaaaacatcacaaggatgccca

SEQ ID NO: 157607 - DNA, 548 bp, Zea Mays
gcaaatgttgtggcagatgccttgagtcgaaaggcccagtgcaactgtctaaccatagactctaaggtcgccgctttgtgtgacgagttgcgcaagctgaacatggaagttgtttccccaggaaccttggattatatctcagttgagccaaccttacaagagcagataatcatgtcacagattggtgacaagggtgttcaagtcattaaggaaatgctcaatcaaaaggtggataagtataaatgctttcgtcaggacaacaagggtatttttggttcgaagatctactagttgttcccaagaatcccgaacttaggatgaaaattttggacgaggctcatctctctaaattttgcatgcacctcggaagtaacaaaatgtatcatgacctcacatccttgtattggtggaccaggatgaagagagaaattgctaagtacgtatccgagtgcgacacttgccaaaggattaaagcaagccatttgaaagtagcaagtaccttgtagccgcttcctataccatcttggaagtgggaagacatttgcatg

SEQ ID NO: 157608 - DNA, 439 bp, Zea Mays
cctaagtccctggtggtgattgaggcaagtgccaatattagtcgtggaggtgaaaacccgttaagtgtttccctctcagtatgaagccttggactcctccttttatagcctcgaggagggatcccaggagcgccacaatttgtcatttatggagaggagacgagtccgagcccctgtagtccggtatgggcgacagaatggcctttgtactagaggttgacttggaccatggggaggatgtccggcccctgtatcttgcattttgaccgagcagagagccgaggctaggatcgagggctcggacgtgtactcgagcctgcctggttgatgtgttgtccgagccatagttattgaaacagtgataagtatggtggaaagcgcatggtacttctcctcgtatggcgtaaagcagacttgatgtcggtccagtaggcatccc

SEQ ID NO: 157609 - DNA, 381 bp, Zea Mays
gaaaccagataataactgcagctaaatttcaaagacacacgttcctaattctctatcgcattgtactgcgttcatgtttgaaagggcataaccacaccgtaactgatatgtacataaccccgcacaatccacattcctaatcacctaagaaaattattaagttgttacctgacaagggggcacgagtgttagaatcagcatccatcactcttgacatggtgccgtgtcctgtatgcacgttgcataataccattgaccgtttattcagcgcaatgctcaattccaagacacttgttggtaacaaagagttgagccaccggttgtcccagacacagtctgaaatctttccgctcttgttggtttcagatgattgaattgccg

SEQ ID NO: 157610 - DNA, 334 bp, Zea Mays
gaccggctgggcgatgctggctaccaggactggagggcacgtcgcatatttgggaacaacggctggcaagcaaaatgcgtagagaagaatggatcaaatgcacatttctggaaaaggatgcgtacttgagaaatcctgagtaagcactgggagcttcgggaagcatgtgtcaccactcacacgcacaaagaaatgtgtgtgatttctctgagaggataaaggagaggactcgtggattgaagatgacggctgtagaagctaggaaatgtccagcattttcaccggataaggagaagatggaaaacggtggggataagcaaatgagatttttcct

SEQ ID NO: 157611 - DNA, 442 bp, Zea Mays
tttctccttttgcatgcactctctttggttgacttaggctacggttcttacaaccattggattcttaaagggtgccccaactattagcgtgcacggatttaatatctatcataaaaatcgccttattttggtgagcttcctgaccccttgcattggttcactttgtttaaggatgcataaacacaaaagataagatttacacgattatctctgtctgaaatcttactgcagccatttcatagagttctgaatacttcaagcagcaaaggtagaagcgtctctggggtgttggaggtagacttcatcaagcccactcatgacaaacaggactttgagaagtcacagctgttccagaagctgatcaaccgcctgaaggagatgactaacgagtactggtaagttccaggttcttgatatctgttcctcccaatttccaaaacct

SEQ ID NO: 157612 - DNA, 314 bp, Zea Mays
aggtcctcctcaagcttcacgactcctttaattgagctagaccaccctgggttgccgtgaacgcccgtgttcttccccgatgcccgcggtcaccgtggccagagcaaaccgagtagccattcttggaattaggggaggggaaacgctcactagatcttgaatttgggttcggccaaagaagggcgccattatttgagcaatttgtccggtgcgcgtgctcgtcggagctctgcgcgacgccgtccgccgtcgagggtgtcggcgtgtaaaagaatagaaacgcaggggctcttctgaaactgtcagtgactccc

SEQ ID NO: 157613 - DNA, 592 bp, Zea Mays
cggggacgagatttctgttaagggggtaggatttgtagagcccaaaatcttacattaagaatttatgaaaaatccctagagcttttgaattaaaatattctttaataagattttcttaacttaaagtcacttctcctaaaattctttcctaataaaatactactagatgaattaagttatcttatcatggaactatacatataagtaagataataaataaaagcatgctttgcattcatgttggggtttttgattgagcatttaaattgacttaaagtttgaaccctatttgaaacttagaaataaaaaatggaaatagaaataaaatgaaaaaaagagaaaaggacttcttcatgcctgggccgcactctggtcatagcccaaatgcggcccctcccactcactctcacgtgggccaccatccggcccaactcctcagcaacagtcagcccatgcgcgtggagtcgttgccatgtgggtcccactctcccgatccccgctcagctgcgcgcgcgtcgggttaggtctcagataggtcgggcccacgcagccagctgctcaccgtgtacatccatatcccccccgaccactg

SEQ ID NO: 157614 - DNA, 1343 bp, Zea Mays
gcctgcccccggataaaccctgagtcactgagctcagggtcgcacgtggtggaactagagaggggggaggtgaatcaaaggaagccactcgagtggattccttgcctggctcaagactgacccgccataagtggtccgccgcattaactatgcctagcatcgagccacggtaggtgaccaatccatctcccgctcatgacctatgagcccctcggcctgcagcgcactcatgacccatgatcccctcgggcaacaatgcattcatgacctattgaggctaggcctgagtgtgtaggccatctacagggcccgcaacactacgagccttgccgagacctaggttacgaaggctaggggtcgatgtggcatagaggcagtaatgatggcaccagggtcccgcgcctcccatgtcgttagggttgggcattcaggttacccgaaaattttcggcccgggtaatttggttaatataacggggagatcaacgttggcatggcggatgcaacattagctggaagaacgaccacgacggacgaaggggccgctccgcccaacggtagagacacgaggatcgagggagttgtgagccccctcaccacagaattcgcgtccttcaccgacttggcagaacacacatgctaaccaagaaaatcagagaaaagaaaatggaatgaagatcgaaaccaaagacaagaagagcaagataaccaaacatagtgcgaggagcgcttccgggtggtaaccttttttcgggtgaccaccggaggtgccggaggcggcggcgccgctagaagcgccgccattcccaccacggaggaggaagctcccacgagcactttccccgtgcagtgtcttggcaacaccaaggacaaaggagggtgcgacgccgcctgcgtcgcttcccttcatcgccaccacgaccagcggactccacacgacgctctaaggacaccacaagcgcattagcatgatgggccaacctgacccctaggcaaggacattggagctagcatgagcatcatgacagtgagatgggctacccacgacagccacgacctccatcccccctgaggcagtggaggccacgtcctctgaatcagaggaaagaggcacgctccctcttgtcttcgcattagcagggcaggaggcctcttatttttcttcgcttgacgacactttgaatgcgccaccaaggtttccttccccgcgttccgacaaaacgtcatgaagaaggaactcaccacggtgctcacgacatccttaaaaagggggagggcgagtccccatctataaaggatccagacgatagcgtcgtgacaaccttgaccctagcctcgatctcg

SEQ ID NO: 157615 - DNA, 484 bp, Zea Mays
ttgaaatgttgctctggtgtttagaaacaaaacaaaacaaaaaagaaaaagaacggtagatgcttgagactattgcatggttaaccttttttttagtatttggatgtgcagaaagaatcctctcattttggcgtgtaataaaggcgtattccttgggacaacctagcagctttcgaggaattctttgggaaatttcctttctttgcctaccccgtgtacccgcgcgcatttctggtaaccgtggccttgtctttgcctactgctctgttcatatgtactacaggacagatagagcgtttgtcgtctggtgccatcgaccggcatcgtgaacgggacgcaagaacagaaagaggagtagagagtccgtgccatgccggagagcggagaacgtgccagattttcgcggtcggcgttttttcgtcagagtccgcgcgcagtgctgccggagaaaacgcgtcgacgcgtgtgtcggtgccctagctta

SEQ ID NO: 157616 - DNA, 526 bp, Zea Mays
tgattatgttgcgattctataggagtttggtggcgttttcttttttatgatgaaaggcccttcccatttaggctcgacttttcctcaggattctgttctgctggtttctgatgaggacgaggtcaccctcgtcgaactctttaggagtaacagtgttgtctcactaggccttcgtttgtgcttgatatttgttcagtgcttcgagggcagcgacacgatccccattgaggaggtattttgttgttggctcatcgatgtctggtatggttgtggtgcttgtttggggtgatctttgcttgagttcttgtggaggcatggcctctgatccatacattagtttgaagggagtaaatccagtgcctcgggattcgatcgtgttgagtgcccaaatgacttcgggtagttgcttggcccacttgccctttttgtcgtctaaaagtctcttctttatggcgctgaaaattttgccactggcgcgctctagtaccccattggattgtgggtcgtagacagacgcgaatactgc

SEQ ID NO: 157617 - DNA, 548 bp, Zea Mays
gttccccaacagattggtgtagaattggtccacacagacaactttctcctcatggctggttagggtttgttccccatcaaccagacatgccacaaaatttttctcttacgatgacgggcgtgaaggtggaataactttgtattagcatctctatctttgagccatgaaatccttgctctcagccttgcaatagttctcttgcaagatgataataataatgcctgtttcttgagtctgagtttgagccagcgttcagcagggctgagcactctaccatcctgcgctatttccagcttatggaggatttctttagcaagagcatgttgggatctcacgtgcccgatctgcttttcgctccaggcctgcaaacttttttgcagctccttgtaacttcatttccagggacttaaaagggcatgtagccgactcaatagaattccacgcagcaaggacaatatcctgaaacccctcaagcttggtccagaaggattcaaagtggaaacgcctttttccggatttattatccctaagccccaggagtagaggac

SEQ ID NO: 157618 - DNA, 299 bp, Zea Mays
ttcgaagcaattttgcactcagtttatctctgcatgaagataccaagcaatcaaagagtcatatcagtgtatgaaagtcaagaggccacaagaagggcagaagggaccttacaagagcccaaaaatgtccacaatactgatgaagccgaagcgcaagctcaaacgtcacagaagaaaatcaaagaaaaagcatctttgatagatcagccgaagccgattccgctctgcgaagatgtggctgatcaaagggttttctttggctcccagctgtcttcggagcaagaatcagacgtcaaaat

SEQ ID NO: 157619 - DNA, 500 bp, Zea Mays
caacattgaaggaaaaagatgcagtattcatgctactgcattaatctaagtccaaagctcactgcataaaaccctatctataatgtgcgtaagatttcccaaataaatcaccacaatagcatacaatggccacaactggatgattgtggttggggatattatctgtatgcttttagaacatctcggcattagggggagataaatgtccatctagtgtaatgcctcaatattctattaaacgcacaaaagctaaactgaacctgtcgttcggtgtgtactcctatgtatatggagtctgccagaaatcattgaggagtaaccatattggtttgaatgcttctacctgatgtagatgtggatatacccgggattaaaatcgtatccacatttgacttattggtatttgatctattctcggggacgcctgcgaatatgatccattggccttagtcaaagcatatgttctgattgtagattcacgtggtctgtaataactctcc

SEQ ID NO: 157620 - DNA, 331 bp, Zea Mays
tttttattttcgtttctctaggcgtgagactcgcgagggataaaaatgagttggttcccgtgggctctcctccctagtcgtgaggacagatggcacatgacgttagtggttggctatgccatgcatatgcaacaattgaatgtggcgtttttttcctgctattcctacggccaaataaatggatcacggtgcatctattacctggtcaaaacggctaaggagttggcgatgcatgcatgcaactcggtcaaaacagctacgcagttggcgagtcatcccctggcgagtggtgaatcaacatgcattaattcccataaatccctgttgaatt

SEQ ID NO: 157621 - DNA, 376 bp, Zea Mays
gcggcagcgagctgctatcttacatcagtgacaacgtcctgtggctcgaggggcgaacgatgagtagctcgagcatcctccaacgacgacgaggcacgggcgacggtggccacgacagcccaagacgcagacagtgacaacgatgatggtgacatcgacgattatcgcccacggtggcatctaacaatgacgacctcctccgattcggtgcgtctccagcatccttcgatgatgaccgcctccgatctggtggcctcaaaggcgtcctccaatccagtggctcagggtcgtcctccggtgatgacatcctcgatccgtgtttatgccctagttgcactatttatgcattccattgatgatttttatgatgatgaat

SEQ ID NO: 157622 - DNA, 489 bp, Zea Mays
ggcttgtagggcgaagacgcggtctccgtcaatgaggtccttcgaagtaggctcgtcgacgtcggggacggctgacgcgactgtccatggtgacccatgttttatttcttgcggagtcatggcttccaatccatatagaaggcggaaaggggtgaacccagtcgccctgcactcagtcgtgttcagcgcccagaccgcttcaggtaacaggtctgcccacttgccttttttgtcgtctaggagcattttcttgacggctgtgaagatttttccgttggcgcgttccacaactctgttggattgcgggtggtatactgaggcaaaggcgagcttggtgccgatggagaagcagaaatccttgaagtcttggctgtcaaatttcttgccgttgtcaactatgagttctgacgggactccgaagcggcaaacaatattttgccagaagaatttctgggcggtcttcgatgttatcgtggatacagccctcgc

SEQ ID NO: 157623 - DNA, 438 bp, Zea Mays
gagctttctttttggatggctgagggactctaggaaggggatcactagagatgtcgggaagggtatcaagtgtgttcttgagatgatttggtttcggaatccacacttgtttctaaggaggggctctcataggctcctcaatcactccatctgtcacaggggcatcatgcttaggtagggtgattttggtaagcttgggagtggctaaaggtttctctgatggtttcaatgcactccactcaacaaccgttccgaagcaagcagcactcccatccttagcagcaaagcctaatcctggtcctctagttctcctcttgaactgactgaccatcatgcaaaactggagctcaccgcacgacacctagctcaagaccgatcgaaggtatgtgttttcttccttgatcctggtcttgccatgtcggtaggactcaaaagcaa

SEQ ID NO: 157624 - DNA, 629 bp, Zea Mays
ctcacatcgaggcggatgtgggcgatctacgggtggagatgagtcagctctctgcccaggtgaaagaaatggcggctattcaaggggattactatgctgcacgcaaggtgttcgacgagggttctgagagcaacttctgtcgaagaacacccatagggaaacttctcttcttcctgcgggacaggaacatgatgcgtatggcgctgcaacagctaaccggggtgctggatttggggtagtaactaccctgactccgcctccggtcaaaggtaacaatcttcttccgcatctgggtttttctgctcagccgttgaaccaagcagtacattccagtttatcaccttactcggcaaatctggcagcggctttacccaacatgagttttcctcaatttgatggacatcatcctaaaatgtggaaagtgaagtctgagtcatattttgaggtgtttgctatacctagtgaattatgggtgaaaatagccactatgaactttgtgggttcggcagcattttggcttcaatcaatggatccggctttgcgtctcacaccttggcttgatttttgctcagccgtgtgtgctcgttttgagcgtgaccatcacaaccacctcattaggcagttttttc

SEQ ID NO: 157625 - DNA, 546 bp, Zea Mays
tgtgctcttgaattgcaagttctgtatatgacatgataaatctgattgttttcttgtagcgaaaacagcaattctgccagtggattagcagtagctgcaatgtaatatcacgtgacgaagttcgattgagttttgtcgtgaaacactgattctgatactggagaaccgttcaaaaaagtacctgctgtatattcgttagaaaaaaaatgtagctgcaacacatgatgaagtctttcgttaaaaaaaaatctaactgcaatgcgctacacatgacatgatgaagtcgacaacagggtgagtttaggtcgggtggagtttggatccctcgaaacctgaaactgattcgaaacatggtttacgtcggatggaatctgtggatccgaaacatgaactcatgttgatccgaaacatgaaatcaaaacctgaaccgtctgaaaaccgacctgaaacatgaactcaacctgagaccgcctcaaaacctaaaatcgatactggttcgggtgataacctaaacctgaaaccaattctaatctgattcgtcatcgg

SEQ ID NO: 157626 - DNA, 672 bp, Zea Mays
gtgcgacatgctcatgcttacttaactcggggtgaccactaggccctactaacggagcaatcagcttaagtcggcaatgacttaagacggtgcgacatgctcatgcttacttaactcggggtgaccactatgccctactaacggagcaatcggcttaagtcggcaatgacttaagacggtgcgacatgctcatgcttacttaactcggggtggccactatgccctactaacggagcaatcggcttaagtcggcaatgacttaagacagtgcgacatgctcatgcttacttaactcagggtgaccactatgccctactaacggagcaatcggcttaagtcggcaatgacttaagacggtgtgacatgctcatgcttacttaactcggggtgaccactatgccctactagcggagcaatcggtttaagttggcaatgacttaagacggtgcaacatgctcatgcttacttaactcggggtgaccgctataccctgctaacggggcgatcggtcgaagtcgttaatgatttagatcggctcggtaccttcacatctacttaactcaacaccaaagcgcgtttacgactactcgtcttaaggcgacctctacgccacatagagaaatctcaaaaccatcatactacattcacctcaatgtttgtaaatactgctga

SEQ ID NO: 157627 - DNA, 1088 bp, Zea Mays
cccagcgcagcgcatccctcccctttaccacgccacgacgtcgacattggggccccatcgtcagcctcgctcgcgcgagcactctggcaataccgctgctgtcgcgtgggtcccactagtcagccgacccctttcccctacctttcgcaacagccctcgggtgcatggcggtgaatctctccgccgcggtttccacggggatggttgcagccgcagggatcgcttcggcctcgcccgtgtttaacggatgagatggtcatcctgtgtactcggccctatttaaccaaccaagccttgggctcctccttaaccattggcgcatcagagctaagtccaccgcaggtgcagctgcttgggcgatccctctgcacaggcattcgaagaaattgaagcagccgcgatgcagctcctaggctcactgtacatgtgtgtggtcatgcccggggtgatgatagccgtgaaccgccgcaatttctcgccggcagtgaagatccggggcttggcgagaacccacggcctcgtgacgttgacgttggtaagatttaccccaccttgtttgcattaatacccactccgcgtagcacccttcggattcgaggattaaactagggagggagaacgagttgctccggcggggtctccaccgtgggctagaggtggcgccgccgcatgggtggtgtctgaggttggggatgatgtcgtgaccgtcgatcgaaatgtggacgactcagattagggcctcgcgaacccattcacttgattgaatctggatccttggatccggatcgggtggactggagtgcgtaccgcttcatcaaaaccctcgtttgatcacaggcgtaggatctcgatcctacggatcatatggaccgagacctttcagtgcgtgtgttttacattagagcccccgaactccttacaaatgaacccgccgtccagtgcgggggaatcctgagtcttatgatcgtttgcgagatagcccctgtagttgatgatatttatgcgctctatccaaagagttagaaaatccagtaaaagtaattagaaaatgatttttaatgagaaaataaatgctagaaacttgtata

SEQ ID NO: 157628 - DNA, 512 bp, Zea Mays
aggtacatgattgagtttgcgccgaacgaggatagagaagcggatcgacagagagggcgcatacggtggcgttctacggagcaacggagtgttccggtggtgggactttagtaaacttcgattggttggcgccgagagcaataggaagctaagggcatactagaacaagagacaattgagtgagtactaacccgaagtgggctggccatggagaggtccttcacggtggcgccaggaacagggcgaaacaaatttgtggtcggtctgagttctccggtggaattgaaccaattgctcaagcacttgggtgtgcggtgtggtgaagaagctgtgctcgggctcaatttataggctgatggccggagatggatgagattcactgaactgtaaacgcgctggcgagctcacccgcgcggcagagccacggcaaacgttcggtgaccgcggattaaccgggcagcgccacctcagtgttttagcgctcgtcgcggaagatctttaccgcggccgca

SEQ ID NO: 157629 - DNA, 636 bp, Zea Mays
gatagacgcacacacggcgccaccagcggggccggggcgtggagtggagaggacagcgcggtggttgcgcccgcataaatggcacggtttcctggccgggccggggggacgggcgacgtcgatcgtaccgcgaggataaggcgagatctcgagggcgtgcctcccgtccgtccgtccgtcctgttcttcgtcgtcgtcgtcgccctcagcagcagctcgctcgctttatccaccttgagtgacgagttaatgcctgagtgctgctgacctgaccaagtgaccaccataccatcctgctcctttggacctttgcgcgcgcggaggacagttggtgctggcacgcacggcaaccatgcacgacgacacagcggcaggcttgtttgcgatcgtggtgtggctgtacaccgccacggagcgaggtgagcacgggtggctggcagcgtacgtcaggcccgggtcgtgctgtacggggcggctctgtacactgttggcgagtcgtccatgttttccgtgcacgagatctttgatatatgccgcacgtacagtcgtgggtgcttcttgctgctctcatttcatctcttatatatattatgctgtaccgtacattttaatcgaatcaagtatgtgtttcaccca

SEQ ID NO: 157630 - DNA, 594 bp, Zea Mays
gtcttggtcaacctatccacaatgacccagatggaatcatggtgccgggaggtattgggcaatcccacgataaaatccatgcaaatgtcctcccatttccaagatggtatgggaaggggttgtaaagggcttgctaccttcaaatgactggccttgattctctggcaggtgtcgtattctgatatatacttcgcaatttccctcttcattctggtccaccagtataaagatctgagatcatgatacatcttgttactgccggggtgcatggagaattttgaaaggtgagcttcatccaatatcttctttctgagctcagggttcttgggaacaaccaatcggtctccaaaccataggattcctttgctgtcctgacggaagcatttgtatttgtccaccttctgtttgatcatttccttgataacttgaacacccttgtcaccaatctgtgccatgactatttgctcttgtaatgtaggctccactgaaatataatttaaagctccggaggaaatgacttctaggttcagcttgcacaactcatcacataaggtggtgattcttgcatccatattcatacaattgcactaggcc

SEQ ID NO: 157631 - DNA, 736 bp, Zea Mays
gtgcgagcacaagatagcagcggtaagctaagcaacccttcgacatcgcctagtgccacataaaaccagaactcccaccagttaccccacttatttttcgcacacggaacaatctcgataacttcggtggaggtcttcctagtcctcggtgtaaaggtgcaagacccaaactgagcaatctttccacctatcttcctttttgccagtgcagatagtaatttttcgcaaagacttcaacagatggttcctcaccatatgaggaaacagcccacacatacttcaccagcgtcgccatagcattcggtgtcaactgacgaatttgcctaaaacctccgtaggacctccactacaaaccgatgtgctggcaagcaaaatccagcagcaaagaaagcctcaaacacaaccaactccccctccgtctcagggacatctttagcccctgagcccgcccaactccgcttccaaagtaacccagccgctgcatctccagcacgcggctcgagtaaatcctcgaggtcccaaattcaaccgtattcctaggctctaggtccactgctgcagaatcgctaatcgtcttctcggacgacggcgtggtcgacgacacgtttgcagaggacaacgacgaggaagaggacgacatggtcacgtaccgtcggcggtggcgaacgatctgcttgatgcaggccagatctctggcagagcgagagcagagagggcaagcaagcaaatgaaaaag

SEQ ID NO: 157632 - DNA, 967 bp, Zea Mays
ttcggctacttggcatggggagccaagctgcatgtggcacaagggccttgtcatcccgaagctcaatttcaatggactcatgaccatagtcattagcttctcccttctcttctcgtctgcccttatgtaaaaccattcgcttttccatctggtcggccacttggtgcgatagccgagaactggggccttcgtatccttccgatacgcaaagttgtaatagccgaagttctcatgaagaccatctactctggccttcgtttgatagtgcagttcgtgcacccggcagaaagcttcggcattgggactcataccctggcttcggagggcccatatgtagacactaagtctaacaattgcattgggtgtcagttgatgaaagtatatctcaaaatttttcaaaacttctccaatcatctcaagtagcgggaaacgaagtcctgccctgaagaagcttttaaaaactatgacttcatcatcttttggatctggaatcacctcttcccgagcaaaccggacaagtttgctctcggcctcccaaagtagcccaatttcttcatcataaccatgtcatctgcaatcatagtagatctaccaaattcaatgtggctgggtttcattgggctcagaatagtgtagtcctcttcatcttcgttctcacttcctccttcaactacgatctgttcagcttcagcaatcgaggtaccttcggcaacagcctcctttggcacaacaagacccgattgcctcatcacttctgatattggtgccgtttcagtgacttcggcctcgtccccctcacgagacaccctagcagtggatcgtactttggccattttagtgtttatgattctttaagatgaagctgatctcaagtgatgaagcgtttgctcgaaaatgcaatatagaaagctttgtctatggttaaaatttttaatagtgcgatggtaatgaatgatgtggtaaatcc

SEQ ID NO: 157633 - DNA, 659 bp, Zea Mays
ctcggccgctcctctccgctgctcttgccgtcttgcctctcgtccactctatatctggtcttcgctctccgctctcggcctctccatctccgctccggcgcctccgtggacctggcctcctcgtccctctcagtctcggactctctcacggtaacattggatcttgccatctcggtgcttgtgctccggctcctcctgtcctccactcctccgtcctccccctctctaccctgagtccctgacctcaacggcaccagtgacgtgaaccggggctctggatctgctcgtcttcggtaaccgtgaggaaccagtgcgcgtcggatcgatctccactttgagtcggcgacggaaccggggctccggaccggatctaccgactaggcggctaccgctaacggcggcctcaactctgtgtctagcacagaggttagtgacctgatctggacatctggtgttcaatggaaacccctaccttattgtggatgtcttccctgtgacctgatctgcttattcccttcatcctttttctttgcaagtcttccccgtgagttgtattgatccgtgaggaaccagtccttttggaaccggtactccggatctactactaacggcggcgagttcttcgtgtctggcgcagaggtaatctaatatacctgttg

SEQ ID NO: 157634 - DNA, 446 bp, Zea Mays
ttaactgcgaacgtttcatggtagcgtttcaatggtcatcaaggccacgttcttcctcgcctataaaacgcgacaccgggcgtgttctcctcctcttccacgctcgttgttctcttgcgttctagctctttgctgcttgtagctcgccgcaggcacgcccacctcgctggagccctgttccttgacccccagcactaccacatccagcaaaagccttccccaacgccactgttctgattccctgccgaaacgctgcccgtcgtcgtgtcatcgaagacccgccatctctgcctgctgctcagcacaaccactcagtccctgctggttgcaccaagttgcggtcgctagagcgattcctgtgctgtgttgtgacagcgatcccctcctgcaaccgaagcctcgtcgaccggcgtcttgttctacttcttctctgtgctacgtacctg

SEQ ID NO: 157635 - DNA, 878 bp, Zea Mays
aagtgcgtggacaccactaccgtgttgtgtaatataagctagaaatctcacaaccctcgtcgtgcacccatttcccactattttgtttacggtgtaccatcatgtgttgtcatcaccccttcgtagccacaattaattttaatagccattagatctatttagtatttttgaaaaagtttcccatgcctaccattatgaaaaacatgcataaccaaaaatctggaaaggaaatataaattatattgccatcacatcctatcacacatggtattggccaagcccctccgtcataacttctagccccagacacgtagcttcaatcagttggggatcgagagacataattgggagcacctcaaattcttagatcttcgtcttcctctataagggcttgtttggatggccatgtatccacatcaatccatgtgggttggagtggtttcgtgtgaaaatttagtttaatttctacaccacacgaaccctacatggatacatgatgagcatccaaataaggccgaaatgtagtctgcaagaatagaacaacacaagatatagtttggtgcttcggagactataaatggtaaatatggaggaggcactattgtgacatcactaaccattgtcaccaatgttacaacctacagaccatatgggaaacaatcccaggcaacactccttttcgtggagagagctgcctccctcgtctctatctctctctaatacatggttgaattcgttgtgtgaagtggcggaggtcggctatgctcggcctgtgtgcggaatatagagtttatttgggagagcccaattctgaaaaattagaattgaagcataaacctatttttgaatttggctccaagatatgcacaaatagctag

SEQ ID NO: 157636 - DNA, 677 bp, Zea Mays
cttgctccgctgctcgggtataaaaatgatgatgcctctgattctctgaagggaagccataccagattcttgtgttcctgtcatatcccactgaaacaggtttgaagagaagcgctcgacgtggcgcaggtctgtcagattctatggtgtagttcaaggtgagccaatccacttagccctatcctttgtgtgaaatgttgcttagttatcatggtggttccaatagcctaatagaaatagttactgaattcatctgttttctgtgagacagattcatagttttctgtgttttttgtcaaatgtgagtaactgaaacacactaatcgcactagagaaattcagtaactgattcgcactcatgcatcatcttattttgatggaggtcattctgtgctcttgtctgaaatatgaaaaaatgatgatacaactgctacacaccacggaaactggctcacacagggctctacctgctacacacaacagaaacagattgatagtgtcatttcaaagtgacactaaaatccaggtctttgtgaaaaggtaaatatgaaaaaatggtaccgatgattatttgatattgagataattgggatgacaaatggttcatcatcacatcttatcgtttcgtgttaggctcttgttaaaatgatgattaggctcttgttcagttaagtagg

SEQ ID NO: 157637 - DNA, 662 bp, Zea Mays
aaggagttgggtgatggtacagtgaccaaatcagagcgccagctcagttaactcaccgccggcgaccgtgcgcccagattcacgcccgcagcagtgattcatgctcggcgcggttggataacgtagaggagtaagaaatatcacccagtggatgaactccgaccactgttcactctggccgtcgtgtccgcttagctcacggccgcttctgatctaccctcgctggagttagacacctcgcagccttgcgccacgtgcctcgacactttaaccacaccgttgttactcatattagcccatcctgtgatcgccggtgagcttgccacgataattgccaccaatcacttacgccagtgcacctccttctctccggccgccgcacgtttccttcaaattagccgccaccgctcaagggccttataaattgagcacaccctcggctccgctaggtattcaagcacccagcacacccactcgtgcctccaattgttcacctgagcccccgaattgctcatttcccccaaatcgagtttccgccaccgtaaaaaggtcctcaccgtggctagctcgattcaggtccgatcttgtcctctgctctcttgtttcagcactcttacatgccactgatgctcctcgacccattcaattaagctagactgccc

SEQ ID NO: 157638 - DNA, 375 bp, Zea Mays
aataaatatgtgcttaatgatggatacttatttagagctaaccgcctatgcattccagttggttctgtttgtctcttgttgttgcaggaagcgcatggtggtggtttgatgggccactttggtgctaagaagacggaggctgtgctgttcacacacttcttttggccgcatttgagacgtgatgttgagcgctttgttgctagatgcacaacgtgtcaaaaggccaagtcacggttgaatccacatggtttgtatatgcctctccctattcgttcggttctatgggcagatatttcgatggactttgttttggaattgcctcgaacgaaaagggggagcgatagtgtttttgtggtggtttatcgtttttttaag

SEQ ID NO: 157639 - DNA, 531 bp, Zea Mays
cttggagacagtccattgagcggcaggatttcatccgtgaggaggtccggaagctgctgcgcgctggcttcatcgaagaggtccatcacccagtatggctagccaatccagtcatcattcccaaggctaacgggaaacttcggatgtgcatcgactacaccaacctcaataaggcctgtcccaaggacccatatccacttccatgaatagatcaaatcatggattctacctctgggtgcgacctcctgtccttcctagatgcttactctagtttccaccagatccagatgtctaggcaagataggaagcataccgcttttgtaacagtggatgggctttactgttatgttctaatgccttacggtctgaaaaacgccttgccaacatttgtacgggcgatgagtaagacttttggtgacctgattagggacaggatggaggtatacgttgatgacatcgtggtcaagactaagagagggttgaccctagtggaagacttaaccctggtttttaacaagctgcgggcaacac

SEQ ID NO: 157640 - DNA, 870 bp, Zea Mays
tttaccacaacctgctacactcttcccctggatggctttgatgtggtgctcagggtagaatggttgcgttctttgggtcccttcatctgcaactttgagaagttgacgctgtcgttttggcaccacggacacatggtgtgttggacaggcattagcggctctcaaccccgctgtaatgctctagacatggcacacaaactattggataccttgctgctatcctttgaagacctctttgtcgagccctagggacttcctccaccttgccaccatgatcatcgcatccggacttctgccagggacagtactagtggcggtacgaccataccgctacccttagttgctcaaagatgagattgaacgacagtgtgaccagatgctatcccaaggtatcattcgagagtgtacctcagagttctcatcaccagtgctgcttgtgaataaatcggacaacacatgacgcttctgcattgactaccgtgagctcaacacaaagacggtcaaggacaaatttcctatccgagtagtggatgaactcctggatgagcttcggggagctcggttcttcaccaagcttgacttacgtagcggctaccatcaggtgcgcatgcacccagaggacatcgatacgacggccttccgcacgcaccatggccactacgagttcttagtcatgcctttcggcttgactattgcaccatcgacattccagatgcttatgaatgatgtactcaagccgttcatccgtaagtttgtactggtattctttgatgacatattaatctatagctcatccttggccgagcatcttcaacacatgcggcaagtattctagttgttacgagagcagaagttagccctaaagcgcac

SEQ ID NO: 157641 - DNA, 1015 bp, Zea Mays
caatgctagaccttcctgagcacgtatttctcctcgggtgctacatgatcttctagcgtccttatctagtcactttatctcatctaatcagaacataggccttgatgtaggttgtggcatagcctggtatgctgtcgtgcatacagtgtaacgggcggtgtcgtctagtcttcttcgtccatctcttcatgcctcggtaacacacagagaacaatatgagtcataatgaaaggcgcccaaacgacacaataggtcaatgcccaatgtctcggtaacgtgcgggtaacagtaaaaggtcgcatgcacttaatgtaggggatacactacctgctactcatgcaggcaagtatgcgtcacatttgtactgaatgctagtgggccctgtgtgagaggcctttgttaggcaccgtctggtggcttatgctaagggtgtctagccatgtgttagcatcggacccctgcctaggagaggggcagacctagggataagtggtgacactatttcccaagcctttcctgactatgggcttgagccatacccgtgggagtccgggctactatgccccttgtctggacacgtggtgactccagacctcacctgacctgaggttcggatggtatcttttacacccagagccattctaaagacttggtgctgtaactagagagtgtcttctcctccgagactttatgttcccaacaaatccctttgtctagggatctgttgggtcacaaggaggtccggatcttatttgcaggctcccagacctatacttgagattgttgattcttccatttatggggcttgatggagataggatctggccaggaggcgaacctggtctggtcatgactccatatggttggccttagccccgtacttggccgactgcccacgaattctttaatggtggccccgagggctcaccgacatgtagggatgaaaacggtttcggaatttttcggaattccgaaaaccgtttccggtttttctcggtcggatttatcggtatcg

SEQ ID NO: 157642 - DNA, 881 bp, Zea Mays
catgacactgtctacggcgggcttcaaacttttggcaccgccgtcgtggcaattgaacgggtggcactgaaatctccctccaattgtaaatttggcatcgcgcgcgcttaatggtgttttagcccttgtgcagtgcccgtgctaccctcgcgccgttagaaacttgtcgccgtccgttcttctaccgtcgcccgtgagtctctcgtattccattctccctgtctcctctcctccttattctcgccctggccgtcgtcttcctcgagctgctctgttcgtctccgcgcactgggtgcattcgagccatgtcctcgtccggatctcgcccttacctgcctcgccggttcctgcgcccgtgctccattgccgacctccgacgctggtgagctttccttgttctgtaaccctagggtttgcagattagaaagccggcatggattctgccgccgagcattgtgcccagaagttgtccttggcggctgttgcagcccgtgacacactgaaagcttctgctgccgcgagtattgttgctggtgattattgcgccacattttcgttaggtaacgatgtggtttctactctggatgttcttgaatccgctgtagctgcggaaaatagtgctttgcgatcttacaaacaggcgactgcagccgtcgattgtgctaaggagacagtggccaaatattctgaggtttgtattcttaaacttatgccctgtgattgaaatgtgaagtgaggaaatgtgaagtgaggaaatgtgaagtgaggaaatttgaagtgaggaaatgcttagccctgtgatgaaatctttgaaaatagtcaactgaatactacacttgttgttttgatgcgatgaaatttgtgagggctatggctatttg

SEQ ID NO: 157643 - DNA, 457 bp, Zea Mays
cactagtaaatgcacacaagaaaaatatgatacgataaaatacattaggttctcaggaatgctagactgctcttccgtctccacgaactgctagactccagtactcctcgaactgctagactcaggttctcgtatcgagtatggagcggcgaagtctgcatgctgctgcgtctgcgaggtcggccggcgaccctagaccgctagagttggatggcgttcttcggcagttgggctggacgcctggacgagtagacaaagacgaagaccctggacggctaaacctggacgagtagacgaagaccctgcacggcgaccctggacggcgtcggacacttggtggcggcggatggatcaggtcagctggtgccgtgtggtcaggtggtgccgtgtgtagggtttgtcatattgctgtgtgtaggcctgggcggtgggctggtccgctggtgtgagacgtggg

SEQ ID NO: 157644 - DNA, 558 bp, Zea Mays
gcaagaacatatgtaaaccttagatcaaagtctacaacagctaagatgttctatgttgtggtgttgtttcctgccaaggaaggtacccctctaatttctaagaactcttgctagcacatgagtgccatcaatggcaccaatacagtcctacacatcagggcaaacatttgttactacaaacccaacatgaaaaggaagggatcagtagtggtgtgtttggatggttggcctagaaataggggtaccatctgtggctatctctaattttggttggtgtagcagttgaaggtggcaagatcatttcatttctcagtttaccaatagcatacaatacttccctgaagtatctgttgatggtctcaatagaccttcgaaaggtcatgtgtacaactctaaacctttgattatgacctaccacatgtaaaaacatggcaacctgctcctctactgagttatgaatgctatctctcaatagttgcctagtgtgaaaaaggtcacacaactgcataaaaggggctcttctcatcctaagtaagtcaacacactcagcatcagtgg

SEQ ID NO: 157645 - DNA, 699 bp, Zea Mays
tttcattctgaaattcagcttttcagtgtaacagggtcgactttgagtgtgaattaaaccttgatccagtgcccaaatgagttcaatctctatagtcgaattgtagctggtatgtagcactacaactttgatgcagagctttgggtgagttgccatgaaacatttggagaaaacctgccctaaatattgactgtcaggtgcacagaatagaaattctgatggtacagtgcccaccggatcataccgccagcgcggctgtcttcaccgccgacgaccgatcttcgccgcgattcgcgccatcgccgttgtgattcacgtcgacgatgacccgataaggccgccaagtaaaagccatgcacttggggataactccggtgactcaccgccgtacccctcgtactccgcggctatggaggataagttcaccgacgagagccaccttccggccttgtgccacgtgcctgagtacctccaccgcaccgccgtaagccttagtaactctccgttgatcgccggaacgaccgccacggtagaagccacgaatccattgcgccagtgctttcttccacctccggccgccgcgcgtcctcctcaaaattcacgaccaccgtcttaccccccctataaattgagcccgtgactagctccgtgaggtcgtcagctaactagccaccgctaatcagccagaatcatctacca

SEQ ID NO: 157646 - DNA, 501 bp, Zea Mays
gcggactgtggaaaaataataaaaaccacagggtctctttcgcataattgcgtcaatgaaggggtacactctattcgaggtcgttagatcaatttcggatggcctagattaaatcaaggcaagacccgaaccggtatgcgctgaacaccattgatgccgagatcagcggccaagataagatctcatcccctggtgaaccggtatgctatgactgccctccgatcttgattcggtgtccaggatctaatgcccaaataggtaaacaagacttctaatcctggccatctaccaaggatcccacggtgtggcaatcatccatcgaccgaccgccccaagcggcagcatagacgccctggcaccatggccggagcacgacctatcctcgctcccgagtccaaatcttgagcctagctggtggtatagggagagaatggtaagtctaacgatgtggtggattcctcacctcaggtccgggcgaagatgatccggtcaacgcgacac

SEQ ID NO: 157647 - DNA, 412 bp, Zea Mays
tcgtagtgagatggagagtggttatcttcgcatggatgggactggtaagcgagaattgttgtcctcgccgattggggtgagtgtaggtgagggggagctgcgaaatctttttgagtgtgaggaattgaggataatgttgttcaactatagggagatgagtatcatcccgaaggttgagccaatgtgatgtatgatgccctcgctgtgtgtatgtaaccgtaatttatgtggtaaggctgctcgctttcgttgatctagccgcgcccgtaggcgacttctgcacggggtcttttgggaacgacctcgatcttcgcgtgcttgttgtgttgttcaggctgcagacgtaagcgacttttgcacggagagtctgttgggaaggacttcgattttgtgcgcctattattccggctac

SEQ ID NO: 157648 - DNA, 641 bp, Zea Mays
gacgtagagtgacaatgttcagattgcgtcgaaaagagttgaaagatgtcaccggaagtggcttggtcatgatgtcggcaatttgatccttcatggagatgacccgaacgtcaagttggcgcgtagacacacgctcacgaacaaaatgataatccacttcaacatgcttggatcgtcgatgaaaatttggattggcggacagataagtagccccaatattgtcacaccagagtgtacgaggtcgtgatagggtgataccaatttcgcgaagaagcacttgaagccaaatgagttcagctgtggcatcagcaatcgccttatactctgcttccgtgcttgagcgagaaacagtttgttgttttcttgagctccacgaaatcaaattgccgccaaaaaagattgcaaaacccccggtgcttcgtcggtcatcggaatcgcgtgcccagtcagcatctgagaaagcgctgagtagcgaggagccagatttagtgaagtaaagcccctgatcaatagtgtcatgaagatatctaagtatacgcttgaccgcagaccagtgctcagttgttggagcagagagaaattgacacacacgattaacacaaaaagaaatgtctggtcgtgttaacgcaaggtactgcaag

SEQ ID NO: 157649 - DNA, 520 bp, Zea Mays
ggtgatgatccttggtagcaagggagaggctgcagacgccatcaggcgtgtacaagtcgctgcggaggcggagtgcggtcgcaagctgcgtgtgctgcgcaccgacaacggcggcaaatgcacggcagctgagttcgcgtcatactgcgcggatgagggcgttcagcgccactactccatgccgtatagcccacagcagaatggtgtcgtcgagcggtgcaaccagacggttgtggggatggctcgggctctcctcaaatagaggggaatgtcggctgtcttctggggagaggcggtggtgacagtggtctacatcttcaacggctcgcccaccaaggcactcaacaggatgacatcgtacgaggcttggcatgggcgcaagccggcggtctctcacctatgggtcttcggctgcctcgcgttcaccaaggagcttggccacatcggcaagctcgacgacaggagcaccctaggggtgttcattggctacacggagggctcgaaggcctaccgcatcctt

SEQ ID NO: 157650 - DNA, 885 bp, Zea Mays
ccctcgcctccttcgcgcggacggagccgaccgcggaagacaacggaaacttcccgctccacctcgcttcgcctcgaaccgtccgcggaagggagattttgcgcggcgacgcggcgacggatctcccgtcgggctgtggagtcggccccggccccgctcagttgcgcagaagacgaactcgacttcgtgaccacgcagttccgttcgtgaccgaagacaaagcggggtcaaatccgcttcgcacgatgtaccccgcgaccgattcgttgccttccgtatccgaccttggacggctccatcagatccacacggagacgcttcgattcggcgtgttgcggccgagatctccccttcttaaggtaataccttgttcaacctcgtcaaatcaatacttatttgacgattgatttcgaacagcactcgtttttttcttcgattcgccgtctaccgggcgagatcctcccatgttgaggtataccatcttgtaccccgtcatatgaatacttcattcaacaatgatttagaacaccaatggttttgttcaaaaatcctagtttattttccccagcccttacgactttaccagatccacacttgtagtttaagctgtcaacttgttacattgttcatcctccgatttagctacctggtggaacaaactttgtacccttctttgggtttagggtttctaggagatgcagacgccccatccaatttttgagctcacccttagttgccaatgcaagcaaggtttgcaacctcctatcctaacattagccatgccagtgtactgcatttgcccagtgatgttcaatccactgaagcagatatttattaagtgaacaacttgtatttctggcgtttatgtccaatgttaccatttca

SEQ ID NO: 157651 - DNA, 619 bp, Zea Mays
cagacaagcgcttcagccgtccccgacgtagacgaaccaacttccaaggacctcatcgacggagaccgtgtctttgccctgcaggccctcaacaaatatcaagctcaaacaaaggcatggcgcgaccacacagttgtcccaaaagaattcaacgaaggggacctcatactcgtccggacaactcggacagagtcacggggcaagctagagccaaagtgggagggtcccttcatcgtcaagacgaaggcgtcccccagcgcgtacaggctaacaacgtcatccgacgaggacctagagcattcctggaatattgataatcttcgtcaattttttgtttgaatcctcagggctaacacgcccttgtaattcaccaaacagtatcattccggcctgcactcttttcctcccggggggtgagggttttaatgaggcggaaccatgtaatataaccgcaaaaatcccccgcaaaaactaagatacaatatgtcgaaaaagaccgcatcgatggtcttcggcattcgaccagaccgaagtcaccgtgaggggcagcgctgactaccctcgcgtgcgacactccgcgcaaaagacgcctaagggtgcagccggactagcacaataa

SEQ ID NO: 157652 - DNA, 825 bp, Zea Mays
accgtccgaagtgtaaatcatctaggttcatggaggtagactctagtgatggacagaagaggcagctcgacatccccatgacaatcctacgccaccttccattcataccgaggatccagcgtctatacatgatagaggaatccgcgaaatagattacatggcacaaaaatggaaaacgatacaatcctaacaagatggtgcatgcatccgatggtgaagcatggaaacactttgatgccattcaccgtgagaaagctaaagaggctcgtaatgtacgtgttgcgctggccatagatgggttcaatccctatggaatgagcgctgccccgtacacttgttggctcgtgtttgttatcccaatcaatctccccacggtgtgtgctttcaaaggcagaacatgttcgtgtcattgataagtcccggacatctggggaataaaatgggcgtgtacatggagcctttgattgatgaattggtatgtgcttgggaggaaggggtacagacgcatgactgagctacgaagacaaacctcaaaatgcttatttggtaccagtactccatgcatgacttaccagcgtatgggctattctgcgcctggtgtgttcacagtaagtttccatgcccagtttgcaaggaagctcttaggttcatttggttgaaaatgggtggcaaatattcatcgctcgataaacatcaacaatttctccctcctgatcatccattctgcctagacataataaattttacgaaaggtgtcgtagtgacagaccacccacctacaacgatgagtggtgccaaaattcgtcaaagatagatggactcgtg

SEQ ID NO: 157653 - DNA, 571 bp, Zea Mays
tggcactcgtgctatcacaatgaagaggcacatgagaaaactccaagccaaaatccctcaaagtagtcgtcatccaaagcaactgcgagcaacaactagtggcaacaacatactcaacctctatggttgactacacaacgttagactgtttgctagaagaccaagaaaccaaggaggaacccaaaaattgacaagtcccagaagtggacttgcgatccaagtggtatcctacaaaatcagcatctgaataaccacacaaagacagaacatacgaaggggaataccataaaccaaactcaggagtgaaacacaggtacctcattgtcagtaccctgaatcaggggtaccctcttctacagtataaagacgttgtacacatacgacgtctcctgaccatacggagaacggcacccgaccccaccacataggcaggtctaggggcaccacgtggcaaggagagataatacaccccaggatgcatcattgggttcggacctccacagagggacaccagacccctgtacgcatagcccggaccctcgaatacagtctggaactcccaagaaggcat

SEQ ID NO: 157654 - DNA, 575 bp, Zea Mays
cgcgccctgcggcgtctcgtgtacgtcgtgccccacatgacatctctcccctcctcgtgaagcagctcgtccccgagctggaagagtggaaactgcttgcgaaaagcgtcgagatcttcccaagttgcagactcggtggttcaccacgccaatggacgagcagctggcggactccgcgcgccaggcgggtctgctccacccgaacaggctccggggtgaccactccatggtggatggccgacaaggctggtggagtcggcggaggcgtgccgacgaacttcttcaggacgttgacatgaaaaacgtcgtggatgggagtctgtggagaaagagccaggcgaaccgcgacgtcgttgatcaactcctcaacgcgatacagcccgatatagcgtggtttcaacttgcccgtggtagcttgcggtggggaagacatggtgcgctgacggaggcgaagcagcgcccaatcgcccacttggtaggacacttgtcgatggcgacggtcgtagtggcgcttatgcacctgctgcgcctgttccaggcggaagtggacgtcagcgaggaaggcagaacgctcc

SEQ ID NO: 157655 - DNA, 529 bp, Zea Mays
cagtgacacgacgatattcaacccgtggatcagtgcttcatattctgctgcattatttgatgctggaaataataactggagtgcatacttgagttgttcacctccaggagcaatgaagaggatccctgcacctgctccctgcagctttagcgagtcatcgaagtacatccgccatactttagtagcttccaggttgtcttggacttgatgtttggtccattctaacacgaagtcaaccagtgcttgagtctttattgctgtgcgaggtcagaactctatgtcatgagctcccagctcacagggccacttggctatccttccgatggcttctttgttgtgaacaatgtccactattggaaacccgatgactactatggctttgtggttgtcaaagtagtgacggagcttgcgagcggttagaagtaccgtgtatagtagtttttgaacttggggatacttcatttttgagggtccgagaacttcgctgatgaagtagaccagatgttgtactagatatgtatgtccttcc

SEQ ID NO: 157656 - DNA, 691 bp, Zea Mays
ttccgctgctgaggcagaaccggccgctcggagtgctgaagaatcgactgtagcaccgaaggtgcttgtagtcggctcagccgaagcaaaagacagtgtggccaaaaagccagaattagaaaagagcccaccggtaggggtagaactgccgaaggtgacaaaagctcccgccacaactcccaagagaaggagaatggccagtgtgctaaacgctgttatggagaccacaaaagcattgactcctgtccctgcgaagaaagttgccgaagctgtcacagcccaggccaaagccgaagctgggccttcagtgcccattgagacgaagcctgccgtgtctgaggataaggctgagcaaaaaactctagataccggcatggcagcggggcagggcatgacagaaaaagctaaatctcctgctcccgaagctccgtccgaagatgttgattacattattcgacatgcttcggggaaaagattatccgaagaagaaatcttagaagccaaacactatgcccggaaactaaaatatccaaagggggccttagtgttcaatggtacgaacgaagatgatttcctgtactgtctcccggacaacaaagagatatccgtttgctgggagatagccaaaactggcctcactgccatgtcgaaggatgaccttgcagatagcctcacgtacaatagtataaag

SEQ ID NO: 157657 - DNA, 657 bp, Zea Mays
ggaaaggctacagatagaaaaggtaagcatagatggattaaagagagaaaagggagggcacccagctaccaaactctatccggctgtttggtttcctgtatttgagcgtgcaaggcccatgaggtgcagcatctcaatggcccgttttgtttggatacctggatacagttttggaccaggctctgtgcatgcaaatcaccggtctcagcctggctcggtgaaaacggacgaaattcgcgttcgtcgggagcctggctgtgctcattcaccgcactggctcacagccgtcactcgcgcatccgctcgagcgggcgaaccccccgctagggtttgctgtcaatgccctcgctcatcgccgtcactcgccgctctccctctccgatctccactcgccctcgagctctccctctctccctcaagctccccctccgctgttgaggcttctccttccaggtggaggtttcgctcgagcgggcgaacccccctgctagggtttgctgtcaacgccctcgctcagcgtcgtcactcgccgctctccctctccgatctccactcaccctcgagctctccctcgagctctccctccgctgttgaggcttctccttccaggtttcgtcaaaaggtaaggaggtttgagtaccatctcttgccctctcc

SEQ ID NO: 157658 - DNA, 460 bp, Zea Mays
gcaataacagatggatacgctgtttgtcttggatgaatgcagccaaatcagacgaagaattctccaatgtcggaataccgaaatgccgtgggacatagtcgtagagagcttcaaatggcgatctgtcaatagaggaatggtggctagtattataccaaaactctgctgaagctatccaattagcccacttggaaggacaagagtgtacaaagcatcttaggtacgtctcgaggcattgattcacgcgctcggtctgcccgtccgattgaggatggtatgcactgctcatgtggagactgaccccggctagcttgaagagttctttccaaaaattacttgtgaaaatcttatctcggtcagagacaatagcaactgggaggccatgcagcttgtagacttgctgaaagaatacctgagcaatggaaactgctgaaaatgggtgcgccaatggaataaagtg

SEQ ID NO: 157659 - DNA, 547 bp, Zea Mays
taacaaccctccggattctcgcatctgatctggtcagcaagacgacttgttgcataataaattgtgaggcagccaggcgcacaatcccgtatcaactttttgcagtccgatcaccaagccatggactccccgaccttttccagcgacaatggtgtgccacaatccgccgacggctccagcgacaacgaagaacaagaggcagcaacagagtttcctgagggatcgagcagcgacagtgaagaacttgagggagcgagcagcagtgacaatgaagaacaagagtcagcagtagagtttcttgagggagcgagcgacgacatcctggagatcgtccggatcttaatggacaatgtcttcgtggaggacgacccccaactcacgttgcagattgtccggaacttaatggacggtgtcgctggcctggagaagcgtgtcttcaactccactgcggagccagggcgcgacgacggctgcagaggctgtgcgatctgcctcgaggacttccaggacggtgtggaggtcgccgtcatggcgtgctccggccagc

SEQ ID NO: 157660 - DNA, 966 bp, Zea Mays
tttccttcctcctttttcttcggcattccccaaccaccagagtttggaaacgtcctgttcgccaagtattcttgcaccaagtctctagtgctaatgtgctcagccacaactctaaactccaccttagctagttggcatggggaccccagctgcatattgcacaagggtcgagtcatgccgaagttcagtatcaagggactcattacaatgctcatgagcttatcccttttcttctcatcggccttcatgtaaaaccactcgtttgtccacccggttggtcatttgatgcggtagccaatcacggaggccttagtgtcctttcgttatgcaaagttgtagcacccaaagttcttgtgcagaccatcaactcttgccttcgtctgataatgaagctcgtgcacccgacagaacccttcggcactggcactctttccttggcttcgaagagcccagatatacaggctgagcctaacaatggcattgggggtcagctcgtgtagttagatttcgaacttcttcaaagcctcaccgatcatctcataaagggggaccgaagtccagccttgaagaagcttttgaagactacaacttcatcctcttttggctcgggaatcgtctcttctccagcgaaatgaattggttcatcatcactctccccaaagtatcctagtttcttcatcaaaactaaatcctctgcctttactgtggattttccaaacttgacatggctgggtttgcttgggcttaggatactgtcatcattctcactttcattgtcactttcagcttcagcagtggtctgttcagcttcggtgtcagtaacaccttcggcaatagtttcttcctacgcaaccaacccaaaatgcctcatcacttctaagataggagctgtcttagtggtttcagcctcatccctctcgcgtgtcaccctagcagtcgatcttactctagccatttcggtgttca

SEQ ID NO: 157661 - DNA, 1156 bp, Zea Mays
ctcgaaatgaagcgactaagggcggctaatgaccctgtaagcttctggacatccttgactcgggccgggggcctcattgcctcgatcgctatgatcttctccaggttcgcttcaatgtcccggtatgaaaccaggaatcccagcaacttccaagcggagacaccaaaaacacatttgtccgggttcagcttcgtgcgggttgcccgcagcttgtcgaagactagggttaagtcttccactagggtcgaccctctcttagtcttgaccacgatgtcatcgacgtagacttccactttgtccctaatcaggtccccgaaagtcttactcatcgcccgcacaaatgtaggcaaggcgtttttcaaaccgtacgacataacaacatagcagtaaagcccgtccactgttacaaaagcggtatgcttcctatcttccctagacatctggatttgatggaaaccagagtaagcgtctaagaatgacaataggtcacacccggaggtagaatccacgatttggtctatacgtggcagtggatacgggtccttgggacaggccttattcaggctggtgtagtcgatgcacatccgaagcttcccattcgccttggggacgatgactgggttggccagccatattgggtgatgaacctctttgatgaagccagcgtctagcagcttccggacctcctttcggatgaagtcctgccgctcaacagactgtctgtgaggcttctgactcaccggcctggcgtcggggttgatcttcagatggtgctcgatcacctccgtggggatcccatgcgaacacgtcagtatttgcctggaggaaggcgacgacggcgagttcctatttctcgtccagatcacccgcaatgcgagtggtctgggtggaatccgcagcgagccggatggctttgacggggacaccatccagtccagatggttgtacttttggcgccttggggagcaccttggtaccagaggttgaggggtccctccctccgtcgtccgggcgagcagtctcaagtgcggcggcagtctctgcggtcgcaagtgtggtggcacggtcaccccgcatggtgaggaccccagtcggggatggcatcttgaggaccaaatacccgtaatgggcaatggccatgaaccggtacagggcc

SEQ ID NO: 157662 - DNA, 767 bp, Zea Mays
tgattttgctccacatcaacgtaatctttgtgatgatgccatgtgccacctatacttctcgttagatctccatcctatttttgaggcccaaacttgagaaattgtttgcttggtggttttgagagcgaaaccaccaacacatcatgagtagcatattcaatacggtccctccatattcttgacatgtgtcatcgatagtcattggctacccgatcacaaagtccttcagcgcattcgcttgacttcgtcaactattatcttgtcttagtcaacatggtctgctccttcatgtactcttgcactcatccatgaacctaggagtcaaccactacggtaagtccttcaaattctcttgtccatcaatcaaagcccaggagtccattcttcactggtcctagtccattgcacaaactcaattgaccttcaccttcgatgttgaccagcgcctctacaatccacactgtagacaagcataaatacatgttttccaacaccatactcacaccaaggttagaatacactataccaaaaccgattatctctttgacaatcacatgtcgcacttcaacattttgggcatatatcaaccatgtgttcacaatctccttcctaataagtgcactatcaaccgtaaacacaaacacataaatcaaaattaaaataaaaaacgagaactcactaaaatgaccaaaaactagtgaaaagtcagacatgctcatttgaaattagcaaagattgatccctaaaaacttagggaacgactcgac

SEQ ID NO: 157663 - DNA, 392 bp, Zea Mays
aatagctaggctcgacacaatcaagaaaataaaaaatcactttctccaaagtgaatcaaaattcagcaaaactccctctcaaaacaagcatgtcaagtctcagcaaaaacgaatcaaactccccctgcaaaatgaatttgtgcgctactcactctcccccttgttgacaaagcactccatcaagataaatgcaaagaaccaatttagagaaaaacatgtgagagagcgcaagtagaagcttccgagacatatgccaaatacttataaaaactaactagcgactcagagaaggagcagcacaatgatatgaccattagaattttagaacttaaatctctttgaaaaatcaatgagccaggcaaaaacatgcatattccaaaatcagtgccaag

SEQ ID NO: 157664 - DNA, 452 bp, Zea Mays
attgtatcatacacttgagacaaaacaagaataatgtatgggcatagaacggtgataattgtatcataaatgtatgggcaaacatgcataacaccggcaataagtatatcataaactggagacaaaacaggcataatccgaagttgttgacagcataaaatagtacaggaaattggcagaatcaaatgcaagaaacgcacatgaccatcaaacacatagggtacaatattccagtatagacattcgctgatccccaaagttgtcattgacataacataagaaacgtagtctttgcccatattatacacacatgactgatctaagtttagggaaccattgtatacacaatatattacatgtctaaactaaactacatccattagaccttgaatctttggatgtcttcaagcagcgataatgctttgttcttcggatggaatgtgatataatgc

SEQ ID NO: 157665 - DNA, 1124 bp, Zea Mays
aaaacacaggggctctggcgcaagatttctacatactcagggagacacccgagcggactgcgggttgatttgctaaaaggtgagggttttatttgcaaggtggtcggccgaagggtacatgggtctattttggccgatggattaaaattctacggctgggattggatctgcctgtgactgaatcggtatggagttatgtccgttagattaggaattaacggtgctgatttaaaacactctagatcaattcttggccacgagatctcgatccgatgactcgggggagttctagcgaaggggtacgcgtgcgcaaaatcggagtcatccatcagcagatcgacggcgcgctcgaatcgacatgcaccactggcaaacagagcggcgctcgcatccgaccgcggcggaggccatggccggagttgccgtccacggtataagcaccctaaactccaatgctaatcggttcgacgcgttacgggaaggaaagtaaacataaaggcgtggttcataccggaaatcgcagggcagagatatccccacacgacgaagcacggatcctcgctggaacacgccccggcgagcaattcacgccaagctggagcacttctttggctaatagcggcagaatcacaaccagtaggccaaatcggagcgccacagtacttcgcgcggcatcaatttcagtcacaaaacgagttgcacccatggaggcggtgcggtcttgtttgtcgtggtggttttaggagggtttgcgggtggaatccttaacgaaggcacccgcacctttatccttgccgaggaaaggaccgcaaggcgcaggattgaccgggcgcaacggtgagccgactccaccgggttcgctgatatcggttgagggcgatggtggggcgtggagcgcacgcgagggagttgaccccatggccccattagtccgagacccagtagtcatcagccgagctggcgtgaccggcaggtggccccaaggcatcggcgcccaagcgcggaggctgactgagtcgcgggcccaagctgtcggcaccaactagttagctgggccgcgcacacgagagagggtgatgagagatgggccgaatagaacggaatcagcccaagtgcccattttc

SEQ ID NO: 157666 - DNA, 701 bp, Zea Mays
gactgccgcacccatgtattctggctgccgcttccacttcattccctggccaccgcttccacctcgttcctagccaccgcttccaccgctcgtcccccctgcatcgtcgtttcctgcttgtggcctgcggcgatcggcatcagtggagccaagccgttcctccagagaagggtacagtgcaccacggtctccaatttctcaggttcgtgtaaggtacgacgaccacgttcattgacctaggtgattgatcgtgatgtaggttctgcacgaccatggatgtgacctcgccagttgggtacgacgacgacttcatggctctactgacctcattggatacacatccaacaggcgttgcggggagcatagacaccggcatgcaaatgttgcagccaaacatggattatgtagccacagatatcgcaggcaacaacaccatggttctaaacaactctgatccttattacagtgctgatcgatttagaacacacaaaaaaagtataagaacaacatcaccggtgagaattttacattgttttaagctgttgttcaagatgaactagatatctgtattgatatattaacgattgattttgcagattacatcatttgtacctgattgcaatgagggattgaagcctactgttggcatgtcatttgattctctagaggcagttgaagaattctacaagacatatgctcat

SEQ ID NO: 157667 - DNA, 490 bp, Zea Mays
ggaagaggcaggtggttgcgccggttgctggcattgcgttctgctagttcccgcccatgatctcgaaggagatggcggtctcatcgtcgtgagttccattgctcgcgggacgcctgctcatccagggtttccctcgcttcagacgcctcgtcctgcgacacggctgagtggggtcccgttctccggccacatgacgatgcagggcattacgacactgattccggagaaggcgtgcctcgcgctgtgggggttcctccccttgcattgttggttcattgtcggagacggggacatcttatatccttccgtcgatgaagaggatgtcggggaagtagggtcgtggcaatgtccattggggcccacatgctgcctttgtaggcagggcaaccggggtggtcgttggatgttttccatgaccatgggagcaccgagggcctctgtcctcttcttccgagtgatctaggtccactcccgggtgggtgaagtggac

SEQ ID NO: 157668 - DNA, 463 bp, Zea Mays
agataggtagagatcttgtaaggctgattatgactcgttttgctacttttttctaacatggcaagtatgcataaacataggaatgccttgagaatttttgttgttagtgatgagtagactactaacagcctgtatgcatctgttgaaggaaagcaagttgtgaaatgtgaacattatcctttcacaacaattttgggctaacatgaaaaaattgcctatgagtttcacaaccacttctcgttgccttgaggataacagatggggatgaaacacctagaaactacggagatcatggcagccatggatgttgtaaagagcataatcaaagaaacttttaaataggaaccaagtctatagaaggaggtactagagtgctatgaaaagagatggacaagccaaatggagcaaaaactgtatggggggcagccctctacttgaatccaggatagttttttttggcata

SEQ ID NO: 157669 - DNA, 1680 bp, Zea Mays
ctcagttgacacttgcattgtcagtcaccacttggacaacattttcttcccctatctcttggatgcatctgtccacaaggtcaaacacatattttccatctttctttacagctgagcagtccactgaatccaagaaacaaaccccatgtgcactatggacaaccaagttcatcactcccctacccttcctgtctgtccatgcatctgtcatcaccgagcaacctgtgagctgccatgattcctggtgattcttgaatctatccaacaccttttgctttgctctcttcaagaatggtccactcatctcataggcactaggacctctcagacctctaccaaaagctccaattgcctcaagcatatggccaaagctcgggagggttactgtattatgtgcaatgccagcttcataaaaaaattggcatatatactcacatgctctatctcttctgtcttctcttttctgggttgacaactttgtttgaattttgttcttgtgggcagactcttcaacagattgtggcttgtagaagttgtcaatagtgccactgccaccatttgttgagggtctagagctgctgctattattacttacccttgttgatttcagcacaacaatatcattctcatgctcattgtcttcttcattggatccatctgatttatctagatcaatttcatccctttctctttgcttttccttctttctctgttctttttcactagtcttctttgtaagcaaggcctccatctcttgattaacaggtgccggaactttcttgcactttgtaacattgaaacctccaatgtttgcaagatgatacttaactctagtaattccaccatggatcaccttgtcacagtacttgcactgtattgcatgcttcttactcatatccgggacaaagcaatgctcccatgtagggtcatctgacttgatagcatttgatgttttttgagtaactgaagcagagtttacacttgatggttcacctatgtagtatgtacaaaaaaaagaattacaaagtatagtaaccgaagcagagtttacaatttacaattgaagcggagattataatcagctagcagatattgacaaatgaaaagtagcttcatcacaaatgtaaactagcttagttcaaaaatgaataatggcttcaaatctcaaagaacttgcctccttgttgttgtggatcaggttgggacgacatggctgttgtctgcttggggctgtggatgaaacgatcacctgatgacctgagttgtcgtcttgctggagcagactggaggttgtggacttagtgccgtaaacactgcagattgaagcttcaaattcagatgtagtgacagaatctgaataaacatatgcagtgacagaattttcacaggctgttgtacatagtaatcaggctgttctcgttaagagtttcattgtgttatttgcaataataatcagattctggagagtacactcacaacagcctgtgaaaactggcagcacgacatgtttatgcatatgttctactcacaatgaagcttcaatttgcataaattccgtcaccggcgtcgacgttggagctgtcggagatgtacacgatgccggtgaccttgtccgtgtacccgctggagtcggcgtccaggtcgcagtcgctgctcaggaaacctgcatgccacacgatc

SEQ ID NO: 157670 - DNA, 791 bp, Zea Mays
agatggccaaaaacatgggatttccaaagcttgaagctggcctctccgccatgtaaaaggatgacctcgcagacagcctcgcgtacaatagtctaaaggtatggaagtgatgaacttaaaaatagattatcttgtcttgtattctcatgctgatcctatctttttgtagggcttaattcttagcaacgctttgagggcgcagaagaatgctgaagatgaaagctgccagatagccctcggcaaccttcggtcagaagttatcaagctgagaaatgaagccgtggaaaaagataaaattctgctttcattggtggacaaagtgaagaaagacgaagcaaaatttaacgctcaatccgaagctcataaagccgaagttgaagaccttcggaaaaaacttgctgaagctaatgaaaattttgaacttgcaaaagtgaagcaagaaataagtgaatggtcgaacattaggttggaaaaaaatgttgaggagcttcgcgaatccaaggagagatgctttgagaaatccttggattgcgtaataaaattgaaaaccagctttgccaaggtgggtacatattcttccgaagagaatttcattcgaggagaccccgagggtgttattgattggataagcggagaagccgaagcttttgaagagatcctcagtgatcacggggacatttgtgccttcgccgatgctcgaggggttgcagcaattctggagaaggttggttgtgaccatgttaaagctgcagcccagaccgaagtcgccttttccacagacaacacgaaag

SEQ ID NO: 157671 - DNA, 404 bp, Zea Mays
tccggattgggtgcaaataacagagagacacatgggttattatgcgaaaattcatgagactcaggattcctacagacaggactgcgggtttatttggaataagccgaggggttctttagaaagatctccaggccgaaggggtatgggcagatcatagccgttggatcgcaaatcaggggctcagatcagaagcccacatatctgaaccggtatgtaatatcaaccgcaagatcggaaatcaacggtggagattttaaaatacaggagatcagtttctgatcattgataaacggatcaacggctgcgatgtaacgtgaaccaaggggtagggttgtttcaatcttagccgcacatcacggagtcaacagccagagccctttcttctttctctaatcatcccagcg

SEQ ID NO: 157672 - DNA, 381 bp, Zea Mays
gttgcgggtcctgtatatgactagtgcgcttaggtctaggcttgataggtcatgagtgggtcgtaggcctaggagccagtaggtcatcagtggaaggaggaccgactctcctgctacggctcggtgccaggcacaattaatgcagtcaatcatttatggtggttcagtcatggaccaggcacagaatccactcgagtggcttcctctcggttcgattgatgtgtgttgcgttcttgctctctgtgttgtgttctacttctccctcttgcttctattggagttgttgctcccatctaactatttacaactacaagagactccaatctgtggagatccttgtgaggagataattataaggaagatctatggccttaagtttat

SEQ ID NO: 157673 - DNA, 944 bp, Zea Mays
gcccgatcgaccatctgtggccacgattagatcccggtgcactgacaagcctgcacacaccctggaccctccatctctagatctacggtcaccgcgcgaagccattagattcagatctaacggcctagaacctatcaaggcgggatccgacccgaactgtcgatcagcagattgaccacccagagtcgcgcgaataggtcatccccatccgcaccgcatgacacggatctgacggagggagacattccactccaaacccagcaggtcacggtggcgcgcaccggcgctacggtgtaacctcgccggagcacaggcaattcacggccctagcgcaccaaatcagacatggttgggtgctaaacgtagcgaaggtgaacgcgaatactgtggagtgcttcataccagaaaagggggtcggcggaaggcttggacacgcccggaagaggccctgcggtggagcacggtctccggtgacaaattaccggtgcactagtgattcctcaagccttcaaccgccatcatgggcttcgcgacggattggtgaagccccgtagccatcttccacgcattagtcgccccagcatgcaatggtccatggcggcggcggcggtccccaactctcgggtgtcgcgttgtgatccgcggtttatagggtggcaacagagtccgaggtgagaaacggtcggcgagatccacgcgagctccatcgttttgcgtttggtttgttgcgcggctccgttcaagtatgcgggcgtggacgaagaagatgacaagtggggcccgggtgacagcgtcagcagagcgaaccaacgcgcgtggaaggaaagctggagcgcggcccaggcagtaatcctccacacgcgggcggccgagaggctgacatttgcggcccacatggcagcgaagtaaagcagggcgcataagtgggctggcggggtagggag

SEQ ID NO: 157674 - DNA, 1577 bp, Zea Mays
ctaaatcagaatttggatttttaagtgaagaaatactataaattacaaaatgaatttatgaataaatacacccattccatgagggcatgtttaaaatttaatatctaattggagtataaattctgtaaaaaaaaattgaattcaaatttcagatttaaaataaaaagggaaaacaaaacagaaaagaaaagaataaagaaggaaaatggaaaacagacactgggctgacttccctcgctcgcagcccatctccactcctcctttcaccgcgctagcccacttaaccgcatcttcaccatcgcgcgctcgatccatgacgtgtgggccctctccgtcagattcccctacccgctcgccagctccttccgcgggattgcgctgcctctgttaggtggacccgggggagcagagtcatcttccttccccgtggacatgggtgcggcgccgttctctcctgtcgcgattctggggattttccccgaccaaatcgctaatgtcgtcgtaactacttaggccgattggtgcgcgccgacttccttgaactcgggagccttcatctcaacggaatcgcgcatatcacgcgcaggcttgcgctgggggggctctgagtcatccctcacccccgctagacccgcgctacaacggtgtcccgaactggccgcgcgcgtttacgaccgagccaaggattctgggttcccgacgcttaaatccatgcccaacttctctggagtcgctactcgcgtcggttctcacatttcaaccccccatttgcgccgtcgtagccataggcaaacccatccacgccgccaccggtgattcccgtctcattgacgcgctatcctcggagttagggtcctgtgcctcgcctcgtcgtatggtgtgtgggcgcggggtcaattgagctcgggggatcgtcctagcacaagcgatcgaccgccggcgcctcctttccgtcgtggagcgtggtcgcggattccgacgtcaggaatttaggtaataagctgttcccatagtccgttctcgcctccactccgcgtaagaccgattagatgggagttcagtgctctcgctcgtcggatggtcgtactccggtgatggcctccgccgcggggctaagggatgcagcctgggtggccgtcgtaagggagaatggtcgggcgccgtcggatctccacgggcagataggattagaagctcccttagccgtagatctcgggttcgacgattgtgattagatcacagcgtacctcttcgtgatgttaatcagtgccgtcggatggggatcggacggaagctcgtgtgccttggtcatttttttaatccagtctgttgatcgggcatccgacggttgtaatcgcacgctagtgtataatggcagggatctaatcttagccgtagatgtaggatcgtccggccctagtcgaaacataccccttcggccaggcaactttgtaaatgaaaccctggcctttctaggaattaacccgcagtccatgcgccggtggtctgggtctcagtttttcttacgcctgagtccctgtgttttccagaaattggtgcccagtacagagactaag

SEQ ID NO: 157675 - DNA, 723 bp, Zea Mays
ggtgttgagaaaataagcaattttatgaacataaatcataaggaactctcatactaacatgtataacctatcaaacaacaccaatgcaaaaacaacatgattaagcaaaactaaaataacacatcagatcatgacattgtagcgagtgcttctagagcgtggcaagccttttgtagtggaaaagatcgccggaccgtacccctggggcccaccggtcagagagtgcatgggataaggaccggactactggggaccatcggtcaacgagggagtaagggaaccgtgcccctggaagcgcctgcccctggataaaccctgaggcaccgagcctgaggtcgagcgtggcgtagctagagaggggactcaggcgaaccggagggaagccactcgagtggattcgtcgtctagcccaaggctggcccgccataagtggtcgtccacattaattacgcctggcaccaagctacagtagagggtcgatctgcctcccactcatgacatgcgaagcccctcggcctacaactcactcatggcatatcgaggctaggcctaagcgcgtagtccatctacagagcccgcaacgcgacgagccacgccgagacctaggctactgaagccaaaggtagacgtggcacaaaggtagtaatgatggcgctagggcctcgcgtcgcccacaccgtccgccgtaatgagcacaagcagagacaactaggcgacctagac

SEQ ID NO: 157676 - DNA, 532 bp, Zea Mays
tgcaaaaatttgcctcgacaagaacgcatgcagcgtgagcggagggagccacagggcctagcttcggaggctagttgcatgcttgcatgcagcatgagtggatgagggggacacccgtagcttgcataattgcatgctttgcatgccgtgtgagtgggagagtaggtgcatggtgagcggggggcacgttttagtctacattaccttcttaatagttagtataagtagagagatgataagttcaacggtccatcacctgcatcgaatggtggggtttctaaccagacacgtgtatgtaactcgattggatatgttgggtacgtggagtgtatatgatagattattcactctagatgacaaatagtggagagagagagtaggcgagtgcgcgtgcgtgagtgtgcattttttgcgcgctgttcttttctcctttttctgtctagattcggaagatggaaaagaagtgaacaaaaccgcaagatcagatcacgtacgcgattttgagcagtagtacattgcaacaatgtctgtg

SEQ ID NO: 157677 - DNA, 756 bp, Zea Mays
gtagacttccacagtgttttccaatagctcttgaaagatcaaaatcatagccctctgataagtagcactagcatttttcagaccaaatgtcattacaaaccactcaaataaaccaaaaaagcctggacatataaaggtcgttttggacgaatcttcttcggccatggaaatctaattatatctgacattaccttcaagaaagctaataattctatttcctgacgcattattgattaacgtgtcagctatgggcatgggatattcatctttaggagttgctctattcaaattgcgaaaatcaatgcatactttgagcttacacgattctttcttttccaccggcacaacattggagacccactctgcgtatctgcaaggtctaataaaattagcttctagcagccggtgaattttgtcctttattcatgggagtaagtctggacgaaatgttctagctttctatttgaaaggtctgaaaccggacttaataggcagtcgatgctctactatctctcggcttaatcctggcatctcagtataattccaagcaaagcaatcagaatactcttttaatagatcgatcatttcattcctaggatcggtctctagggtctagttgacaaaagtcggcctcgaagttttaccatctcctatgtcgatctcctccaaaggatcagccgatgtaaacccctgtcctaacttgtcgagatccctaaattcctctattaggcctccctcagaggaactagatggtct

SEQ ID NO: 157678 - DNA, 626 bp, Zea Mays
cagcgtgactggtgctccgattgaatgccagcgagcctgtgtccttgtatttcatagcatcaggggaggaaagatggggaggaaatggcttccctgaatgtccatcacgcctactgtctagtggcagggtcaggcccgatgctcgtgcaggggatgacatgatcggtggcaatgttcacgcgctgaggagcagagatggggcgagagattagggatgacatgtgggtactcgtgtcagctactcatactagggaagagtagggtgagccaaacacacgggatcggggcattagtggttcggctaagcgggtgaaggggcacgtcgataggcaagatccgcttgtctaggagacatggacttgggggcgagtgcaattctgggtcaaaaaggtggtgggatggcttaggttactgttttgtcttttgccatttcctacatttgaatttaagtttgatttttcaattaaatcaaacgaactccaaatcacttcaaaattatgataaaagtagaaatattcagatgaacattttggtgaagtttggactcttttcttggtcaagatatttgtataaaatattttccccttcacaccaagtgggcttaggcaaccaagtgtgcctttcac

SEQ ID NO: 157679 - DNA, 726 bp, Zea Mays
gcggcggtctagctctgacgaaggggtctcagagatcggggaggtcctggcatacccgttgatggtcggattgcagttggtgatggtcggagtcatcctagacacgcgtgggggcggacaagctcgtcggcggcgagaagcttggcctacacatggcggtctagttcaattggatgactcagggaggttcaccaaatgacgtagaagctgggcgaacaaggaatctgacaatggcgcagtggcttacccggttcacgttgatctggagtttccggtgaggtcacgctcagtctgaggtctcgggaagcttcatgggactctgggaggccatccgagtagttggcgtgggcgagggatggctgggtcacgctggtcgcggtggccgctgctcgggcggctcgggcgggtggtgtggagctcatcggagttagggtcttgcttgggggagtgaggcggggtgcggagtggattgctgcgcacttggggagggatttatacgcgcgagcaggcaagggtgcgcggtgggcctgacatgctctcggggcgcggacggagaagggccagtgcgcgctcagccccttcgccacggcgtcgagcacgtggcagggtttagtgtagttattttcaagcgtccgtttgctccaaatctcctcgaatttgggcaagatccttttgtaagatttcttctcccgactaccctctgtcatttttttgtggaagccaagg

SEQ ID NO: 157680 - DNA, 361 bp, Zea Mays
gaagcacaagaagaaaaggaaaattaagtcagtgtagttttattttccaatttgtgcaactacaaccatcttaaaagcctttctcaataaaactgtgggtggtaccgtcttaccaacaatggtgccaaatgtaaccaggaagaacacataaagtaatgatatgtgaagaaagtagcaacacataatatatatttggaaacagctcggccccgttcggcagcataggaacagtcccaagccagaaactgtttcaggcctagatttagtgcatccgactctttcgctctttctagtccagaattaatccaattggaacacttttgcctagaacacttcttctccttgttcggtagcctaggat

SEQ ID NO: 157681 - DNA, 1265 bp, Zea Mays
cgccgcgcctcgccgccactggcgatttccgggtgcaggaggtagtcgccgcggtgccgaatcactcttatttcctgtcgactcaaccgatgttcgttgtggccttcggaggccgttgaatcctcttcgggctacgtggaacggacgttctctaggcggtgctgagttgtgtgcctgtgctgggtcgggagtgatgttcgtattgttctgggcgcagagtgagtcactacgtggatttgcgtctcgggagctcttctatttcatttccaactaattagctccatgtattgacctctgtaagtacagtctctgccaactattcacgggttgagccggctgctgcataggggacgcagtgtgccagtgtcacatcctactgtaccaagtttgttctgttctgcgctgttagtgcactgccggctaatagcgatacacttaagcttgtcattgtaccttgcaatctattcacactctctgaaatttctccctttacacattttccagtgacttagtaatttcatgttgcttagtggttcctaactttggtaacccttttaactgacaggcaggactattcccattgctcagatatggctgttcgaggaagcagtgctttcaagctacgtttctatcccaacttagaagtacaaaatattgcacaagaatgggttaaagagagccggaggctgttctatctaagaactgccaacaatgtcacaaataacatctataagggaaacactcctctatggactggaatggtacaaaatgaactctctgaagattgcaggggtttgaactacacttatttgaataatttgagggaacgcgtatcgtccaaatcaattgtaaatagacatggtaataaccgagaactgatcgggcatagtacgataaatcagcatgtgaaatcagtgccagctccagtacgtgttgttaatgatagtgtcaagtgtttcagcatgcctagagcctctaaggtggagattccttggcctgcctattcaccagcggaggatcctttgcttgataaatctaatacagaggtaattttggagcttgaggataaagttcatgatggtgatgacaaaaagaaaaaaactgttgtaaaaaaggtggtttcacctttcccaactaaagcggccttctctgaggaatctttgaaagcacgggaggcacttgctagcatctacgacaaagttttggtagttgacgatatcgagtcagctaggaacattgttaaactgctcactacaaagtacaag

SEQ ID NO: 157682 - DNA, 458 bp, Zea Mays
tctggatgctccattgtttgcagaaatcgaagaattcagagttggtgaagttggatcctaggtcagttatgatgctatttggtatcccaaacctgaatattatgtcttgtatgaactccactgccttggctggtgttaaagaggcaataggcttatactctatccattttgtgaatttgtcaatggcaaccagcacatgagtatagcctccctgagctttcttgaagggcccaatcatgtccagcccccagcatgcaaatggccatgttatagggatggtctgcagttgctgtgccggtaaatgttgttgctttgataagaattggcaagcttcatatctctggacaaactccgcggcatcactcttcgctgttggccaatagaaaccagatctgaaaactttcccaaccagagttctggacgcagcatgtactccgcattgtccggcatggatttcc

SEQ ID NO: 157683 - DNA, 592 bp, Zea Mays
ataatatctaagatcgagtctgtcgggtagatgaaaattaatcggctttaatagatgcataatttaaatataacaacttagctttttgaggaacaccgaggatagtcggttgcaattgctgcaggtaactcggacgtagtggaagatcttcacttgtgtgtatcaaccgccactaattctgaatttttcttcgtcgacgtgagagaataagggcagcaataggcgtgttgatccaaccggaggaatagagcagtgcggagcagcagttcttggtggacgacaatatttgtaaagtagattgattttctccccgtctcgatccatgtgcagcagcagggagaaatccctccaccttgtgcaagaaatgtggcgccaacttgattgattttttttatgtatcagacaacagaagcactacaacggcttcttccttccgcacgacagcatgttgattgacgtcgccatgaggacgcatgaactcccttgcgtagctgcattcgtagacctgcgtatggtttcttggtgacggacgacactagagaaattcgatgagatggcagcgacatgcgatcaacgagacgacaacgtgaga

SEQ ID NO: 157684 - DNA, 296 bp, Zea Mays
aacaaggcaacaaaccaattgttcacaggtcttggttgccgtctccacagctctcgccaccagatgccaaatcggtgggggtatagtggtatacacgtacacgcgtgccgagagatggacagagatggcgcacatgggggtgctgctgagaggacaggaggagagaaagagagaagcttgcaatggcttgtcctggtgtggtttggtttggtcccagcaagcacaagagtaggccatggcagtgccagcgcgtccaaccatcatattttgcctgtcaagtctaaagtcttccccac

SEQ ID NO: 157685 - DNA, 665 bp, Zea Mays
ctcggtttgatgttaaaacaaggagcagccttgctagtactagtgctagtgtctcggtttgacgttaaaacaagcctgcaacccaactgcacatgctagtgccactcccagtcgcttgcagtcgccgcacaactctcacaggatggcccaatcgcacatgctagtgccaacagtcagcccgccgcacagctctcatatagacgcacacgcacgcaacagcaacaggaaaaccctaagccccgtcgctccctccgccggccgccgccagtgaccggtcctccagtgatgtctccaccactcgacgcagaaggtgagctccccgaaccttgggatcatggaggccattacaacatacaggttactcttcagttcttcactcttcatcttccacatgcccttcgcccttcccttgcttggaagttgaaccctagtcagctactcgtctctcgccacaataaatgacgcgacaggccgaggcgtcgcccacgtgttgctttgattctcaggtttccagttctataaatccagccccttctatcttagcctggcagaccgaggtcctatgagtcgatatggtcggagacatcctctaatggcatccaagtctagggctagtgaaaccaatccttatccttgtcctaatcctaatcctaatactaacgttg

SEQ ID NO: 157686 - DNA, 456 bp, Zea Mays
ctgtgttagcccatagcactcccctaccctcgctggagctagtccaagccttatcgcacccgatcgcccctccccgtgcccgggattcttcaccagagttaccccaacccgcctggagctctcctctccgccgttcttccacctttggtcccggtctcatggccggaaccccaccagtgagttcgtcgggttcttctcgccgatcctggccaacctcggtgacctcggaacccatgtagctcacacccgccccagctccggcgacttcaccgctgagaagcaggagcggcgccgcccgcagtcataaaccctcccaacgttgatctcaatcgtccgatttcgaccgcacgacctagatctcgagataccgcttcgcgcacgcgcgcccagcgcctggacccatctgtcgaccgcatgtgtccatggcactgggcccgaccggtcagtccgcttccc

SEQ ID NO: 157687 - DNA, 581 bp, Zea Mays
gaacatttgctttctgttaaatttgtctggacaccaatattttggtttacctgtctatatatctaccttcagatttaggtattaattggttctgctgttacttcttgaattttttacttagatgttagtccctcctgctatgttgtttttgttgttcagaatcccttcatttttgtagttgcctgctgcattttgtgctactgatctgtgtcatccttcgctgccctcttttctctttgggtttgtgttttgcttggtgttgctatcctgtgcggtgaaggctgtgtgctcaagactgttttccttgggtactgttgctatcttgtgtggtggaggctgtgcgccagggaatcttttgcttttgttctccgatcctacgaactttgcaaatgctgcttgtggattagcttttgccttccgtcctggttgatggaactatttactactacgttcggcacaacggcgtaaaggacatgatgtcctgctttggggccagctttagtggtgctgtcgaatgtaaatatgcccatcgtggacgttatccaatgtaaatatgcccatcgtgtatagctagaacatct

SEQ ID NO: 157688 - DNA, 986 bp, Zea Mays
tattttgcgactttttgtgggtgcacaatgtagcaaagttagagttggtctattaggctacaactttgctgcagagcattggtctagttgccatataaaatcgggaggaaattcgccccaaacatggtctgtcagactgactaaagaagaatctgatggtacagtgaccagaagaatctattggttcagtgaaccggccgccggcgaccccgcgcgtggattcatgccggtgaggtgattcatgctcaccggcgcccggatgacgttccgcggtgaaaagatcttctcctccggatgagcttaaggcactgtttgtccggccgccgtgtccgctctaccccgatcaccttgaatcgaccctcgctggagttagacacctcacagttttgtgccacgtgcctcagcactttaaccacaccgccgtgactcgtactgaactatccagagatcgctggtgaggttgccacggttgcagccactaatctcgtgcgccagtgactcctttcttcttcgaccgccaccacgccaaaccaaattcactggccaccgcttagcgccactataaattgatggcacggtctgctgcgttaggtcatcaccaagcctgagcacccgctcctgcctctgattagccaccacaactctccaatttcccatttcccccaattctgttttccgccaccgtggtagagccctcaccgtggtcagtgaattccaggtctgttcgtgctccctgctctcttgtttcagcatccttaggttctcctgatgctcctcagccaattcgattgagttaagctgtcttagatcatcgggaacacgttgtgctgttcgttgtgtccgctgtcacagtggacagagagagttagagctccgctagtaaaattagttgaggggaaactctcgttagggcttgaatttggtctctgccgaagtagaacaccggtcatcgagtgatccgaccggtataagctcgtcgaagttcg

SEQ ID NO: 157689 - DNA, 600 bp, Zea Mays
atgggttccaagtgacttttgtagctgctcccagaaacgtgccacaaacagtgctcctctatcagacacaatagtcctcgggattccatgcaaacacactatttggtcaatatagatctctgcatatttttccgtcttgtgggtggtatgcacagacaagaaatgggttgtcttggttagcctatccacaacgacccaaatagaatcatggtgccgggaggtatttggcaatcccacaacgaagtccatgcaaatgtcctcccacttccaagaagggatggggagaggttgtagggtacctgctaccttcaaatgactagctttgattctttggcaagtgtcacacccagacacatacttagcaatttccctcttcatcctggtccaccaatataaggatctgaggtcatgatacatcttattacttctgggatgcatggaaaattttgagagatgagcttcgtccaacatcttcttcccgagttctggatttttggggacaaccagtctatcctcaaaccatagaacacccttgctgtcctgaggaaagcatttatacttatccaccttttgattgagcatttccttaatgacttgaat

SEQ ID NO: 157690 - DNA, 673 bp, Zea Mays
agatctagggaaaaggtggggaaaatctatgcgaagctcttcttctctttcccacgttgcttcatcttcaccgtggtgactccattgaactttgcacatctttataaccttattcctcgtgactcgagtcaaagtatccaaaatcttgatggggtactcagcataagtcaaatcttcttgaacactaaggtcctccattgctaactgttcttcaggcaccctgagacatttcttcagctgagatacatgaaagacatcatgaacatccgcaagatgatccggtaactccaattgatatgcaacctctcccactcgctttaagattaagaaaggtccaataaagcgaggggacaactttcctttgactttgaatcttctcataccccggagtggtgacaccttcaaatagacataatcttcctccttaaactcaagtagtcttctccgggtgtcagcatagctcttctgcctggactgtgcagttctcaaattctcccttatttgctggacttgttcctctgcttcttgtataatctcaggtccaaacaactgcctttcaccagtttgatcccaatacaatggagtcctgcactttctgccatacaaagcctcaaacagtgacatcttcaaactggcctgatagctattattataagagaactcaacgtacggc

SEQ ID NO: 157691 - DNA, 438 bp, Zea Mays
aggcggaggaacgacgatttataatggagggagtcttgagcggcgtactgtgattggtgacgttgccacagtgcagtcgcaacatcctgaggttggcagggtaacttggctcatggtggggcattcatttagttgtgattgtgacaagtgactggcgtgtgctcaggcgggtgcacgaggtcttgctggagtgactttcttcactgaggtatcacttcaaggtctgcaacccgacactttaatatagcagctcggcgtgcacgacaaggctgtctaagggcagagggtgtaggtgtggcttgctaggatgcacaaatgccaaggcggctagaggcaggattacaatttatttacgcatgtgttttgccacaggtggttgtgggctccctctgtctagtgtgggtgggcattagacattttcaagaatttaccacggtg

SEQ ID NO: 157692 - DNA, 683 bp, Zea Mays
ccaagcgtgtcgtgccaatttaaatcagtgtcaaattaaactgactgctccgctagtagggcatagtggtcaccccgagtttagtaagcgtgagcatgtcgcatcgtcttaagctattgccgacttaagccgattgctccgttagtagggcatagtggtcaccccgagttagataagcgtgagcatgtcgcaccgccttaagtcactgccgacttaagccgattgctccattagtagggcatagtggtcaccctgagttagataagcgtgagcatgtcgcaccgccttaaatcattgccgacttaagccgattgctccgttagtagggcatagtggtcaccccgagttagataagcgtgagcatgtcgcatcgccttaagtcattgctgacttaagccgattgctccattagtagggcatagtggtcaccctgagttagataagcgtgagcatgtcgcaccgccttaagtcattgtcgacttaagctaattgatccgttagtagggcatagtggtcaccctgagttagctaagcgtgagcatgtcgcaccgccttaagtcattgccgacttaagccaattgctccgtttgtagggcatagtggtcaccccgagttgagtaagtatgcccattgacagcgaacagtttgagtgccttcgaagcctttttattgatgatatattt

SEQ ID NO: 157693 - DNA, 653 bp, Zea Mays
ggcgtaacgccggttgtttctcagcgaaacgctccaccttactctggatcgtcttcaggatgttggtgatctcttgaaccttcgtctcaaccttcggtctccatcgctggaactcactctgctccgtcacgatgctttgcaccgtcgtctccatacccgccaccgatcgttgcatcgcctccatgagtcggtgcgtctcgcggtcccccctcgatcttcaccatcaattgtgccatggggtcgttgagccgtggtggtgccatccccgttgccttcgtctagaagtgtgttcgatactcgtgtagtcgtgtgtcggctctagctccaaataccaaatgttagtactcgctctgactctcacgaatggtagtatgtgggaggtggaattcgcgtagcgacgattatcagagtacgagcttgaccggttgatcgccgatcgccgccgccgccagagagttcttccacttacacaagtctaccctcacatacgaaccctctcccctatatgactctggatcgctattacatcatgggcctatacaagccactgtggacccacgtatttgctattgggccggattgacctgttgctgcacctgggccgtgctcctgccgtcttcccgcgcctcatcaatagccttggatgctgccgg

SEQ ID NO: 157694 - DNA, 432 bp, Zea Mays
gtagcttcctgtataaacaaaaacatccataagcaatcgtactatttggtgatcgacatagctagatcaaacttaccattcttttagcttttcggagcatgtcgtcaccgccaaacttgtggttaggattggttcctcgacattgcctgtgatgcgctgacactttcttgaagcccttcggaagcccaatatcgataccaagcatagtacgcatcaggcacgggcgccatccatggaaccatcacctgcacacacaatgttacatattatatcaatcacaacaatcaataaaaagggtaaaacaaattgaatactaacctcacgatattgatcatcagtcaaatatatctttgaggacccttcctttttattcaaggggcctgcttctgtcggatgattttgaaaatacaggtttgtagcctgaattctcgc

SEQ ID NO: 157695 - DNA, 1088 bp, Zea Mays
ggggtatcgggaagtcctggcagcccgatctaaaacggacgcaccagattagatccaggagagttatacatccgtgctcaaccctagccgttggatccggaatttacggcccacgtttaatgactcgaaggggcacgccagatttaaccagagtcgttgcttggctgatctacggtccacgctcatcctagcctaacccacactccctgatttaactcataccattgatttcacaatctatggccatgccatcctcatcaacctcccgacccggcgggagacgacgctgcgccccgagggccatcccctacgccgaacccgatggcctaggccctgtccgacacgcgcgtaagtgcaaaatcgcatggaggccacaacgaactcaagggggaaatttctcaagtactagcacagtggtgatgtcgaccccctggtgaggcggtgcctcggtaacgtccacaccagcgctcaatgcaccagttgttagagccctggaatcctagcttaaggagtactacgggcatggatggataaatcagaagcgactaaggggggggttctcacctgaggtcctggcgccgcaatctgctagtggcaaagttcctggtggggaatcggccatgcccgcatggtacactccgttggagtgcgacggtgaaccccgccccactttccccctcctacaactgcaagcgccgcagcaacctgtggtctgcttttcctccacggtgcgtcgggattactaggtaagagcggtggctgcaaaggcttttccctgcaacgatgaccaggtttatagaggtaggcgaagctgttcgcatcccgcagagcccggcggcggttggagctgtttgaggagtcgtgcgaagcgccaaaatcgcgcggctcgcggagaagctgcggaggatgcggtcctagaagatctacagggcgcgctcctgacgtgcggggccgcaagccagcgaaaagaagtaaagaacgtgcccaggaacgtggctgccaagtggggacaagcggtcagagtagcacgggccgagcgcaggggaaaactgggccactcaggtgaatccggcccaggtaagctttta

SEQ ID NO: 157696 - DNA, 523 bp, Zea Mays
gtttgagttcatgttagttatcttagtgactatgtttgatttgcttctttgtaatgattgttgttgtattgtgtgacttttgtccacaatgacaacagttagctaggttaaaccttagatagttgggttccctctactctgtatagtctgtcctatctcaatcttttcgtcccttctttccttactatatccatacagatgtcagaccttggaatgtcaactacaagtgatgtcactaagtgcaaagaacacattgtgttggcaactcctctagctaagtatcagatggaacagttcaagaaggcgcatgcacactttctgcaagcaacatctcaagtggtagctagactccaacacgttgatttagcagaatttatagcacttgagcagactaccggtaaccatatgacatcaacatcaccctcgatagttgacttagaaaagctgttacaggcacaagctctgataatacagaaagtatctcaactcacctcctcataccaacaagtgttggcaagtcgaa

SEQ ID NO: 157697 - DNA, 663 bp, Zea Mays
gccatatcaaaagaaaaataaattcgaaaatggaaaagaaaacaggtttgcgctgaggcccctgggttttatctccttctcctctcacaaaacagtcctcggtctactattggcatgggtcactgacattgcacaaaaccccctggacctaaccgaaatctaacccacgctccctgactgacttaaacagtacccgcggcatagattacagcggcgaggcttaccggcggcagtagagctccggcggggtggtcagtgacgtccgggaggtcacgacggtcacgtcggtgtgcgggtcggcgtcggaggtggtcggagctaccctggccacgaacacaggcggcgggggtcgtcggcggctcctgctccggccaaaccacggcggtatagttcaattaaggtgcgcgaggagcttcactgggtgatgtagaggccatgcgcgcaatgaattggaaaatggtgcagaggcttacccggtccacgagcgccggcgggttgttgaactccggcgagcacgattgcgctattccggtgacgcgggtcctcggttcaagcttgggtaagctccacgacctcaccaggaagctatctgagggcttggatcgaacggaggagggcgggaaaggggctggccacggtggttgctctcgggcggcactggcg

SEQ ID NO: 157698 - DNA, 700 bp, Zea Mays
cgcgggttattttcaattaaagtcaggctctcttttgtaagtctggctcggcgaaggggtatgcttacatctcgaccaccagatcgggtttcaacggtcctgattagatgcgccaaggcacaaactggtacgctctcaccacccttagatccacgatggacgccccagatttaatacgaccggatttgagtcccgagcgccagatccgaatcggacggcccgtgattccccctgtgaagggggacacgatcttctaatccagctcgcacggcgtatgatccaacggtagagatcaatcacaccaaacggtaccgagtgttctaaccagggccgttcccttctaaactaacggccagcgctcaaccccccaacacaccaccataccgcagaccgtacacggcggcgtcgccctggcctgcggtggagggcgcaccgacgacatgctaagctatgagctgatgccctaagccttattccgaccggtgcaacgtgacgaggaggctgaggcgaactcagataagaacttattaccggtgatgtgggcgcaggctgacccgtcctcgagtcggggtggaatccttggcaggcgacctgacggtgagcaattctggacgaaggtggtcgaggctccacaaaataatgctacactcagcaccaccatgcggctacgaagctccagcaccgccctcccgagcatttt

SEQ ID NO: 157699 - DNA, 406 bp, Zea Mays
tattgccttggtccagaggcttgagcaagattgtagtctctaacacgctaaggtacttgttccctactccttcccatcatcctatcaagtggcccttgagataccctctagctggaggatccaccacccatgtcataacttccaccagccctctgactacattcgtgctccacatgtgattgatttagagccacttaaggttcatcctcgtactgatcgtcccaaaaatgggttcatgctgcctcatctgccctcagccgttgcctgaacctagacctcttcttttcctttgtcttatctatgtcaagttggaagtatgcctttatgtaggagaaatagagggacatttcttgatattcttccctctatgcgtgagatgctccttcagtcaggtaccacctccttc

SEQ ID NO: 157700 - DNA, 558 bp, Zea Mays
ctgctttgtaccaatattattcaaacattgcttcatagtggcaaatattttgccaacctctaagtcataatcaatcaacttagcttggaacttctggcgttgatgtacaggaagcatctggatcttatttcccatcaggtcttgcataagaggcagttggatgtttatattgggaagtcgaccatgttcatttgggtcttcatcaactgtttttggcctcactgtagactgaagtaaaaatataataatgatagaataagaatggtaaagaagcagacaaacaaagaacatagtgggtatgtgatctaacctcaaactgaccagtagatggcgattttgagacataacaagtctcgatgctgctccgaaactgatgaaaccgaatgaaaattaagaattatgtatatggattgactcgtgccatgaattaagatcatgatatgactactaaaatcattggatttgtaaatagtcataaataacattgttgtaaaaaacagaaaaaatatgatgtgatgacacctaacatagatgacgccttgtattgtgcaaaatgta

SEQ ID NO: 157701 - DNA, 341 bp, Zea Mays
ccaaagcagacggtcaggtcgatctgctcgagaggatgcaccctcttgccgggggtgatcctgtggaatggcgcggccccaggcaggacctgggattgctcgacccccatgagctccaaggtgttcacatagacgatgttgaggctgctgcctccatccatgagcacctttgtgaggcgtgtgttgccaatgatggggtcggctacgagtgggtaactttcggggttcggggtatagtctgggtggtcgtcttggtcgaaagtgatggcacggtctgaccagtctaggtagattggtgtcgccacctcaaccgagaaaacctctcggtgttcttgcttacg

SEQ ID NO: 157702 - DNA, 663 bp, Zea Mays
gccagtttgaagatgtcaccatttgaggctctatatggcagaaagtgcaggactcctctgtattgggattagactggagaaagacagttctttgggcctgagcttatacaagaggcagaagaacaagtttgaatgataagagaaaatttgagaattgcacaatcaaggcagaagagctatgctgataatagaagaagactactggagtttaaggagggtgatcacgtgtatctgtaggtgtcacatattcggggtatgaggagatttaaagttaaatgaaagttgtcccctcgcttcattggacctttattgatcttaaagcgagtgggagaagttgcatatcaactggaattatccgatcatctgtcagacgtacatgatgtattccatgtatctcagctgaagaaatgtctcagggtacctgaggagcatctaccaatggaggaccttagtgtttaagatgatctgacctatgttgaataccctatcaagattctggacactttgactcgagttacaagaaataaggtgataaagatgtgcaaagtacaatggagtcaccatggagaagatgaagctacttgggaaagagaagaagagcttcgcatagattttccccatcttttccctagatcttcctaaatctcgaggacgagattcttt

SEQ ID NO: 157703 - DNA, 490 bp, Zea Mays
ccaagagcagagacggccacaaggatgctatccgcggcgaggggcggcaatcttctctgctacttctcgattcgcacgacaacgacggctaatgttgagcctatagaagaggagaggggaaccagatgcgtggttttatagcctgcccaggtcggactccgctggacgcctggctccatagaagcttcaagattttccccccgccatgcggtcgaattccgctaggtctgttgagattgccgcgccatccgcggggagggtgaacctagccacccgatcccacgcacaagcgaggagggagatcagtcaagcggggtccacagccaacgcgcaacggcccctggtggccggaccgattttggtgcgatgtctccgccggctccctcgtaacaaacaggacgagcttgatttggggtaggagatgggactgacgagatggccctacgcgtaagcgacaacgcatcagcaagcgtgttaccagggatggggc

SEQ ID NO: 157704 - DNA, 413 bp, Zea Mays
gacgatgggcttaccatacgaggttccccatcttcctatatgtacacgactgtggtgtctgtgtaatagaatatcacattctctaatatggtatcacagaaggttcgctcccgtgacctcgcttccgctaaccctagccgccactgacttgtcgccggcctgcaaaccctagccgtcgttgacccattgccggctccccacttcaaccacgctcgctgttgagacacctcgccgagcaccatctccctgctctacccgccactgaggtcctcgccgggccaagccactgaaatctgtgtgccgcctacttcgtacgggtgctgtgagatctgcgcgccgtctgcttcgtacgggcgccgctgactcgtcctcaccctgcttcgtgcgggccatcgtggaacgccgacgccgac

SEQ ID NO: 157705 - DNA, 722 bp, Zea Mays
ctctggactaggtgccaatttctagaaaacacatggacttgggcgtaaaagaaacggagacacagagtgttgtacagggtggactgcaggtttaatcaccaataacccagggtctctttaagaaaaatgtgccgcgaaggggtatctagggtttctaaccgttggatcggcaatgaagcgctcagactagatctcatccctccccaagtcgtatgccacgacagccgcaggatcccgcatcaatggttctggtttaaaatatatgcgcgcaagtggaatcgtccgatcgcgatcggacgcgtcatcgcgctccagcccaaacgccagctccgatccatcccgaccgcccattttctaatccacggatgtcctgatgttatcaacctcccgctgcccatgcataggcgccgccctccccagtaatctctctctttcccgttggtcaaccggcgtgaacaccgcccggaccagtacccgacacctccgttctccgacggcacacccatttcggtccacacctaaactccgctcaggacaactgctcttccacggatcacataaatgccataggatggagaaaaggaggtaagtccgaggtggctactcacccgaggtcccggcgtcgtgatctgttcggtggcgaagtccctgcctggtggggaatcggccacacgcacgacacccactctctgagtgcgacgatgaacgccacctcactttcc

SEQ ID NO: 157706 - DNA, 718 bp, Zea Mays
gtttggctctgttgagttctagcactagcaaaggtgctatgatagaggcctccaatcactcgaaggaagctttatagatgctatcatggcactagtacatgtgagaactatttgaggagtgtcaggggtaagaaccacaaggggccaaggcccatggatcaaggaaaagaagaagcatgctcaaaccaaacccagacaaaagccaacctacaagccacggacacccaaccactcccccgcttcaatataagactagggtcgggcatggctaaagctgattcctctagtcaagctaaacacgcctgactcaggaggtctaccggatcgcgcccatgtcaaggccgacctctccacggacaaagatgaccctccacatcgccttctatcatagaagtccggcaaggaaggagggatgcgtgaacgacctacatggcagcatcttcttacagaacttgtgggtgaggctaccaatctcgagggatggtgacgacgttagatagccctacgacgactacttaggcttaggcctcttatcgaggtaaaaagaaccccaacccccatgccaaggcccggggcacgcttacgcctacactgcaacccgcgatcttcgtgaaacttctctaagcaagtcaacaaagctgtgacaccagtggtaggagacgacaatggaggaaaaaagccccgactgttttacaagcataccaactccttcaccacg

SEQ ID NO: 157707 - DNA, 526 bp, Zea Mays
attgccattgcactgttgtgctgctgaaaaatttaaccatagctgaagctttttatctcattctcgagcatagcatcatcttgatttagcttcggcataagagaaagctttgtcaaaactgtaaaaatcatcaatttcgtaagatctgcgagaaattcaacatcagatggccagagtacgttcaaccgctagggtgacccgtgacggagaggaggccgaagccaccgaaacagctccgatttccgaagttatgaagcaatctggattggttgtgacagaggggactattgacgaagatgcacatactgctgaggctaaagaagttgatattgaggaagaaaatgctgatgaagaggaagactataacactttggtcccagcgaagcccagccacttagattttgaaaaatctactgtctctgaggccgatatcctgatgatgatgaagcttggttacttcgggaagacagagaagaagcttcttcgttttgccggcgaagaaaccatcctcgagccaaaaaatgac

SEQ ID NO: 157708 - DNA, 610 bp, Zea Mays
aatttctcaatgaaagtgtacctcgtttcagcatccaccaacctccgacttagataggtcaccacatgctcctttcctccgatcgcttgtgtaaaaacagccccaataaccttgtcttcggctgcaatgtataatctgaatggtactcttacttgaggtgcttttaatacgggagccgaagacaaatattttctaatgagattaaatgcttcctgctgttctgccccccaagtgaattcggcatcattcttaagccgaaggataggggtgaaggcatcatttttcccgaccaggttagaaataaacctccgcaaataatttaccttgccgagaaacttctgcatttcgaccttataggtcggaggtcccacattctgaatagatttgattcggtcagggtctatctctataccatgttcatgtatgatgaatcctaaaaacttaccagccgacactccaaaagcacatttacgtgggttcattttcaaaccatattgacgcattttatcaaagactttgcgcaaatcagctacatgagaactaaactcagccgatttgactacaatatcatcaatgtagacttccacagtgtttcccaacagctcatgaa

SEQ ID NO: 157709 - DNA, 365 bp, Zea Mays
cttgattttgttgctcttgttcgctaccactataactgtacaattaaatagacaagctttattttttcccagctgcgcggcagagcaggcagacagggtgatcctgggtcgacacggtttatggtgaggtatgtttgttccccgaaagaagcactttagcctgctaaactgctgtaacttctggtatgatctgataatatagtatatgcttaatgaatttgacagtgtctaactttttacactcagcttacaagatgaaatattccagaaatttaatctggacactgaatgggccgtgaggctaatatcaaggataacgaatgatgaagacatagctatcgagagcaatgttgttgtgaaacagg

SEQ ID NO: 157710 - DNA, 453 bp, Zea Mays
gtttgtgtttgtggcatgttcagaacaggtatatgccgtatttaaacgagttgtacgctagatttgaggaagaggattttaaatcaaggttccaatctataatacatcatcctttgactgtaactaagtttgagactgcctgggcaatgcttcttgatgatttccacctgcatgataacatcagtcttaccagaatgtatgaaattcttaaggattggatacccgctttttcaaacatgattattgtgggttgatggtctctacacagcgtagcgagagcatgaacaagctcgtaaagagtgctcatgtcgatgcaaacacgccacttcatcaattcgccaagcaaatgttgaagcttttgcacagtaggaagatgaaagaggcaaaagaggcactaggatgcatggtgagtacgtagaatattattgtgccataatatttaacttgatgtgg

SEQ ID NO: 157711 - DNA, 428 bp, Zea Mays
cggtggagctggaggctagaacctgttagagcctggaagggaggcagctagggaagggagcgacggccggtgggccgggctaccagggagggtgccccgctagccttcgctggcggccagcaatggatggggcggggcgtcgccgcgccagctaagaagtggacgggctcaaattgacaaacgcacggaggcacggagctgtcttcggatggcaacggatacggcaatggcagatggggatcgcagcgcctcgtgcccaactcgtcactaggaaaaggcggcggcagcaacctgaacttgtgaagactttgcggacgaaggatatgttgtccgtgtctgcccttaaaaaatgcggaaagagaaaacatatttagctaaatattccaactgttgatgaagatagattaatagcctagtggtttaagttg

SEQ ID NO: 157712 - DNA, 558 bp, Zea Mays
aaaccaatttcggcccattaagcccagcccagccaggccgcgcgcgcgcccgctccgcctaacaggtgggacccgcctatcagcgtcagtcacgcccgcacgctctctccctcccactgccggtggggccggtttgtcggcgccggtttcttcgcgcgtgcccgctccgttagcgctgaccgccctaatagcgctgaccgcccgttcgcgtgttcgctctcgctggctcgtggaccccatcagtcagcctcttccccttccctaacctcccacccgtgcaccccgccatggatgtgcccacatcgtgcgttttctggccacttctcccacacgctcgacctccttttgagcccacacccactcgctcactcccatcgctcagtagcgctcctctgcagaccccctcacacacctctcttgcactgtgcgtgcacccatggaccactgtcgccgtccgccgtccgttccatggccgccgtcgagctcatgtcgctccaatgctcctgtgagctctgcctccccgcgagcaactcaagacaccctctggtttgcccccgt

SEQ ID NO: 157713 - DNA, 542 bp, Zea Mays
agttcaggacccctctactgctgcagggggtccggcaacctggggtccagttctagagaatgggcgctcgtctcctggagtggtccggagctgtgtagctgcttagcatggttccgtaccctaagcctgcacattccaccactctgcaaggggtatcctagtatttggagttgtgatcctgtgggttcgagcatacgacttggcttcccaggctaaatcctgcaggtcctattgcatgaatcaaaggatgaaagataccagatggtgggtcctataggtgtactcctaaaaacttcaaagccgaagctgtgtgctggtgcaggtcccagtccagtagtaggtagtctcaaactgtagacgctacctcctaggggccggaccaccaattttatctttggtatactggtatccagcctcgacatgtcgagcctacctcccaggggggccaagtaccagggggaagttgatgacactacacacagcaaggacaaataacatacagataagtttaagttccagtgttacctcattagcggttctta

SEQ ID NO: 157714 - DNA, 325 bp, Zea Mays
gtggcggtgacaggcagaagtgaaccattaccaacaacaatagaggtgggagagggataccgaggggttgaggagtgagagagggtatcatcatgtgaggtcatgtgggaagaggcacctgtgtcaaggtaccagtcgttcgccggtggagtgagggtgacagtgctgaaagtggaggccagagaattctggtcccagagcggagatcccaccatgggctggtactgcgctgccatgggctggtactgcgccggctgctgctgctgttggtgggagtacagctgctgggccagaagcgcctgttgttgggcgtgctgctgctgtg

SEQ ID NO: 157715 - DNA, 601 bp, Zea Mays
gtcgacgactgcactaatttcaatgactgcaccaacattgacgactgcatcgcacaaggttgtgaaggacgtcggcgactgcacgacactgctcgacgtgtttgtctacatcgagacagtttccactgccctgcgcgtctagttgtaatcccatgacctataacatcagtagatcttggttttatggggtcgaaatttttttttgcgctagcatagcctccccataatcccacaagtttttggaggtggaagatgactacgctatggaggtctctttcctttttgtaggggttttccctcatccttatttccgactaagaagggatcacctcacacacttggagcacaagctctatctaactgtttctactagagatacgccatgtttatcagcggccaaccagtcttcgggtatgcacatagtctccctgcacgaaacacgatcctggaagcatttatgcccacgcatccgtcttctttgatcatctcatgttgcatccgactcaggcccactaggtgcctttcgggcaacccactaggggccttgctgacggccaatggagcataatcgagttatggtgacccggaggatatctatccc

SEQ ID NO: 157716 - DNA, 888 bp, Zea Mays
caagtttgagagccagtttgaccttgatccagtgctcaaataagtttaatccttatagtcgaattgtagatggtttgtagccctccaacttttctgcagagctttgggtgagttgccatgaaaaatctggagaaaatcgaccctcaactttggctgtcaggtgctctcttgggagttcgccatggtacagtatgaagatcagaccaccagctggatcgctcgttgccggcgataaggatgccgctgtggcccgaattggtcgtcggcggccacggtaaaagctcctggcgacgtgtcaaatagttaccgaggtggcaggctccggttaaacggcgaccaccgcgctgtcaccggaatccgccgcgtggtatgctcgccagcacgatcccgagctccccgagcctcatccgtcgccggccagccgtctataaatagagtgcgggcactgcttcatcactgcattccgcacatcagcaactaagcaattgactcgagctcaccagaaaacccacgtagccccaattccctctctcttcggttcttagctccgccgcgaagaacttccccgtggccagaggtcctcgggtgagtacctatccaattgtttcatgtttttgcttgctgttagcctcctattgcccccagtatcaactaatcgaattgcggccgaagcctttcaccagaacgcgcgcctgctctgtagaacgccgccgtaaccccttcaccgtcgacccgctcttcgggtcttgtattgcccaaaccaaagcgtatccaggaaccctggtgaacccaggaacctttccctagcttcaatttagccagcctagccttcggtgatccggaacacgataatccacttgatcacccgcactaacaccgtggccagaa

SEQ ID NO: 157717 - DNA, 364 bp, Zea Mays
atgtgacatttgttcccaattaggtagtgcctccatatttttagggcatgcactatggctgccaattctagatcgtgtgtgggataattttgctcgtgcggcttgagtaagcgtgatgcataggcaatgaatttttcattttgcataagtacacaccctaagccttgccttgaagcatcacagaagatgacgaaatcctgatggatgtctggtagtgacaaaacgggtgcggttgtgagcttcttctttatgatttggaagctttcctcacacttcggggtccacacaaacttattgtctttcttgaggagctcggtcataggtctttctatgctggagaatcctttgataaaacggcggtaat

SEQ ID NO: 157718 - DNA, 762 bp, Zea Mays
ggttaatagcctcatgtgtattgcaagataaaagctcatttgcaacaagaagattatcatgatcaattttaatctttgtatagtcttccttaattttaacaagtctatctttcaactctatatttgcttcatttaatttgtcacacttatccttagcatcttttagggaggttttaagctcacttacagtggatgatatagttttgtttccttctttcatctcatcactagcttttacaactatgtcatatttggtagttaaaaattcattttcatctttcaacttatcacatttagcctttgaatttctaataatttgagtgtattccttaagcaagtcagctaattcatcataggaaggtgaagcaaattcatcatcactatcactatcatcaataatatcattatcaatttgtaccttccgttcacctctagccacgaggcataggtgagaagtcgatgagggtgatggtggtggtgaagagaaatctccaacgatagcggaaactttttcatcattttcttcttcacttgaagaagacccgcttgaggactcaatgtcagtgagccagtcaccaacaatgtatgcatttccatttttcttcttgtggaaccttttgtgctaccatccttcctcttgaagaatttcttttcctttttctcgtcatcactgtcatcatctttcttgcccttgaacttgttcttcttgggcttattgcactgatgagcaagatgaccaagctctccacaattgtagcagtc

SEQ ID NO: 157719 - DNA, 1474 bp, Zea Mays
tgcatggcaaacaagctccacgtgaaaactccatcttcaatcagctcacagtaatttccaaagactcttgaactcgggatcaatgagctaacaagaaccatccccatgatgataaccgaattgagttccattgaactagatcataactatcttgatgggtatattccttcaagcatcgaaaatttggaatgttctgcagtttcttttatctttcaaacaaaaaattatcaggtcaggtaccgtcctcacttgcaagcctgcaaatgttgacacgtttcctttcttacaggttaaggtcacaacggactctcaggactagtttgggggccacataaccggagaggattgaagaacttaaaatctcatccttattcaaaactgaataaggggattttaacccctacaatccctccggttttctcgctcccaaaatatagccctcaaggtcgttgcctgacttgcctagaaggctagaagggtgatgcttaatgtgactggaaatccaggcctcaaaaaaggtatagaagatagcaagactccagacaatatggcacacactgaagatgacttcagatcagctatgtgggttgcagcagtttcttctgtagttgtgtggggtgggggggtgcaatctccttttatgtggctcctatcccaacgtaacaatctcaagatccgagttgttgcagttggcaaacacagatctgtcattgtcactgggtaaaccactgtaattgtcacactagcagtcatctgattcagttcaaccctctgatgcatgtagctgttcatcatgataatagaaacaattcatgtccaaggtggcaatatttatattgtaccgggataaccatcacaataggaattcaaaacttggtcgtaagttcttgttagtagttaacagacatgatgtaactgatccatggtaagatataattctgttgaagtgggtcctgttactcctgtatgaatgcatgtggaataacttcttgaaaagtcacatgtaacacgtgacatttggtaattgaaacaaaaatatgatgacatcaaaccctaaacaacaaaattgatgttccttagaaacaacaagagaaactaaattcatgtgatcaattcattatctaggattatgcttgatgtaaataatcgtatcatacaacacatcggttaagatacattgaatcatgcacacaatgagcatagtacaacactacaactcaacgttaaagtacctgcatatacaccacaatcacacagtcctattttagatgtatctgcaacatattgggtttaagcttagaacagtttcttttttctaatcatatgcaccacaatacattatccacaaaccaagttgaggtaaatttttcacaaggaactgttgcacataactctttcaaaacaagttcagcagattttctaagcaaggacagtacgaaggagtaatcataaaaaggttttagcaaatagtaac

SEQ ID NO: 157720 - DNA, 617 bp, Zea Mays
agaatagccaagtgggcgtgtgaactcggagctcatgatatagagtttcgacctcgcacaacgataaagactcaggcactggtcgacttcatatcagaatggactgagcaccaggtcctggaaagcccagaagtcaatgaaatatggagagtgtacttcgatggcgcgctgagactgcaaggagcaggggcagtgattctctttatcgctcctggaggagaacaactcaagtatgcactccagctcttgtttccagcatccaataacgccatagagtacgaagtgctggtccatggactaagcatcactgtttcattcggcatcaagagattaatggtgtacggtgactcactggtggtcataagccaaataaacaaagactgggattgctcgaccgattcaatgaacaaatattgtgtagcggtgcggaagctggaggacaaattcaaaggattagcattccaccatgtggaaagggatcgcaatgcagcggctgacgcactgtcaaagctggggtccagttgggcccaagttccacctggggtttttgtccaagaaatacaacaaccaagtgtcaccgcagatcagatggaggagtgccacgttttgagtcaggc

SEQ ID NO: 157721 - DNA, 315 bp, Zea Mays
gttttttccttttcgatgatttcattcatgagttgggtttcggaagaaaaaaacgacgacgacgattgacgatgagtgagcaacaaacaaaaccaaaatctggctgtctgctttttcctggacgccgcgtgatgtaaaaatcagctcgccgaatcgctgctgctgctgaaatgaaataacagcgtgagcgtgagtggctgtactgctaattgattgatgaagaaagctaatgggaacgaaaccttcacaaatctttcttccttgcccagcatgatatctgcactgcacccatccatccgtgtctgtcgatccgac

SEQ ID NO: 157722 - DNA, 322 bp, Zea Mays
gccatactccaagacagaagataatgcgctatcagcgaccttcgaaggtcggaaaaagaagagactgaacagagtttttgatgctattggattcgtctatcctgactaccattacccgttacggggtcaaaaaagaaaaggtacagcttctgcgaaggaagttgcttcggccgctcctagtgagccaacaccgaagagaaaaaaggtgaaggttcttacccaccggccacgctacattgagccggccacagtgcccgagtttgtcggcgaggcttcttcggcttctgaagccaacaaacctatacctgcgcagaaagctgaa

SEQ ID NO: 157723 - DNA, 337 bp, Zea Mays
gtggttgaggtcatatggttattggtagtctgctcatgtgctataaattctgctaaatcaacttgttggagtctagctaccacttgagatgttgcttgcagaaactgagcatgcgccttcttgaactgttccatctgatccttagctagaggagttgccaacacaatgtattctttgcacttagtgacatcacttgcagttgacattccaaggactgacatctgtatgggtatggaagaatggaagcgatgagagggttgagcaaagacagattatagagagcagagaaaacccatctatctaaggttttacctagctaactgatgtcattgtggac

SEQ ID NO: 157724 - DNA, 722 bp, Zea Mays
gcatcccgtctaggaggacaaaggactttgccttgcgagagagtcaccttgctttggttatgtccttgggcaaggcactatctgtgtgggggatggacatccctcgggtcgtcacacacactgaaacgcgtcctgggccacctggcaggtttcctctttggtcatcctatggatgggccagctgaaggcaactagtcgcaagcccactcaaaaccagtaaaggccaacacccaagttaagcgctacaggagcaaaagcatattgggcagatggttgcgatcacccgacaggctaagcccccagcggtaactcgggtggatgaatgaagagtattccatagatgtaggtagatggtttgctacaaacagggagataggcaaatggattacgtttatcacttgtgcgggatagctctcctcgatcatgtatataaggccaggaagcacccctaccattttcatctcaccttgacccacaacactcatagttcccaacttgtaatctctcccccatacaagaatcaccaaaggaagtaggctataacgcagctctcacggcccgaacctatataaatttgtgtgactttctatcgtgtcaccatacgaatcatcgagtcgtgatcaacgacgtcgtcctgcctaaaagcatcacgtggggaaccccgtggtgcatagtcgagtaacaaacaccgacagttggtgcgccaagtagggggtgcaacg

SEQ ID NO: 157725 - DNA, 616 bp, Zea Mays
gaagagggtgtctagatctgctaaaaatcgacccccaaaatggccggttccatagatcgcaccaatgttttcccaagcaacatcatgaaaccgactctggagagtatcagatgaagatcaatagcgatttgaagattacataaatcagcgactatcccaagagcgagaggaggcgaaggaaaaatatctgagcatttgaaggtgggccagtgtcagtccagcaaggagagtttcagatggcatctcctctacctgctacataggcccccaatataagtaaatccgacaacatccaatcgcttaggcattgtatagatgattgtgatcaattaaaacaatacatgaggtgtatggaagagtcctttaaaaaatcgacacgtgcatatgaaaaaatcccccatctccaatttttcagctacaattggtcattcacaaacccagccatcttatgataatgtcaatgaaatcatgcaccgggcaaccatagtctcctccgccaatttagaataaaccagtggtctcgctctttacgacggaccacccaagattgtgctagggccgtcatactcttcacaaagcctaactaacatgctcggaccgttcgactatacacgcg

SEQ ID NO: 157726 - DNA, 423 bp, Zea Mays
attaggatctttgggcggaatgattgcagcagcatcactctgtctcttcctcttagggggcatcgcagtctctcaagcgaagtaggcaggctcaggaactcagaaaacagagaagcgacggaggaaaaagcaagagttagggtttggaactcaaggggatatgtcagcataaatatgagttggctcgatatgtcgggcgcaaaaaatgccagatcataactcggaaaagcggagatcacaatcaacactcagccattacctctaaaatgccagtgagccgctaatgcacaggcaaaagcacgcaacgatggataagcaaagaactacattttttattcataaggtgtgttcgtcacaaactttaaaccgactcattatgagtcggcctcttccactccttggacattacattagactactcta

SEQ ID NO: 157727 - DNA, 619 bp, Zea Mays
aaaaaaggaaagactacttgggcttcggtactcaattcggcccaattcccctttttaatccagcgcgacccacttctccatcccgcgcgcgccgacagcagggccccatggggcagtctctcattcgcatctcgcgcacacttgcctgcttctccctgttacatcgacctgcgggccccttctggcagctgctattcgcgactcagtcacccatcagtgccctcgttcatatgtcactaaccattgggccggtgtcgtcagctccatcttcaactgaatcctgcgcatggcgggcggcgcggtctccttccccttcttccggagctgctggtcacgactctgattccgtggctccgggacattaaatacagtgctcgcccacgaaccctccaccataaaccgcaccattagcaccacgtcagagcacctcgtcgtgagcagcggcggcgcagggtgtgcccatcaccgaagatctctcggcgccgcttttggggccttagtgcaggttgtggcgctgcgttaggtctcggtggtcacgttcgtagccttggcaggagtcgtggagcatccggaccgagttaattcctcaccgtcgtcgcatcgctgccgtggatccgcc

SEQ ID NO: 157728 - DNA, 407 bp, Zea Mays
gccctgctaattttactggtacttggaagattacttccttagtaaagatttggcccctaggtgattgaataataaggcccctccttgattcactaatgggtatgcaatttttctcaataaagttttacttagaaggtggcgatgcaccagaataaaaaacaataaccacgggatgtttggcgatagaaaatgtacccatcagcataggttctccttcgggtgtagtagccacgagagtataataaacctgtcctgtcctcttctcacctctgcctgcctggttgcttggcacattgcccgtgccctagcattgggaagtacttccagaaatcctttgaaaggtctgcttgttttgcttaggataggggcagtctttaataacatggccagactttccacagttgaag

SEQ ID NO: 157729 - DNA, 458 bp, Zea Mays
cttggatagggcataaatagcatgcttcgtgctgggctcgcgggccacgggcttattgtccatctgtagctcgacctagctagtagcgaaagcgacacgccaaatgcacgaggtgctggcgtgatgcacctcgaattgcgcctccggcgctggtgctcatcaattggctataatgtgcaactaaaacatcgggctcgcgccaagtgcacgatgagctggtgcatttgaacaagcatcctcccttgtaggatctcgccccatgctatcttcggcaccctaccctatcggcgatctccatgtgtcaggccatttctacaaagagcatgttcacttgactttagtccgtactgacttctgctacaatgttaatccgaagcgaacaacctaaaaatctctgccacaagggagtctttttttgcaggactaatcgtacacatatcactctactttaacaaaat

SEQ ID NO: 157730 - DNA, 361 bp, Zea Mays
cataaacggtttacgcatcccattgagctaggaaaccgatgcctagacatttggggcgacactcaactagttgttgggcaagtaatgaaagattcgaagtgttgggaccccaatatggcagcatacttcaaggaagtacaccgcctcgaggacaagtttgatggtttcaagctaaaccatatcctctaatgggataacaaagcggctaacgctctactgaagatagcctccggacggggagccatcctaataggagtctttgctaatgacctctttgagccaaccgtgtggtgtggtgaaactcgatgcgaaaacgaccaactgggaacactagtccaccgacccgaaaagctttgtgacc

SEQ ID NO: 157731 - DNA, 322 bp, Zea Mays
tttgctttataaagattcgtaacggagatttaaatgtgtaattctagagttcctcgagtcttcggatcataccgcaatacacttcaatccgttccatcacaacacccactattttggacgtaagtatattcttaaaaattagttacatttaaatcgtgactgttctcattaaatcatgaacttcgtgtagatgtgattaattgtgccattcattgcagcaattcaaaaagctttggtggcgtggaacaaccgtcagtttgctgttacatttcttgaagagcaaaggcgtagatagattctacaatttcacaaagagcaataa

SEQ ID NO: 157732 - DNA, 432 bp, Zea Mays
cctccatcctgatctgaaagcagaatatgtgatggaagaagagccaaatgtattatggttatctcttaaaaacagatatgagcagtaaaaggctgtaatcttaccagaggcgaatcatgaatggacccatattcgtctgcaagactataagtctattagtgattacaaccatgttgctcgcttgcgtttctgcagcaaggaaccatcagatgcggataagattgaaaaaacacttcaaactatgatcccatctgatagggtcctgcagcatcagtaccgttctcgcaattatcaggcttactctgaactcatacatgatctacttcaggcagaaaagcatgatgagcttacgatgaaaaatcataagcaacgtcgtgttggagctgctcctatgcctgaaatacatcgtgctgtgaagaatgagaagaaaag

SEQ ID NO: 157733 - DNA, 374 bp, Zea Mays
cgataaacaccttttgcggggcagacaccctttaggcacacccattgggtgtatctcacggaatcttcaagattttctgaaatgaggatacctgcaaaatatacacaatgaatgtaccgcgacaaaaagagaagaccggctgaaacgggaggaagtccaaatgtggttactgaagcgcaagtccaatcaatagaggtattaaagtatagggttgagtggtgtccagccgggggtcctctgtttcaaccagccagatgtccaacttgtcaccgatcaaattgattcaagacctaacaaggcatggacagatagtgtcaccaggctattctgaaaattattctgacaacaacacaagatgaagacctttgaatgga

SEQ ID NO: 157734 - DNA, 449 bp, Zea Mays
gtcttctccgggtatcagcatagatcttctgccttgattgtgcagttctcaaattctcccttatcattcgtacttgttcttctgcctcttgtataatttcaggcccaaagaactgcctttcactagtttgatctcaatacagtggagtcttgcattttctaccatatagagcctcaaacggtgacatcttcaagttggcctagtagctattattgtatgagaactccgcatatggtaaactgttatcccaactaccaccatgtttaagatcacaagctcttaacatatcctcctgtacttggttggtcctctcggtctgcccatcagtttgaggatggtaggccgaactgaaattcaactgtgtgtccaagcactcgtgcaacttcttccaaaaccgagaagtaaaatgtgatcctcggcctgacacgatcttcttaggcaccccatgt

SEQ ID NO: 157735 - DNA, 571 bp, Zea Mays
tatgaccgacttcttctcttgcttgtaggactgcaaatcaatcttcattttctccaggaaggtgaccgggtagaacctcctttcaaactgcctgatgaagacatcccaagacaggactcctagtgaggaggagtgcgctgcctgcacgcctctccaccaaatttgagcctctcccttcatcagttgtgtgccaaagtgaacacgatcaccatacacaatctcaaagacattcatcttatcctccacgtaagttagccaatctgccgcctcgaccggagtaccactgccatcaaaagtatccagcttcatgcccatccactgcatcagagaaagaccattgactggaagaggcacctcggcctcgccacttggagcagcacccgcaaggacagcgcccccgggcacccctccaccaccaggaccctaagcagcacccacaggggcaacaagaatagcttgcctcagaatggccaactcctgctgcatggtctgcatcgcggctaacattgccgccggactcatcgagtccccactaggaacttgcggactaccccgagccctacgaggcggc

SEQ ID NO: 157736 - DNA, 291 bp, Zea Mays
atttaggcttagctgtccgagataatttcatttgtgatgatggtaaccggagcatctgtccttttgttttaaacataaatattttgatagcttaacttgtgcatcattttatcatgtactaacatggtatatagatggcacttagcagtagcattcctgacttacgtgattgtcctgttagaatgcttctgcagtataatgggcttatgctaatctgtttggaatcccatgatgaataacaattatggatgttgggcattttgtatttttatgatgcaggcttaacggatt

SEQ ID NO: 157737 - DNA, 1170 bp, Zea Mays
gtccttttcgtgagatcgtgaaccacctctctcgctcgatcaggatgtgagcctcaataaaattggcaaccacgtcctacgtcctctcctttatatatatttgtctttctctcggcgagcataatatccaaaatccgcaaaccattcctcacataccacatcacaatcgttgccgcaccatccacaacgcatttgtgtcgcccttcagacccatttgtcatatgcccacatcttctttaatctctactttcgtccaacatccaaacttcccttgactcacagcctcacgcacaaccctcaacttctcttcccgtatcactacctcctgcaactcccagtcctgtcctagccgatcaaaaccaccccatccgccatattctctttctctcccatccgcaaggcaagactcttacttccgtatctcctcgtggtgtcaaggaagggggttcacttgaagctgctggtggagacacgggtagaagtctggagctccgccatagacgtgcttcgctggaacactgtgcgcaacacatcgccgacgccaccccgactggtaaggtctcgcatccccttcttgctaagttgttgtgcatgcatgccgccgtggcccgctccctggctgagcaccgccgtcggcgagccgctctggccgctccggcgagagcccgcatgtccctccctggccattgcagcctgcgtccgtccctggctgctgtagcctgtgccaggcaagccgctaccaccgtcatgctgtgccccagccaacgttgccgctgcatgcctaggcagctgcgccgccgatgagtctcaaccctgcccgacgatccccgccctccctatgttgcatcgcgtgtgtctctaaggtagcagaaaaaaacgccgatgcagtttcaaccatgcatgcggtcaaggaaaagagaaccgttgggaaccccacctgcaggcttgccccccacgtccgatctgcatgtaggaaaattggaaaacagccttgtgggccctcttgcatgcatgcacacacacgacctccactctagtttgccatgcatgcatgccgcattcacgatctgcaaaaccaccgcccctcatctcaatcttctacacctacggtcacgtagccctttgtgtggcctatttttcagccaaataaaatctcgttgcgaaaatccg

SEQ ID NO: 157738 - DNA, 440 bp, Zea Mays
ggagaaccttgcgatgaatggttagatgttattgagtataaatgcaacgagattcttggtaactatatcaaaaaagaggccaaagcgcaaggcctgaccttcgtagcccagaaaagcgtcgattaaatcgcgtgtttgatgctattgggtttgtgtatcctgactacccccgtgtaattcaagagacgaagaagaggaaggaaaagcatgtaaaattgacttacaaatgctgcaaaatctttgtttcaaagtggaagcctgaaatgatgaaggaagatcttgaagagaaggctaatattatagagccaagacaggttactcgagcaactgctcaagcttcgggagagcctaaggtacggtacgatttccaaatctgctttgtgattaaaaagtttctctcatctggttattcaaaagggaaatgggcccttgggccattt

SEQ ID NO: 157739 - DNA, 467 bp, Zea Mays
catccatccagagatcagtatcccggataaaacgacaaactggtgtgcattgaaggtccttcgatcccgatctaacggtcacagttcaattagtcgaattgttttatgatcatctaatcctagcccttaccttggagatcaacgactctagttatctcttcttccctcaaatccaaacacggcggtgccacccattctgtggcggcaatatcgccggagcatcacccattcgcaatctggtgcacaaaatctggtatccgacaaccgcaaaacatatcagggctcataacgaacatggggacgcgacttaccggtggttgaggcggcgaagggggcctgcccacatgcacaacagctccactacgatgcgcccgcttcagcgagcgattcctgttccaccgtgatcttcgggctcctctaggctctgaacacaggcggtgaggtcaaacagatcttctccaccgcac

SEQ ID NO: 157740 - DNA, 418 bp, Zea Mays
tgtcgatctacctgcacgcatccatcaaagaagggcagtaattaattcagaaccgcaattgaatcctccaaaccctccacctgctgggttggaagctttcttcgtggtccaaacacagcttctgcagcaaatggccaatgcaatggccattatttaatcccaactcaataataaccaacatcacccacaccaaccaccacccagagacaaacactgtgaattcatgagccataaactgcccaccttttctagctccctagatccactacaagctgacgactagctaaaatctatggaggaaatgctcaacattgcccaattcaccgataaggagaaagtgctatatgcattgggttgccatactggccccgctacggattagtgggacagctattgcgtacgacatgttgtcgctgac

SEQ ID NO: 157741 - DNA, 701 bp, Zea Mays
ctgatagccctgctgtaggagagatctaggcaggtggccattttttctttgaagccggtcgttgaggcctcgcatgaagcaattcttattttttaggtcaatattgccctggtcaattgcgtattgggataaatgattaaatttgttgagatactgcatgacagtatctcccccttgcttgagtcgcatgaattcttcatgtttcatgtgtagcactccttctggaatatagtgctcatgaaatgctaatttgaattcatcccatgtgacctgatgcccagcaggttgaatggccacaaaatttccccaccaagtactggcagagcctcttaaatgttgagccgcgaacaacgacttctgggtttcagtgcagcggataagtccaaatttctgctctgtaacctatacccattcgtcggcttccagaggaccttcggctataacgaaaagtgggggacgggtttccgagaaatccaggtacgaagtttcacgtggtccctgtgcataagccctttcgccctgttgctggaattggtttcgtggcatttcgcgtaaaaagcgagtgttgtcagcggtcgcattgaccaaggtagcgatagcctcggccaacgttggcggtactagcggtggattgggcgtgtcttcccgaccacgggacgttcccgcactgtcatgtgtacgagtcctcgatggcatctgaa

SEQ ID NO: 157742 - DNA, 673 bp, Zea Mays
agatttttcaaataatatacgtgtgagtttcttgagtaattcttctacccctcccatacattgttctaatgtatatctttgatgatctatataatgctttaatagattgattatcattagcattacttacattgctattttggagcgaaggctgcaagaagtcgatcttgatctcccttttcttgataatcttctggtgtcgatccacagtgaagtgtgacaaaacttctccttcgcttcttcgcgcacccggacgtgttgtcacagtgcctcaccatcctattgcttcatgaggttttcaaaccgatgctacttatcaaccgacacggtctccatagctggcctaagtattatcttaggagacatttggtgcgatctttggaaccggccatcatgaccgatctaatagatctgaaacgcactcgttcccagtggagtcgtcaaaaagtgtgttagtgcctttttgagcaaaacaccaaatgaaccctagggtctgtgcgcgacgacatgaccttggggttctctctgcgggagcgcggactgtccacaattgacgcgcccggaccgtccacgactcagaactaagatctcatctcccgtgagggatccgtcgaggaggaaagatgttgtggttgctttgccgttagtaggccatccaaaagcttccctagac

SEQ ID NO: 157743 - DNA, 554 bp, Zea Mays
cttttttgtcgaatttccccttttggtcaagtttttagtgctgatttttcatattcttctgaccattgtcgatgttgctcgtaggatcctcttctttaatttagaaatggcataggagactaggacacttgagctttgatcttttgtgtagactgagttcacttggcctgatccaatgattgcctaagttgaaatttgagaaggatcttgtcagtcacccttgttgtcatggtaagatgattgcttcttcccattccccagtcaccaaggtgatgacctcgacgaattgcttcatatggacactattggtctagctcgggttttctctttcggggggatgtcgtatgtgcttgtggtcgtcgatgatttttctcactattcttgggtattcttcatgaaggcgaaggatgagacttttacttgtgcttgagatttgattcttaggttgcaaaatgagtttcccaaaagtgccatgagagcgattcatagtgataatggcagagaattcaaaaatactgattttgagaccttttgtgcttctttgggactcgagc

SEQ ID NO: 157744 - DNA, 939 bp, Zea Mays
agcctcgttagatctcagcctatccactaaggaaagtattatcttatcgttttcaagaacttcgttccttagtgtgatgacttctgagcgaagattcccaagagctattcggtagctctcatcttctgcttccttctgggcctttagagccttgcttagaattaagccctagaaaatgaagagtgagcacataacgatagcaagaaaaaccataaaaataatttactttacacaagtcaaagcatacacactttcagactattgtaagcaagactgtccacaagctgatctttcgacattgcagataggccaagttcaagcttcggatatcctatattatccattattttccggcagacatgtatctctttgttgtatggtagacagtaaaggaagtcatcttcatcattgccaccatataccaaggaccatcggggatacttgagatccctaacatagtgttgcacttcgacaacctgctcttctgatagttgctttaccaaagcatgtcgaacaatgaattccagctctttaacagttgcttcaggagtaggagatttggatttctcaggaacactctcctccagagctatcgatgcagtttttgaaggtatagcttcggcaggagcttctgaaggttcagcttcagcaagagtgtgggccatgctggcgtcaccagtttttcttgaatctttagcctgcgtgctaagagcttcgacagagacatgagctgatgtttttacggactccaaaacagcatctagcacgctagccattctccttttccttggagtcactgcaggagtgcttgatggcttcgacaatcctattgcacacgacggactcaacgccttcaactgttctaccattttctctagttttggctcttcggtcggatttgtcctagccttgactggcatagcatgacctggttctgtg

SEQ ID NO: 157745 - DNA, 667 bp, Zea Mays
ctggtttgctcttgctgatcgacatgtatattctgttggattagcgattggttgtagtattgcaaatatttacttgtcgcttgtttgttttgtattgaggaagaattggtaaatcatatgtgtgtggtagctaaatagctctggtaaccatgacttcctaaatcatgccctgatctccaatattcatctattggaatactgatgacgataaggtccaactaatgatttctctcattaacaggtacgtgactgtgagcacgaggttgctgcgaaacagcgaccacctcaacttacacctcaatggtatgctactctgtgtgcttgatatattgttcctttttcccacaaccaaaaaaacatttccctaaaataagttgcagatataacttggatgtttgaacaattttccatcatttttttagttctaagcttctcaacaattggattgtactttctatactcaaataaacgaattcttagccagatgaaaagtttattccaaatgggctcctggacattttaatgttgtggcgtttaaatgctctcattccgtccttcctgataaatggtcttctcttacagttttttgagaaattactgtgaaggaccgtactagaggaaccattggaagaatgccacctctgtgtagaatttgagtaagttccca

SEQ ID NO: 157746 - DNA, 558 bp, Zea Mays
catgtaatcccattcattataatgtaattgccagttggtttgtcgggtatttggtatcctgagaagtaagaccgggtagtaatggaaagagaggcaatgaaaggctgaagttgacatgagaagaggcagccaaagatttagcctgccttgaatatgagcgaatgtaaaacaaaaccttaaggcttcttttgggtttcaactgtagcttttcacaatggcaccaaaaggctttgtctattgtttttgttgcaacttgcaacttctgcaacattataggaaatcgcaagagctttttgatgtgcccatgaaaacccaaagtatgttatgctaaagaagaccagattttcgtccagacattcgctgagatatgtggtggcaaataaaagtgtatgatgtctgtggtgcgatgcgccacgggaaaaaggcagaatatatgatactgttattgtcttaactgtctaatcaccttcctgttttagtagtcatgatttggtacttggcttactgtttttttgttatgcagtggatgtggcaatactattactgtcaacatgttgc

SEQ ID NO: 157747 - DNA, 499 bp, Zea Mays
ttcctgtgttgaatatgctgttctttctggaacctattcgggtttcgttgtgggggcgtgcgtgaggttttagcctgttcctatttgttgatacgtgtgtactcgatgtggggtggcagcttcgaatgcgatgggttgggttgcctggcctcggtgattgtggattgggtggctcattagtgtttagcgttgttgatcactgggggttaggttacaggtttatttctgatacataggttacatgtttaccgatcctctcaatacaactggtctgttatgtttcattcgattttcagttaagtcatagtactaaactgcacagtctcattcaattttcagttaaatcaacctgttaatttggtaccataattttaaatatgttcatcttctcttggtgcatttaaatatgttagttttgtacaattcaagtctgtgaaaccaatttttctagactatttagtagtacatatatctttaactttgtcagcgtttcgagacc

SEQ ID NO: 157748 - DNA, 644 bp, Zea Mays
atcaccgaaagaattcgttcaatccatatgtggaggtcatgactcttcatctctaagactcgcagagtagataagttcacccctcctactcaggttagttgcatacccattaggaaacatcaacatcttgatctactgcagtacttccttcctctaggccctgctaaggacgaaatcagccttaggccttctccatgtctttccaccactaggcggcttcatctcttggtttggtctatcacataacgctgccagatctagtcttgcctttacgttatcctttgacttatcaagaatgcccataattgttgcccaaattgcatcggcaacattcttttcagtgtgcatcacgtcaatgttgtgtggaaggagtaggtcatcataataggggagccaagtcaagcccgacttatgtgtccacatatgttgctcaccatatcccacaaaaccaccttttggattggccacgagcccatctatctgttgacgagattcggcaccagtcatcattgcaggtgggtggtccgtcactacgacacctttcgtaaattcttgatttctaggcgcaatgaatggtcaggagggagaaattggcgatgtttatcgaacttcaaatatttgcacccatcttcaaccaaatgaac

SEQ ID NO: 157749 - DNA, 694 bp, Zea Mays
tttagtgcagcgctcgatagtttcgcttcagcgcagtggtatggtaaagagaaaaatatgtgctacatattaacatgtatagaagatcataaaactaaaatatatacatctgctaagttttggggcccttaatttttggaggccctgtgcgagcgcacggctcgcacatgcctctgcccggccctggttctgggcgccatgatgggcctcggtcgctccttgtgccgacccgcggggagaaagggaaaggggtctgggcgccgacgcccaatctggggctgaggtagaagaaagagatagcggctcatcaggaaatgaatggctaggatctgatctgcatagcgaattcacgatagtgtatcgtggccattgttgctcggatggccggctgtgattggatcgcaggtaccgtttcgatgaactcgctccggtccatccgatcgtaatcctgcgtctcaaatttaataacgaagattttaaatcgtgcccgtcggtcggtaatccgagggctcgtattgcgtatcagttcatgataatacgatctaatccggggcgtccacctctgatcggacggctcaggttttaggataccccttcgccgagcaaaagttcaaaagagaccctatgatttttagaaataaacccgccacccccttttagtgtagaataattacaaccgggtccggaaattttg

SEQ ID NO: 157750 - DNA, 670 bp, Zea Mays
caaagtcgtatcagcctctgggaggggcgccactaccaacgtcccagcaggagcagcgtcggatgaatcctcagctagcaaatcaagcatagcgcttatctctgcatcactagggttcaggggcaactcaaaatggacctgttgttcgtcatcaggaatctccccaagcgaagcaaccaaagcactaacttcttcagcagagggtcgcactctaaggcccaaactgccatcagtaataggtggattcgacacaaaaagggtgaaggctttgggaggaggtaggttccaggacgaatatgccactggagcaccaacatttgacactttacccctaaggatcatctctagtcgactcaccaagtctgcagagggaattctcctgttagtaacccgagttgagtcggctagccctcgatacagataagctgggtaggccctgtctttcaatggctgaatattcttgaaaacaaagtcagtaaccacagcttcagcagtcagacgcctctctttcagcagtccaacctcagctagcaacacacctgcctcagctacctcctgatctgtgggagactcggtccagcttagggtgcgaacgtccagctgtcttcccgacccgggaagggagagaattcccataattctcaactatgaaccactccaggcgccatcc

SEQ ID NO: 157751 - DNA, 636 bp, Zea Mays
gtgggcagcaaatttctgttctatcgtcatctcccaatcaagatatccctcagcatcataatgacccgaaaaagatggtatagaaaatttaatcttagcataaaggtcgtcaggagcacgattgttattaccttgctggcgatgttggtgtggcataccttctgtgttttgatgaagacggcgacgtaggcgcaaatctctggtggccgcttcatcataattaccttcttcatcaaacaccgcatcatcgggaagacgtggacgaggaggtggtggtggaggtgcttgttgttgcgtctccaacacagcaagtctgtcgatgatctgagacaatcgtcgatccagcctctcgtaagtcttgccaaggttcatgtcaatgaaggcatcatgcactgacttgtggaccatctcctccatttgctccttcaggagcttgttgtttgcctcaagatcttggcggctaacacattcatcgaagtcagtagggattcttgcttcttcgtcgtcgcctgccatcgaaacacaaaaacaggaaacaaacggtgatggttatccctaataatttcactacacgctcctctcaggtggaacacaggaacacactctattgtatcttaccaagctcttacaagtgtc

SEQ ID NO: 157752 - DNA, 461 bp, Zea Mays
tcttaggttcatttggttgaaaaagtgtggcaaatattcgtccttcgataaacatcgacaatttctccctactgaccatccattccacctagacatcaagaactttacgaaaggtgtcatagtgacagaccgcccacctgcaacgatgactgatgccaaaattcgtcaacagatagatgggctcgtggccaatacagaaggtggttttgtgggatacggtgagcagcatatgtggacacataagtttggcttgactcggctcccctattatgacgacctgctccttccacacaacattgacgtgatgcacactgaaaagaatgttgccgaggcactatgggcaacaattatggacattcctgataagtcaaaggataacgtgaaggcaaaagtggatctggcagcgttatgtgatagaccaaacctagagatgaagccgccaagtggcggaaagatatgga

SEQ ID NO: 157753 - DNA, 1209 bp, Zea Mays
tctttctagtgatggagtaaacccttacagaaacatgaatattagtcacagtacatggccagtactgcttattccgtacaatctacctccctggatctgcatgaagcaaacatcttttatactgtctatggtcattccaggaccagatagcccaggaaatgatattgatatatttctacaaccacttattgatgaattactacagttgtgggagggtgttgaaacttttgatgcctcttcaaggaagaagttctctctcagagcagttttgatgtggactttaaatgatttccctgcattaggtaacttatatggttggagcacaaagggaaaatatgcatgtccatcttgtgctgatttgacgaggtcaatttatttgaagaagggacacaagtgttcatatatgggtcatcgtcggtggttgcctcagtcccatccctatcgtcgtagaaggaaccacttcaatggtatggaggagaaagaactagcgcctgtaacaatgagtggaagtgcagttttgaggatgatggatggtaaaacttttttgtatggcaaaggaaaggttcatccggaggaagaacaatcatcagggcacaaagctaaagccaaaaagaaaggaaacggtaagaaacaaggcaaaaagaggaaacgggtccaaagggaaaaacaacaaggtaagaaagagaagaaacctgaggattggataaagaagaggtctatattctttaaacttccatactgggaacacaatctgttacgacacaatcttgatgtgatgcatatagagaaaaatgtatgcgataattttgttgggacattactaaatgtaagtggtaaaacaaaggacaatctaaaagcaaggcttgacttggaggagctcggaattcgacctgaactacatccacaattggataacaaaggaaacaaagtaatgcctgatgcaccctttaccatgtccagagatcaaaaggagattctttgctctgttattcaaaatcttaggacacccgatggttttgcatcaaatctatctagatgtgtggatgttaaggagtgcaagttatctggccttaaaagtcatgattgccatgtactaattgaggaaattcttcctatcgcactacgttcttgttatcccagcaaagatgtcatgaaaatagttgtagatttagcttctttctttaaaggattatgttcaacagttctaga

SEQ ID NO: 157754 - DNA, 609 bp, Zea Mays
tcctcgtgaccgcgtcgacgatggtggctatcgaagacccaatgtctcctttccccactacgatggtgagtccgaccccctgccatggatcaataaatgtgagacttacttcaggggcatgaggactccatccgatgagaaggtgtggcaggcatcactccatttggacggtgtggcggcagagtggttctacactctggagcgggacacgggcgacgtgctcacttggtcccgcttcgttgagttcacccgtatgcggtttggaccacctctacggtccaacgatatggctgatctcaaggaccttcggcgcaccagcactgtcgaagactatcaacgtcagtttctgtccattctctgtcgttgcgaggatatgacgcagctccagcaaactcagatgtttaccgtaggcttgggtgaaccgcttcggactgatgttgaaccgctgactccaactacactgcagcgagccatgcacctggcacacgcctatgaatgccgtaaggacgccatctgctacatcaaaaccaacgacatctgcaaacgcaacaaagccctcgttatcggctaccagcaaaccccgtttgcgcaggctctcctcggaggagg

SEQ ID NO: 157755 - DNA, 345 bp, Zea Mays
gaactgattccgctgtcacatgattgactcttcctctactctggttctgcggagtcttgttctgtgcagatccacgagtaggtgtgttctggtcaatcctctggttgttgttcttctggggtgtctgttgattatgccttgggcagttgttggcatagtggccaagtttgccacacttgaaatagccattaggttgaactggggtagttgtgttgctgttctcggccggtgtgttcatggtgcttccttgacgattctgttgttggacactagacctttgaccggtctgagtgctgcttctctgctggttctggtattggttgctcctctgaccttgttgtccag

SEQ ID NO: 157756 - DNA, 966 bp, Zea Mays
gcattgcaattgcaattgcaattgcaagcgcggcgtcgtaggacgacgatgaccaacctccacagtacaacttccgacgacctctgtttcgagtccttgcaggttcagctgattgcttgccatagtcgaccagacatgttttgctgcaactgcaatctccttcaagtttcaagggcggcctgggtgcgcagggatcctccctccccgtatctccacgcatataaactgacacatcaaaaggcctctgagttgcatcggcacgtgcaagctcgtctccatatatacagcccaccaatcaccagttaaatatggtcaacgaaacgcggagggcctagacgcacgctaattgtgttgcctgactgagcatcgctttcccagaccagtgctaattgtgttgcttctgtcagtgctcggcttggttgagtgctaactgtgttttactccacgtagagtttactcgttgctacatctgcaaacattgttgcagaggttgcaatatgtagcaggcatttttatgtggcttgtaagaccgtctccagcaacagtctgtaaaccgttctgtctggtatatttagcggagccattccttctttatgcctctagcaggagacgctaaagcatccgctataatatagaggaggttcttcgttcgctaaacgtggcgtgctcgcttccaccctgtatcaactgttcattctcgtgttccctccttgcatccaaataaaccaggcctgatgagtggcttgtagcccggcaaggttttggtcaactcgagcacgacatgacttggcactattttattatttctttgtttttctataaaatctctatagtatatttgaatatagagtataaaacataaaaacatgtattctagtggctatgcagatgtgaatgtgggtttagagccaacaattgtgcatagtgtttcttatttttaccatttaaacctcacatccgtatgaa

SEQ ID NO: 157757 - DNA, 790 bp, Zea Mays
cataatcatagaaatgaattgaaatatctgcaatgactgctgcctcgtaatttttatcatagagctttaccaaactattcatttcactatcgctatgtttcaaaggtatctgtgttgtctgacagactattcttgttcagactgatgctgccaaatagagagcattaaccatggatgtgtaagcatatacgtccttctgtgctacccctctcattcttttaatcatgggcagtgacattcttgatatccatttcagaggaggatcttatcctaaaacccagccttacaaacggaaccataaaaaagaagattttgcatcaaagttgataatagggattaataggacatgttggaaatataccatgggacgtaacaagtacgtatgttggaaatctactatggggtataatagctgacgatatgaaaaagctcttctctgattgcaaaatgtttgttcatccgatctggaactgacaagaagatagacgaaccaaacggttgtgtggatgttgatttttttcctgatggcacatctcttgatgttcatcttatatggatatttggcaccttggccgttgttgttggagttagaacatttgtaaagggtcctttgtgcatatagcatatatggaagaggtacacatgaaaattgaccccccaaatcacaatatggtatcgcgtgctagggtttggcctcacaaccgctgcccgtaggcactgcagccagccatgcactgtcgatccatcaacgccgggtctgtgcgtctggccgccgcctgcgtggggctgc

SEQ ID NO: 157758 - DNA, 766 bp, Zea Mays
gtttaaatggccaggtccagcccgggcccagtaaggcacgacctagtctggcccaagcctagtaaggaatggcctggttcggcccaagcctagcaagatcttagaaaatgggaacatagaacttggtcatgttcctcgttcctataacgtttcgttctaggaacgtggggacaatctcgttccctatgttaaaatctagttttagtatcgtaccacgttctcattcttcggtcctattgatccgggaacctggttactaagggtaaggcatggttcaattaagcatgacatgattaggtacaattagctaaatgtgtcacgtagtgctgcgtgtcgggctcaaaataatgtatgggcacatgatgatcctaattatgtcgtgtcgtgctgatctagcaagcacaacacggaaatagggtcgtgccagcctaagcccgacgacataaaaagtagctaaagacaaagcacatttataaatcacaacatatatcacattcacataaaaagtagctcagagcctcaaacattcacaattcacaacaaagatcatattcatgagtcacaaaatgtatcacaaattacttaaataaaggatagagctattcgtttaatgtctacctcatttaaaacctttttaggtaaaaagcaccttgtgaaaagaccctataaaggaaaaagagcgcaacctagctctaagatagatagttcaatgtcttagtttaggtacatcatatgaaattaggaataagaaatgcaagactgcgta

SEQ ID NO: 157759 - DNA, 362 bp, Zea Mays
ctcactgttagacaatgacaggaaaccttgcgactgagcgcatctgccactacatttgcttttcctgggtgataatggatttctaattcataatccttgatcaactcgagccatcgcctttgtctcatattcaattctgactgggtgaagatatacttcaaactttttatggtctgtataaatatgacagacattacccagcaaataatgacgccagacctttagggcatgaaccaccgcagctaactccagatcatgattaggataatattcctcatgtcggcgcaactgccttgaagcatatgcaattactcggccttcttgcattagcacacagccgaggccactgcctgatgcgtcac

SEQ ID NO: 157760 - DNA, 312 bp, Zea Mays
ggcgtcggcaaggtccccggttctagcatgatcgaggttaacggcgtcgtgcacgagtttgtgagctagcgtagccagtagtgtagtgtactaatccacgatacattgggacaagctacatttgtacatctacagtatagaactagttatgtatatgtgacgacaaataactacggttaaatgactcgaatgcccgaaggcattggttgtacaagcgtaaagagtaatggtcagttccgttgaggtaatgtatggacatcatatgtacactcagagcagttattatatagcacatgttgtcataaatttaag

SEQ ID NO: 157761 - DNA, 608 bp, Zea Mays
tgccggtcaggtcgaaaaataatactcagcaagagaccccgcgctcatgcaatatctcacagtcgtccgcagtctcgagagacaattcaagggtttcaccctacaacatgttgatcgcaccaagaacgaagaggccgacgcgttggctaaagcagcagccaagggcgaggccttgccctccgacgtgttctaccacgtcatcggcacaccagttgtccacaacccagaaggtttacaaataactcaggacgccgaaggccaccgcatcgtcaacctcatcatgactgaagtttggcgggccccaacaactctgtatttgcaaggccactaccatccaagcgatagcaatgaggccaaacgactaaagcaccgaagccgagactttgcattagtcgggggccagttgtacaagaaggggatcagtcagcccatgctaaagtgcataactgaaatcgaaggcatacaaatcctccgcaaagtccacaacgaaacttgcggctcccactcaggacccagggccctcgctgccaaggtgattcatcaaggattttactggcccacaataatctgtactgcaaatcgagtcacgaggtcatgcgaagcatgcc

SEQ ID NO: 157762 - DNA, 720 bp, Zea Mays
cctgcccgttggctctcgggtgtgccacggaggcatacttgatctgaatgcccttttgctcgcagaagtcgaagaactctgagcttgtgaagttggatcccaggtcagttatgatgttgttcggtattccaaacctgaatattatgtcttgtatgaattccactgccttagctgaagttaaggaagcaatgggtttgaattctatccacttagtgaacttgtcaatagcaaccagtacatgagtgtatcctccttgagcttttttgaaaggtccgatcatatccaatccccagcatgcaaattgccatgttataggtatggtttgtagttgctgtgccggtagatgctgttgtttcgacaagtattggcaggcttcgcacctctgaactaacttggctgcgtcactttttgctgttggccagtaaaaacccgacctgaagaccttcccaaccatggtcctggatgctgcatgcactccacattgcccagcatggacctcatctagaagttgctttccagtatctaaaagaatacacttcatgaggactcctgacgcgccccttctgtatattgtgtccccaatgagcgtataatgagctgactgccttgcgatacgctcggctgtatttttgtcatctggctcctcttcattccttatatatctgatgatcggctctctccagtcatcaggatttgattctggttggctcagagtattgc

SEQ ID NO: 157763 - DNA, 486 bp, Zea Mays
aaaaatgttgcataaatcgatacccaatttcagaatggtatgagtaattgggtaaccaatgggcaatgataaaaacgagctggactatacatctctgcatataaaaatctctgcttggcagcattggcctaatgtcgtgcactttaccgccattttatatgcgcaaattctcctatgtgcttgaaagcacaatgcaaccaatgaatgttcttgtgagcgctagacctgatggtcattgtccttgttgatctgaagtcaaatacttgctccaaatgacaaatggtgtgcatgagccctaaagtattttgtttttatggctaacatattgttgcgcgtatcagtctaaatcctgatgattgactgtatatttggtgataataacagcaagtttgcagaaatgtaaccacaaagcgacttgttgttgcgtgtcttgctggaagttgagactaatccttcacgttgaaggacaaatatgtagtattcatg

SEQ ID NO: 157764 - DNA, 411 bp, Zea Mays
gggtggctgctgctgcacctgctggattgctgctaaggtctgaccaattgcttggactacttgagtttgcatcatgaacatctactcaactgtcatggggggtggcagtggcaactacggctgctgagctgcctcctcctaggtgcatgcggttccggctgagcaagccttgcacctctgcgcctgttctcagacatctgtagaaagcacaaacaattcagatctgactctgcagtctttcagcataagaaaagatatatggaaatctttatagcactgaacaaatgatcatcttcactgacatcttctcagataaagaggaaagtggaaataaagggattacccaactaaataactgactttattaataactacaccaagttgcaggggatacccacaccttgatgacaa

SEQ ID NO: 157765 - DNA, 893 bp, Zea Mays
atttattgaacttcgctcatctgcactcgattttgttccacattcacatacatattgtgcctgtcctacagctccacatactatatcttctgatcaatacagatttgaccttgcaatcgcggtttcactacctcttggtaagtatcacgaaccagcctccgattgtaccatcctttgcattttgttttcattagatactagtaagaacttggtaagacacggtagtgtgtgttcctattcacccagagagcgtgtagttgcttattagggataacctttactgtttgttcctattttggtgtttccaatggcaggatccgatgacgagattgaggtagtcattcccacacaattttcctattgtgtcagccgcgaagacttcgatgttatttgaaagtgtatggaggaaaatatggaggaaacggtccacaagtctatccatgatgcgcttattgcaatggatttttgcaaagtgctagatagggtggagagacggataaccgagcttgtcgatcgggttgccacattggagacacgtccactagccttagtccttgttatgtacctgtcattttggtccccaaaaaagatggtagttggcgcatgtgtgtagattgtagagccattaacaacatcaccattaggtaccgtcatcctattcctcgattagatgatatgcttgatgagttaagtggttctaaatggttctctaaggttgatttgcgtagtggttaccaccaaattcgaatgaaattgggcgatgaatggaaaactgctttcaaaactaaattcggcttgtatgagtggttagtaatgccttttgggttaactaatgcacctagtgctttcatgatattgatgaacgaggttttacgcccctttattggtaaatt

SEQ ID NO: 157766 - DNA, 1025 bp, Zea Mays
gggaaggtgtttttttcaccagcggctcaaaaacggtatgtacagaagtttcatgcatcacaaagaaatatattacatcaatatacacaaattgtttacaagtgttttctgcaagactaaaaacatgctcaacaattttgaactagcaaaaataaaagttccagtcttcgtcaatagcttcattgacaattttgatggtctcgagtgcctcttttaggaacgggtcagcttctggattgtatggctccggaggcggagatagttcagctgcaccaaagtatatgtttgttagttccgaagctaaaacatattacaaagctaaaatataacagatgtacctataagcctagcccgctcggcagcctcttcagcccttctcgccgcttctgaagcatcatgtgactccttttcgttctttttaatggcttcatcagcgacttctcgaccgcccttcagccatatctcgaagtaaaatttcccaccgagcgtagcagctccggctgaaggattcttgatgtcatcaactgagaaagcgaagtttgactaagccacaaccttagtatgttcgcaaccagccttctccaatatggacgtggcccccgcgcactagcaaaggcacaaaaatactcctcggtcacttagaatttcgtcaaaagcttcggcttccccgctgatccactggacaactccatcagggtcgccgcggatgaatctctgcttagaggaatatgccccaaccctaacaaagttttcctctaatttcctggcgcattccaaggatatttcataacatctttctttggaagcacgaagctcatcggcattcttttgtgctcttgacctttcgatctcgcatatctcatgcttcaccacctcaacttcaaatttttcggttgcttcagcaaccttccttttcagttcttccactttggctttatgagctttggcttgtgcagcaagtttagcctcgttagatctcagcctatccactaaggaaagtaatatcttatccttttcaagagctt

SEQ ID NO: 157767 - DNA, 390 bp, Zea Mays
gcaagttccatggaagcggcattccagaagaatattgtagggtagaagtggcgacagtcgtccaaggatccgaggacgacatgctagacatccctagacccaaaggtattgagaaacttggacaagctttcaagaatttcatcctttggcctcgaagggatgtcgaattggttgatccaccgcctcctcaaacagtagttcctattgtagacccatcatcacctcttcaaacttcacatgctgctcctcatcctctttctaactcaccgtctccgccacaagcatcgccattcagggctcaacatcttctcctcgccattctcttggtgacccactatgtaagccaccaacaagggatccaccttctccacagccatcaagggatccacg

SEQ ID NO: 157768 - DNA, 958 bp, Zea Mays
ggtacgtaatctcagtcgatggattcgcgaccgatggctcggattcaacatacacgatatcaaactctagacgctggatccgaatccaacgctcctagttaattcagccgaaacggcaccacgagctgatcctatcgctttcgatccaacggcctgtgttcactactacgtgttcagatctcgcgcgtccataacgaaatcggcggtcacctgatcgccccttcccgcgagaccgagccaggcggcggcgcacaacgcccaggcggcggtggccatggccggccaaaccccacccggtggtcagatgtgcacttccaatcgtatactagtgtaagagaaagcaggagctaacgtgaactcgaggaaggtgtctcaccgagggtagggatgaaggcggagccggtcgacggtgcggtacagcacggcggtggtgcatccacttcggcgaggaatctccggacatccagcacacaacccggccagccgcgggcactagaagttcccagagagcgccgccaagcatccaaacgggccggtgattcaccctatctcccagccaagcaccgaagccaacagcggctcacaatcgatggcagcatggagcgacttccaccgcgctctcccccatggcggctctcagctctcacggttgcgtggcgtgggtaggacgggatgcggaggagtatggggagctgacttaagtccccaggataatcacgtggtggcccgagaagtaggggaagggggttgagggagatgcgagatccacgggcgggagatcggcgtagtctgttaggaagacgctcctgacgacccgaccccaccgcacagcgactagaagatggcacaaaggtgcacaagggagagttggagagcggggcccacatgccagtgagatgacagagagggcgcgggcgagaatgggctgcgctggagaatcgctagatgggccgaaagg

SEQ ID NO: 157769 - DNA, 580 bp, Zea Mays
tccgggaatacccgcagaagaggaagctcccagagtgaagttaacagaagaaccccactgagtcgtcggatgaggcagacacggagctccaaactgagatggtgttggagtagccggtgcaggagtaagcgcagccagatactgaggaaacccctgcataagcacgaactgaggagtcccgggcacgtagaactgctgcagaggggtggtactaaaaattgctgctccgcacttgacatcatgttgatagtaccctgagaagaggaagaagtcactggctcccatctgagctttccattgggattcctcctacacaccacatccttgtggtcttggctgcagatagagcacctgccactccactaacactcagcacagcgatgcgcatcaccacaacggaaacacaccagccctagcccgggcttaggaacaacccgatacctctgagtacttcctcctgaagtacccaattcagaggatttgccacggtaggggtggtggcgctggtgttgtgacttgcccctcttgtgggctggacccctagtgttgcccctccttgcgtcctagccacgaggctgat

SEQ ID NO: 157770 - DNA, 561 bp, Zea Mays
taccctaatctaacccgcggtccctaggttctcggaatagtacccgcgacaaagattacggcaactagactcaccggcggcaaaatagctccggcgaagtggtcatcgatgttggggaggtcacgacggtcacattggtgtgcgggtcggtgtcggagatggctggagttggtcggtcgtcgcgcgcaggcgggggagctcgtcggtggcgtggattccggcctaatcatgctgggatagctcaatccattgagttggggagcttcatgggaggtcagggaggtcgtaggcacaaggaattgaaaaatggttcacctggtagcccggtctacgtgcggtggcgagcgggccgaagtccggcgaggttgcgctcgcttctctggcgaggcaaggtgcactagtgaagatggctaacgcctctgggggcacttataggcgagggcgagacgctggcacacggggcgggagcgaccacgcgcggggcgcgcgctgccgtggtgaaaggatcacgatgcccaagaggggggtgaattgggcttttctaaaaatcaatactaatta

SEQ ID NO: 157771 - DNA, 668 bp, Zea Mays
ccaaaactgacttgttccattccaggaagtccaaggctattaggctgaaaccaatcgtaagtggagctgtcgtccaggaacttgaaatcatggacattgcaccgttgggcattcaagttaatataagcatctgaaaaccgtttggagaattttctttgtttattccctcttgcactaatataccttggagcgatttgataggggggcctaagttgttttttgttcagtctgagaagggtttaatgggccacagaaagtttgggctggaaacaaacacataatgccagatgaaacaacttttgatctggactcgcatcaaatagctgagacaccctccttccatgcctgcttccatgcctgcgtagatgaagcttccacatgagcaaacatctacccaagtgaacatttataatttcatgttttcatttgctggtaacttttgcttaggatttaagtggttttttcttaggtatttctgtctgcaaaagtgcccattgcactgttgaacattctagattggaagtgtcacccatttgtatgagtgcagacatgaggtgcctaggccgtttctttatatgtgtgtgatggcatgctatgacggactttatgctacttgtttatgtattagcgtactaaacttgatatggtgaccttgatgtaaaccattt

SEQ ID NO: 157772 - DNA, 445 bp, Zea Mays
ttggcttcataaatgagagcaagactttgctctctcccaggatgttcatttgattaccccctttgggaatgagggtcattatgcagagagaattaatatatctgtaaaacttatgtagattggtggactcccaaaatttaccagtctcagatatatgaagatcccgggcttcatccttggtgggttgacgaaagtcatgaattttaatcttgtccccagaaatatcttcatcagaaaatctaagtatgtgagcaaacctccggtagctcaccttgtaccagctgccttcgatatagaaatttagataaggaaagttatagggactttcctcatcggccagcttgatccaaagagtagaatagaactgagcaataacctcatcattccaatcatattggaatgtcataatgttcttcattttcttcctctcacaggccctcaaagc

SEQ ID NO: 157773 - DNA, 300 bp, Zea Mays
gtgaaactgaattgctacatatcacctcacttactgttgttcatttgtgtgtgtggggagaggcacaggtgaagagtgaaactgaattgctactcttttagagttacttcatcaaactcaagactgtgagtggccagtgagaatcgatgcgactctagaacctagtttggatgggatgagtttggtgcaatcagcaaccccattaaaagatttcaggctggtgatttttagagcaccacatctgcacatttttgacttcgagtttacttccgatctattattcactaactttacctcgcc

SEQ ID NO: 157774 - DNA, 449 bp, Zea Mays
cagatataaccatcgataaacctaatgaagatgatcaagaaagcaaagatatacgttataagggggcagcggattcctcgccggtccgtcagatctgcagcggcgcgaggggtttgaatgcggatagtgccccatcacgtcagcgcgtcctggtcagcggatgctcgccggagtgtaatggccatctcgccatcaatcggagcaagtctgcttcacagagggtggaagaagatggttggacggaagtcaagccaaggtactggtggcgcaaaaacctaggaaatcttggaaaatctcagcagcagatcgatgcatcaagctccaacctgttcaaatcgaagcttcagggtaaatgtttcaactgcttctcaccaaaccactacgcttttcgctgctcggctactacccggtgttggctctacttgcaaaccggtcaaagggcgaggcta

SEQ ID NO: 157775 - DNA, 285 bp, Zea Mays
cttgagttctttattcatcgattttaccctatcatgtattagatcctcaaatcaaattttcatatcttgtttgcgccccgccattgatcgatgcgctcgctcatctcacatgggtgggactcttcgctcttgcagcaccgcccatctagagggagctactccatcttatggacaccaactccagcacactcgtatggaacaagtccaccctcactgtcttaacagcgaggtcagaccacgaccttgtcctgtaccttccctgctgccttcatttgtctattctcc

SEQ ID NO: 157776 - DNA, 581 bp, Zea Mays
gctctgtccacggagacagcgggcaccacgggcaatcgaacgcgttcccggtgatctaaggggtcctagtccaattagcggggttggcgagcatcaggagaacctaaggatgctgaaataggagagcagggagcatgaatagacctggaattcgctgaccacggtaagggatctaccatggcggcggaaaacaaaattgagggaactgggaaattggagagtggtagtggctaatcggaggcatgagcgggtgctcaggcttggtgatgacctaacgcagcagaacatgtcgtcaatttatagcggcgctaagtggtggccagtgaatttggtttggcgcggtggcggccggagagtgaggagagtactatcgcgagagctcagtggcatctaccgtggcggcctcaccggtgacgaaccagtagtagagagtggtttacggtgactcactacgatggggtaaggcgtcgaggcacgtagcctggccggataacggcgaacgtcggtgatgctagcgcgactatcactaaacgcacacgagtagctctttcttgcttgatctctcttttgtggcacttgtg

SEQ ID NO: 157777 - DNA, 735 bp, Zea Mays
cgagggaacaggttgtatgcatgctcatgttgtgtgacctttacaaagcttgacggaggggatggttgactacgaagtccggtggagcgaggtcccggcttgttcgttgacgcgctctaggctggcgtgcgatggattttggagacgcagagcagctctcccccccgagcgtggtgcgagcttcgggttgcaaggcgcgcttgcccgagatctccccaactcgatttgtttatggcgataaccaggccacgctcacgtacttacacccaaggctagggtgcggtgttcagtctcaggcgcctaacggttgacgatatacgcgacagcaagtccgcgggtgacgcccggcgcggcgatctcggctgcgcgtgccgcgatccggtgaggagaaaaactgacggaggcggcccacctggcggcaacagcgcttgagccataggagaggcgacgcctgtcatgtggggcccagccgtcaatgctgaggtgatatgcgtgcggtaagtcacaggttaagtcggcccgcatgtcggcgtcaggagtccgcgcacgtttggataaacctggtagagtggctgcctagtggggcccacgagtcattcccagagctcagcccgcacgggattcaagaagggatagcggtgggtcggagtgggagaggaaaaggaagtgggtcgcggctgaggaaatcggcccaaagatttttttactggtctccgaatttatgttttctctttt

SEQ ID NO: 157778 - DNA, 1827 bp, Zea Mays
gcattaggtgcgagtgggatgtgcacgtgcccatgacaggggcaggtgacgtaccccctcgattaaatgcacgcgtcacgcctagtctgcaacgcatgggatacaatgttgcccacacgttagcaaggcaagaccattgactcaatgtgccacttgggcaccctttattatgcctctactgttcctcgtgcgttaccaaggcatgaggagacaagcgaaggagacaggacgccaccgtccatacacccctacgcaccgcaacatatcacactacacaacaacctacaccaaggcctgcgcctgtgttcctattagacggggcaagaggatgccaggagcctacacaacgaccaagaggagatacgcacccagaagatgtagcaccgccagctctacttgatgcctcatgcttcgtattatagtaactcctaggcccacctgtcggggcccagctcccttgtagtgtgcccccttggagtataaaagggagggcacttgcgatacagagggtatcagtgcttaggtcctgactgcgcactacggggtaacccacgtagtgcttttgggagggcggcatcgctgatcgtgactcgatggtacctacatgagcacgtcggtacacaaaggaattatacaggttcgggccgtctgaatgcgtaataccctacatcatgtttgatgctgagtattgagtttgctggtagtgcacggattacatacgatttgtgggtgatgatggatgagacctatcagtctaatggtggcatggttgcgacgagaggaatgtcgagagagttttgtaggggtaccctctgagccttatataaccagctgaggagacgtccctttacagatcgtgagatcttatctggatctatctacttttgctactattgcgtgacgactcttccagtggttattcccttcgagttttggcatcatgtgatctgctatccgtttgcatgcagggcgtgttacacggaattccgttggctcctctgtgatatatgtgcatagataacatctttatgtcgtgctcttaggaatctttctagctaaacatgtcatcctctcggtagcacctgtttttcccgaaggtcggcctaatagcacatcttggcgatgacttatcgggggtctgttcaagcgacccatggaacgtgtccatgtgacaatgacccatggtatatccatctcccatagaaggggattgattcacattcagacccacaacacccaagctctccagcaatacaactcatagtggatgtagggtattacactccggtggctagaaccactctaaacccttgtatttcttatgttcatccattcggtcagccaaatctataggccccctcctcatcttaggattagggtgggtgcattccatcactctactggaggatttcccctccgacattttgagcgctaggtagggggtcagggcctggccccttgattgatatgacagcccactcatccaccggtgagctcgatcgtggtgaatctgtcgatatttggcgcatggtagagaatcgacgtatcaagaggttcaccgtcgacctcagacgacgtctcaggaagcgagccgctgccatcaagtgaaggcggtgagagccttgtccatggcagagcaggctattgctgccatctccccgctagtctccaccatgcctgaggtcgcctctatctaacccccagcaagatatagtggcactcgaggttctcgtcgtaggtcaacagccgagtgcatgagagagtgcctccatcggtcgaccactgtgttccatggtatgtggagttgtctcctccgactgcgggatg

SEQ ID NO: 157779 - DNA, 549 bp, Zea Mays
tgtgtgattagcttcgtgaactgcgaagggcttcccgatcgtggagaaaatttctggcaggcttcgcaggaccttgtgacccgatttgcggcgcagatcatggcgggccagtagaaaccttgacggattacctttgcggctagtgccctgggccctgtgtgagagccacaagtcccgctgtggacttcgcgcagaatttggacgccttcggtctctgtgacacatttaagcatgggttaactgacccccttcttgtaaagttgtccttcaattagtgcgaagtcccggcttcgatgtttgaggcgctttgcctcattgatgtcggttggatgatagtacccctacaggaatagggttattggtgcccgccagtcttcagtcatgataaggttgactatgcggtggccctcgctgtcattggttatttggagcccctctgggctgcggacggctggcgtgccgatgacatggtagaatacgtcggagggcagggcctcgcctcgggcggctgccttggccaacgcgtcggcctcctcattcttggcacgg

SEQ ID NO: 157780 - DNA, 347 bp, Zea Mays
gtggaaggtagacgatggcctcctgaccgtcgatctcgcgatatgtggcggcgattagatctatcgtaatggttcggccaaagtcggtagttaccgttgatccttgatcggatggctgggtgatcgcatagtccaggatcttttattggccgttggatttggacccgaggccttacgtcgtgtaccgcttcaatccattaggatctaatccgggccgttagaccagatcgtgcggctgtggtgttcgcataccccccttcggcccgtgtgttttacaaaggagcccctacactttttcagatttaacctgcggtccactgctcgggtaaactgagtcttaggaaaac

SEQ ID NO: 157781 - DNA, 344 bp, Zea Mays
gttcaacatcgggatcctcataggtgacaggaacgtgggtgtgaaatccaatggtctagaaaatgttgcagccgtgaaaaggaaagaatgtgacctcagggctcaggccctcaggggacatagacaggttcaaatatcgcatggtcaaatttgagaatatatgtaggcccacggactctggaggtttgggaatttttaacgaagcgagtctgatcgtttggttttaatccgtatcgtcttctacaatttttatagtgtttgtctctacaaattacagttacagcagtccaaacaactgtttttaatcgaaagcgaacaaccctgctaaaatggatttggagact

SEQ ID NO: 157782 - DNA, 1129 bp, Zea Mays
acaaataaattatgtccaaattttctatttttctataaaacagcgaaaaccggcgttttaggatggtttatcgccggttttcgtcggtaaatcggtacaaatttaaattggtttagattgtacaaaccggtcagtttttactggtttactggcactaaatattacaggtaggtaacgatttttccactgacggttttataaaccgtggttttaggtgaggagagaggtgaacatggtatggaatggagcatgcagtggtgaaaacttttgtcttgctcagtcaaacaacggctcatggttgactgtactggcatcaacctttgtccacagtccaccccaccatccaccattagcagggcatcaatcagcatgcatctttcttcctggtggcctctgcaagctctgttccgacttcatcgcctttcacctactcccattgctccgccattaattttttaccggatcaagagcaccttccttcctgtcctgtgcatcgaggaggagagagaaagagtatgtgcgtgtgagagggagcagagtcaagaacagcaagcagcccagaacccaacatacatttaagagggggatccaaaaaaattgcagtctttacctgcaccacccctccctaccacaaatttccctctctgctggaactggaagcagccgtggcatccgccgtttcttgcgtgcttcctttcttggttctcctactagctgtcatcgctggtactgaaccagcggagaagagagaggtgaaccacggtgatccccgtgctggacaccatggccgtgtcctggtaggggataagcaacccaggaaagcagcaaccttccgctgtgcggatcacaggagggggactgcgtggggaccagaccaagcatggaggcactggcggccgcattcgccaccggccttgtccttgccctcgcggcggcgccagcgggagccgaaaccgaccccgacgacggtaagagccctgggcggcgctcccggttccggctgagtttcttggtttcttgggatggcgtggtgggttttccttttctttcttgtttcgcgcgcgattgatggttcggttccgtgttgcagccgcggcgctggcgaatctctacacctcctggaacagcc

SEQ ID NO: 157783 - DNA, 484 bp, Zea Mays
aattattttttgagcttcggatttttgttgcaatcattgctgaaatggccgaagagaagaaaggcgtggatcccgcacttgctggtttctacgaagccatggagaggacctatgttgagaaaattactgatgaaatgttagctgggctgtctggagactcaagtgacagtgaaagttttgatattgtgagtgacaacgatgatgccgaagatcggccgtggaggccaagtcatgttgttttttggaaaacccattgttaagaaagggcaaactgaagcaatgaagggcaaatatttccatgatatatctgtagtgagggctggaggagagaacactgtgtctcttcctaaggcagatgaattagtggcattcaaaagttttatgaaggatgggcttcactttcctttacataagatgctagtcgaagtgctgaaaagatttgaaatataccttcatcagcttactcccgaagctttgattaaag

SEQ ID NO: 157784 - DNA, 731 bp, Zea Mays
ggtcacctgtactgggccgccacggtgaattttggcccagcatcaccttcctcctgcgcgggcactaggcccctagactcctcgcgcacgcgccgatccgacttgacgatggcaagtgggacccatgtgtcagccccgtccgcctcaccccgctgctgtcgggcgggacccgctcgtcagctgggtcttcccccttgcaaccgacctcgcgcacggcatagcgtcaacagaattccccgcatccgcgggagttcgttcgttgaccccccttgagtccgcgtcggccgcgatattagacccggcgccctcccttcggggtgattcacttccgtagttcgcctgcatgcgatagcccaatcttcacggaaccaggggagggaatgagtgccaccgggtggggtcacgactgtcgcatgggcagctcaccggcggcacaactctgggcctggcatgcgacccaggcaggtcgcctggaggagtattacatgttcgaggtcactatcgtgcgttggggtcgtgaatcgacggcaatcgctcgccgtccagggtcgcccgccatggatttctgccccaactcgtggacgggacggtctgcccccgcatcaccggtatgatgcccttccacgtgcccatccttacttcatgatcgcgtatcattcaaccgcgcttcgaatttggccctctgtgtcgcggaattgctcgcctgagttccaactccgcccatccccgcc

SEQ ID NO: 157785 - DNA, 558 bp, Zea Mays
acctccttcacgatcttgtgatcataccatcccactgctgccaggtgctcaaccggtattcattcggccctacaggtatgccccggcagtgaaggacgagatagagagacaggtctcggagatgctagactcgggtattattcgacacagcactagcccattttctagtccagtcttattggttcgcaagaaggatgaatcatggagattttgtgttgacttccggcacttgaatgccctcacggtcaagcgtaaatatccggtaccaatcattgatgagttcctagatgaattgtatggtgccagctggttctctagtctagatttgagagctagattccaccagattttactccaagaaggtgaagaatttaaaacagccttccagacccatagtggacactatgaattcaaagttatggcattcggattgactggagctcctgcaacattccaaagcgcaatgaacaccactttatctccagtacttcgcaagtttgctcttgtctttttcgatgacatcttggtgtacagctcttcccttgaggatcacctgca

SEQ ID NO: 157786 - DNA, 981 bp, Zea Mays
tcctggactgggcgcactaatatagggaaatgtaggggctaaactataaaacatcagcagactcagaccgtgcttgcctaggaccgcgggttgacatcactcttttgcgggggttcttacgcaaaatgacaaccgcgaaagggtacagtcggattaggaccgtccgatcaggagcggtcggatcagattagatctaagtcttcatagaatgggtacgcgctcagaaccgtaggatctaagatctagggcacacatttctcggatcgaaggagtatgctaccgatgatctcgcctgcccaacatctatcccacggttcaaaacacttcacaactctctctgatcctggccgctcatccagagatcaacgacacagggtcgtcttcctccctgagttccaagctacggccgtagtgcaaatccggcgagcggtgagcaagctgtcctcgaccacggtaaggagtacgcactaatctagcgcgatagaggaacgatggctaattacaagctcgcaatcataccggtgtcagacacgtgcgcagagccgtccacagacgatcggtgcgacggtgctcccagggtcggcaaggtcgatgcgtcggcaccccaacacggcgatgcctagccaaccaccgtcgcacgagaaacttcacggagcgctccacccacctaactctaccctcggccgatccaacctctagccacacccttatctcttttctctctcctacatgcagtttcaatggtggccgttcctagcatagtgtaaatcctccgggtatagaatgaggaatggcggtggccggtttataccctggtgccaaggactctgcaacgcacaattggaggaacgatccgcaggaaacggtgaggtctgttcatcccgcgctattctcgcggggaagaagaccggatggctagatgggcccacatgcagcggcagtagcaaagctgaagcgtcggcccccaagtgtcagtggcac

SEQ ID NO: 157787 - DNA, 5263 bp, Zea Mays
cttcagtccaacaaacgcaatgcgatccaagtagcatagctaatctataggacacaagtttaccgtgagttgtagcacaaagtcccctgctcacggtggagcacagccccatggtggtcggccacttccgacgagcaatacaggatgcggcacccacgaggtccattgccggcgacatggagagggagcagagagagggcgcgtgctagagatggtccctagcgtggcgagctgcaggaggaggggcgccgagcggaggtgatggtggaggcctaggcatgatcaagcagaggggcaggggcgcgacggaggagcccggccgccggagggagctcgccattggggagggtgttaactacgtagcggatctgttggggttttgacgatggtggcggcaacacagccgtatcgctctcaggtacgctgtttcttacgagttccggttctgccagccaaaatctgctatctccattacaacccaggcttttatataactgccataggctgcccgttacatgagcctaattcatccacacatttcttatatactttggattcggccttttatgtcgagtgctccgctttgcttcctgaactttagcgtccgcatcttccattacaacagccttcccagtgttcaggtgccctgtgctgctaacatccccttccccttgacagacagcttgaccccaagctggagcccgcgggaactgctgcttgatggtgtgttcatcttcccaggtagacaatgaagccggccagttagaccatcggattaggagttgaggtataaccttgttacctttgcgaagcagccttgattccagcacttcggtgggtattttcagctcctgcaacaggtctggcatggttgcatcggttgtgatacgagttccttcggctaatttaagttgggacacatgaaagaccggatgaatcgcacttccttctggtaatgtcagttcataagccacgggattcacctgctttgtgatcagaaacggtccaaaatagcgaaatgacaatttagcgttcaatctgctccccatcgaactctgacaaaatggctgcagtttccgaaatacatgttgtcccacttgaaacaccctttcagatcttcctttgtcagcttgttttttcattcgatcttgagccctttgaagatgtaacttggcctgttggagcataagctgtctggttgccagatatgtttgcagatcagcactttgacattgttcaatggttgacagtcctaactgggatggagtgtggccatacaaaacctcaaacggtgactgacccagtgcagtgtgaaaacatgtattataccaaaactctgcaagggatagccaattggaccactgtttagggcagccatggacaaagcatcgaagataagcttccacacattggttgacccgttcagtttggccatcggattgggggtgatatgcactgctgagacataattttgtgcccaccaacttaaacaattcctgccacaagttactggtgaatattggatccctgtcagaaatgatagacaatggtaggccatggagtttgtagacctctgataggaatagcgtggccacagatagagcagtaaaaggatgggacatggctaagaaatgagcatattttgaaaatttatctactaccaccaatatgcagttgaatcgacgggatgtaggtaatcaagaaataaaatccaagctaataacttgccaagcctgatccggtatgggtaatggcaatagcagaccggggtatctgtttcggtcggccttggcctttttgcaaatctcacatgactgcacgaactccttgatctgtcctttcatgccaacccagtaaaacagcttcttgatgcgatgatatgttaccggaaacccagaatggcctcctatagggctgtcatggagggcagtcatcacctttaattgaacttggttactgcaacccagccaaatccttcctttatgtttgattactcctgataccaaagtgaatggctccattgtatcccctgcagcaagtgtactcaaaatgttcttagcttcctcattctcctcatagctgctagtcacctcagtgagccaacttggtaccactgtcgaagttgctaacacgttgagttgcagtttggaaccatcagtgcataggtttggtcgtctagaaagagcatctgccacacggttttccacccccttcttatatataatgcggaattggagacccaacagcttggttaaggctttttgttgccagatagtcgacaacttttggtcttccagatgggttaggctttgctgatcagtcttgatcaaaaattctccatgttggaggtaagggcgccagtgatcaactgcaaataaaatggctagatattccttttcgtaggtggacaatcccaagttcttaggacctaaagctttactgatgtaagctataggatggccttttgctgcaaaactgccccaatacccgatccacttgcgtcggtttccactacgaattgttgtgaaaaatctggtatggagagaaccggtgcttgcaccaatgctgccttcagagcctcaaaggctttctgagcttcatcattccacacaaaaatttggtccttcttgagcaggttagtaagaggtttgctgattatgccgtagtgagcgacaaatcgacgatagtacccggccatgccgagaaaactcctcacctccttgacgttgttgggaatgggccagtctcgaataacctgcaccttttctgggtcggtggcaatgccttctgcactgatgaggtgtcccaagaactcaagggtggtctgtgcaaatcgacactttgatagtttcagtttcagctaatgatcctttagcttctgaaacacttgtttcacctgaaggacatgctccttcatgtctctgatgtagatcaacacatcgtccagaaataccaccacacacttcctaagaaagggggtcaaaatcttattcatgaaatcctgaaaggtggcaggtgctcctctcagtccaaagggcatcacacggtactcgtaatgtctgttgtgcgtctggaaagctgttttgaattcatcaccttctttaattcgaatttgatggtacccagacctatgatcaagtttcgtgaagatcttagccccacatagctcatccacaatttcatcaaatattggcatagggtacctatttttcaccgtatgggcgttaagacgcctataatccacacataaccgccactctccgtccttcttcttcaccaacaatacaggagaggcaaacgggctcgagctatgctgtatgactccttgctccaacatttcaataatctgcttttcgatctcatttttctgttggggggtgtagcgatacggtcgaagtctgaatggttgggctcccgataacagtggtatcgtgtgatccacttctctgggaggaggcagtccagcaggtttgtcaaacaactcatggtattcttccactaactgagccatttcaaaaggtatgttctgggactggcccttgtcttccacgctcaactccaatatgtgttcccaggcctcttgtttaagaatccaatttaactgcaccttggataattgatggcaggtgctcaactttggaaccaccccttgtaagcgtacaactctcgcttcatattcaaactccagccacttaccaacccagtgtactttcatgggactgtgggcctctagccagtccattcccaaaatgatatcatatccactcaatggcagaaacttgaagtcagtatggaaagtgatccctccacacaaccactggcagtcaggtacaaagtatttgctccgaagacacctcccatcagccacttttacttgaacaagttcgagtaggctctgaactccagtcacctttcccatcagatggtcactcataaaactcgttgaactgcccgagtctactagaactagcagttgttggctttgaattaacgcccaaagacgcacggttcgggttaccctcacttccattgactgcattcaccgaaatggacaacactgcttccccatcactatcaacgccaccctcagtcactaacttcgtttgttcctcttcttcgcctgtaactgttagagcccacatctcctcaactaggtgtaggggtacggtgttagaacaacggtgtgcatgcccccatttccccccacatttgaagcataaccctttagcccttcgatatgccttgagtgcagttagtttactgtcctccagcctacttgcagcagcagggtaagcagccctgttagtggtagctgacaacgatgatcccgccattgttgtgcccttctgcagcggcttggaaaattcccctccatcttgcctccgatgttcatggcgtcccgaatgcatcagcacgtcctcctgcaacagggcgagggagcaagcagcatccaagttgtttggtcgttgaataacaacaacagacctaacctcctccttaagaccatctataaacctcgcagtaatcattgctggagtaagttgaccctcatgagccaataattgatgtaatatcacatcaaactgctcaacatactcactcaccgaattggtctgatgtatgtggtaaaattgcctaatcaacatgctatgctgatcatgaccaaatctatcatttagacatccacaaaattcttcccaactcatctctcccaacctattctccactgactgcaaccaaaaagtagcggttcccacaaaattcatgatagccatcctaatccacatccccctagcgactgaataaaaatcaaaatacgtctcacacctttgccgccacaattttgggttgttaccatcaaacactggaaaggtcatactgggagctatcgatcctgaacactgggaccaatttcccatcgaattcaccccgcccgcactccatggaatgttaccaaactgtggagggtagttcgtacctccgaccggaggaggtgtctagacctcatcggtccgggcacccggtctccggtaagggtgagcagatcgatggcgaaattgcccgtgcgccgcttcgagtgaaggaagctcctgatgaacggagcccagcgcaccatccacgactggatccttgttgttggacgccccgatcagcgacttcagatcagctttggcttgagtcttcttcaacacctcagcaaactccgtgaccttcctctcgatctccggcttccacttctgaacatcgccttgctctgtgagca

SEQ ID NO: 157788 - DNA, 474 bp, Zea Mays
gaaaaataggaactcacgctcgtcgccttcctccaagcaaatgccaacgtcttcgcttgggagccgtcgcaaatgccggggatccccagggaggtgatcgagcaccagctaaaggtttacccggacgccaagccagtaagccagaagccacgaagacagtccgtggaacggcaggacttcatccgagaggaagtccggaagctgttgcacgctggctttattgaagaggttcatcacccggtgtggctggccaacccaattgtcatgccgaaagccaacagaaagcttcggatgtgcatcgactacagcagcatgaataaggtgtgccctaaggactcgtatccactatcgcgtatagatcagattgtggactctacttcggggtgcgacctcttatccttcttggacgcttactctggtttccaccaaatccgaatggctaaggaggataggaagcataccgcttttgtaaca

SEQ ID NO: 157789 - DNA, 576 bp, Zea Mays
ccgacatgcttgggggactctgcagcttcggatactcctctgtctttgaactctttgtctctgctttttctgctggagcgactacagcttaggcggtcacaacatgaattatctctaaacctaaggggtggctttggcgtattcaacaatttctatcttctttgcggcaatcgctgtagcagtcttctctaaagagtgtagcttcggtctatgagtcaaaaccttagctctctttggcttcgacgcggcggaagaggacatagttgccattttccttttcgaccttgtttttgagcgggaaaatagtagccaggataaataagtccaatcacataaaaaactctcttcagtctccttttgcctcgagcaccaaaggcagtgttgatggcttcgtcctccgacttcgtataagctcccagcagctcatcactggtcgcctcaatgacttcaagccaatcatcattccactcataaaactgaattctgtagcgataggtgtatctcagataaaccagaccaccttcgctggagccagtagcggtctccttcggcatctcccagtcattaacaagcgac

SEQ ID NO: 157790 - DNA, 766 bp, Zea Mays
cccgctcgcgcgcgaagtcgcccgcgcgctcccctcgctccctctcgctgacacgccaaccccacccgccagcccctctcgctcgcgcgctttccctcactggcagactggcgccaccggtcagccgcgtcgtcttcctcgcgtacgacgctccgccgtcccctcaccgccgtcccctcgccgcacaggaagagttcggcaccgccccgtcctccccgcttgaccaacgtccttgcccggtaccgccccaccgtggagtctcatcggtggcgctgtgcggcattaatgtcggcgctgtgcccctcaccggcgctcgccaagctccgccgctccccttccctcgggcgcctataaaaaggtcgccccgggcacctccttccccgtaccggcctcggccactaccttcctcccctcgcccgagcacaattcgtggagcaccactgtcttccccctctccggtgagtcccccctcctctctctccctctccattggtccagcgagcaattaagtgaactgagcagctccctcacaaagccacgaacccgaagcaccacttcccagccctagtccctcacccaaagcccgccggtggcgatccctgtcgcggagctctgccacctccccgcggacagccccctcccaaccccctctagccaaattaagcctacccctagaatcgccagcctctgcccgtgctaagccacctccccgtggaccaagaaccgggccaccggcggcgaaccgccgtcgagcccaccggcggcc

SEQ ID NO: 157791 - DNA, 313 bp, Zea Mays
aaatgttctcctacatgtaacatattcatgtgtttattttgattttcccatcatagcataaactaaaagttgatatgtgttgttcattgaaactattaccatttgttgctttttgactttggggtataacgttctctcccttttatgaaaaagaagttgccattatctggtgtacctgatttaattctcattagtgcttggattttgaatagtcaattatggtgccaacagccctgttatattctgcccaccaggtgattcatgcaagtgctcacctcccaaagatctgaagaaagtaagaaaacaaattgtc

SEQ ID NO: 157792 - DNA, 687 bp, Zea Mays
tccatcgccaacattattattatttatttctccttcctgttacaaaaaatatgtgaccatacatactcatatgttccaaatagtttatgactaaaaaaattgaattttattacctggttttcctcatcatcactaacatcacatgactcattacatccaatgtctggctctaatcggcatagaacgccatcaagctcatccaacacatccattgccttgtcgtaccctacttttgacatacacgcctagcgaacaactttcattgttttcgttagcaatattttctgtctgtatgatttagtaactccatcctttcccctgaagctcttatcaattctttcaaacggtacatcttgtcttgatgagacagtgtacctttgcaatatatactttgaaggtatcttttcaacttgtagatgcatgaaggctcttaaaagatgaacacataatagacctgaaatcatgaagaccaaccattatttttttaatgatcaacattattttgtactacaatcaacaaattatataatatgcaattttattcgtataatcaagacaatatgtacaaacctgtatgttcccactgtttgcactcgcatgtatactctctagcttctatgtccgctgttatcttgaattgatgttgtccccccacaattttattagatctttttgtatgttttgtac

SEQ ID NO: 157793 - DNA, 511 bp, Zea Mays
aggtcgatgagcatcctaagcacaccagggtgcagtaacaagagagaggagggcgtgaatagacatgtagagagctgggcacgacgagctcacacacggcggggttcttgactaatttggggaaaatcccaaattgggagatgtgggggacgattggaagtgagggctggttcactgggtgcacaattacttagccgagcaggctggggtaccaatttataatgtccaagggcggtggctcctaattttggcatggcgtgctggcggccagagagaaagacggtcactggtggctcaatcgtggcgttcaccggtgcagcggttctgagatggtaagcctaggcgtgccacggttactactgcacagtaaagagccacgacgtggcataattgaggtcgccgaagttccacgacgacaccgatggtccggccacgttgcacgactataggcgcggttgataagcttcaccctgcgaccaaatccgctccccctcaatcttttcaccccccg

SEQ ID NO: 157794 - DNA, 834 bp, Zea Mays
ctgctgggctcagcacctttggttgttctactgccttctctaattctggctctttgaccgggcctgcactagctttgatcggcatcgcagaagctgtttttgtggctaagggggcagcctctgcattttcaataagcttcggcacatcggtcatcccaataggcttcggcctacgtgtcaagacctccgtcctctttggcttcgacgcactagaagaggtcaaagcaacaactttccttttcccccttgccttcgaacaggaaaacagtaattagggtaaacaaacccaataacatcgaaaaccctgtttagcctccttttccctcgagcgccgaaggcaactgtcatagctttgtcttctgtcctcgagtaggctccaagtagctcatcactcgttgcctctatagcgtctagccaatcatcatttggctcgtcaaattgacttctgtaccagaaggtgtacttgagataaaccaagccaccctgactggagcgatgtgctcttgaactaaatctctggtaccaatgtaggtacatatggtgtactttgaaagcgatgtgctcttgaactaaatctctggtaccattgtaggtacatatggtgtactttgaaagcaatgtgctcttgaactaaatctctggtaccaatgtaggtacatatggtgttgaaggccattaggcacgcttgcactccattcccaattgcgattgatggcctcctaacgcctaaacgtgaccatatgaaacattgaatgatgcccctcacatcctccctctgattcagatcattcttcatgtaaaaccattgtttcatccaagagcccgaccacttct

SEQ ID NO: 157795 - DNA, 617 bp, Zea Mays
agatttaaccttattgggtgtgccttctttttccaagacaagagcgacatccgaaggttcttgctcagtattctttccaacatttatcgtcggccctgtttctgcgggaactgagggctcaacttcagcttcagcacgagttgtaacagcttcaacgactttctcactcatgctgggcgctcctgtcgaggcaggagtttgtacctttgtcgactccatgacagcgtctagcacactggccattctcctcctctttggagttactgcgggaatttttgatacctctgccaatttcctcaattctggctcttcggccgtttttgccctagcttcagcaggacacttcggcacatcggctatttcggcctttgattgctccgttgttgtcttcgaaattggctcttcggctgatcccgttgtggcttcggcaggagcggggaactctggctcaacaacggaagaaggcccctcagtaagcttcggcactctagccgtttcaatgtacctgggccagtgtgtcaaaactttgatctttttacccttcggcgtagtagagatgggaagtgctatctcctccagccctcacaatagaaatatcgcggaaataccttcctttc

SEQ ID NO: 157796 - DNA, 484 bp, Zea Mays
ttgcgatgctgctagtttccagccttgttgcagtctactattccaaggcaatgatggcccttattaatttaacaactgtttcttgtgtgctgctatcagtctggggttcatccatgaattatgttagattttatcaccctctcttggaatgttagggggctaaattagtaggcacaccacgatgcggtgcgtgaattgatctcagccaccacctgccaccttgtctatttgcaagagactaaattatcaacaatctataggttcacagcagatgctctaggagggccaaaactcaacaatttcagattcaagcctgctgaaggaaatagtggaacccagggaggcatccttttgctatgggatagtgacgtcttagtcctatcaatgtaactattggcgagttccacttatctacaagtatggcacgtaaggatcgccgagcctccttctccctaacagtcatctatggaccaacatgtagaag

SEQ ID NO: 157797 - DNA, 628 bp, Zea Mays
ttcttgataggatctccattttcccagggttaacgtttatcggatacatacttgatttgtaatagttgacccttagaccagttgaggttgcaaggaattgagaattgccttaagaaagaataactgctttgggcaggcttccattatcaagagagtatcatcagcatattgtacaataggaaaatcttgttcacaactatctcgcagaggaagctgaagcaaattcaaatgtctggccttgttgataatactctgaagaaggtcagccgccaagataaacaacagtggtgagagaggatctccttgtttgactccttgcttacaatgaaaggttttccctgggactccattgagtaacaccgaggaagttccagaatgtaggatatttcgaacccagttaatccactttgtactaaatcctttatgagtcagaacctgcagaatcagttcatgctctaaagtatcaaacgccttttcgaaatcaagcttcagcacaatgatttatttttttgaggaatggcataaatgaatgtattcgtaggcccaagccaagcaatcttgaattgttcttccttttatgaaaccatattggttcctgtgaactaaccgtgtcatcattgtttgcagt

SEQ ID NO: 157798 - DNA, 834 bp, Zea Mays
ggatggtgtgctcaatggacataagagtcatactagtttgggcagaacgtccctacatatagtctttggttgcttacattactggcacctgattgcttgtagtaggggttataagcgggcgatagagggaaggaccttaagtctctttgagttgtttatctaaggtatgacctgattgctagaggctctaagttgcttgcctgtttgctctcttggagtcagggttttcgattgtcccttctctcttgctagatgtcgacaatcttccttttataggccaaggggagggtggcttatagatttcttctcatgtgagggagtgtaacgttagggtaaaaggaatagtttcacccttggtaaaagttttgccatgtgtagatatctcttcccgcgtgggtcgcctgcaatgcctcggaatccaccaggggagctcgtgatctgtgttggtgaaggaagctcggacgtcgtcattatttctcttcttctccccatgtcgaccttctaccttcgtggcccaaccactggccttccttatcgttgagtaagctcgtatgatgtcggaagactcagacctataatccataggccatgaatgtggcttggccctagggtttgtagggtgttggaaggctcaaacctagtatccacgagtctcaggtggccacagaccaaggatcaataggctatgaatgggaggaagaccagcgtttacccacgtcgcatcctgttgtcaggtctagttgatgtggcgtgtgtgaggcggtcggtgagagcggtctaatctaacaggtaataaaattacatctagcgaatatgagtatgggatattagaaa

SEQ ID NO: 157799 - DNA, 902 bp, Zea Mays
cctagccaccacagtcgttcttatttctctagtcgtgggtcgccaacactcgccaccatgcctagcagccgcctgcccacacatgcacccacccgcatgcgacctagcaaccacctttctatctctcatttctctctccatcgccttcgtgcctcctcactttgcacccaccccagccgtcgcggcaccgttcatcgcaccaccagcaacaagcccacccatgcaccgccacctggacaccgtgccaccgccaccaagcccccagctcatcgcgccccacgccgctactccacgccccacgtgaccatgtcgcacccttgctagcaccgcgccacgtcacgctgctccagcgactgtgccccagtgacgacgctgctccaaccttggccccgcccccaacaacgccaagcactacgcagctgccaagccccatggttagcattctcatgttatacttagccattatagtatactgtagtgcgagggttgagcttctgttggtactgctgttcaattgtgcctctggtcacgcttaaatgtgtgtgttttctttaaacccgttgcatgtgatagataaattagtccttccattgtgagacaactatacaccaaaaaatgttatttgttcaacatacatatttgtattttaattgtctgagtgattatttttgagacaactatagtttcatttatactatttgtttcatagataaaaacagttttgttgtttaatgcatgtttttgagttaatggcacatcattgagactatggacatctaattttttcacttggccctgttgctttagttattcatgccatggcatattatttcatatacgatgtttcttcctttatgcagcaaatgtaactatggtgagagatttttggaacacagaaagtt

SEQ ID NO: 157800 - DNA, 861 bp, Zea Mays
agatggagcacccacattgggatcagcaacagattgggtacacccattgggatcagcgtcagtaaattcagtcacaggcacttcttcagcagcaggaaccgaggtaccaacgtcccgatccaaactggatactcgccggaggcgtctctttttctttttctgctcatcagcagaaggatcaggttgactggctcggcaagggtgcctcgggcgagtactggcaagcttctgagtatccaaagttgtatcagcctctgggaggggcgccaccaccaatgccccagcaggagcagcatcagaagagtcctcagccagcaaatcaagcatagtgcttatctctgcatcactagggtttaggggcacctcaaaatggacctgccgttcatcatcaggaatctccccgagcgaggcaaccaaggcactaacttcttcagcagagggccgcactctaagacttaagctgccatcagtgacaggaggattcgacacaaaaagagtgaaggctttgggaggaggcaagttccaggctgagaatgccactggggcaccaacatttgacactttgcctctaaggatcatctcaagtcggctcaccaagtccatagagggaattcttctgttagtaacccgagttgagtcggctaggcctcgatacagataagccgggtatgccctgtctttcaacggctgaatattcttgaagacaaaatcaacaaccacagcttcagcagtcagacccctctctttcagcaatccaactttagccaacaaagcacctgcctcagctacctcctgatctgtgggagactcggtccagcttggggtgcgaacgtccggctgtcttcccgaccgaggggggag

SEQ ID NO: 157801 - DNA, 1506 bp, Zea Mays
gaaaccaaatacggtgcactgcagatggtggttacaaccaacaaacattcccaggggtttatcataaagatttgtcttatgagttgtatcaaaggtaactgcatcaccaaagtcaatgtaatccgcttgctggctatcatgggaccaaaaaatgctcaaaatctttccttctttgtccagctggaagtcagataaaaattgtgggttatcttttttacacaatgcaaaaagaaagaggagcttagacacatcattggcatttctttctctttgtcgcgctttcttcctgtcaacattaaacaatatatcatacgtcaatagttcaaagcgtcattatgtaattatattagtgtaaataacaatttgacttacaggttcctcacgtcttgtgcagttaacgggatattctctggtccaccatgcatttccgaaacaaaatccataatacagtgttgcggaatcctgctttcttgcatcgcactaaggaactccatgtatttgggatcatgtgtcttgttgcactgtaactgattcttttctgtatccttcctgaagaactcatgattatgttccaaatgaatcagatcaatctgcaccgaaataatattctctttggcatcgtcatagattttttttaagtttcattctagctttgcattgtgttcgcttggaacttgtattacgcacttttggattaccagatcctcttccggcacgcttgccttctattgaacaattcaaccacttgcaattttttctctccctatatctcttcaacggaaatccaacttcatatgcatatcggctatagaattggtacgtcttgtccacattagtaaatgtcataccgaccttcggtaccaatcgttgatctatactatcatcctattgaattaatggagtcatcatgcattgcacatatacaaaataattttatagcatgctgaatttctaggacttcataacttgcacggacagtatatcaaatatgcacaaattctgacattatcttactgaacttacatggctttggagaatgtggtgtgtcctgctcatgatcaccaattgtcctcatgggtatccggtgagttgctcccaccaaacttggatgaactgtgttgctgtcatcaaggaatcatggcgccggtaacgcagccagtggagttacagcatgacgaccatcagacccacaaggtaacgtcgtcgctgtagcctctccacactgcaccgatccactagtcgtcgccatcgtgtataccctacctctcctaggtcatcaaacaaagcggcgacggtgcgtagcccagtttttttggagttatcctactatattcgccaaaaccgtccttgtcgatattcatggcatgttccaaatatcccgcacgattcgcatgttgcgagatttccgtgagtcgacacggttacgattacctgccaattgtgttacaacaccataaacacggctcaaccccacgcgcgaccccaccacgatcccagtgaacaagc

SEQ ID NO: 157802 - DNA, 306 bp, Zea Mays
ggaggaatggagaatgggctcggacctgagccatggatggggtgctacctgcgccatgctccaatggagaagggggaatagccatgggagaggggcgctggcagatacagccatgggagaagagaggggtgggctgtaattatagagcaagctctggatatgccagacagcagcagcaggtgacagtggtggcagagcgactttgggtggcatgttttgacattttgcttttggaatcgaaccttggttgctgtacaaaatatcttccttgatgtataatctacaaatcgtgtatagagattgagg

SEQ ID NO: 157803 - DNA, 670 bp, Zea Mays
ccatccgatcgggattctctggcctggattgaatctagactttaatgaaccggtacgcgactgcagccgttggatccgtgatccaaggcccagattcaatgctctagcgtcacttgtcatccgtccgatccaaatcggacggctcacaacccccaaacccgaattagtatacacgttctaatcgtagccgctcctttttgatccaacggcgcacgatcgtcttcttccacccgcgcccaaacgcggcggtgctgcctagagccgcggtggaggctcgccggcgcgcccgcgattcaacgtctaagtgcccctagtgcaaaattgaagggtgctacgccacaaggggatgaaggcgaatcgtttgactaggtctcttaccgggggaatggagtgcagaagctcggccacggcgaaggcggatccgcggcagagcgcaggtcgacggcgaggaattgccctggcgcagcgatgccccgcttgaaattggtggtcgccgaggttcccaggttcgccgccgcagccctggaacgccctgcgggtgcccgagcgacaccacccacgagtcggacggcggtggtccgaaattctctctccacctccctagtctctctctcacgatttcctgacgaggctggctagaggcgtggcgaaaagggagggtcgggtcctc

SEQ ID NO: 157804 - DNA, 659 bp, Zea Mays
tatatcagcagttcagcacacaccaatggccctgacaaaaaggttgcggcgctgtcgttgcaaacttgcaccgtactatgtgcgtgcggtgtttccacactactgtgtgcgtgcggctgctgcagcagcaggtcttgccgcgcgagtcgcttcaagtggaaagccgctagactagggtagtagctagcagttctcggtgctgtttcccacttccgcaccgaaagaggaatgctttcttgcttgcttgcatgcatgattgtccgtcctgccgctaccgggctggctggctcactgagcattaggctgactccagcagtaatcctatctcatcctctatcttaaacttaccataatttacaggatatctactatgctaccagcattattttcatcgaccgatcaacgcacggcctaaccgacaccggcagccggcagacggctgttgaatttgctacaagcaccgttcactcacatgttacaaggtgccttgcctttagtaagctacgtggattattccatcatgtcatgtgtagtgggcggcttttgaggtgtcgtgtcagatctcgacagggcacatgaccagtcgctgccaaggtctctagaaatatcattaggatacttgccaagttttagacttctgaattttagcttcattttac

SEQ ID NO: 157805 - DNA, 905 bp, Zea Mays
cacaggggcagttcatggggctaatatgcggcgtcgagctctcgttccgagagatttaggtcggcaatgatcaaacgaccaccacgatgagcttcagcaacaaacgtaaacaatagaacgctaaatcaggggcgcagaaccgtaccatgtacgcctggccacgcgaggctgagactttgatgacgtggtcaccagacacgcgaaactacacggctagagactagagtgttttcagggtatagcttgggggaaaatgaaggcagcaatagggtattgaagtcacccacaacgacttactacaagggtaaggattctaccttttctctcttcttattttcccccggttacccttttatatggacagcgccgcttcatacgatggctgagttcaaagattggatagaggtgtcaaactgggtgaggctgtcaattgcatgagcgcgagtatgtggctccattccaagcatccacgccggtcgcatgaacaaagcaaggcaggaatagggtagattttattgttgttacccccatcgagcacaacagataaagttgccagaataaatgtctttcagttcacctgggatatttcagtactggttaaagtctggaccgcccctgcaattcacctcatccatatctcttcctttacacaaaagtgaaacacggcagtgaccaaaaagtcttctgtagatttttcttctaataacgtgaacttcattacttgacagaaccttctctgttcagccccctttatttcttgacacaacaacaggtcaaccaaggctaaccaaatatgctcacaaaacttaactctacaatcttgacacagcaaccccaagccaaaagctcacagatcaagagttatcctactccaaggttaacccaaattcactgcctcaataaac

SEQ ID NO: 157806 - DNA, 421 bp, Zea Mays
ttccaatgaccttgagccagtcatcggcatccagaggatcaaccgcatgggagaatgttggcgggtgatgactcataaaatcccggtgcttatctctggccggggggtgcattctgctgttgatgctgatgctgttgattctgctggttttgctgaatttgttgaacagccgcagtgagtccatgcagaatctgcatctaggcggcgatgaactgctccatgttgggattcggtggtggtggtggtatttgttgaccacgctggttccggttgttgttgggtccttgacgtgcgttcaccatctgattggttaggaagtgaaatccttagaaaagtgaggagtagaaaagattatagaggggaacatcctaagtttattattattttttatatgatcttatggccatcattccataagacc

SEQ ID NO: 157807 - DNA, 895 bp, Zea Mays
gaattaaacaagttctaacaattattttcacattaaaaatcattttctaaatgattttcccagttttattatcatctggaccgagctactaaaatcagaaagtttagggtttactgcgcaagaattctgtgactcagcgcacatcagctatggaccgcgggtttatttttaataaagacaagggctcttttgcaattagtaccggccgaaggggtatcggggtcttacgatcgtccgattcccatccaacggccagccacacatcctggccgagccgttcacctggcttctaatccccaccacagattgcaagatcgacggcacgtacccctttcttcccaacccgcgcccaaacgcgatggcgcccctgcgctacggcggcgccatggccggagatcgagaacccggcccatacggacaccataacccgattcactcgtccctcgcgcaattgacgactctctgaacccactgctacaaccaatttcggctgatgtcgagtgtagagcccggcctacggcgcacggcggaagcccgtgtccgacgaccaactccgggccgcggaccggatgtacacgaaccgcaccggaagatacacactcgtgaaatggaaatgcacacgtaggacatattctcaccggcaatcgacagggcgaaggggttgttccacggtggccgaatcccgcgcggcaacggagaactccctggatgcgcaggttgacggcgtcgggcaccaatgtgcttcgcgaattggtgggcgaggacgagcagtcggggcaccaaggcgcgaaatgagtcgatgcacgaatttccctggtcgcccagccgcgcggcgacgagtctccgcccgtactcctttttccccctccctcactatcgattcacggtcaatccc

SEQ ID NO: 157808 - DNA, 396 bp, Zea Mays
cagagttctgctgattgttgaatttattctgctttggatatggatagtcctttataaagtgtctggactttccacagttaaagcatctagtggaagaactaggaagagtggggaaatgagtaccaggggcactcggctaatttgtagaagtggggcagtggtaggacgaatgaaaacaggctgcttgaacggataggagggtggacgaggcgaagaacgattctgattaaaaggtcggattaccaacctggttcgcttctcaggtccctgattagacctgtcacctccaaatccctttgattttccatggcctgtgttcttagcttcgactgccagtgctgtgctgatagctcggttgtaagtaaggtccagacaggttgccattttcctccgaag

SEQ ID NO: 157809 - DNA, 486 bp, Zea Mays
ctgatggctgaggctgctgtgtgcactctgtatcagctcggtcgctccaaaaaatgaaaaatcccagctggctacagtgctacgccactagtactccattagaaactagaggttgactgacaattcgccatcacttgttacccacactacacggcataagaaaggtgtgacttttgctaacgattctcgaaaaaaatcggagagatagtagaatccatcgctgtcgttatggttcaatcgtccctatcaggtatgtacactcgtagtcgaccatctaacatatgcacggagccaccgagctggtgtgtcctctggtgaagaagggaaacgatggagcagcgccatgttagttgtccccgtccctacgaaagaaacgcagaaattgttgaagtgggtcaaagcctaattacattgggaacgtagagcctccgtattcatacgagcacttaaaatctgatgcgtttgtgagagattcaatggtgatcg

SEQ ID NO: 157810 - DNA, 709 bp, Zea Mays
gatatgtagcactacatctttggtacagagactgggacctgttgtcacctgaaatctggagaaaaaggacgctaaacttgctctgtcaggcggtttttggatgggattcagaatgaacagtaacctgcataacatcccgattcaaggaccctggacgtcggtgatctctacgccggtaatctcctcaccgtgattcacgccgatatgcgcctggataagagtggatagctgtccacggtgaaaatatcgggggagggggatggatgtggtctctggcgcgagctcatccgcttcagccagttgctcccgtggtcggccgggacgccatcaccggagtttgatgttcctcgcggccacgccacgtaactgagggtgttaccacgtagcgtggagtcgtggcgtgaagccagttactaccttaagccattgctccactacgcgccacggtgaacacgctccagcgaagatcttttctgtcaccaccgtgtgcacttccgtcccaaattcgcgaagcaagaaatccatccctttaaattgaggacactccctgcttcgcctcgctgttacgcgcacagcccacccctcactgccccagttcattcaccacagcccccagtcactggtttttcccgagaaaggtcagtagcgccgccgtgtggagttccaccgtggtcagtcctgtctgaggtaatcccagcccaactactat

SEQ ID NO: 157811 - DNA, 636 bp, Zea Mays
cttcgtcttcggatggttttgcctcaatttgcgttttaatttgcgtttttggagcttcggcaggtttcttcggagtggtacttgaagactttattgtctccagtacatctagaacattaaccatcctttttcttttgggggtcactgctagacctttctgggtttttgacatttcaactcctgcgaaggacttaaaatttctgatgctcttgtcccttcggctctcggctcttcaaatttttcaaccttcagtgttgctctcagctcttcagttttctgtgcaagcgcaggttctttggcttcagtagccgaagaggtctcactgacaaactcgggcactatggccggttcaataaagcgcggtcggtgagtaaggactttcaccttcttcctcttcggcgcgggctcgcttggagcagctgaagcgtcatctttcccagaagttgcaccttttcttttttgcccccgtaacgggtagcggtagtcagggtacatgaacccaatagcatcgaaaactctattgagtctcttctttttcggcttctgaaggccgctgatagagcattatcttctgttttggagtacggcccaagcagttcatcacttgtagcttcgacactcttcagacaaaccttc

SEQ ID NO: 157812 - DNA, 617 bp, Zea Mays
attggatgagagatctaccgcacagatttaaaatatccaaactgttttccatccgccagatcgggatcgaacgaccacggttgcatcatcgccaaccggtacccgaatcagatcttgaccgttaatccctatcaacggtcgcactccttcccccaaccctcctacctacgacgcacatgcggcgacggccgcagagcccactgcagaggagttcgccgtcgaactccgtccgacgaattggggccccaaattccaaatcaataggtgttgtacgtagagaaggatgaggcgaagctatgggttagcagactacctgcgagaaaggcgcccacaaggctggccacggcatggtgtgatcgtcggtgatttcccaagtctggtgagaaattgggttggaaacgggggtcgtcgtcgtccgtcaatgccacgatgagccagcacacacccaggcggccatccctgaccacagtgcggacttcaatcggcgatgcaggccaaggactgcgacggtgactccattctcacctcccagatcaacggacggagtcgtttcttccccataaactacagagcggcggcgggctttagtttgtacggcggcgagcccttgtagctgg

SEQ ID NO: 157813 - DNA, 656 bp, Zea Mays
ttcgttttcaagaacattcagccattaaaggacagagcctacccggcttatttgtatcgaggcctcgctgattcgacccgggttaccaacaaaagaattcctgtagtggatttggtcagccagctcgagatgatactcagaggcaaggtgtcgaacattggtgctcctgttgcatactcggcctgtaatctgcctccttccaaggcttttaccaattttgtgtcgaatcctcctgctggtgatagtggtttgggccttagagtgcgaccctctcccgaagaggttagtgctttggttgcctcacttggtgaaatccctgatgacgagaggcaggttcattttgaggtacctttgaatccaagtgatgctgaggtaagtgccatgctggatatactggctgaagattcctctgacgcagcccctgctgaaacactggatgcagcgcccatcctagaggctggcaaagctttggatattcagaggtctgatagttttcacccgaagcgtcctcgccgaggcaatcaaccaacttctcctactgaggggaagaaaaagaagaagagacgtcttcgccgagtgtcaagcttggatcaggatgctggtccttctgctcctgctgctgaggaagtgcccgtgccagtttttgctgaagctga

SEQ ID NO: 157814 - DNA, 382 bp, Zea Mays
atttattgctgatcgctttgatagataacaagttgacatggaggcgtagacgctcaggctcagcgtcggcgagctcagcatccgacaaggacgccaccgtcgccatcggatggggtcggcgcctcccgcccggaggccggactactacacatacacatgcacttgtgtacaacaacttgcagtgcagtgcagtactacagagggaatcctcgtcctccacacgcggtttcatgttccacgacggccggcgacgccacctgacaccaaccctctgagatctgtggctgcttgcctcttccttggattggatcattgattaagtagtataccagtggcattaggattttgtggtgcgtgcaagaacacaggtgctaccttccgc

SEQ ID NO: 157815 - DNA, 973 bp, Zea Mays
acggtgcattatgggccgttcgattagatatcaacacgccagattggatcgacttcaactaaataggtacgcaaagatagccgcacgatcgaccctcaatgttccagatttaaatacaaaagaaccatcgagatccatctgatccctgctcaatgccctatatcatcccaacccgaaacgatactcagatctaatctagaccgtatatgagtagatcaacggatccgggacgttaaactaaacgagtgcgcccggtatgatctgcaccatccaataaccatctaatggtgaaggcgatcgtcttcttccccggaacatgccacatataggatagcgacggcgcgcgtatcacactagtgaaatggaccgacgtgaccctgtccgtggactcgcccgacactacgcgcacattgaaggtttagcagggaccgagcaggggaactcaccgctaatggagagaactggccgacaacgccacaagggagtggacaatttgatggcggcgcacgatgatgcccggccgaattcctcccccgcgtggtatagcaggtcgccgaggtctgccccgaggctctacccgcacgcaccactgctctgttgaccgcaccagacctctacgccccttccttcctcctctcttcttcttctcgttccgcggcaatggcaagcagacgctctcacggagatgctggtggattaagtgcgcaaggggagggcgaggtcaaggatgttcatataggcgcgagaaccgggctggggttagctgatccctcggtcagttgttgaagtccgcccatcgagcagcgctcagcccccagaaagtcgctggggtttgttggggtagctgcgtcatggtgacagagacggggttgcggagggggtcccatgccgcggtgacttggcgagagcctggccacatgggcccgctagtcagcgcatgacgtgctcccagacgggcagggcacaggaagaa

SEQ ID NO: 157816 - DNA, 392 bp, Zea Mays
ctactatcgggtacccaggaacgaggtactcagagcaagcccataatctctgattctggccagcatgccaggactccgccaagcaagtgtgtgaggcagaatggacaaccaagtcttcgtcgggcaaggactataaatgcaggacgaccaagtccctgccaagtaagtctacaaggcagaacaaacgaccaagtccccactgagcaagtctgtgaggcggaatggatgaccaagtccccactgagcaagtctgcgaggcagaaggaacgaccaagtctccaccaagcaagtctatgaggtggaacgaccgaccaaagtatccgctaagcaaggcttgcaaaggcgggacgactaagtccccaccgagcaagtctacgaggcggcacagccaa

SEQ ID NO: 157817 - DNA, 727 bp, Zea Mays
tgcaagaaatttcagttgagcagaagattcaatccaaaggccaggttgctacaacctggtttggcttgagtgctcagttcacaactatcttcggctagcacatacaggtcaaggtggagcattaggggagcggagaagggtagtagaggagaggagcagatcatactttgagctatacattgaggtggtcgttgttttgtagcaaccccacgctcggagtcgacgacgtcggggtcagcggcgtgctccaactaatcttcaccctcctccccgcgctcgcgatgaactaagcatccttgtcagcgtgggcgtcgacgtcgccatgggcgtcgccgcggagaaacccgttgtaatattctcccttctcgccgcaaaccaaatcgccctctctgcagaccaaatcgccttgtcggcatggataaaagcacaaatcacgtggaaagataagcatcacatgtgatctttgagtgaaacgacgaaaaatgtaaacttaagggataaaacatatatacggaacgagaaacatcactatactacatctgaactcatgaaagcaggagtacatctgaaggcagcagggtgcaacaacaactattgtaagattgtcatcaaattctaagccaaattaatttgcacgccatttgtactgctctcgtcctgcaccaatgaaaccccacttccatcccgacctaactaatgtccctttaaagctcacccaaatatccat

SEQ ID NO: 157818 - DNA, 835 bp, Zea Mays
tcctaccaaggaaggaagctctctgatttctaggaactcttgctagcacatgagtgccatcaatggcaccaatacagtcctacacattagggaaaacatttgttactacaaacccaacataaaaaggaagggatcaggagtggtctgtttggagggctgaccttgaaataagggtaccatatgtggctatctctaattttggttggtgtagcagttgaaggtggcaagatcatttcatttctcagttcaccaacagcatacaatacttccctgaagtatctgctaatggtctcaatagaccttcgaaaggtcatatgtataactctaaacctttggttatgacctaccacatgtaaaaacatggcaacctgctcctctactgagctatgaatgctatctctcaatagctgcctagtgcgaaaaagttcacacaattgcataaaaggggctcttctcatcctgagtaagtcaacacactcaacatcagtggattcaaaaataaatctcaagttgttttgcctctcttggtctctttggtgcattgggccataagtgatagacctcctagcatgcattcggtgcctcaaccatgcagccaaccaggctgacataactgctacaaggaccactgcctttgtaattagccgacgacgtgcaatagcaggatccattgctagagtaataaaatataaaaggagattagaggtctaagttggctcacatgtgttgtgctagttgctaaaatgtaattcatagaacattgatctatagctcaaaggcacactagcatcatagaacattgatctatagcttagaaaatacatgatcaagcatg

SEQ ID NO: 157819 - DNA, 1062 bp, Zea Mays
atgcagacgcactggaatttaaaatgctgggatttaatccctaccggctaaacccagatcgacggtcgagatgaccccatgccaaatcggtacgcagatctaatcatagacgtacaccttcaatccaatggtccctgatcgtcgtccgttccaaccactgcacacgacggcgccgccgcccaacccacggctgagccatcaccggtgggtcttaactacgactctggtgccccaaactccaaccaaataggccctaaacgatgcggtgacaaatgcaagttcgggtaagcgactactaccgagaatcgtgtgcgcagtcgcactgtccacaaccaggggcggcatcatgaaggatggtttgcaccggcgagcaattccaagcccgtcggatggtaatacgcccacatctttacgcttacaccttctatggggcccagtctaccacccgaaccgagtatcaggttgaagtcgatgatacccccacggatcatcgacgacggatcgattcctcgccacccacaccctcggggattctctcggttactaatgtccattctcctggagctaggcatgggacagactaagagagggacgcgaagcagggcttggtatttattcgctgaccaaggaattcgtagactctggtagcggagatctcacttgatcccaacaactcaaggtagcggccgtggtgaacggagggggaagaggagcaggtggccgggacccacatgtaagtgacttcgagcgaggaactgggagcgtgcagattccgaaaggaccccagagcaggcggattccaaggttgagtttgttagcgcatcctttggtttggttatgatggaggagatgaacccgacaggagggacccaccagccaatgactcaacacaagcgcgcggaatgaacatgacgtgtgaggctagggcgtgggccctgatgtcagtggcggcgatagctggctcaggtgcctgagtgaggctgcctgcagggccgattcgttggtgcctagaaatggggggttgggccaagggttatgggctagaatcgaataacatagccc

SEQ ID NO: 157820 - DNA, 803 bp, Zea Mays
ccaaagctatatagttggaaatagagcggatccatccctgacggcgagaaacttgaatagattacgacaaaggcgcaggagcggtacacacacagcagcacatgacattgcacaccgcacgcgtgctttctcctttcatgtgacctggcgtcctgcttcggcttcctagtcggcgattcagaacactgccttcaacgtctgaatgaatgaattggaaatgaaacaccaaggcacgtgctgctgagcacgttgcctgcactgctggatgcacgcacacgtacgacacgagggcttgacacgttgcgtgcgttggttagctaaccgaatcccagccagcggttttgccgccataaacgtgtgaaacaggaggcgtacgtctgctgcttggcggcgcgacaacaacgacgacgaggacgacgacaagggcgaagtttggaattgcttcgctcggacgaccgtcgccctcgctttccatttccagtttccgacctccgtgtccgtgtccgtgtctatataaacggcatcgccccgcggcttctcacccccctcctcctcctttctccctctcctcgcctcctcttcaacttgaagcagcatcgtcaaccctcaacagcccttaatctggctggctggtagcttaatctagctagctaggcggtgaacctgataatgttcttggactccggcagcttcttcttcaagttcaacaccgcccccgcgcaagcgcttctcctcctccacagtaggaagagcttctatttctggatcttccacgtcttcaacagacaccccctcctcctgct

SEQ ID NO: 157821 - DNA, 1010 bp, Zea Mays
gccacgaaccgaagcgcctgaggcacggtgcaattgcgcagggttagtgctcatagtatcgcttctttgtttatgcgcgcaacggccggtacccatcataattttcgatgcttctcttgcgggccaaaaaacatgcagcctctttagattgcccggtctttgagacagctgatgcccatcgcattatggatggtgaagacgaaatagccccgtctaaccttccgggaccttctaaccagccgatacctacgctacaaggaacacgtgcgtacaactgtgtttatgcagccattactgcaacaaaaaaatggtgttagtgatacttatgtcgtcacaggtcgtagatctataatgtcattcccttcagcgcttgccacatccaataggctacaccgacgcagtagagtacgtcgcatggtaactgaccaaccattgtcaaccacgcttcctttggacaagtcatacgtagatgctctaaaaggtatgtattatgcccaacatttctggtaacattcttcctactttgttgatgtgctaccctttctcttcttcctatgtagatgcctaccctgagaggtcatactacggtggacctgaacacatatgcccatattgccacgctgttttctggttccaagagcgtgtcaaaaacgattccttgtccacccaaaggaaaatcgtgtacaacctttgctgcaaaggagggaaggtgaacctaaaaccatttgaacgcctgccgcctttgcttgctggtcttttgaaatttaatggaggtactcgctcgaggcgtttcttgaggcttatccggtcctacaattcattgtttgcattcacctctttcggtgcagctatcgacaaaatgataaataacgacactgcaccttatgttttcaaaattaatggggtggtgcaccataggattggcaccctacttccacagcgtgggacacagccaaaatttgcccaactgtacacatatgacaaggaacatgagacccagaataggctag

SEQ ID NO: 157822 - DNA, 522 bp, Zea Mays
tggttctcttcagttttctaaaaatttgttcgccagtctcaaaaatcggctcaaccgaactaaaaaccggctcaaccggtttttgcattgttcactctgtcactttctgacctgccagactgctagtcagtccagtcaaaaaaagttgtgtgcagactgttggaaaatcggttcaaccggttttggaaccggtccactcttcggctgagtcagccagtgaaccgagaaccaccctggtggaaaccggttcaaccggttttcagttaggattccccaacgaccaccagcttttgggggctcctttatatacccctcacactctctctctcttcattcacttctgccctctccacgaattcttggctgaccaactctcaaacaagagcattcaatccacctctcacacccaaaatcgcatctccttcaattgattgaaggacccttggtgtgaggtgaagtcggtctaactcgttgatttcatctcgattctccctttctcttcatctctcgagctcatcgcaa

SEQ ID NO: 157823 - DNA, 948 bp, Zea Mays
aatggcatgcacaaaaacaaggtcaaaccagtagacggagtggaacaaagactcaccgtgctgatgtgcgatatggccgtcgtatgttcttctccactgctcaccctcgctctggacgacgcgccgctctgtagatagggtctcctgctcaccctcgctccggccgatgctatgcctgataattagtaatggttaaatagaaaaatcatatctcagcggaggtcaaggaaaaacaacgacctctctctctctgtgactgacctgcaggtcgcctagatttctgaagactctcttgcagagatcatggagccaccataggcggaggtagttgaggccccgctcgggagaaggagccaccatgcagtcgtggaaggggtgaggcaccataagcggctgcatttgcggaaggatactgacgagctgtaatggttggctgcatttgcggaaggatccattgcggtagttgagccacggaattcggggcaggtgggcgggcaactgaaagcttctgcgcgagccaattctctgcagtctgcatgtacccagtccagttgactgaacatgagaagcgaaggcgctactctctaatagtgggatttcaagtggagatgaatttcacttttatcgatttgttagtgagcgaatattggcatgcctatcgtttcatgtgagggtcggtcatatgtgtttcaccttcccttttgtagtgagtatcattacttgttgtcttaaaaacttgttgtggcgcgtaacaagagttacctgtgggaggcctatgacagtgctcttcatttctcaacatccagtttcttcagtatagatgtggaataggaaatctgatttgctgaatactaagatgaccagaacaaaagcagtcagtcagtttggtggatgcgcattgcaaatgacagtcaagttgcatgaaagaaatcggcaagcaaaatagac

SEQ ID NO: 157824 - DNA, 360 bp, Zea Mays
caaagaggaccccgggttcttggctaactggagacaggttcttccactgtttcagtgagtcgctgacacattacagaaaactccttcaggttctaatccttcgcaggtgaagtccccgacgacgatccaagctaggagccaagctccgacgaactagaccgcccggatgatgctacagctggagctcccaagcgacaggaaccagattagactccatccgcacctttccccccaatcaatttcgctagaggtggtctatcatgctctggccacggcgtcagtgcgggtgatcaagtggattaaggtgttccggatcaccgaaggctgggctggctaaattgaagctagggaaaggttcct

SEQ ID NO: 157825 - DNA, 335 bp, Zea Mays
ggctgatgcccttagcaggtccggggttccgaaggtggccttgtcgttgatcgctgatctggaccgtgtggggatcgctttgtgttatgtcggcaccgctagcaaggagactcagatgcttattcaatcctctctcatggagagagtgcgtgcggctcagtagcaggatcgtctattgtaggaagctcgaaagagggtgggtgatggtaaaccgcgggagttcaccattgatgagaatgatttggttcgtttcaggggccgcctctgtgtgcctcagaaatcagaggtgaagatggatatcttgagagaagctcataaaacgccttacactgtcc

SEQ ID NO: 157826 - DNA, 396 bp, Zea Mays
gtgatatagtgttgtggtggaggatgcatcaaatgatggggaagctaccttagttgtgcaaactacttttaagaactccatttttcttactaccatcaaagacggtccttctcattctatggttgaggataatacagaacctgttttggtagaggacacaccagttgatgatgaagctaccttggtagtgcatggtccttctctttctatggttgaggataatatagaaccttgactggtagaggatcctccgatagatatagtgtcttcttcatccacaagagctagaaaggatgaggaccttgcatgcccgcctttagctcccccctcaccatcaactacgacagttaggcgttggtgtaagtcctataatatctcgtcgcttcatcgaagtgc

SEQ ID NO: 157827 - DNA, 692 bp, Zea Mays
ttcaaatcgctttgtcaggtcgactgaagaagaatgtcatggtacagtgatctgaataagatcagatcgacagctcaaccctcgccgccgacgagccacgcgcgattcgtgccgttgtcgccgcgattcgtgctcggatcatgtggatagcgcttgggatcgagtaagggtcctcgtcgtggataactccggctagtaaacaaatctggccaccgtaccgcactcaccacggtcactccggataacctcgctggtgactgccaccttccggccttgtgccacgtgcctgagcacctccaccgcatcgccgtgacccattgtgactctctgttgatcaccggaatgactgccacagtaataggacaccaatccacgtgctagtaactttccactcctccgatcgtcgcgcgtcgtcgctcgaattcccggccaccgctctcgcttagtataaattgaccccgccgtgagctccgtaggatcatcacgcacccagccaccaagtaatgccctcagtcgatcaccagcaagctccaattttagatttcccccaaaaccttcaagaacaccgagtgaattgatctcgccgtggtcagccacttccaggtctactcataccttttgctccctcgtttgagtgttcttatgttctcgtgatgctcatcgacccacccaattgatctgagctgccttag

SEQ ID NO: 157828 - DNA, 1159 bp, Zea Mays
ttaccatacaaatatcagttaactaatttttattctcctatatgaagtgcttctgaaagtggaagtggaaggggaagtggtactggaagtgggggaagtgcttctagaagtggaagtggaagtgctccaagcacaagtgctcttgcatgcgctcctagaagtggaagcacaagtgctccaagcacaagtgctgcaagtgcaagtgaaagtggaaggggaagtgtaggaagaagaggaagaggggggaggcttgcacaatggtttggaatttaatgatcaagatagcatcatgaggtgctgtttcttttgtatgagatgttgcttttgtatgacaatgtaatggattcatggtactttgtcatgcttttgtgagacttttgttgaactccatatgtactactttgttggatttgttatgtgacattgtgttattctatatctatctgtgttgttgaaaatactatcgaaattctgttgcaatacagtcaaaatattgtcaaaaagctcttgaaatactgctaagctgttgtgtgaaaatcaggggtaaaatcacaattacagaacagtccaattcaaaaggagggacaaaatcacaattatgactgaagggtaaatttgtcttttgatgtcctaattcacacagttactgcatctaacagaaacaggggcagacttgtatttcgttttcaaaaaagaggcccgaaatcacaaagtcgaattttgaggggcaaaatcacagttgcactttcatccagggacaggaacacaattgccccttatttttattagtcagtagtctttgtttttttttcggtctcaaagttaggtttacctgctctagtggagtttggtttcaactttagcccatctagacatctgaattgggcccaagttttccgtgtcttcggcggcctactcctcgactgctgcgtgtgtccagttttctagctaacatgtcttctcctcgattgcggctggactggaagaacaatttgctaatcccaccgttctaaaatatatggaatcgaaagttcaaaatctaaatataagatacaaaaactgctatgcaaattcaacactttccttctaaagtagaccatacgttttctctctaattcatggcatgcaataataacacgtaatccatggcattttcgtc

SEQ ID NO: 157829 - DNA, 892 bp, Zea Mays
gttgttttggccgccgaagctgagggcggtgtttgtttaatttcttccattacatttacaattcatcgtttcttttgttctttaactttctcctttgtagtcgaaggctattctttcctctataaaaattttgtcagttctgatcccagaggacttagcaacttgaagggcggggattcagtcattaccttcagaatttccgctacttcggtggcaaagggcgtcggaggagcttcttctcctgtctcatccaccttcagctcagaagagggcgttgtgtcaagcttttgctttttagagattgttgccttcggctctggagctgtttttgttttcttcaaaactttttcatcttccttcactagctgagcagcttgcctactcaggatgttgacaatcctttttcctttcaccccttcggcccctttgtcaagcctctcataatccgggtattcgaagtttaatgcgtccatcacctgatttagccttcgtttcgaccgggtgccgaaggcagcagtcattaattggtcttccttcttggtgtagttgccaagaatttcgttacacatcgtttcaatcatttctagccactctttacatggcttcttgaatttcttctcaaatttaaatcgataagggagccgaacaagttcgtactcccccctcctttttcttaggcattccccagccgctagaggtcggaaatattctatttgccaagtactcttgtactagatctctagtgctgatttcggtagctaccactctgaattccacttcggctagctggcatggggagccaagctgcatgtggcacaagggccttgtcatcccgaagcttaatttcaatggactcatgaccatagtcattagcttctcccttttcttctca

SEQ ID NO: 157830 - DNA, 829 bp, Zea Mays
cgcatgtatatagtatattttgtcttgaaataatttgataataatatcatagtttgttggattttattacatatttaagtattaatattggtcaaagacacactggtatccttttggaggaaatatttctttaattgcaccgtagactcatcttaggccttgtttggattttttagataatggaaaaatagttccggccttctcctccgtagagggtccgagccaacagctacataaacagcatccacacgaacaccatagctaagcacacatgaaactgaaacaaggggaaaccacacagggcttcaaagacatcaaaaagctagagattaatgcgattggagaaacgccatccattatgcgcaaacaccatcatcaccactttctccagatgtctgcaagcctggactagcttctcctttgcagcttcatgcctttgaagcagcgcccaggaacggcaccagtaggttcccctgtagattacctgcatataagttttcgggatatcgtgatcaaaaaccacctcattcctgctaagccataaagcccaaattattgccgccacccccgtcataatcagggatttgtcatgtttactgaaacccatcaaccaattcccagcaacatgctccatatcccgaggggtcggcaaaccgaaagcggctaacagcgccctccaaatgaaacgagcgaagtgacactcaaagaacaagtgtctaatcgtttcgctattagagcaaaacacacaaagcttattccccttccagttcctacgcgtcaagttatctttagtcagaatgacccccctaccaagataccacagaaaaac

SEQ ID NO: 157831 - DNA, 528 bp, Zea Mays
gtaggaaggaagaccttgaactgaacggagacggaggcgaccaggccgggcccaacgaacggacaaacctgacagcccacttggggcgcatgcatgccgctttggttgtattgagagggagagctaactcggacttgtttgtatcggtttcagctgtttacatagtgtttttatctctgtttattattatagcttcagcgctctaaagagccggatttcagttgagctgggcgactgatgcctctgactcaccagcgagcctcacgtctgtacacgtagtactacaccacatgcttgcctcaaactcaggtactcaacagcgttggagctcttcaggggtaacacagtctcggcgttgcccctgtcgatgcagaggatggatttgattgaggtcgctgaagagcgaattgaagatgcatggcaggcccttttagaaacatgtctgcgaactgttggggacatgtagagctcccatctcgccgacggcccatcaatcttctccctgacaaggtgaattttgtatgtcca

SEQ ID NO: 157832 - DNA, 294 bp, Zea Mays
ctccatttgactttgtacagcctgatggtgctcctttgagtgaccatgtctgctgttttaagaatttgggttggcttctctatgtatgtcaagtcttcttggacttcaagatccacggttagcaactgctcttctggtactcgcaaatatttctttagctaagatacgtggaaaacatcatgcaccgctgccaggttttctggtaggctgagctggtaggcaacttctccacgtcttgcctgaatttggtacgacccgatatatcgagatgctaactttcccttgactccgaac

SEQ ID NO: 157833 - DNA, 386 bp, Zea Mays
ggcctatatgcctatatatatgctacagtacccgtgggggtgattatctcggctaatcaaggtcagtaacatggtatcagaggaggttagggttagggtttacgtctaaacccgaccctgatccaaaattttggcgccgtcgcgccgtcgttgtgctgccatcgcggccagctctccggcctgccgtcgcggccatcccttccctcctctgccaccgtcgcgcggttttcccgccgccagggaatctcgccggcctgcgcctgcggcgtccgccggatctcggccgccatcgtcctctgccggatcttggcctacgcctgcgggatctctgccgcgccgtccgccgccagagcctctcggccgccgcctccttcaacgatccgccg

SEQ ID NO: 157834 - DNA, 378 bp, Zea Mays
tccgattcctttggtggctgccttcagttctctctcggcgagggtacaagcggtagatggtgatggctgtatgcctcgagtatttatgcacgagagggggagatcggctggtacctggctagcatccggtgcggcgtgcagcgatttggtcgcaaggttgttatgaggatagagatgctacagcagggccccacatgtcatgcagaccagggcacgagccggtgcccgcgagcgtccttccgcccgacatgcatggccctgtacgtgtcgatcgcaaacggatgcatgcaagagaattcaacgaccaatttgctagcgaactggagatgcaacgagatgacctcatacctgatgtcatgctaacacatactccggcca

SEQ ID NO: 157835 - DNA, 656 bp, Zea Mays
taccccttaaaaataatctcgacctcgagattactacgtgctaggaaaaaggtgggaaaactctgcttgcaattcctcttctctctcccaggtagcttcatcctctccatgatgactccattgcactttgcacatttttatcactttgttccttgtaactcgagtcaaggtgtcaatgatcttgatgggatgctcagtgtaggttagatcttcttacacactaagtttttccattgtcaactgtttctctggaacacggagacacttcttaagctgagatacgtgaaacacatcatgtacatctgatagatgatctggtaactcaagatggtaggccatatacccaactcgctttaggattttgaagggtccaataaagcgaggggatagctttcctttaactttaaatctcctcataccccggatcggtgacacctttaagtatacttgatcaccctcctcatactcaagttgtcttctttgggtatccgcatagcttttctgccttggttgttctgttctcaagttctctcagatcattcgtacttgttcatctgccttttggttaaattcagacccaaagaactgtctctcaccagtctgatcccaatacagaggggttctgcactttctgccatataaagcttcaaacgagg

SEQ ID NO: 157836 - DNA, 455 bp, Zea Mays
tcgtatctttgaaggcccaaggacctcgctgatgaagtagactggatgttgcaccgggtgcgcatgtccttcctccacccgctcgactactaacgtggtgcttaccacatgagtcgtgcaggagatatatagtagcagatcttctgccggctgatttggtgcagctcggcgtggcggcttgagtactggtggtgtagtcaagaactttttcagtccttctagagcttcttgtgcctctgtggtccactaaaacttgtccaccttttcgagcaacttgtagaatggcatgcctttctcgcctagccttgatatgaatctgcttaggactgccatgcatccagtaagcctctgtacctttttctgtgatcgtggcgcttccattctcatgatggcctcgattttttctaggttagcttcaattcctcggtggctgacaatgaatctgagtaacttcc

SEQ ID NO: 157837 - DNA, 598 bp, Zea Mays
ctcacgctcgccgccgtcgcgacgccggacatggccggcgcgtgtctcggcgtcgctccggtcggagaatgatccatcgtcggaggaggtcggcggggatccgccgtcccggtcgacgccgagatcgtcctcatcgccgatgaataggagcgagcggtcgccgtggcccacctcctcgtcgcggtccatgtcgggctcggccgtccagagtgctgagtgcacgcgcatgcaacacggcaatgcaggtgaggatcaacgaaacccaaatctatattaacatcaatccctgacgcaatgcaacgatctcaaggaaagaaagcatcacgatctgtactacgtacccaacacaaacgcttccccgatctccactcttccagccacacgagcaaggctagagaaaatatggggccggggccgacgaacacggagggaagggggagagataggcggccggtttctgaggagccggtcccggactcgtggccgcgccgcctctctcgcaaccatgaaccgggtgacgtacgagacggctgacgctgggcctttttgttattgccactgaatggtgggccgttggcccatgcccttccccccgtgt

SEQ ID NO: 157838 - DNA, 484 bp, Zea Mays
cgcccatcccctcgccgcacaagagagtttggcaccgccccgtcctcgccgcttgaccgcgtccttgcccggtaccgcccccgccgtgaggtctcgtcgtcgccgctgtgcggcattaatgccggcgctgtgcacctcaccggcgcccgccgagctccgccgctccccttccctcagacgcctataaaaaggtcgctccgagcacctcctcccccgcaccggcctcagccaccactctcctccctcacccgagcccaattcgcggaagcgccgccgtcgtctccctctccggtaagccttccccctcatctcccttcccctctgttggaccaacgagcaattacttaggcctatcagcttcgccacaccgccgcgaactcaggacaccactcccccaccccagtccctcgcccgaagctcaccgacggcgactcccgtcgcggagctccgccacctccccgcggacagccccctcctggccccc

SEQ ID NO: 157839 - DNA, 789 bp, Zea Mays
tctatcatgtatgagggtgctgagagtggtgcaacttcacttaacatcccttcggcagtctcgggcttgatagttaggtgatgtctactttgacgaggccttccctaggtgagtcttctctaggcttctttggtatataaggattttctctcgcattgaagagttgacagcaggctctaagccattattacgcaaggatctttgttctaatgtgtcatggccctgatgtggtcctagcgaaagagttgtcagcatgtcttgttgttgtggaaccaaaacaacattgagctagcttaatgtcttggctcgatacatcagttggccctaagacaaggatgggacattcatgtggctagtatctcagactgagctccccttaggtcaggaatcctcatgtcatggctaagcccctaaaccatgagcgctagcttgatcaatcttggccttctaatatatggggcctcctaagaggaggaccattcttaagctaccgagccatcctttttccaccagagtgtacacatgagcatacccgatgggtatagcctccaagccaccatcttattcatagagttaactagtgggtcactcaaagtattgtgtccttatctcgtggacttcacattcccctatgttagactctcgttatgcatgagcccctaagcgcttcatggtcatgatgagaggtcatctttgaccttgattcacaaaccaacttgacagggggttgagaattattgttcttttgtcgaatgtccttcgaagcaggtgagggttgcccatgcaatc

SEQ ID NO: 157840 - DNA, 1138 bp, Zea Mays
gtgatagagaccatcagatcgagcaacaacgaccacgatttaatgaagctagatccaatcagaaccgctcgattagatccaacggtccagggtttaaagcaccatgatctaatcatgtccgcacggtgtggatccaacggtccagatcacattaaccgaggggaacgcgtgtacacatcacaaccgcacaactcaagatctacgactcaaccacagtcttctacctccggccagcagcgcggcgacgccatccatccccggcggatccacgtcggcgcacggccacccaccataccagcgctctaaccataccgataaatagtcctacgcgaagacgtgaacgctgaatcactggaggaggtactcaccgacgctataggcgatgcctgtgcagttcacgacccacggcggacatagcgctccaacgagcgattcgtccagcgaccaaggcccttgatacgggtgttttgcacgccggcttccgtagaccccaggtgatgcctccagacacgacggcgagttaagaacgcgcgcgacggtctgaatcgtctcttcctgaccgtgatggaaaacttcagctcccgacggcaaagttatggcttccggccgggcgcatgcggaggattggatgggaagggtagctacgattagggatataaatacacctgggtccgaccgaggaagtcgcaacaacccacgataggtgtccccggccggcgacaatggagatccgtgcgtgttgttggcatgaagacggttgacgcagtgaccccacatggcagcaaccggtggcttggggcgaggcagcgaggatctcggccggggaggttggagatcgaatcgcggacgccgttggccaaacctgcgatttccgcgcagacttttgctccctggtttgtgagcaggtgggagaagaaatagctgacgcccgggacccatcagacagcgagggaaggagagagcacggttgcgtggagcgtctgcccaggtggggcccacacggcagcgaatcaaccgcgagtgaacggctggattggcaggtacttggcccgcataggtcaaagtgggccgatagcggggtcaagggagatgggccgagggaaatggatttggcccaagtctggacggtgagcttttc

SEQ ID NO: 157841 - DNA, 428 bp, Zea Mays
gttggacctgggcacccataaccatttcgggttaatgggcctccaggaatgtctgaacacctgggccagggagaggcccaaacaaccttgcttctccttcccaacttccaaacgaccatccctggtggtagaaccgacttccatcttggaaatcgctaggccatgttgagcatccttgcatgaatggcctatatcagtttttggctttgccatcattctcacccttgagaatgtgaaatccaaatcgtcatcaaccttgtcatcttcaggcccaaactccatctcccaacccctaacggcagccaccgctacccagctccaaggacccctcagcagcgcccaaggagacaacggaccccaaaacttaccaatggaggaaaaggcagagcgctacccacccacagttatgccagcagcgacgcccaatc

SEQ ID NO: 157842 - DNA, 646 bp, Zea Mays
caaggggctaccctataaaagtccctaaactcaggctactgttactatggacggcaggttgatttttgtaaagcgcagggtctcttttagaaaacacacggctggcaaggtctgaactaacctgagccatctgatcaactgcgagaggccaggattagacttagatttttacgaaccggtacgcagcgtgagacgttagaatggccatcgacggtggaggatccatctacccaagcattttctataaacctaatccgcacctttgctgtagagatcaacggccaactcctatcttcctcttgctagcgcgcagcgaccaggaaccggcggcgcaaagtcaccgcggtgcaactccggcgacccctgattcctgatttccgatgcatgaacttctacggtaacgggatctaagcactatgggaacaagagtaaactttgaagggggttccctcaccggagtgatgaagcgcagccgctcgaccacggctggaggtgaacccgcggcgcctcccaacatcggcgagaaattcggttgacgccggtggtgctcacacctaattgctcactcccacacgatccacacgtgccagtgaactccaatttcgccatccccgaagcaagaatggcaacgctcggaggaatcgtc

SEQ ID NO: 157843 - DNA, 531 bp, Zea Mays
ggtgcagctccatgaactggtctagctccaactccatgaggtgggaagcgagctgagctgtggctccatctctttggctttgatggcttcggtgccgcctccaacggtgaccgtcggtccggctgctgaagacgccgcccgggaggtcgtacaagatgccgtggagacggcgaccgcgcgcttccagcacgactctcctgatgtcgagtagctcatacctgtagaaatgaggctagggccccgcttgaaggcggatgtaataacttcgtttttgcaagatacttttgggaactatcaattaaatagttcttatctgtatgatgcttgttcttgctgtgtgtggttttatcaacccctctcctggtactcggtcccctgggatgtaggctcgacgcatcggggctagataccagcatacctaaggaagagttggtgtcccaacccccaggaggtagcctcgactgggacctggacctgcacacagcttcggctacaaagtgttagtagcacacccattaggacccatcgtct

SEQ ID NO: 157844 - DNA, 339 bp, Zea Mays
aaactactaactagcccacccctcgaactggactcagttctttaagatgtttggccccggcaaaacaccaaagatggtgttctttagcaaaattgtgcagaggccttctgcatgttgggctgaacaacggcattcctatgctttcaaagagaccaagctcctagaatgatggccgagataactccttgctggaccagttttgagaggtgttcaatgctctccttcaatcagcaaaagaggattcagcttgacttggctcttgaggcaaagcccaagtttgaaagaattttaaaccagaattctctagtgaaaacacaagtggtaataatatgctggaca

SEQ ID NO: 157845 - DNA, 614 bp, Zea Mays
gctccccgagcctcatccgtcgccggccagccgtctataaatagagtgcgggcactgcttcatcaccgcattccgcacatcagcaactaagcaattgactcgagctcaccggaaaacccacgtagccccaattccctctctcttcggttcttagctccgccgcgaagaacttccacgtggccagcggtcctcgggtgagtacctatccaattgtttcatgtttttgcttgttgttagcctcatattgcccccagtatcaactaatcgaattgcggtcgaagcctttcaccagaatgcgcgcctgctctgtagaacgccgccgtaaccccttcaccgtcgacccgctcttcgggtcttgtattgcccaaaccaaagcgtatccaggaaccctggtgaacccaggaacctttccctagcttcaatttagccagcccagccttcggtgatccggaacacgataatccacttgatcacccgcactgacaccgtggccagaacatgatagaccatctctagcaaaattgattgaggggaaaggtgcggatggagcctaatttggttcctgtcgcttgagaactccagccgtggcgtcatccggtcgatctagctcgtcg

SEQ ID NO: 157846 - DNA, 944 bp, Zea Mays
aaagcctataggactggtcgtagaccacagccctgaccttaaaagttgccttaacaagaaaacacctcttacccctaagaaacaccttctctcctttccccgatattaacagacccttcttttctcctaccagatggaaggctcttgggtcattaggacatcctactgctcagaggaggaaggatttcctcaccttctacggagttgcggactatgcatggggatccgcaagaagcccgaatatgtctggaaggaataccgcgaaaatggaatagagaagtgctctatggcggtctacctgggagaaagccgaagctacccaaaccaccctcccttccaagtcaccttcatcgggcaccgcttcccagacacttgccaaagtgttgcccaaaaagcccttaaatagctatgccaaaactacagcagagagatcttcgaaaccccccttcgttatttcccacctaacaacaaaaatacccccacctggaggaaaagacttcaggccctgtcagggagagaccccaccattgtctacatggccagatacctccacactctcgataaccactacgatgatctctcctcccactgcacccacctaaactcccgggtggaaagcttggagcagcaggtcaaggaacttaagaaggagaaggcgtccctccaagagtgtctcgatatagcagaaggcgaggaggccaacacccgtgaagcctaccgaaccctaaagatggattatgataagaagctgaagaagctcgcccccacgaagaaaaatccaaaagaagaccaagaaccaaggaggccaagctgagcggaggaaaaaggcccctccagcaccaactcccgccaggatagagaatttgtccgacgtcgaggatatgtccctagctagccttgatgaccttctcaaggaatttggggacactttagaaaaagagttc

SEQ ID NO: 157847 - DNA, 475 bp, Zea Mays
gttcatactttttcgctcttcctttttttggcattccccatccactagaggttgggaaagttctgtttgctaagtattcctgcatcaagtccctagtactaatgtgcttagccaccaccctaaattccacttcggctagttggcagggagaccctagctgcatattgcacaaaggtcgagtcatgccgaagctcagctttaagggactcattaacatgctcatgagcttctccctcttcttctcatcagcattcatgtaaaaccattcattagtccacccggtcggccatttcgtgtggtagccaatcatgggggccttggtatccttctggtatgcaaaattatagcactcgaagttcttgtgcagaccatcggctctggccttcatctgataatgaagttcgtgcacgcgatagaacctttcggcattgacactttttccttggcttcggagagcccatatgtaaacgctaag

SEQ ID NO: 157848 - DNA, 428 bp, Zea Mays
tccattctcgctcgagtcgccgacgtgccacctcgcgcctccccttcgttgtcgatgccggatctgccctccctccgtcgtcctagccgaagtgaagtaggcagcgggctcggctgtcgactctgcacactgcgcgccagacaccaagacgtggatctaggtcaactgcttagttcctccattttactgttgctatttgtcctcatgcctccattttaatgtattaaatcactcttctttttcggtgcagttcctgcataaggttgcccaatctagcaccttcattcactgattcttgttccccggacaaacctactcagtacaacctgcgtggcaagagaactgcacctactcagtacaacctacgccagaagcgtgccaaaacaactcccacggcaagttcttatgtgcataacttatcttgtttc

SEQ ID NO: 157849 - DNA, 619 bp, Zea Mays
ggagactccaagggcgaatcgggctgcacggctgcggcaatggagggccagcctctccctctcctcctggtccgcgcccagccgccgtcactgctaaccaaaccgtgggcggccttggcgttgtcggattgaagggagttaggagaagcgttcctggccgtgcatcttggatcaagggccgagaatgattgtaggcatcccagggatcgtattaaatcaagaccgcgaattcgaagatctgacggctgtcgtcaggtaccgactcataaaagcctaagtctaatctggtccattgatggaagattcatcggttgtgatatgacgatacccctttgcggccgatcaattgcataagagcccctatacttttgagtattcaacccgccattcaaaggagagtaagaagtagtacaattgggtccagaatttttacactatagcccctgcggtctcgggaattcatgcccgcagtccataccttgctggatctcaataaaataaaatgggaaatagtttctaatatagaaataaatctatgaacctataaaattcataattcctatgttttaactctgttttgatccattccaattgcattatgctcatgataatattttct

SEQ ID NO: 157850 - DNA, 558 bp, Zea Mays
cgggcatcgagggccagtttggttagagagcaggagtggacagtgatccgagagcgaagtagataggccatgtagcacatggctatgaaaagcttggtcccattcagcatttgcaaagaccctgtcaatcttaataagagttgggtttgtacgctcgttactccaagtgaaccttctaatttgcaggttaatctcctttaggtcacaacagtctaacatatcactgaagcggttcattaggcttaggttcagacacctcttattcttgtcactagctttgtaaattagattaaaatctcccaaaagcagccacttaattccagattgtggtttcagttcttgaatttcttagaggaaggttgacttcatgctatttcttgtaggcccatagaccacagttaataggaagacaatatgggatgttgttagcttaacttctccagaaatatggaaattgcctactgtaaaatcagtaagttccacatggttggtattccatagcaacgcaaatccctccccttgtgccgctgggcctccagccggtttgcagaaaaattt

SEQ ID NO: 157851 - DNA, 875 bp, Zea Mays
cgagctcgcctcgtctgcccatgtggcgatacactggacctcgatgtgatgctccgcccggagatcttctagcgtcttcttcatcgtctctaccgcttgggaacccggagccgcctgcgccgtctaggctttttgcgctgcctacgccgcctggaactggcggacccgctcctccagtgtcccctctttctcctctagtttcttctccttctcctccgcctcgagctcatgctcggcgagcaacttttcccatctttcccacatctcctccctccaggcgaggtccttctcctgtcagatgagatccgtcgcccgctcctccagggaggcatccttcgccttgaggttttcctcggtgagagagatgttgctagccctgtcatcaagctcccgctgcagcttctgcagtgccgccttagtcgcgatctgctcatcccgctgcttctccagcatcgcattataggctttcaacttctcatggaattccgtgatgaccgcctcccgctggtccaagtgctctttcttcttgaccagccccttctcctcccgggtcaccttccgctcccgctcgagcaccttctccaggtcctccttgaggtcctcacgcccctgctcaagctcgggccgctccaaagcaaattggcgggacgcggccttggtacgttcctccagctgggtgcgccaatcgtcaaggcgctggtgctcagtctcaagcgcctcccactccctcaggatcgccgcctcggtctcccggagagcctgatgagtgcgggacagcacccgagggaggggaggtggtgccgtttctggcccggcaccggtctggagccgccgcccaagaataatctccggctcctctggaatgggcggcgaga

SEQ ID NO: 157852 - DNA, 840 bp, Zea Mays
cctcgtatatgggcggactgtggaaaatagtgaaaactgcaaggtctctttcgcataattgcgtcgacgaaggggtacactctattcgaggtcgttagatcaattccggatggtatagattaaataaggcaagacacgaaccggtatgcgttgaacatcgttgatgccgagatctgcggccaagataagatctcatcccctggtgaaccggtatgctatgactgccctctgatcttgatccggcgtccaggatctaatgcccaaacaggtaaacaagacttctaatcctggccatctaccaacgatcccatggcgtggctatcatccatccaccgaccacccataagcggcggcgcagacgccgtggcgccatggccgacgcacgaccgatccccgctcccgagtcccaaacttgagcctagctggtggtatagggagagaagggtaagtctaatgatgtggtggattcctcacctcaggtctgggcggagatgatccagtcaatgcgacacagcggctccatgattcatggtggcccgacggcgatgcccaagcaccggtgtggaatccctgggcctggctactcccgcggcgtcaaagcccgaccacgcaccaatctgcggggacacgacgagtgcttgctctcccgtggctcatctcaagtccaacggtggtgacgacatgaactccacggcgtcacccttctctctccctctctctttcttatgttggtttcgaatgtctgcggatggcaaagtagtcgtgggacatgggtttatacccgctactgaaggaggggatgggtccgcatggcccagggtggccgagatctatggtgga

SEQ ID NO: 157853 - DNA, 449 bp, Zea Mays
cggagtctaggaccagcacctttccatccctgggatagatgatgaagcagatccagtggtccctacatgaatcaaatttgtgatgcatgtgtattaaaattattaattttatgtatgcaaactcgcacttacccaaagttgtacggggccactatgaattccctgtgttgatactgaagcatggcgtttgctatgtagaaggcgtatgtggcttcaaatttcttcttcatgtcctgtgcaatcttcttagcttcatcaggtgacttcccctttaactcttcatggtcctgaccgattctgaatttgtgctcgttctcgcatattttcattgggctcagatatccagcccttttaccggcattagaacgaggatccggaccataacggacctcctgctgatcatgttgcattctgcaaggcacacatgcatgttagatattgaaaattaa

SEQ ID NO: 157854 - DNA, 420 bp, Zea Mays
atttagtcggccttcccagagccccagctttctctcgggcagaacaagtacttctttccaatcacacccacgctcgttgcatagtcacaccagtcaccatttgccacctacattgctggtaagaaccttgtaagagaggggtaagacgcttcataatttgtataccaccaccaccaccctgagagatagttgtagggttcacattgtttgttgcctgtttgtctctgttttgtgataacaatgacatgaccaaagaatcaaatggataaagacaaggggcttaagcttaacgacgatgagtgtgtctcttagctggaattgaaggagatgatgcgtgcgatgactgaagcttttaaaaaataccaggactctacggtgacatcctatgagtagcttgatcgacgagttgctgaacttgtt

SEQ ID NO: 157855 - DNA, 462 bp, Zea Mays
tgcatgtgtgaattgaatgaagctgaagtatgtggagatggatggagaatcatgcatggccggccggcaagggtggtggtggagccgatggagtgatggccgtgcgtggatgcagttattcctcctctgcgcatatcctctcgtacaggcggcccgccgaaatggtggtagcagacggtcatgcccggggccgggaccgggatgagcagcaaactttaacttgagtgtgagaattagaaaaagaaagaaagaaatgatcagaaagccgtcgaatgatcaatgcttctctcagcccagagagggtttcggcccatatataaataaaaaattggcctgcgcaagctcaagtagaggatgggctgccaccccgcaaatattttagcccagtgtacacgtaccctggacacaccaaggaataggaatggtaggtagacattggcaatgggaccgatcctcgattcc

SEQ ID NO: 157856 - DNA, 272 bp, Zea Mays
ctttggtatacagggacaattgcaaataaaaatggagtaggggttttgattgataagatccttaagaatggtgtggtggatgtgagaaggcaatgggataggatttttctagttaagataatcgtgggtaatttgatcatgcatgtaattagtgtgtatgtcctcccccaataggccacgataagagtaccaagagactttttaggaagacttagatgacatggttagagctattcctattagtgagaagattttcataagagatctcaatg

SEQ ID NO: 157857 - DNA, 533 bp, Zea Mays
ctggaacatagtgttcacggaatgccaatttaaattcatcccaagtgacctgatgtccggctggttgaattgccacaaaatttccccaccaggtactggcagggcctcttagttgttgggcggcgaacaacgagttctgtatttctgtgcagcggattaatccgaacttctgctccattacccttatccactcatcagcttaaagaggatcttctgctttaacaaagagtggagacgcgtttcagagaaatccagatatgaggtctcacgtggtccttatggaggagctcttctgccatgctactggagttgattacccgccatctcacgtaagaagtgggtattattgacagtagcattaaccaaggcagcgatagcctcagccagcgttggtggtacaggtggcgaattagtagtatcttcctgaccacgggaagtccctgcaccgtcatgcgcacgagtccttgatggcatctgaggcaaagaaacatttgggaaaaatataacatgtcgatacacaccatcattttaca

SEQ ID NO: 157858 - DNA, 546 bp, Zea Mays
ggacaaacttgcaagtctggatattgtacaacatattacatatgtatccgatttaaacatgttaagttttagatgattttacatgggtcgaaattcaaagatctgtttttcttgttttctaagtttgggagccaaataacacagtgtgccaagtttaaggaccacttatgcattttattcgtccatctaaaatccaccacacataagctgcttttccaaatctagcaggaccacaaccattgagatcttgttggagaaaacatattgttagttgttacagtgacccttgagtcgctgctggttgacacctcagctaatgctgactcttgtcgaagtgaaagcctgatggttttgttgttgtttccttcaacagtgttctaagtacctggacacagccacataaattgttaagaagttgttgttgcagtgcacaatttaaccttttttagagaatagccactggtcgcttgttgtactacgtagacatttctccaatagctttagttacatcggtctatcaggccttgagtccaaagtagtttcttg

SEQ ID NO: 157859 - DNA, 343 bp, Zea Mays
acactattgtttgttgcttcatcattataaccaaaatcagaggagattgtttgttgcttcatcatcataaccaaaatcagaggagaatatgagcagatcagcagggaaggggggagaaggatgagagcaaggaggtagtggcgagcatgagcagcaaagggatagcgagctggagcactggagtggcgagcacgagcgctgagcagagggcagatagtcagatacggagcggtggaggcgagcgccgagtagcatagggaggttgtggcggtgccgaacttgagcatgacaagaagcgagtatggccaacgctaaaaagtggcgctttagcgcttaaaacgag

SEQ ID NO: 157860 - DNA, 664 bp, Zea Mays
aaatacgtcaacaagaaggtcgctccgagagatcggccaacaaagtgacctcattcaccaacattagaaagacaagcaaaagaaacacgaccaactcaaacatcccaaaaggtagtccaacaggttccaccaccgacgccatggatagcaccacctatttatcaaccacacccatatccaccacatgtgtatacaccactcatatttccacctacatatccatccacctgcatacccatccatgtggggagactacaccatactcacagtatccttatgatacttataaactaccatatcactcgaatttgggggcaccacaaacttcagtatttgataggctagctccatcaatgcaggaccaattgaaaatccataattcggtcctcaaacacatcaagatgcatgtcgcaatttttagccacaaatgttgacagatctggaaggggcataaggggagaacccccacctttgtagtacccgagtcagagtcaccggctccaacaagttctaaaaaactagatagaactatagttggcagcatcattaaggtaggaacaatagacgtcgtgatcaataaataagaaaatgaaggactaattatcattggaacatcgaccaagacacaattatatagggttgtcacgacgagcagcctaaaaaa

SEQ ID NO: 157861 - DNA, 1400 bp, Zea Mays
aaagtcgatgatgcacgagatactgcccgggatacctctaatcccatgtctggaatttcagagaaaacatccatcatatcacctgcagtcgactccgacaacatatcttcaggaatgacatcctcaagggcccgatcaaaatctgttatggataattcttgaaggctaacaagagcagacagagctggagaaggaatatcactatccccctactacctctgtaacgccggctgttcttacgaattagcagaacttcttcttcctcttcttcgtcctcgtcaaaaatacggacaatagccggtgcagggtcacacccattggggtcagctttggcacggtcacacccattggggtcagcttttgcaaggtcacacccattgggtacaacttctgcacggttacacccattggggtcagcttcaacaaggtcacacccattgggatcagctggtgcacggtcacaccaattggggtcggcttcaataggtacaccaccaatgggatcaacctcagtaaagacctctgctggtacttcttcacaaacaggagcagaagggccagcatcctggtccaagcatgacattcgctgaagccgtctctttttcttcttctcctcctcaacaggcacagttgggaggctgacttggcgaggatgctttgagagaataccctcaggattttgggtgtccactattttgtcaagctcttgtataatcgtaacagccattgcttcagcagggggcgagtcagaagattctccagccaacatattgagtacaacatctatttctgcatcatctagacttgtcggcatctcaaaatgaacttgcctctcatcattgggaagatcacaaagaggagcaaccagaacctcaatgtcttcaggagagggtcgcactctaagacccagaccactatcaccagcaggagggttggacacgaaattgaaaaaggacttaggagatgacagattccaagcagagtaggcaacatgagcaccaacatttgatatgtctagtcggatcaccagatcctcagcagaaattttcctgttggtaacccgagtcgagtcagtaatgccattgtacaagtaagctgggtacgttctgtccttcaagggctgagtattcttaaaaataaagtcagcaaccatagcctcggcagtcagacctctctccttcagcagacagatttcagcaagtagaaccctagcttctgttacctccaaggcagtaggagactcaacctaacttggagtgcgcacatctggctgtctcctcgaccgagggggagggacttgctgtggttttccataataaaccactcaaggcgccaccctttaatgctatccttgtgaggaatgtgaaggtattctgttttcttcccgcggtgcatctcca

SEQ ID NO: 157862 - DNA, 831 bp, Zea Mays
aagtcggtccgctcacaaggcaatctgagctgatagctgtgcccgaacgaaggactcctgagtcctggtactgaagagagccgccgctgtagggtccctctgagctggcaaccaggactccatgggtacgtgtcagaaccgacatacccgggctacagtggcacgctgaaggtcgagcagacgtggatcagaagcaaggggtcgcacctcagtctcgtcacgctccctgaagcgaggtggaggaatgggcagagcagaaatgggagcgggagggggaatagtggaagctggagtggtggaggtggtgggtatggcagaagtggtggatggctctggagcgacaggagctggtgaagtgggaggtggagtagacactgtggcggaaagtgtggagggagcaattgagcgaggccgagatgcgaggcgacgaactctataggcaatctgatcagaggagatctgcaactgtcctcctcgttctgcctgctctgctaccactgccactgcaagtgctgcacgagcggctctatccatacggcacttcttccgaccctctggctgctcaaggtaaaccttcttccccttgacctgcctaaaggggcgagggggtcctcgtcgtctcttccccctgacgccgagacattctttgtccacaccatcctgatctgagtgctgcatggaaatgtcacgagagagagaaggtccaagcagaacaagagatgggcacacgggcaggcgagagcactgaaatggtagaagaggtgagcacgttttagtcacatagtcataagtatatgaaatgtgaataaattcatacatagagagtgaaga

SEQ ID NO: 157863 - DNA, 295 bp, Zea Mays
gccatgaccccgcaagaaataaaacatgggtcaccacggatagtcacgtcagccgtccccgacgtagacgagcctacttcgaaggacctcatcgacggagaccgcgtcttcgccctacaggctctaaacaaataccaagctcaaacaaaagcatggcgcgaccacacagtcatcccgagggaattcagcgaaggagacctcgtactcgtctggacagctcggacagagtcccggggcaagctagagccaaagtgggagggccctttcatcgtcaagacgaaggcgtcccctagcg

SEQ ID NO: 157864 - DNA, 607 bp, Zea Mays
gcgtatggctagaagattattgcctcacgtatcgtgtggcggggataaatgatgactacctcatcatccatttccttcccatccacctcacgaagggaacgagggcctgactcgagcacctgccagccaagacattcacgactgggctgacctatggaaggcctttattgagaattaccaaggcacctacaagtgactaggatgctcctcggacctaaagaggtgcacctagaagagtggggagagcctctaggattacatccggaggttttctcaaaagggaaacgaactccccgatgtccatgacgccgacatattcagtaccttcacctatgaaaccactaatgatgcgctcgtcaatgagctttgatgagggagacaaaggacaaccacagacctgttctgtaagggaaagggccctgcaatgcctgcgggcctaacggcgagaagagggagcgtcgggaacaccctgataggcatggaaggaaccatcgtgcccaactcaatgaagaggaagtcgccaccatgaaccgaccacccaggccaccgaccaagaacgacgacgaccatttccaaaagctgatggactcaccatgccaaaaccacg

SEQ ID NO: 157865 - DNA, 1043 bp, Zea Mays
gctccgccgcgccctgcaggtgcttctcatccgccgcgtcctgcaggtgcactgctcgtagctgttgatctggtttgccgccattgattcgtcgcctccttcattttagggttcctgtttttcgaccgaacgcgcttcaaatcaaggtttattcgctatctccagttttgtgtttgagtttgcctcaagtaatcaatgacttccatcacaaatcgtttcaagatttgcgttttccatcattaattagtggaatcgcatttacaatttccaaaggtgactgttccttcgttttagggttcctgttcttcgaccgaacgcgcttcaaatcaaggtttattcgctatctccagttttgtgtttgagtttgcctcaaataatcaatgacttccatcacaaatcgtttcaagatttgtgtttgtttatagcgctgcctaaataaaatgctcaatgaactcaagagtcttcttgtctgctgtttgttgcgagctgctaaagcatgtcagttgtattaccatagaaaatactgtgtttatgtggcgtccgagcttgcttaacgtttcttgtgttcctagttacctcgcctctccataccgaatttcagataaattagtgccttgtagtacctttcgtgcatcatctggttcttgtttcatggtagcacaggggtccaggaagaggtcagcagatggaactgttaaaatttgaaaaattctcagcttgaactaattgcatggttttttgagatttagcaaagcctaaatgtgtatttcagctgctcgatgtaccatttccccctgaatagcctaaactgtccagatgatgatgggaactttttccctttttcaaattaacttcagtgtctctttgtttgatgagttgatgttttttcccatcatcatctggacagtttaggctattcagggggaaattggtagacattgtcttcttagattttttccctatatgtacaaatggccttgaccatcttttgggtttcatcattctagaaacccctttcttagggtttaagttttttgtgtggg

SEQ ID NO: 157866 - DNA, 305 bp, Zea Mays
ttgaagctttgagcaggctatgtcagtgacaccagtcctcgcactccctgattttgctcttccatttgtgattgagactgacgcgtgtgatgatggattgggggcagtccttatgcaacaagggagacctttggcttatttgagcaaagctctaggactaaagaaccgacacctttctatttatgagaaggagtttttagcactaatcatggcagtggataagtggagaccgtatttacagagggcagaatttgagattcgtacagaccacaagtcctttagtttcttgggcgatcaggtgttgc

SEQ ID NO: 157867 - DNA, 678 bp, Zea Mays
tcacgctcacttctagttccttcatgtagagcacatatgtccatccacaaatcatgagcatttctatggtttctaactctattaaacacatttttgcaaaggcctctaaaaagagtgtttttggccttagcattccatttctcatagttaaactcttcacctacaagatttgtgggatctctaggttcggggaaaccttgtgtggcggctttgtagacaccaatgtctatagcctctaagtaagcttccatacgaattttccaatatggaaaatcatcaccatcaaaaacgggaggcgatccatccccaccggacatcgttactctagcggttaagctaatctaagagcaacaaggctccgataccaattgaaaggatcacgatgcccaagaggggggatgaattgggcttttctaaaaatcaacactaattaaaacctaagcaagagcccaacttcaccccaacaactagcaataagagaataatactagaaatacaacaatgctaagacaatactttaaatacttgctaaataaatacacaatttaaaatgcttgaattaagtgcgtaatgtaaagcaaggtttagaagactcctccattttttcccgaggtatcgaagagtcggcactctcccctagtcctcgttggagcacccgcgcaagggtatcgctccccc

SEQ ID NO: 157868 - DNA, 660 bp, Zea Mays
gtcatgatagtcttgactaggttgtgttatgtgcttctcttgtcttgctatctaggaaatgtttcagttgttcaaacctttttttaaaatatatataaaatgttgtttgtttcgctcatgaaaagacccccgcccaaacaaccttgagtttagcaagtgaaacccttgtaaaaaaacatgcttgtgttggtgttttctaacccttgtgtgtttcccccttgaagttgcacatgcacggcttgtagacacccatagcttgacccctaaatcgactaaaacttccttgtgcacttgttgtgtcaaaaaaaatcgtttggtgtctagttgcgcaaactctatcaagatcatgtttctttccataaatccttgctcctaaaacgtcagagcatttctgttaatcatcctacctgatcctgtttgcctacctctccttttgcctagatctggtaatcctcttccttgtgaatcatgttgtggctttatcatccgaatccctggatcctttaatgattctgccccgttatctggttatctgctattactcgttctcaagtatcggatgttgatcttgcctaaatctcttaattctggtcgatctcatgctcttcctccaagaatcatgacgccattttatcgattctatctctaagcagtgtatcc

SEQ ID NO: 157869 - DNA, 524 bp, Zea Mays
agcatgcaaatggccatgttatagggatggtctgcagctgctacgccggtaaatgttgttgctttgacaagaattggcaagcttcacatctctggactaactcggcggcatcactctttgttgttggccaatagaaaccagatctaaaaaacttcccaaccagagttctggacacggcatgtactccgcattgtccggcatggatttcctctaacagttgcttcccaacagtcgagtgaatgcacttcatgaagactcctgttgcacctcttctgtacagtgtgttccctatgagggtgtagtgagctgattgccttgcaatgcgttctgctgtcgccttgtcatccggttcctcttcattttttatgtacctgatgataggctctctccagtcattggggtccaactctggttggctcaaggtgttgcactcttccgtccgatctaagggaatactcaggtgtgatacttcttggacgaagatcccgggcgggacttcggcccgactggatcccagcttcgac

SEQ ID NO: 157870 - DNA, 847 bp, Zea Mays
cgaaatcggtgaggacttgtgatttgatcgccgtccatgggcataggagatctcgtatcccatcagctcgagagtccactttgtgatcctcccggcattatccgtgttgcggatcacttctcctaggggggttatgttaccacggtgacaggatgctactcaaaataatgcttgagattttgcttagtaataagaacgacgtacatgagtttttgtacttggagatatcgggccttcgcgtatgtgaggacctcactaatgaagtaaattccataccacgtagagcgagagcggctccttgtcctccagagggactaggacaagggctcaagttaggagagtcttgaggttgtcgagaggttcctactcttccattgtccattcgaagtggtcggtcttccgcaacatcttataaagtggcagtccacgctctctgaggcgcgagatgaagtggctaagggaggctagtcatcctttgactcattgaactcctttaagatcccgtatgggccccatgtttgtgttggacgcaactttctcaaggttggcctcgatccctttctcgaaaaccaagaagccaggtaacatgcccctcgggatgtcgaagacacattttttgggtttaacttgatgtcgttggcttttagcctttcgaatgtcagtctaatattggttacgaggccctcagatcgcctagtttttaccacaatgtcatcgacgtatgcctctacgaacctatcgacgaggtcgccgaagtatttgatcatgcatccctgataagttgccccgcattctttagatctaacgacattattacataatagtatgagtcgaagtgggtgatgaa

SEQ ID NO: 157871 - DNA, 1019 bp, Zea Mays
caagttcttcttaatgactctgactttatcctcgacttcaagcaccaggtcaggtccaaatatttcctctttctcacgcttgtgaccaatttagcggtgtcctacatcttctcccatacaaggcctagaaaggtgtcatctttaggctggattggtaactgttattgtaatagaattctaccagagaaaggcacttatcccagtccttgccataatgtaacacacatgctctcaacatgtccttaagaatctgatttactctttccatctggccatcagtttgaggatggtatgctgagcttcttatcacctaggttccaagtgactcttgcagttgctcccagaaacatgctacgaacggtgctcctctgtctgacacgataggccttggtattccatgcaaacgcactatttggtcaatatagatttctgcataatttttctaccctgtgggtggtatgtactggcaagaaatgagttgtcttggttagcctatccacaatgacccaaatagaatcatggtgccgggaggtgttgggcaaacccacaatgaaatccatgctgaggtcctcccatttccaagatggtatggggagaggttgtaaggtactaccttcaatgactagccttgattctttggcaagtgtcgcacttagatacatacttagcaatttcccttttcatcctggtccaccaatataaggatctgaggtcatgatacatcttgttacttccggggtgcatggaaaacttggaaatatgagcttcgtccaatattttctttcggagctctgggttcttgggaacaaacaatcggtcttcaaaccatagaacacccttactgtcttgacggaaaaatttgtacttatccaccttttgttcgagcatttccttaatgacttgaacacccttgtcaccaatttgtgtcatgattatctgctcttgtaaagttggctctactgagatataatccaaggtacctggcgaaacaacttccatgttcagtttgcgcaactcgt

SEQ ID NO: 157872 - DNA, 593 bp, Zea Mays
ctttttttgcatccttcgtggtgctttccgtgttatacgatgcggaaacaatgtcctactacgatggcgctagcgacagccctgtcgccatcccgcctcggctgcaccatgccccgatggtgatcgctaccctagtggcctgtggccatctccccaccttcgatgaattagagtttgtacgggtggccgacgacggtgggggcctcatcttcgacacgctctgcacggactcggaccatagttcccctgcgagcgaggaacgacgaccacccagcttctgtggccccatcggcggtacaagcaaagtggggcgccacacatgataggagtcggagggatcatcagacataatgcctccgacaagagcccgtagtatatgcccggtcgaagcgaatctgcgccctacttgtaaaaccctcgaacagttatgaataaagcacgtttttggaactgctcttgatgccaaacacggtaaacagggggtgaaccttggttaaagccttggtcctttctctccctttttccccttctttctctttccctttggccactttcaggataggaagcataccaggagtcgaacgagataggac

SEQ ID NO: 157873 - DNA, 538 bp, Zea Mays
gttttgaaaaggtttaacatataccttcatcggttcactccaaacgctatagtgcgtctaggaattttcatttgggttgtatccttgagtcgtttcaacatagccggtcccaagcccggtaaaggaggagggttgtgttaggtccgacaaaccaacgtaaaaaccagccaaatcttatggagatgaaaccacaaagaaaatcgttggggcgtaaccctcttagcgacgcgccatatcggaacccgggtatggtgttaaatgagcaagggtcgggccgtcaccccttaagtgacgcgccgtctcttgatctggagtcggtgataagtgagcaaggatcgggttgtcgcatccttagtggcgcgctacatcggcgcccgggtgtagtggaaaatgagcaagggtctttgcatcttcctcggcgggtgcgaagggtaaggaagctagtcgaggaagaatcaaagaggctaggagatagaatcatcctagtcaaactggtcattggggacttggttctcaatgttatcagcgcatatgctcc

SEQ ID NO: 157874 - DNA, 383 bp, Zea Mays
cttgggggttgccgcaagacctttttgtgtcttcggcattgtcacttctgctgaagggcttaaaacttgcaatgattttgttcccttgattcctggttcctcagctttatcagtctttggctcagctaacgtggctgagggtgccttcggcaaggtggccggttcctcagctttctgtgtagaaggaattggttcccttggagtagcagctgaagaagttttcccgccaaactcgggcactgtggctggttcaatgtagcgcggtcggcgggtgaggaccttcaactttttcctctttggcgcaggctcgcttggagcagccgaagcaacaacctttccagaagctgcaccctttcttttctgcccccgtggtgggtagcgat

SEQ ID NO: 157875 - DNA, 544 bp, Zea Mays
caaggatgtaatagagaagaggtgaaggtgcacaagaaccaagggtatgagtacagtaaagaatggagctaaggtaagactggcatgtggcaaagacaaggttacgatcaaaggtgggataagtaaaacaccactctcgaattgagaggggggaagggaggttttaagttaggatcacaagggtaaaggcaatagcaaacaaaacacattaaaagatggagttgaaagttcgcatgcagcaaagaataggacacatccaaaggaaaatgggtaagatacaactttcaaattgagatggaagagagaagattttagagggcagatataagataagcaacagggtgggatgtagagatgacaaaggtaaagatgatatccataaaagcatgacaaaggatagaattaaggtaagactcatgaaatggcgaagtagaggaaacaattaagggtaagataggtaaggttccaaccgaatggttgaagtaaaaattcattaccgagggaagttataacgaaacaacgagatcacctaggatatacgaaa

SEQ ID NO: 157876 - DNA, 540 bp, Zea Mays
cagggggtccggtaacctgcggaccagttctagagaatgggcacttgtctcctggaggggtccgaagttgtgtagccgcttagcatggttccgtaccctaagcctacacgctccaccactctgcaacgggcaccctagtatttggaactgcgatccagtgggtccggacatacggcttggcttcccaggcccaatcctgcaggtcctgttgcatgaatcaaaggatggcagataccagatgatgggtcctatgggtgtgctcctaacacttcaaagccgaagctgtgtgcaggtccaggtcctagtccactagtaggtagtctcaaactgtagagaatacctcctaggggccagaccaccaattttatctttggtatactggtatccagcctcgacacgtcgagcctacctcccaggggggccaagtaccaaggggaagttgatgacgctacacacagcaaggacaaataacatacatataagttccagtttcaactccattaatggttcttaaagtatattacacaagaccaaaaattg

SEQ ID NO: 157877 - DNA, 997 bp, Zea Mays
ccgaagccaccgagacagccccgatctccaaagtcatgagacaatcgggattggttgtgacggagggagctattgacgaaggtggacctactgcctaagttgaacaagctgacatcaaagaagaaaatgttgatgaagaagaggaagactataacactctgatcccatcaaaacccagccacttggattttgaaaaatctactatctctgaggccgatgtgcccatgatgatgaagctgggctatttcggagaaactgagaaaaagcttattcgttttgccggagaagaaaccactccaaagccgaaagatgacaaagtagtagtttacaaaagttttttcagagcaggattacggtttcccttgaacgagatgattggggaagttttggataattatgaaatatatcttcatcagctgacccctaacgctatcattaggctcagcatcttcatctaggcccttcgaagccaaggaatggacccaaatgctgaagctttctgtcgagtgtatgagctacattatcagatgaaggccagagaagacgggctacatgaaaatttcggttgttataacttcgcatatcgcaaggatacgaaggctccggtgctcagttatcgcaccaagtggccaaccggctggaaaagtgagtggttctatatccaggccgatgagaagaagagggagaagttggatacgatgatcatgagcccactgagtttaagcttcggactgaccaggcccctgtgccgcatgacgtcggggtcaccatgtcaacaagttgtagcagaattcagggtggtggctgaacagatcagcactagagatctagtgcaagaatacctggccaacagggtgtctccaacgttgagtgcatggagtatgccgaagctgaaagggacaaggaagaagaatgaaattgttcgattgccctatcgcttcaaatttgagaaacaattcaaagagccttgccaagagtggctagaaatgattgaaac

SEQ ID NO: 157878 - DNA, 333 bp, Zea Mays
ttgatttacatactgctgtttattagggaacttgaacatgttctggattgcctttgctaactactcctatgtcttttactgagttatagaggagctatttagtttcatgtccactctatggtctctactcctttaaagcacgagtttcgaccgtcgtacttttttgcggaaagcacgtatggttattcccctcccctagataagacttatctcaccagaggcaaaactaatctctctataaattgccggcatcctatggttcctatctcctcgcgtgtatggttattcccctccccctggataaggtttatttcactagagccaaaactagtc

SEQ ID NO: 157879 - DNA, 475 bp, Zea Mays
gtgacgataaactctgtcactccacctgataacatggctggagactcttcatcagttcaacagtcttcatcagactcgggcagaaatgtgccagccacgacgacagagtctatcacttcacctgataacatggctggagactctttatcagttcaacagtcttcatcaattcagcaatgaccccataccaggctgcaatctggtattcatcaacccaaggtatataaagatggtactgttcgttatggttgctttacttcatcaggagaacctcaatgtttaactgaagccttgggagataaaaactggaaggctgcaatggatgatgagtatgatgccttgataaaaaatgaaacatgtcatttagttccaccaaaaaagggaagaaatataatagattgcaagtgggtttataaaatcaaacgcaaggcagatggaagcttagatagatataaagctagacttgttgcaaaag

SEQ ID NO: 157880 - DNA, 464 bp, Zea Mays
ggaaggcggaggacatgtgcagcttcgtgcccatgaggcgcatgagctcgcgctagaacgtcgacgtgaacactaggtcgcgattggacacaatggactgcggaatgccgtggagacgaatgctgttgggtaaagaaggcttgcgccacggacttgacgttgtacgggtgtgccaaggggatgaagtggaagtacttgctgaagcattcgacgacggagaggatgactgtcttcccgtgcacccggggctgcgcctccacgagtccaagccgatgcctacccatacgatggcgagcattggcaactgttgcagtaaaccagctggatgcaggtgttccgacttgtacatttgacaaatcgcgcatgcccgcacgaagtcctgcaccagacgacacatgttgggaaaatggaagtcacggcggaggtggtgcagcgtgtggtggacgccttcgtgtccgtcgttg

SEQ ID NO: 157881 - DNA, 521 bp, Zea Mays
agaattatactaataacattttcccccttagaaagatgccgccacacacaaggctaacggcacgcaagtcaactggaccaatcggtgtgccccggcatcaactggcccctcgacatgaaagcaggagcagtgggagtaatgaccccataggagatcttgaagcccgagtgagtcgacttcaagcggcgctgcaacacaggaccgatgcttgggtcgcagacggagatagaataaatgaactaagaagggacatccgtcacctgcaggatcagcttgctgatcgggacttagcacttgactgggtagtacagtcccgtttgctggcatgtgctaaggaagcaagggctcaggcccgaattaaggaacttagctcaattgtcgatgacctgcaggtctattgcaatacgttgcatgaggaagtccatgtactgtactcgcaattacaccctagtgcacctgcacaccctgctgaggcggaagccggaccctctcacgttgcgggacgcgcgctgggtggggag

SEQ ID NO: 157882 - DNA, 692 bp, Zea Mays
atgaagtaacaaaaactcctcattaatagggcagatgaagctgcaattcaaataaaatggctttcctttttttggagccattaagagggcattttgggctggccttcctatgtccgagttggccacagttcgggcatttaatttttttctctgagtagcttcttctccttttcctctacaggtagggactgtttcttctttgcagcaacaccttctaagcaacttttcatccgattcttcctttgctcacaacgactgtgggagacccggcattcggtagccttgcattgattctccatggacaatcacctcctttgcaataagctctatatctgaaaggtcagattgactcaattcctaactcaaactcattactgatcgcatactgcctcatagccagcctgaattctttcatatccttgtacaaactaccaatcttcattattggattagatctgttgcaaacaaataccctttcttgtggtatgaaatcattgcagggcaatgcagctgtttcatcatcaaattcatcgccgcggtcaccaaacgatctactagtaaaagcatcttgccttttagtagtttaacgttcatcttctgctagcaatcctaaccgatcatacaacactgactcagaggcagactgttgctctccttcttcttcccatctatcatcaatctgtattgccccc

SEQ ID NO: 157883 - DNA, 966 bp, Zea Mays
gagacttgtttcaagattcttcttttttgctcagatttttctgattttatgagtaattcgctgtttaatttgtcaatttcggcttgagcttcagccagtgaaccttccatagagtgaatgacgaagtccttcttctccagggaagcttcgtgatctttaactttattttcaaggtcttgaatgacaaagtcctttttcttcaaagcagcttcgtaactttcgactttattttctagatctttgatggtagcttcatttttcttgtcttcaagatcttgttgcatcctcagcactttacttagtaatatactctggcaaaacaaccttcgtcagaaaacatcttaattcaaaaaacaataataagttgagagtttttaccttgaaattagcgtagaacaagctaccggcgatatggtatcgctggtacctgcagaggtccgcttcaatcttcggcaggccaacattctttgagaaagtcctaacaaccttggcctcggttcgattccaaaggcatcttagcttcccttcattgactccgccaaacagcagagcccctggtttgtacccacaggatacaacatatttctttagctcttctttttcagtttctgataactcttgtcccagtatatcttgaaaattgaagtgttcctcttccaaagtatcttcaatttgctcttttccttcctcaattgtcgtgtccactgcggccgcagcatcttcttcctcagccatttttagaagtatgttatcaatatcaccaagtgtggtttctagattaggatcttcggtggtctcggtttcggctccggtggctgctccggtggcttcgggtccagtggctgcggtttcggcagtgccagcgctttcaataaatggtatttttgacaccgatgtcggtggcggtgtctgatgaatgacatcggccacttggataattctccgtttttcggcttagtgggactt

SEQ ID NO: 157884 - DNA, 1236 bp, Zea Mays
cgggtccctatagtgagtccgatgatgacgtcctcgtagtggtgcttcgtgggtctcacgggacaatctcacgatgtggtcgtgtgcggcgtagccttgcccttcatcatgacccctatgttaccctacaacatgcataggcatacacctgatatggtgcattgtcccatccttcctggtatgcgggtcactgtagagactccggtgcttaagtccccaatggctagggttgactggccccataaggcagatgggatacaccatggatcgtatgcgatggtgtacggtcgtgttgatagggacctctcggcgcccattcgatatgccacacccatggtctggacgtggattggtggtgatgcgtcctatcatggctgatgtgggtcagtagtactggatcggggccttcgcctcactaatttgctcggtgaggacttgatctgtcgcttcgccttgcagggttgctcgatagggagttggtcggtagctccgccacgtaggtgtcggatatcataattaggggtacctagatcacaaccctaaagtgcctagacgattgagtaagaaggggtcataagaaaaacacgcttccgaccttactaacgcacgagggacccaagtcacaactcgccagaggctaactccgagcactatttcaaccacccagagcatggctacatgcaacatccgatcctggccttggcctcgggagaaatctctgccttgcccgagctcgaccttggccaaccgccccagcagatgcgcattaaatgccacctactctcccacgaatctcatagaggaccatgcgaagcactgtttcaaccactccgactcgacaattccgcacccctgtcaagctggggctcggacacatgcccatgctcccgagcctagcctcgactctctaccccatcacggagcatgcaatagggatcgagcgtccttctcctgacaaaaagtcaacacaaggacagggccatctcgccggccatgccgctacaggtctcagacacaagggcaagaatcatcccgtcggcgatgcctctaaaaggataggacacatctcctctgaccacaacaacaacgcaacaatccttgtacacctgggccccctccttgtgactataaaaggaggagcctggggccttctagggagggcgatttcatggctcacaactcaccttactgctgatattggcactcaccttaatcatattcagagacttgggacac

SEQ ID NO: 157885 - DNA, 611 bp, Zea Mays
tctctctctctctgtaccgccgtccccacctgtcagtcgtccctaacctctcgcccacgatctccccgccgtggacgtgcccatgtccgcgcgttctccggccatgtccctgcgcccgcgccccttttgagcctcgcgccctgctcgcccaccttccctcgctcatttgcgccctctatcaaaccctctagctctctctctctctctcgctctgcccacgcgtgcagggagcttcgccttcgcccaccgtcgacctctgcctattctgcgtccaccgtcacgatcacgtcccgtccagtgccacggtgagccccgcctcgctgtcagctgctcgagacacccttcgatgtgcccttttcctctctgtttcgtccggtccgcgctcaccggagcgatctctacgcagccggagccccaccgtcgtcacctcgtcgcgttcttgtgcctccgccgttgcttcgcgacttcagcgcttcccctcaaggtgagcaacctgctcgtacccttaatttggtcatccctactctgttgcccacgcgattgctcgccggagctatccccgccgccgttagcctgccccgccgtggtctgcgccctctagtgcctctgcg

SEQ ID NO: 157886 - DNA, 446 bp, Zea Mays
tgtcgtttctgttaattgaagccagttttcagtgttgtcctcaccattttgtttggaccttgtaactattgatccctgcacccttggtcttgggcaattgtgtcaagttgatagtgctatggtcgggggacatgtttggctaactgacttgatttggtgccattgaagatgtggagcaagatgaggggtaaaactgtgggttcagtcgggctaaagtaattgggttcagagttagaaatatctgtaaaagatcctatcccactaccatctccaggtgattctggacaaactgcagataagggtaactcgatcttggaaaagggaggtaccataggatatttttcaccgagcagaagatgaggttgaaccatttgaaccctatccaagtggtgactcagctacctgtctgttgttttcatgtcaggcatgcaacaagctgatttctg

SEQ ID NO: 157887 - DNA, 589 bp, Zea Mays
gtgcaccgatgcttccagctttgggtctttccctatttctctccaatcttcaggttagtcgacttttgcttattactattcacgttagcaaactggttctctctctaatttttgaaattgcagaatgtcctcgattctgtgtctgtccaactgaaatcctatggcactcctatccctgacctagtttcgtctttgatgcagtggaaccctctactgcttcaaaggcagatagaagatctgaaggcctccaaccttggttagtgagtctgcagtttccttttttgctatttattgcctttcttatctcatatattgtgctcttctctactgctttactagctttgactcagcggtgctccaatgctgaagagaactatacccagagccaggctgacctgaaccaaacatctgccttcttggacagtgcccgcaccttgaattcttctttgaatgctcagcttgaatcagagaagatggcttatgaggtaaattttcttgactgcttccgctttgctttctttgcttcgatgctcagtgctgttcttgcttgcaggaggagagacgaacactcattgcttctcgcgacaat

SEQ ID NO: 157888 - DNA, 606 bp, Zea Mays
cttttgtttgatagtggagctcatgaatattgcagaaagaatcagcatttggctccatgccttggctcctcactgcccaaataaaaacccctaacctcatcaagtgtttggggttagcggatgaagataaatatcaaatctcttcagaaagtctactagcatcttgtgaagaggaaaccgaaggccagccttaataaagcttcagtaaacccatacttcatctttctcagggtgcgggacagtgtcctccccagcagccctcgcaatagaaatgtcatgaaaatatttgtccttcattacctcaatatctcccttctttatggtcgacttgccgaagataacatggcttgccttctagggtcgttcgtcagcatcatatattcagaatcatctgtagccctgccaatatctcatcagaaattttcttaacattatacctcttcatgacctcctaaaactcaacaagagcaagatcttcgatcttcttctcttcaaacatttcaaaaattcgcaaaacatgaagctacacaggcaaggttgtgtggcaaagcgtgccctatgaagcaaacttcggagttctagcaagcaaaaagagctagttggcaa

SEQ ID NO: 157889 - DNA, 459 bp, Zea Mays
ccaatgtccaatccaccacagccaacgagtacacgaacttgaagggtctagtagtatttttgtactgtcctaaactacaacatcaggcatttttctggaagaaggttgaagtcttgttcctggcttgggttgtgtcgtcagtcgccactcctttacctcgacctcgagagcgagaccgcggtcattaacagctgctttgttgctttctgggaaagcaagctcgagtccctacagtccattgtcgccccctacccaaaaaagctcgagacaggtcatcatcgcgctcacttttgttagttttatcctgcaagtcacagctgaatagctcatccactgtcattactcctgtaaaccagctctggaatccatggaatagtttatactactactagacatttttctatatcctgctgaactgtactgttgcttttgatggcgggccagacagttaaaaaagaa

SEQ ID NO: 157890 - DNA, 754 bp, Zea Mays
caaaattatagaaattggaatgtaccaatttggacctaatatggattttctatgaatttaacaagtttctgtaattatttttacgctaaaaagtatttttccaattatatttatttggttttctgttttctggccgagcacatcattatcagcaaccccagggactaaaccataaaataatcccagactcagactgcacctccctggaccgcgggtttaataagggatttcttagggtttcttacgtaaaagctcactcgcgaaggggtatggaatgacatccgccgtctgatcatcaccggacgcgccagattagatcgtcctataaccgaaccggtacgcaagggaagccacaggatcagaatccgacgacccagaatttatgaagcttgatccaccctgaaccgtccgatcaaaggcgaacgacagagattcaatcgcgttgcagcgctaagcaactctaatcctagccgttcaactacgaaccagcgtccgagatccgtttgccccagctgaccggactccagcggcggagcgatgcccccacagcggtgcgccatggtcggaactccaaatcggccctcggtgcacgattccactgaacgataggtgctacacgaagcctatacgctggcgaatacgataaggatgttcttaccggctctccgaggttgtagtggtgatgtccacgaagagtagcggacggcggcgatgtccagactccggtgaggaattcccccaaatctggccgatg

SEQ ID NO: 157891 - DNA, 507 bp, Zea Mays
ttcgatcaaatctcgtgcccaatcagaggtgtttgttcctccccgaatcccgtaaccacctccaacacagtctgtggagcaaggcgaatcaagatgtagacctcatcccagtctctctctttctcgcctgctcgatggcgctctgctccttccgatggctttgatgctcaatatatagatcacagggctaggggcgagtccgagcttggccgacctggtcccgaggtccacgcccgtcggcttgaatctcgcggcatttggttggggaatcgccaggattccgcgcaggtcgttggggaggaagacaacactgaccacgcgggcccatctgtcatcgcctcagcacgaagcagcccacgcatagtagaaccatgtgcggctgccaccccgggcccacgtgtcggcgcgcaggtgacaagttgggccgtgcgcgcggagaaaagcggaagatgggccgcgggggagaagaaatcggcccagtgaggttcagctgagccctttttcttt

SEQ ID NO: 157892 - DNA, 885 bp, Zea Mays
atcgagtaataatttgcttaggattgctataacaatattgtagccggatcttaggactataactttgttaaagagtgtcgatcatgttactacacaaaattggaagttattggctctgcaaatcgggctgtcagttcatctgaataaggaattccatggtacagtagccgagctcaccgccgacgaccttcaccgcgattcgtgctgccgccgtccggattcgtgctcgtggctagtggataacctctcgggtaaaagaatcttcaccgccgtgcgctggacatcactacggtgactcaccgccgtcttcctttttggctttgcggctggcgcggatagcttcgccggtgaccgccgttctccggtcttgcgccgcgtgtcccaatctcgccaccgcatcgccgtgactccctctaactgcccgtcgaccaccggagttactgccacgccactggacacgtattcaccgcgccaaggttcttcctcatctccggccgcccatactgtccgctcaaattaagcgccaccgccccggggatctataaattgaccccgcagagagcttcacaacaccatcacccacccagccaccacgtattgctagcaattgttcgcccgagctcgcgaattttgaattcgccccaaatccattctccgccacccgaaacccaacctcaccgtggccagccttattccggtcagttcatctccttctctccctcgttcaagctttcccttaagtctacgatgcttgccgagccactgaattgaactaggagcccgccaatcgctaggtacacgacggtattgtcgtgatgttcacggccaccgtggccagagcacaccccttgatcattagtgcaattatgttgggggaaatcctcc

SEQ ID NO: 157893 - DNA, 420 bp, Zea Mays
tccgtaatagcttgaagaagggcagcgccctctcagccagcctcgaaatgaagcgactaagggcggctaatgaccctgcaagcatctggacatccttgatacgggctgggggccgcatcgcttcaatcgccttgattttctccgggtttgcctcaatgccccggtacgaaactaggaaccccagcaacttccctgcggagacaccaaagacgcacttgtccgggttcagctttgtgcgggttgcccacagcctgtcgaaaccaggatcaagtcttccactagggtcgaccctctcttggtcttgactacgatgtcatcgacgtatacttccaccttgtccctgatcaggtccccaaaagtcttactcatcgcccgcacaaatgttagcaaggcgttttttagaccgtagggcatcacgac

SEQ ID NO: 157894 - DNA, 533 bp, Zea Mays
agcaccagcgccatcacccctaccgtggcaaatcctctgaatctggtacttcgggaggaagtactcagaggtatcgggttgttcctaagcccggtctggggctggtgtgtttccgttgtggtgatgcgcatcgctgtgccgagtgtcagtggagtggcaggtgctctatctgcagccaagatcacaaggatgtggtgtgtaggaggaatcccaatgggaagctcagatgggagccagcgacttcctcctcttctcagggcactgtcaacatgatgtcaagcactgagcagcaattttcagttccacttcctccgcagcagttctatgtgcctgggacttctcagttcatgccgatgcagggttttcctcagtatctggccgtgcctactcctgcaccgactattcctgtaccgtctcagtttggagctccgcgtctgcctcacctcgacggctcagtggggttcttctgttaacttcactccgggagcttcctctttgacgggtatttccggagcatatgtgctaccctctgt

SEQ ID NO: 157895 - DNA, 464 bp, Zea Mays
aggaaggtgacgcttcttccaagttcggttgccgaggggagtaggaggcgatatagtcgagaggagagggtgtgcattttgaggtggagtgcagaaagacgcttggcgtgttttttcctcggaggggacacggtcatttaatgtgacgtgacgttctgcttgccagccgaccgttcatggtacgcgtgctcgcgaaattcgaaacaactattgttcagtcgtttttcaatcgtaccttggtggctctgtccgtccaataaagctgaccgggagggagggcttcggaccattacctttgcagtttcaatcctttgcctccaaacgtcgttttcaccttctgcccagatagctcttcgccttcttctcgccttctgtttgtttcaatggcggaaaagatcattgtccttcctccccgctacacgtggcctgtgtcttccgttaccgacgcggatctggaggcgttg

SEQ ID NO: 157896 - DNA, 980 bp, Zea Mays
cccaaatccatcaatgctgatactattttggtggtagtcgacatgttctctaaatatgctcattttgtgccacttcttcatccattttcagcattgaaagtagctcaattatttctggattcggtttacaagttgcatggtttgccgcaatccattgtctcagaccgtgataagatttttacaagtcggctgtggcaggaactcttcagattatcaggcaccacattgaagttgagttcttcctatcatcttcaaacggacgggaagaccgagcgtgttaatcagtgtttggaaacctttcttcgcagctttgcacacgcttgtccaaagaagtgggttcattggctatctctggccgagtactggtataatactagttttcattcttcactgggcaggtctccctttgaggtactatatggcaggtctccacgacactttgggctctctacggctgatacggcgacacagctcgatctgcagacttggttagatcagcgtgagcttatggtgaatttggtacgacaacaccttcacagagcccaacaaaggatgaagtttcaagctgataagaatcggactgaacgggagttcaaagtaggcgatatggtgtatctcaagctccagccttatgtgcaaacatcggtggccactcgagcaaaccataaactcagttttaaatactttggtccgtatcccattatccaatgcattggagctgttgcttacaaacttcaactgcccccttcagctaccattcatccggtggtccatgtgtctcagctcaagcgttcggtgggtcctcaggcagtgagtgcaacccttcccgatgctaccactcatcttcaggttcctctgcacattttcgaccgtagggtggtgcttcgcggaggcaaatctattcggcaggtgctgattgggtggttagactccgatgcagcactttcgacttgggaagatgaggaggctttacgtgtcca

SEQ ID NO: 157897 - DNA, 700 bp, Zea Mays
gctaaactggtcatgggtcgcttaccaggaatggggggccgctgaagctgtccacggtgcggtgcgaatccgcggcggagctcctaccacggcgagcaattgctggcgcactgtgtcccaatcgcgccaaccgagaccacgcacgcccttcggagatcgggcaggagtgctcaggccagcaatcccgaccacatcggcgtcgttgtcgcggaatcgctgcggtggaacctctcttctcgtggacacagccctggcggcgacggttccattgttccggggcaaagaactcgcgtgagtgagcagcagggggaggaaaagatcacgggagctcccatttattccccggcgtggttgatcaggtcgtgcgcgcgagaatcgtgccagcggcgtgcccgccatgcgcacgttccgttgagaagaggactgaccccttcgggcccacctgacagagacacacgcgacacgtaggacgactgagggactggctaggcgggcccaccggtcggtgtttgttcacgcgcgagcggagtttgactgggcgggcccacgtggcagcgacacggacgagcgcgcgaggggagaaagtggaagagacaaggtggccatcgttgtcggtgccagaaacagatattgggccgcgcaggatcaaaagggaaatgggccgagatgagcagaagccagcccaggcacgtttttcttt

SEQ ID NO: 157898 - DNA, 427 bp, Zea Mays
gacggctcttggcaacgtgggcgagaaggggcgacgcggcggcggatctggcggcgcaaggccgattccgagccggaggaggtcggcggcgacgacgaccacatcctgttgctgacgagtgaagtccgttcgcctcggaagcgcaagcgcccacaaatcccagtccgttttgccggtacgtctcgccatcggtggatttcttctccgaccatcgagggctcgcttagatccagagttcatcggttcgaatcttgttgttgcgggccggatattcagcgcatcaggtacgaacatggtgttccccctcttcgcagttacttgtttgtaactttatattccaaaattttatgtttcagttccgtagttgaccgaactcatgtgaatcaacggattccagtacgatgtggccgccaaagtaaccttacat

SEQ ID NO: 157899 - DNA, 762 bp, Zea Mays
caactgcaggacccactcaacgtgaagaaggtgattgtcccacgtatcactgtcaactagtatattgtcaaaaaagaccaaaacacatttgcgcggcaagggcttgagggtactgtccatagcgccttgaaaggttgctggagcacccgtgagtccgaaggccatcacacaaaattcaaaatggacatgatgtgtttaaaaggctgttttatgttggtcctagggatccatccatatctgatgaaagccgacccaaaggtctaatgttgaaaaccaagcagtgtctgccaattcatccaaaagttcatcctgtccactacgggaactaggtactgggacttaacggtcagtgcattgagatagcgataatccgcaaaagcgatacgtattgtcctttttcttaacaaaatcactgaaggggcaaaaggacttttactgtgctgaataagaccatttttatgcatatcatccacttgttgctcaatttctaacttgagagcaggcgcgtaccggtaaggtcgcatttggacaggacgtgcaccaggaagcaatggaatctgatgatcgcagtcccgaacaggtggcagcccagaaggagatgcaaacactaaagaatatttgtccagcagcacttgtaactctggatgtagagactgaatcagggactgttccttatctggcagatccgagaggttgcatagctgaaccagtgcaccatggctacctgaagcttgcacaccttaaagtttcactaaagaagag

SEQ ID NO: 157900 - DNA, 1576 bp, Zea Mays
gtggccgcgaactgcatttccagcccactcacactttctctccgcgcggcccactccttatccagccttttcttttgtttgatcacacttgcgtgtgggtcccttgcgccagcagtgttcctgttcttcttcagtcacgcgtgagcgccgcctcagtccagggaggaattggcctactagctcaaatggccctagcctgtgcctctgcgcacctgttcgttgcaacggcctccctaatactcgtcgcgtccctcgctgttaatcctcctatcttctacatgccctctctctaagtataaatgctgaaaccgagaacctcaagattatcatccaaagctcccgtatcatagcgagaatagggaatgtgagagatggatccaccattgttgttgacgctggatgcgggcagcattctgttgagtcaaggccgtgtgggcccacctcatccagctcggggtgactgctggtgggtctcttccacctcgtaacaggactaccccgtagcttgcgcatgatgtaaacggactccgcatcgcaggccctgatgaacggatctgccggttttcccccatccttccaggataaagcaacctcctgcgaccgcttctagcatctagcctcgatctatgggcgccagagtcatggtccgcctagtaaagcgcagagagagatgagccatgtcgccatggttgaacgagcagagctttggcatggccgtcgccaaggaagtgccactgcacgacgccaccgtcgatctgcgtccctggccgctgtgactcacctgaaccgtcccctaggatcgattggagcgtcggactgtgctcaccggtaattctctgctgtcaccgtcacgccgcgtctcgaccaccatctgttgttgcggtgggtcgtcggggtaatactgcgggcgtccgccattgctcgcaagtgagtccagagcctcgcctcggcgaatccttgaccagggggcgctcaactcatcgtcgccgtcgcggttacgcgggtcgccgtggacggagctgggcactgctggaatcctggtaagaaaccgcctcccatgttcgcctactcctcaatttcatttcgcacctagttaattttggttttgtgcgctgggttgctggcatgatttccgtcggccatggcgccgccgcgggctttctggcactgccgtgcgcgtaggcgtagggggtggcgcgtgcaccggagagtggtggccgtgggattgttaatttgcggccgagattaactagtttcttacccgttcgcgcgattgcactggcaccgtcgatctgcgaacccgcggctcagattagatttggtttcattaaaccagggccgtcagatctagatccgagtgaccacattacataccggttcgcttctgttgaagtctaatcgtggccgtaggaatctaatccgacgtctgtgagcgctcgatacccgttcactctggagtaattgcaaatgagtccctcggtttaggtaaaaataacccgccgtcctcttgcactgttcgcagagccttaggaatcttatgctctagcccctgcgttttccagaaaatgaggcccag

SEQ ID NO: 157901 - DNA, 584 bp, Zea Mays
cagccgaaggtccgccacctcggcgctccgttgggcaaggcgctcattggcctcggtaagcgcggcccactaggaccgcagcgactcccaaatgttgctttcgtggcggatgaacagcgacttagcggtgctcacgtctgcaagctcctgagagaggaaacaggatatcataaagaatgccctgatcacatgaggtgtacgtctaaaaccttacctagaagaccttgggaacgtccctggaaaggatttccatggtcgaccgaagcgacctcatcgccgcctcggtatattcacggaaattatcccgaaactgctcctccaactcatcgttgagggagaggaggggcttcgaggtgtcgcggctccagaacaggagcgactgcccacaccactcattgggattgagctgcatggggataaggtcgctgctccccaagacgggccacggttctgcgcgcccctcgactgaggcgtcgagtcgccctgcagtcggtgcatcgggtccatcgcagttgacgtctcgggcctctcctcggccaacgtgacaggcctccgctcatcgacctcggcaacaacggccgccc

SEQ ID NO: 157902 - DNA, 745 bp, Zea Mays
ccgtcgtttcgtcgtcctctccgccgcctcgcacaggtagataaccgcagcggtggcggctcggctgcacgccctgtacaccccagcaacaaaagtcggcggctgctcgcgtggagtaagacggcccacctggcgcgcttgaggatggtccgccatcaggctgccggtggatggactaccaccgccgagggccagtgcgtccgcatcaagcgtctcgtggaggagaatggcgggcgggcgcgaaatcagaagtggtagctgctacagcagccttctcttcctctttacacgcgtgttcctgacgtcgagagagacgactcggtcaagttcggagacaacgatagtggggaaagtcggccctccgtgtcccctcttcacgtgcgcggtccacaaacttcatctccctgtttccccataggtacgaccatcctcttccaccgcatttttcttgaatctcaaattccttgctgttaggtttgctcctttcctgccagttcgtgtgcgccgatgcgattatagcgggtcgatgagtaaccgtcgcaacctttgtcttgagaaatttgcagggcacaggtcccgccatggggaaactgttgttaccttatcgcaatctgtggggcggtccgcacgggacggtcacgggggatgtccagatgtttctcctctctcctccatgcaccctcctgcctccctctcactttttcgtcctcaattgcggtccctgtcggttataggttgaagttgg

SEQ ID NO: 157903 - DNA, 548 bp, Zea Mays
tttactcagagcctgcgtgttaactttcaacagagattgggagtccagtttgccgtacgccgaattctcgtacaacaacagccatcaggccagcatcaaaatgtcaccattcgaagcactgtatggaagaaaatgccagactcccctaatgtggtccaatgtgagggaaaggacactagaaggacccgactttgttaaagaagccgaagaaaaagtcgctttaatccgcaggaggttacttgaagctcagagtcgacagaaaagttacgcagacaataggcgaagggaactcagatttgaggaaggagatttcgtttatctcaaggtctccccgatgcgtggtgtcaaaaggttccaaatgaaagcaaaactggcaccacgtttcatcggtccctaccccgtaatttcccgaatagggcccgcggcataccgtcttgagctaccagaatccatgtcagatattcacaatttgttccatgtgtctcaactccgcaaatgcctaaaggtaccagaaacccgcatcgaggcagatgcaattcagattcaaa

SEQ ID NO: 157904 - DNA, 688 bp, Zea Mays
atccaagtatcctggattgctacagccgttaccagtgccagaccaagcctggcaagtcattactcttgacttcatagaaggtttaccccgtgctgctcgtgcgaattgcattttggtggtagtggacaaatattccaagtttgcacactttctacctcttcttcatccattcacagcatccaaggtcgccaaagtgttcatgtcctcagtgtacaagcttcacggtatgccagcagcgatagtctcggatcgtgatcgtatattcaccagctccttttggcaagaacttttcaagttatctggcacacaattgtgtatgagcacttcgtatcatccccaaacagatggccaaactgaaagggtcaaccaatgcctcgagacttatttgcgctgctttgttcactcttgtcctcacaagtggcatcattggctaccaatggcagaattctggtacaacacaacatttcattctgctctgggccgctccccattcgaggtgctgtatggtcgaccaccacgacactttggtattgcgcctgctgacactataactgatccagacctgtccacctggctgtccaacagagaagtgatgctccgcgtggtcaaacagcacctgctgcgagcccaagttcgtatgaagcaacaagcagacaagggtaggagtgagaggcagtttgctgttggc

SEQ ID NO: 157905 - DNA, 571 bp, Zea Mays
gtgaagttcgaccccagttcggtgctacatgcctcgcttgactcgtgggtgtcctctatgcccttacttacacaaggcaatcggctcgggtggcgaagtccaaccctagtttggtgctacaagcctcacttgacttgtgggtgacctctaagcccttacataaggcaatttgctcggtcggtgaagtccgactcttgttcggtgctacatgccccgcttgactcagggtgcactcaagccctactttacgaaggcaaacactaaaggttgcattctaatccatgaacaatgttatgcactctcactgcacctcgacatcacaattcttacttcatgacatagataacttgaacaaatctccttcacgcatagcaattttccaacattttctttcatgccatcaaaatatccttagctaacatgcatgttacaagtaagttttaatagggtcttcaaagtttaatactcaaagttacatgatcaaacatcaagcttgccgaccactccgacaactcgggggctaggatgttgcccgcctcgccaatttcgacagctcgagggctaggcctct

SEQ ID NO: 157906 - DNA, 715 bp, Zea Mays
catccaagaacctggccaccttttccgaaacatgggcacagggtaattcgcctcagatcgaggcacgaagctgtaacaaccaaaattgttgtgatattgttcttttctgctcgccttcgtctgataagacagttcatgaatattgcaaaagcatcttgcatctggttccagtcattggctcctcatggcccagataaaacccccactctaataagagcttcgggggtaatctgatgaaggtatatctcaaatgttttcaaaacatcgactaacatcttatgaagcgggaaatgaagcccagctttcatgaagctcctaaagactaccacttcatcgctttctagcaagggaacaatgtcctctcccccatccctcactaaagatacatcatgaaagtatttccccttcatcacttcaatctaatcttgcttgatggtggatttccaaaaaacaacgtggctaggtctccacggccaatcttcggtaatctcattctctcacaatatcgaagatttcactatcgcttgaatcaccagatagcccagccaagatttcgttggtgatcttctctacattggtcctttccatggcttcgtagaagccagtgagtgtggggtcagtgattttcttgtctttagccatttcagtgatggtcgcgtccgaaagccaaagctcacaaaggaaactaaacaacaactgcagcacgaaagctaga

SEQ ID NO: 157907 - DNA, 844 bp, Zea Mays
ggggacgccttcgatttgacgatgaatggaccctcccacttcggctccagtttgccccgtgactctgtccgggtggtccggacgagtacgaggtctccttcgttgaactctcttgggacgaccgcgtggtcgcgacaggccttggtttgagcttggtatttgttgagggcctgcagggcgaagacgcagtctctgtcgatgaggtctttggacgttggttcgtctacgtcggggactactgatgtgcttgttcggggcgacccatgctttatctcttgcggcgtcatggcctccgatccatatagtagacgaaaaggtgtgaatccggtcgcccaacattcggtcatgtttagggcccagactacttcgggtagctggtcggcccatttacccttcttgtcgtcgagaagccttttcttgattgtagtgaaaatcttgacgttggcacgctcgacgacgccgttagattgagggtggtataccgaggcgaaggcaagcttggtgccgatggagaagcagaagtccctgaagtcctggctatcaaatcgtttgccattgttgactgtgagctcggacgggactccgaatcggcaaacaatgttttgccagaagaacttctgggcagtcttcgacgttattgtggatactgccctggctttgatccacttggtaaaatattcgacggcgacgaaggtgaacttgaggttcccttgagccgtaggtagtggcccgatgatatccagcccctagcgttgaagtggccatgtgtgggcaatcagcttggtgaactgcgaagggttgcccgagcggggagaaaacttctggcaagcttcgcacgaccgtg

SEQ ID NO: 157908 - DNA, 734 bp, Zea Mays
gcttcatcagataaatgagctactgctatcttgctgcttaagaggggagccaaaaggatgacaacttgtgctgatgagttgctaattctttgtcccatgtacctcatgccaatagtctataccaacactaaaaatgaaaattaaaccttctgaacttgctaggcggtgcagacacagacaacagaacaacatttcatatatgctaaacacataccttctatagcgaggagggtgagcttcttcagtgggcgatctacttggagttggcaaacagcagcagaaaatagggcttcttcataggctctgttgctgcattaaaataaacaaacaacagtagaaagcaatggcaaggagttcatctgtctagcgctaggaggcagaaaattcacataacttccgacacagagcaggacgaccaatccgttttaggccctgtcatcgcctccgccacatcgtcacgccagaaaagtagcaaaactatgaactccaggaccacatactatatggctgattacctggaaaccaaacaaaagtcacagattgtttacatcacaagtgtaatgccccaacattctcatatgaattaggcatgcataaacctgaaagggcgtccacaaaaacacagacattttttctctggtcagagcgaagttgttggaccaactaacataaacagctcctgaaatgtgttcatggtcttatccaacataaaagtcacagattggcacattttg

SEQ ID NO: 157909 - DNA, 669 bp, Zea Mays
gagtagtcggtgcaggagtaggtgcagccatatactgaggaaaaccctgcaccggcacaaactgagaagacccaggcacataaaactgctgtggaggaagtggaactaaaaattgctgctcagcgcttgacatcatgttgacagtgccctgagaagaggaggaagtcactggctcccatctgagcttcccattgggatttctcctacacaccacatccttgtggtcttgactgcagattgaacacctgccattccactagcactctgcacggcgatgcgcatcaccaaaatgaaaacacaccagccccagcctgggcttaggaacagctcgaaacctctaagtacttcctcccgaagtacctgagtcagaggatttggcatggtagggatggtggtgctgatgctgaggcttgcccctcttatgggctggacctccagtgttgcccctcctcgtgtcctggccacgaggctgttcaacacccgaagacttctgcgactccatggtatactggtgttgcatctccacacccagtgcctgctccactgtagtacggaagtccaccaacagaaaggctccctgggcatgcctgatggaaggtttcaggccctgacggaactggctcgccttctccatctcattataagccacatgagggacaaagcggacca

SEQ ID NO: 157910 - DNA, 484 bp, Zea Mays
cgtaatcctacacatttattatggaggggcaaccgaagtcaagatttctggtttcttcatgggactacaagatcagagccaaacctccctgcttcaaggtttatgctcgtaaaaaatcccggttcaactaacacagtctgaggagattggaacttctactcctctgcagaaatttaaagatggaattacaaaatagatcaatggaatcctgtcggcccctacccaaccagtcaaacgaaagagaaagctgattcctagcaatttcaacctaaggcgaagcaggagggtggccaagataccacctgaattaggctctccctctgctgcaaaggtgtgcaagcatctgagtttctgtgacgagagagagaatatctccttcacggatgcaagaaaatatgctaaactattcgattcacctctttctagagagcacattactgcgctggcagccctgttcggttgggaggtgcccccacctgggcag

SEQ ID NO: 157911 - DNA, 289 bp, Zea Mays
tctgaaacagaaggacttcaccattcaggaccttgaaattatggcaaaagaacacgaaggtgcattagaaaagaaggactttgttattcagtctatggaaggctccttggctgaggtccaagccgagaatgaaaatttaaagaatgaattgctcaaacaatcagaaaaatctgagcaggaaaagaaacaccttgaagcaagtcttaaaaccgagatggagaagaacttaaatttgcaaaaatccttgaaggagcttcaagagaaatgtctaagcttcggcagccgatgc

SEQ ID NO: 157912 - DNA, 790 bp, Zea Mays
gtggacggaggagtctttggatgaggatttggattatttcgcggcattggatgtggctgtggtggagacttctccgcatgtgatggatgctgttcccggtcctagtgctgggcgtaggcggcgaagggcggtggcgaagcgtagggtgagtgaggttgagggtggtcgtcttcgtgtggatagggctggcaagcgggaattgttggcctcgtcggctggggtgagtgttggtgagggggagttgcgaaatctttttgagggtgaagagctgaggataatgttgtttaactacagggagatgggtatcatcccgaaggttgaaccaatgtaatgtgtggtgccctcgctgcacgtatgtaactgtaatttgtatgatgagtctgtgtgccttcgctgatccagccgtgcccgtgggggacttgtgcatttgatctagcgcgtttattatgccggtccggctgtgcctgtaatcggtctttgcgcggatagtttttcaacaaagattttcgcacggatgtgcctgcgattttgcgcgcttgttgtgctagtccggctgcacccttgggcgacttttgcacggatagtcttttgaagaagacttcgattttgcgcacgtgtcgtgctagtccggctgcacccttaggcgacttttgcacggatagtcttttgaagaagacttcgattttgcgcacttgttgtgctagtccggctgcacccttaggcgacttttgcacggatagtcttttgaagaagacttcgattttgcgcacttgttgtgctagtccggctg

SEQ ID NO: 157913 - DNA, 468 bp, Zea Mays
gctctagcaaggatagtggttctggatccacgacggtggtcggagcaggcggagatgtcgcaggggaggctggatgacagaggtcggagacgccgggcgagcagggctaccccgcgcaggagcatccgcaacggaccacttttcccgcgagaccccaggcggccgtgacaacgatcgagaagagaacgtgccgaggctgcatcgggtgccggcgtggagtatgtggcaacggcggagaggagggggaaagggactcgacgaggctgtgtatagactccaagagcacgggatgcgcggtgtttattaataaacagggtgatgaccaaatcttaacaacttcccctggaatcccaacgaatccaacggatatggcggcaatacaggccactggcagcatgcaagccacccatggcggaagaagagggcccagtcccaggagccccacctgatcagccggctgtgaaattg

SEQ ID NO: 157914 - DNA, 280 bp, Zea Mays
cttttgcatcttgtggagactggggttttgccgccgaaagaactgtgttcttggtggatctggcgcggggtcactgttccggcagaggagacccacgaggctgttgtttatgtgtcgttcctcatccgagggcttgctcttcccgtttctccctttttccgcggtctcctcgacttctctgatttaaatcttacacatttaaatatgaactccattcttcaagatgtcattttcgtacacctgtgcgaggcctttcttggaattcttccccactttggac

SEQ ID NO: 157915 - DNA, 440 bp, Zea Mays
ggctaagatataaattttcccagacacagctttaacccgcggtggacggcgggtttatttttcaaaaaccagagggctctttagcaattaggccacgacgaaggggtatcttcgatcgccagccatccgataccgatccaaaggctcagaatagatcgtgaagcgatacacggcaggcaccacaggatccaagatccatagtccaaaatctctcccttgcattaaaccgttctagcctttggattttcaatctacggccgatacaacccctcttacctcaatccttcatcgcggatccaacggtcctccaccatcttcttcacgcgaggcatcaggcaactgcgttgtggctgttcctagcccgcgacggtgtctgccggccaggagtccgagcagcacctgcgccagagcccctagccgatcgttgactccacggcaaa

SEQ ID NO: 157916 - DNA, 863 bp, Zea Mays
cccccacgattccatcgctagatcccagattcgatcgctagaaatttctaggcgataacacattacttccaaaaacccatatatacatctgttattagggctggttaattgtgaagtgaaaatattttgatgccctctcctgattggctggtaggagagtggtggggggtgtctaattcatgagtgttatttggctgatagtgtggaattgtgtacttaaattttagacgccgaaagtgcttatatacatagacttggaagtagagttcagtctgtcactgtaacgctgaacttttgcacctctacagactacggtgttgcattctctctttttctcatttgttgaacaagacttcacaaataatgcaaagttaatattgtgaagggagagaaggcgagggaacacctcagtgctgcgaaaagtgtatctaggcaggccacttgtttgattgttgtggcactttaatcatgtccaaaacgttatatgccttacattattgcgttaccaaattaatcttgccattcgtcaatttccaattattgtttcttccactcttctattgcacagtaaacagttcacaattattgttcactagggtttgcatctctacgctcgtgggacattcctttccatttggttatgatgtccaattttctaaggattaatttggtggataacctctgtcccacactcaacaatcgtcatgtgtgtgtgtttatacataaacaagattaagctttctaatgctgtagtaattgattagttcgcaatggttcggtacataatgtgttttctctcatcgttgtacatttcactatactgctgatagccacaaaaaaacagcaacgatattggatttcag

SEQ ID NO: 157917 - DNA, 490 bp, Zea Mays
gtttgggtaagaaagagtacggtaaggaaaaactccatccaagattatggatcttgattccttttggagatccgacttgaatcttatctttccttgatttgatgaagtcgatcatcttcgattttcggccttggaatcgtcacccaagttggggacatatagttaagatgacatgtaggtaagggcagatggttagtgggtaggggtcgcatagaatgagtcttgacatgtcataatctagcttcctttggggtctagcttgattcctattcttctttaatgagattgatctcttccttcttcagtctttgtctcattgattcgacgttagtgtatttttggagttagggaatatggttaagatagatattggtgagatggactataggtcaaaagtttgtttgatgttaggtgggggttgatagattatgcaatccatcgtgactctatgggttgggttagacctcatgcatgtggctgagttggtcta

SEQ ID NO: 157918 - DNA, 711 bp, Zea Mays
gatacaccacccgacgtgggttgccaaccccgtccttgtcaagaagaagaacagaagctggaggatgtgtgttgactacacaagtcttaacaaggcttgcctaaaggatccttttgctctcccgcgaattgattaggtcatagactccaccgtggggtgcgagtttctttccttcctagatgcctacttggggtaccacaagatcgctatgaaggaagccgaccaacatgcaaccaccttcgtcacccccttcgagatgttctgctacgtctccatgccttttggtctgaagaacgttggggcgacgtaccaatagtgtatgctccagtgcttcaccgatcaaatcgggtgcaacatagaagcctatgtcgatgacatcattgacaaaaagatctaacgacttcatcgccgacctagaagagacgttcgtaacctccaaagattctggatcaagttgaacccctagaaatgtgtctttggggttccaaagggaaagctcctaggcttcttagtctcagaccatgaaatcgaggccaaccaagaaaatatagaggccatccagcgcatgggccccatccagaatctgaaaggagtacatcggttggtcggatgtgtggctgcactcagccgtttcgtttctaggctcggagagaaggggatgcctctctacatgctattgtgaaagagtgaccatttcacctagacagtaga

SEQ ID NO: 157919 - DNA, 478 bp, Zea Mays
gccagattgataatccgagtgggcttctcggttgtttgggcacattgggcttcttaagtccagatttagtacctggactatcgctagctgatttctctattgtttgggtattgctagccaaagtatctaatacttcctccggctctgtaatgcatgaatttagatctgaacttttgtcttttctattatccttcttcactacataaacttgcttgaccattcgatccttattttgagctctagaccgattcttataaataaaacggtctttgtcgtatgatcgttcctcaaaatcagaattgaaatgagatgaatattctatgttatgtggtctaaaatatgaagaagaataagcaattgaatcataccagcctcaagatggataaggatgaaagtacgaaagagctgaaccatattgcattggtattggcggcccaaaaggaggatatgttgctgatgcatgaaactcttctcctcc

SEQ ID NO: 157920 - DNA, 326 bp, Zea Mays
ccgcagtccaacggagttgtggaacgcgccaatggaaaaattttcacagctgtcaagaagatgctcctcgacgaaaaaagggcaggtgggccgacttattacctgaagcggtctgggcgctaaacacgactgagtgcagggcgactgggttcacccctttctgccttctatatggatcggaggccatgaccccacaagaaataaagcatgggtcccagcgaacagttgcgtcagctatccccaacgtggacgaacccacttcgaaggatcttatcgacggagaccgcgtcttcgccctacaggctctaaacaaataccaagcccag

SEQ ID NO: 157921 - DNA, 392 bp, Zea Mays
attggttgttcaattcaggtgtagtacctctaaattcaggtgaaatctaagtccgcttatgtgcctgcatacttgaaaactgtttaggcaccaagagtttgctgttaacttgacattatgtttgtctgggcaatttgtctccttaatatgctagcttcaagtatgctcccatcaatttattgtgcgtgccccagggaattcaaacatttatcgttgaaacaaagtctaaacgagatgctcccatctgttactaattgtttcgcagcctcatattgtttaacatgctttattagatgctcaagttaatagaacgaaagtcatgttgtaggcgtataactgtatatgtttacaaatttgatggccaaatttgttggccaaattatagcagcccc

SEQ ID NO: 157922 - DNA, 316 bp, Zea Mays
agtacaaaaaattgtcttcgtcagtgccattaaacactagggatcctgggggatacttcagatccttagcatattgcctagcttcggcaacctgctcctctgatagctttttccctgccgcgtgacgcactataaattccaatccctcagtagaagcttcggcggcagggaattcagattctttgctggttctctcttcttctaacggtaacagagcttttgcagcatccaaaggcccttgttcagtatccttttcaacaaaatatgcaggccctgtttctgcgggaactgagggcccagctttagcttcaacccg

SEQ ID NO: 157923 - DNA, 895 bp, Zea Mays
agcgtcgcgcaggccggcggcctcgcctgcccctccacggaggaaggctgggacgccgtgcgccgcgtcgtgggggtcttcaaggacatcgcgcgggtgctggtcgacaccttcgcgtcaagatcgaacaagtccatgatcccgattttctctcgatccctcctttttctgcgttcgttgccttttggtgttctttgctttataagatcttctttcttttctctgctacatggtgaaagtccgtattcgtcggctacttttggatgcaaaaccgaaatcctttgttccgctcgctagttacccggaggatccggagttggaacagttcctagaaatggagcaattgcaccgtctaaatgaatgcctagttgcttcatctaggaacataggtccacatacgcacggagtggaggatctccatggaggccggttctgggctcttggatatgattcagactctgagttggaggaagaggaatccagtgtggtacctgtggctgtggaggcaccgggttttgccgatcccaaaccatcgttttcgtcggggatttcggagacatctgtttcagtaagtaaagatcacttcatgaatgtgccttctccgtgtcttatcaaaaaggcaagggaggatcggcgtccatggcaaggtccactgcctaaaccgaggagatctcctatgattacgttcgggaatgctctgagcaaggccagagtgttttcgaagaaatcgtactcttggtctgatgctcgaagttcaggccccaggcgctccccgtgtttttcggtccacagcagtactccaagatcggtgcctgctcattccggcaatggaggcacagatgtcgcatgttcaaatttcaaaaataaggatgcaggatctggtgctgtcctgatc

SEQ ID NO: 157924 - DNA, 1140 bp, Zea Mays
actcttaaatcaattcacaaaagtgtgaagatagacaactgtgtcgcaacatattttcttcctaattcaacaatttaccgtgactaagaatgtcattagatggggtactttaccatagacacagaagttcagaatagagacaccgaactgaaacaacacagtatatagaagtatggactaataagacaaaggatagggctaaggggattggatcaccttgaacaggttaatcttcgtgatctgacaagaactacaatacattgaacagattaaactggtatataggacacagtttgaaccatcaaaaagtttggataagtctacagtttcatataaatgtcgtgatctgacaggaactacagtttcatatagggaaaccatgaattttgaggtcaggtagatatatttttaaacaaaactccggatagcatactgcatatcatattaatgttttgtgaatagaggtgtggtgttcagatttgagtgactgatgtcttaaaaaataaaaaatctgacaagtgctaaaatagttcatgtagtacactcaatatacaaaatgccgcacattacacattgcccacaaatattgattcaactacaacttaaactctatttatttacggaaagggtgcacggatgataaagctacagtcaattcgagaaaaggaaacatatataaaacttagaaacacaaacctgaaattgacagatgaacagccacacgagtagttctctattttgtaatccaagtttgtttgtgtttcagagaggtgtggtgttcagatttgagcgcttagagaggtgtcttccatctcatactcgagcatcgcaagatcagggcggggctggtgcgtagaatgggaagaatgagatggtgggacggtcatgcacttgcgatgggatgcgggttgatggtggtcctatgcgctggatggtgaagaggggattgggttgcaattccttctgtggcagcaagccgtggattgcgtttggggcgcggaggatatgggcggggcatccgcggtgcatgggaagaacgattgggcgatgggtggtcctgcgcgtcgtcgacaataggattcctgcgtgctggattgctgcggtcgtggatagtggcgaggggatgtgtttccttctgtg

SEQ ID NO: 157925 - DNA, 690 bp, Zea Mays
cagtttgcacagagaaccctgagtatttgaaaaacccataaagagtctgcaacactatttctttgcgtcactgacaaatgcaaatagaccctccccttttctatttcttcacaaggtgaagtccacgactgtggacggcggagcaggaactccggcgagcccataccatccggataactcaactaccagtgctctggtgcggttgacaccaaatttgacccctaataaccatttcccctccatcagttgcagagttctaactctaaatcgctctttccacggtgacgacgcaaaccgaggacaattcgtggtgttcccggtgacctagtctaatctagctcaactggcctggttgctaagcatctacaacacatagagacgctgaaacgagagcaaggaagccatgaacggacctgtaacgagctagccatggtgagctcacatcgcacggtgttcttgattgatttgggggaaatcccaaattggagctctctggtggatgatttgagacacgagcgggtgcattggatgcttgaataccaaacggagctaagggcatgctcaattgataggatttgagggtggtggcttgtgaattggacaaagtgcgctagcggccggagaggaagaagaacactggtggctttaatcatggcgttcatcggtgcaacggctcaacgattgtgatcc

SEQ ID NO: 157926 - DNA, 552 bp, Zea Mays
ggcatgtgttaacttatcttttaggatggtgaatgcctcgtgttgtgtcgtaccctaggagaaagggatgcccttcttggtgagttcatgcaacggagcgacgatggagctgaaatcacgcataaaccgtcggtagaaccctgcaagcccaagggaactctgaatctgcgtaactatcgtcgacgtgggccaggattggatggcctcaatcttgctactgtccaaataaatgccctgcggagtaacaacatagccaagaaacgacacacgtattgtgcagaagttgcatttttccaaattaccaaataagcgggcaacgcacaaagcatcgcaagctgcacgcaaatgttccaaatgttcttccatagacttgctgtaaattagaatatcatcaaaataaacaaccacaaacagtcctatgaaaggccgcaaaagttcattaatcaaatgcataaatgtgctaggggcattagccaatccaaatggcataactaaccattcatacaagccaaattttgttttaaatgtcgttttccattcatctccaagttt

SEQ ID NO: 157927 - DNA, 395 bp, Zea Mays
atcatgctctcggaaacgaggtgaagaaacaggtggagtagtgaagggagtgggagtgggggaagcaggcgtggtggaagctattggtgtagcgagggtagttgtaggtactagagtagataaggctggagtggtagtggtggctggagcagagggctgtagtgaggggtcaagtctagctggagtggagcgtaaccaaaatgactaatgtctgacaatgtaagcaatttgatcagagccaatatgcatttgtcctccctgctctactctctcagccgatgctgctgcaaccgctactcgaatagctttatcaagtttgcacttcttcttgcctccctatcgctcaaggtagattgcattgcccttgtcctggcgaaaagggtgaggaaggatcc

SEQ ID NO: 157928 - DNA, 808 bp, Zea Mays
cctccagctccacgtctccactcacacggacgcaccagcgggcagccgccagccggaaacattgcgtcaccacgcctcgtcgccaacgtctgcagcggtcgagcggagccctactccatcgctcgccggagagacaggtatcggccggcagccgcactccacagtctccactcctcctgctctgatctctccgtgtctggaaacagggactagaacatgccaccgactgggggtgctgatgccgatggctctgctgttggctcatcgtcatcggcatccaaggccaagagcttcatcctggatccaccattgccggtggtggtgcatagcaccacacttcccacaccaaatccaacatcaggtaaagcactgctctgctacattggtagttgtgtgtgttcagtatataatgatagctgtatgtacatgtatataatggtagaaacatctattgaattgttgtcaggatctaagcgatcaaggtcagaaaatatgtgccaaaaccttagtggtttgtgtctacatcaaaatgatggcagtggtagaggttctggtgcagcagcaacaaatgatggctgtggtagtggttgtggtgcagctgatgtaggtagggatactttgccaagtggaggtggcagaggtagtgctgctgctgcagcggatggaggcagcaatagtgaacaagccatcaatattgaggatgatgtccctactggaaaaaggcagaagaaatgcacatctgatgtatggcagtactttaccaagaagaagttggtcattgaggataatgggaagacatatgttcagt

SEQ ID NO: 157929 - DNA, 647 bp, Zea Mays
gtgaaaattaggggctcttctgttaattagccacagcgaaggggtacggtacaatctcagccgttggatgcaactctgagggccacgattagatcctaaccagccaactcacccaagccactggatcaataactgacgctttggattttaaaatgcctagatcgatccacaagcgtccgatcaagatcaaacgaccagcaacggatcaggccgaaccggtacacttaataagatctgggccatccaataacatatctacgatcccagggtgctcgcgaagggggctactatgaccaaatcagagccgccgattcaaggatcgagggttcgcacatcatcttccccaggtcgaacatgccatctgatggagcacacggcggcgccatcgccacggtgccctgagcgcgcgatccgcacaacaatccttgatcctatcggtgatacatctagcgaaggttgaaatgagtctattggggaggatctcaccggtgctggcaccctgtacgagccgggtcatgacgccaatagcttgaagattccttgatgaggaagcccgaccggtgccgaccgagtcgttgcttgagtatggttcccgcggtgtcctagcccgatggtgaagcttcttcgttgcatgccaaggtcgcaga

SEQ ID NO: 157930 - DNA, 1387 bp, Zea Mays
ctttcaaattatggggtttgtgccctaggtcaccacatcaaaattgtagcccaattataggagaacaactttgctaaagattgtgagctcagttgttaagagaaatttggagaaaaacccaatcaaagatggactgtcagactagttgaggtctaaaattcagcatgacagtgttttaagatgaactttgagctcgattttgaaggggatccagtgactttttgtgagtacacattatagcaaagatatagatggattatagctctacacctttgctgcagaaagttgacatagattccacataaaaactggagaaaatgaggctccaaaatgcgctgtcaggttcatctgactgaaactcgtgatggtacagtagcctggattggatcagactgccagcgcggaactctctccgccgacgatacctccgccgtgattcgtgccgttgccggcccgacttgtgcacgggatgggcagataagggcacacggtaaaagatcttcgccgacggtgagctggcgatcactccggtgacctccgtggccctctctccctctttgcggctgaacagattaactcgccggtgaccgtcgcttcccagctgtgtgccgcgtgtccaagcctttccaccacgtcgccatgactccttatacccgtcccatcgtcgacggggaggttgccacgacggtggacacgaattcaccgcgcaagcttcttcctcacctccggccgccgcgcgtcctcctcaaaattcacggccaccgtcttactctccctataaattgagcccatgactagctctgtgaggtcgtcagctaactagccaccgctaatcagccacaatcatctaccagcgagcttgaatttccaatttcccccaacctcgttctccgccgccgtgaaacccaccctcaccgcggccagccgtccccaggtctgctcattcctttttcatccctgttctagcatgcttacgtattggtgatgctctccgacccttccaatcgaaccaaaccgcccctaatcgccaggaacacggctgtctggccgtagggttcacggttgtcgtggccagtgctccttgggtggtcttagatgaaattgggttggggaaaaggcttagggtcgatccaattcggtgtctgttgctcggagaactcagtcgttgccccgttcggccggtgtaagtgctcgccggagcgcggtcgtgcgtgaacggcgtcgaggatgtgtcaggtgaagaaatagaacatcaggggcatttctgcaaatcgtcagtgactctgttaaacagtgagagaacctgtttgcgattagtaaaaaccccgagtccctttctgcaaaggtgccagggcgcgggcgcgcgcgggcacctttctgccctagc

SEQ ID NO: 157931 - DNA, 713 bp, Zea Mays
gcaaaagattatggccgaaggggtatcttcagacctgagccgcacgattcagatctgatggtctcagatataacatgaaagggtatgttactaggtgcgctggatcgataatcaacggtcacgattcaaatacccgaaggggtatccacctgtctgatctggagcatccgtggctgatccaaaggccgatcacaacaacacatcacaaccccggatccagtggccaccggttttcttcccaaaagcagcaccgtacccagcccatggcggcgccacacgcccatagtggccacgccggagagcaaggagtcggcgcctcggagctcaaaatctcatcgccctaaacgcaaaaaaggaaaccaagaccactactagcttcataggctaacttacctccggtagaagtgcctcagcacagcgcccacaaagaagggtgacccatcggcgatggacaagccccgacgaacaatccttccctgtattggccaccatctcgcaagggaacggcacacacacgatccacatgatcaggcgcacacagtaggccgtgcgacacacataacatcggtggggaaagtgagagtccatggcaaggtgccgtatgtggtggagctgttcttttagtgaacaacagcggcaccccgaacagtcatccgacttcaggacttcgcgagcatgtccctggaccgcccgaggctatcttctgatgttgg

SEQ ID NO: 157932 - DNA, 893 bp, Zea Mays
tcaaaaggcgagttatcaggctcactgctagccttttcttgaagaccatgcttgttcataaccttgaggaggcagtggcttcttggaaagcaaggaaatcaagtggttgattgcctgatggatgtatcatgggcattttgttggtccagtcttagttggcccccctgtgtgtgccagttcgtgggtcgcctctgctacgcatttttccagggggaccatctcttatatctgctgcatcctcatcttggtagctttcaatctcgtgatggttacttctagtgccccaccatcatggcatttccatgtgtattctttctttggtagccccatgttttgcatccatgcagcgattctgcaatgaaactgctaggttgaacatcaaaaggtaaaagttgaagatttctatgaatatcttacatggatgacgtgattaaactgtactttgtagttgggaccctttgatatatttttttcttttcctcggtatgtgttaagtaggttgggtctactttatcattatggcagtcacatgacccatttgcgctgatgttaagataaacaacttggtgttcaaaagtcttaatcatgtaaccctgggatagggctcaactttcgccactaaggaaagaaccctggcacatggcttgtgctctagacttcttagtaagcagacaggaaatcttgtcgttgatacggtagttaacctacttgtttaatcatcattaccgcagttgccacaaaatcccattcagatgaatctgaaacctgcgcagtcatctttccattaatcaatctaatgctctgggaccatgtttctctgttctgtatctatatgtagcaaatgaatacctagctctcaggatacttacagtatcccgtggtctttaagctaa

SEQ ID NO: 157933 - DNA, 659 bp, Zea Mays
gaatagtctgctctttgtccgacaactcctccagactgcatacttggagcactaaagaattcacagcatgtagtgttacactggaaccttgcaatggcaaccttaacctcttatgggatcgatgcaccaccgtagggctacgtcgttcaagccagtccatgcctataatgaggtcatatattggcaagggtaacaccttcagggtagatggaaacgacacaccactgaagtgtaggattatagggaggctacgctagcacaaaacaaaagttcaaccccataaaaccaagaactactgtggttataggtcatagaattaccactagacgtgcagggcatcagaagacatcttgatgtagacgaacgggtcgagcagtgttgtgcagtcgctggcgtccttcacgtcctcacacggtttgtactagtgttctagatgcaacacctccgaggtatccacacatacagggaggaagcgtcgcgtatcgaactgctaggttcgtgatggtggcttagcgagggcgagaggcgggcgactgctcatttactagtggcgaattagggttctcttaaccacgcccatgtccctcattatataggtgttctggtgggcttctgactctgaggcccatcagtaaccctaaagcccagtctaattttgg

SEQ ID NO: 157934 - DNA, 1658 bp, Zea Mays
cagagtattcgatcaagattcttgacactatgattcgagttacaagaaataaggctataaagatgtgcaaagtacaatggagccatcatgcagaagatgaagttacttgggggagagaagaactccgtatagattctccccatcatttccctagtccttcctaaatctcgaggacgagattctcgttaaggggggtaggatttgtaatactcaaatggtagacaataaaagtacgagatagatcttatatgtattgcctaccaagcatgagaaatttgaagaatcataattaaagggaatgagtaactaatgaagcaattaatctatgcctcattttggagattgtatttgtgcattaaaactcaaacaaataagtaaaacaagcataactttaaaaaaatcaaatctagttagaggattaaaatataggggcaaaggggtgaaaataatgggaagaaaaaaataaataaataaggcaaacagtatgaactatattcacatttagaattctattaaattttcgcaagacttagaaattcaaaaccataatttgaatttagattgaatctttgatttggggataaaacaggaattttttaaaaaagaaaaaggaataagatgtttgttgggccgtcagttccccattcggcccactcctgtcttcggaaccggccaattcgatcccgcgcagcccatctggcgcgctcgcttaccagccactgccgtgtggggccatctggtcggcgtcatccgcatcttcctcgccacgacgcaacgcaacaaccagggagtaccgaacccagccgtaagtgcggtaaaacgccatgattctcggggcggatttgtagctgatagttacgatgtggacttcggcctcgtttccccctttccctggcatataaagctcctgtgtggctgcgagttctccacccgtgccgcgccgggcaagtaatatcatcggcgtcgtccgcggttcaaggttcgtggtgccctgccttagcaattggggtcgcgtgggcctgcccgtgggtgctagcgacctccccagccccgaagccgagccgggaactgcgcaatttctcgtcggtcgccgtccgtggcggattcatcgtgcaacctcatcgtggcgtccgtctactccccaatctccagtaagaacctcctcaaccgcatcgcgttcacctaaggatcatgtagagctcaccgagatggaaaatagggcactggggcccctaatcgctcgtctccggcgtgctgcgccgccgcacggtgctgtggcgccgccgctttgttgacagggagaggagagtttgggggaagggacgtgggtcgttgaaacggagatgtacggctgggattgaatctggattttccctgggtcggtatgtgcgagtccatccgatggcaatcgtagggtcagcattagatctcagtactttaaatcaagaccatcgatcctcgatccaagggtgaccggagtgtaccgtttcattgttaggatgaatctaatcgtagccctagattcctgatcgtgcggccagcgcgatccgataccccttcggcgtggtaatttcgcataagagaccctcggcttttcctataccaacccgccgtccacctagtttatatcctgtgtcttggaattattacaccgagac

SEQ ID NO: 157935 - DNA, 413 bp, Zea Mays
ggcggccgaaggcgaggtgcttggctggatgtaacctttctctggcagctcatcgatctgcttagttcaactaactctgatccagatactctgtaagctctcttaaagatgggggcggttccaggaagaagctctatggcaaactcaacctttcgctcgggtggcatgcctggtaagtcctttggaaacacatctgggaactcgaacacaaccttgataatctcaagtggttctgcttcactgctatcaatagccatctgataacaacttcctttctttggctcaggcgggactaactcggtcaccacctcttctcctattgggaacatcaacttaattgttctcttatcacaactgataaccgtctgatacttgtctagccaattcatccctaggatgacatctattccctg

SEQ ID NO: 157936 - DNA, 375 bp, Zea Mays
cgctgcgcgactcatcctccgatagccgcgcattcccatggcgccccgaatcctcatcttcaagccgcgaacaaacaaatcccgctccgatcgcgatccccacgccgttctccccgtcaactaccacctccttaactctcacgccatggattgcagcgatatacccgccctctgtgccgtcaaagagctcatctccatcccatcccgacgtcgtccccatccgtctcgccccgccccgcaaccaaaatccccgtgcgatcgtgagccccttgcagctgcgcggaagatcttgttcaatcatcgccgccaggtccccatactagcagcggcgcggaagatcgtgagccaccagccgacgggatatcggtcgcgagc

SEQ ID NO: 157937 - DNA, 566 bp, Zea Mays
tttgtgagctcctgcatccatccagcaatagactctaaatgctcctctaaaatatagagggtgagcttcgtccgccatttgtagagactgtacgagcgtccgctatctcctgtgtcggctccttcgcgcgtccgctcggagatttccctcgttctcgcagggaggccgtggacgtacgaccaccggggacctcgagctagcgcgcagccggggcgagcccggtcccgccggtgagccctatccccgtccgactgtgaagtttgtcgtgtctgtgtcacagacatgaacgggaggtcgttgccggggtgtagagcacgaggggcagcggcgaggacactggagagctgctacgaggagacggcgggaacatggcggcgagctgctgcgaggagacgatgggaacatggcggcgaggagactgcagatttgctgctgctcgctgtagcatgtgatgagggtcaaaaaagatttatttaaatgaatgaaagagctcgacgggtgtttgagaaatatatgtcatgtgataaaaaaataggaactttagtttctagtatacgttcacaata

SEQ ID NO: 157938 - DNA, 474 bp, Zea Mays
aagaaaaggagaaagaaaagccagatgggccactactctccatttcgacccactagaggaaactagcactgcgcgcttctccactgaacaaaaccctagccgccacttctacctcaccgcgtgcgtctgggctcactgcagcgtccgttggtcccagctgtaagtctctcgtcctcttagcacacacctaatgaaccactggcgtgtggggacaccctgtcatccctttcgcgatcgcctcacgtaacagactcgcgcacgttgtcggggggaggcctctattttcacgcagatcaaggattccgttgccaccatctatgaccgactcgctagggtccataaaaccgaaagtcgagttttcccctcctccatttgttcgctgtgtgcaagtttccctcaacaacgagaaagagaggttccgctgccgggcagtgacggtgagggagcttgtccgtgtcgcgtcaccaaacctcg

SEQ ID NO: 157939 - DNA, 507 bp, Zea Mays
accgtgccgaagttgatcccaatgggtgtaactgtgctgaagttgatcctaatgggtgtaatcgtgctgaagttgatcccaatgggtgtgaccgtgcaccggctgttgtccgtatttttgatgaagacgaagaagaggaagaagaagtctcgctgatttgtaagaatagccggcattacagaggtaataggggggatagtgatatttcttctccagctctgttcgctcttgtcagccttcaagaactgtcaataatggattttgatcaggcccttgaggaggtcgtccctgaggatatgctatcggagctaactgctaatgacatgatggctgtttgttctgaaattctagacatgggattagaggtatcccgagcagtgtctcgtgcatcatcgactttggaaggcagtcttcgatgtcaagacgttggtcgagattgcccaactcacatggaggtgactgctgcagaaaacccagtcctcgaggatggtgttgtcagttaccgag

SEQ ID NO: 157940 - DNA, 435 bp, Zea Mays
aaaatttgcgcgcgcgagggtagcgaatgaaaccctggtgtggtggaggtggatttcacttcacttggacgcacacgcaaacacgacagatttgatgaatgggttgggttgcgtatccgcccggcgacgcaaaagccattgacggacgtgcaattgatggacggacggacagcgagagtgggtgtggaaaacggcaggcccggcggaggaaaaggggcagcaaagcaaaagcagagcgcgcgccaccagcggatggatgatgtggtgagcgtgatggaccgacagtcagtggagctaatcccatcccatccaatttatgaccctctcatccagcaaatttatgaccgtttacccgacgccatcaaatcaaatcaaaccaaaatccttgtgattctcgccaatgcctccacaactcacgatagctacagcccggcc

SEQ ID NO: 157941 - DNA, 677 bp, Zea Mays
aaagcgtgccacaaacagtgtcctctgtcagatacaatggtctttggaataccatgcaaacgcactatttgatcaacatagatttctgcacatttctctgtcttgtcggtggtatgcactggtaggaaatgagcggtcttggtcaatctgtctacaatgacccaaatggaatcatggtgccgggaggtattaggcaatcccacgataaaatccatgcagatgtcctcccatttccaagatggtatgggaaggggttgcaaagggcctgctgccttcaaatgactggctttgatcctctggcaggtgtcacactcggatatgtacttggcaatttccctcttcattttggtccaccagtataaggatctaagatcgtgatacatcttgttgctgccggggtgcatggagaattttaaaaagtgagcttcatccaatatcttctttctgagctcagggtccttgggaacaaccaatcgatctccaaaccatagaattcctttgctgtcctgacggaagcatttgtatttttctgctttctgcttgatcatttccttgataacctgaacacccttgtcttcaatctgtgccctgactatttgctcttgtaattgggctctaccgagatataatttaaatcacctgaagaaaccacttccaggttcaacttgcacaactca

SEQ ID NO: 157942 - DNA, 798 bp, Zea Mays
atactcatctgtgccccccatctcattttgattgatgcttctctgttcaaaaaagttgaggccccctggatttttgcagaagaaaaaaaattcccatgctcaaaataaacaacacagcatctctgcccactctttcaccccaaccaaaaaagtcagagctcccatggctttccgtgccacgagatgctttctggtttaaaacaccatcgctgatacgtacttgccggcgttagcaagctggttcatgtcatggccttcttccaattaccttcttagacactagcatgcagcagtagaccattttagttagtatgatgagcagatagatctgctagattcgttcaatgtcagtctacctgcattgctcgccagtagtatagcaggaaagagagcatgtatgccaggtcttgaattgggagctgctggtacagcttccatgcgcgtgagttctgaaagtttcagccatgaagtagcacccccgtgaactcgaggtgtcttagcagtgggatctgcaaaacaagacattttgagccgcaacgtaatatgtacaatggctagctctccatgcatgcctagtgtacggctgagcacagtttacctggctggttagccggtcagccatgaagaaaatccgccatcagaacctgcaagacaaggcatcctggtagatcagatcaaatgatctaattcaaacagacttgacagacagacagatatctcacccactcctagtttgtattacttgacaaacatcccatgctcggatttttcttaaacaccccatgtaaaaaacacctg

SEQ ID NO: 157943 - DNA, 645 bp, Zea Mays
cgaagctacaagtgatgaactgcttggatcatattccaaagaagagaataatgcattatccacagccttcggaggccggggaaaaaagagattgaacaaagtttttgatgccattggctttgtttaccctgactaccgctatccgctgcgaggacagggaaagaagagaaaaactgccactttggccactccagacgagcctgcgccgaagggcaagccgaaggcaccttcggttgagctagttgaaatgaaggttgacaaagataaggctgaaaggtcaaaaactgaagaagtaacaaagttgccagggattttaagtccttcaacagaagcaacagcgctgaaggcagaaaagagttatgccataactcctaagagaaggaggatggtaaatgtattagatattttcgaaacatccgactccataagtcctgctcccacagggaaggttgccgaagctgacaaaacgcaacccaaagctgatactaaggaaatagaagtcaagactataataacccaggctgaaaccaaggcagagcccacagtgcctacagagatgaagcttgccgccaccgagcagaaggccgaaggaataactccagataataatataggttttgagaagagtgcggccaaagaggtcga

SEQ ID NO: 157944 - DNA, 641 bp, Zea Mays
cacgccgccagccgccgccggagacccgtgcccgcgttcccgaccgttcggccgccggagaccacaccatacatccccgagctccgccccaaggtgagacacccgtccccgtgccaaattttccctattgcgctctgtgctcggccaatttcaacttcgccggtgctcggccgaggcggaccgccgtgctcgcgcggtggccagccgatttagcccggtccatttccccggcgttagtccctaaggtgcctctgcctctgctgaagttagccaaggccttagcgcgccttaagccctttccccgtgaccggaatgcctcgccggagctcctccagtccgcccgagactttctctccaccgttctcccctctctgcccgtggattcatggcctcttccccgccattgagttcgccgtggcgttctctccctctctgcccaactccagcgaccccggagccaccctagctcacgcctgccgcaactccggtgacttcaccgtcgcggagaggagcagcgccgcccgcagccgtttgcccctccctggtctgatcccctccgtccaatcttcatcgcatggcctagatcgtgggataccgcttcatgcatgagtgcctgacgccctggcccgcctgtcagcgcc

SEQ ID NO: 157945 - DNA, 1016 bp, Zea Mays
ttggatccgtagccatatccttggattttgtggtatgtagcctagatgatgtttaaacttgctttgttcacatggatctggtatatgatggtgtatattcttgatgatttgttcacatgggcagatgggctgttatgtttttactcatgttcgatggtagatctttccatatttctatatttctgagcaatgtatgagctggtcaatgatggatctaggtatacttgaatgtgaacattagttggtccacctaaaagcacttggaggcacaatcgttgttgcagtcgtgctaaatgtatcctacactatttacccgttggcccatggcttatcaatcctaaaatacactatcatgtaccagtctgctcctcgtcgtcgtcgtctgattatggggggagttgctcttgtcatcttgtgttagttatcacttcttggttgttcgctaggtttaagcgtcgtgaatctgtaactctgaatatgtccctctgcatctgttacttgcaatcggttactatgaagatattgaactgttattttgagtattttatggctgatgatgaaattagatgaaattgataacaacttgggagctacttgattaaactgatcaaatcgatgctacttcttttggttcgtttttctgactgtcgatgattcttctaatccgaggccaaaaaaatcaattcgtactttcatgtgttacaattgccatcttatatattcagggttggcatgctatgtggtattttgaggaagaaaatcagggggtttaatttgattgggccacttgtaatgaccaagtttgtgagtacagtcatgcctcttacctaaaatatggtagtatgcatgaagcaaacaatgcattcaattcatatatgcatagtcaaggtgaagaagttggaaaaacagttctataagcatgttgctgcacccattagtaatcaagacaagtatggtttgtgtagttggaaggatgtagttatcattgtttagagtattgtaattcttgtgctcct

SEQ ID NO: 157946 - DNA, 497 bp, Zea Mays
caattgtagaagtaaatgcagtgtgatggttttgaattttcgtcgtgggcatagaggttgccctaagatgggtgatcgcaaacgtgccgagtgtgtcgtgctaatttaagtcagtgccaacttaaaccgaccgctccattagtagggcatagtggccaccccgagttaagtaagcgtgagcatgtcgcaccgccttaagtcattaccgacttaagccgattgctccgttagtagggcatagtggtcaccccgagtttagtaagcgtgagcatgtcgcaccgccttaagtcattgccgacttaagtcgattgctccgttagtagggcatagtggccaccccgagttaagtgagcgtgagcatgtcgcaccgccttaagtcattgccgacttaagtcgattgcttcgttagtagggcataatggtcaccccgagttaagtaagtatgccaattgacagcgaacaatttgagtgcctttgaagtctttttattgatgata

SEQ ID NO: 157947 - DNA, 972 bp, Zea Mays
aataaagtatatatgtatgttcatatattccataaattgtatcatgtatggtgtcctacataattttatattgtatgcagaatataacatttttcacaccatctagctgcattctatcgtatacaatttaacctacaatactaaaaatccaaatcagttaaatagtacttacatgtatctgcagaatcactggtgtgtcctgttcatgctcaccaatagtacacatagtattaaggtgctgtcctccttgatttattgtcatcctcgatgcctcaaatgtggtctgatcatcaactcccggggccctcaaagctgctggtggagtaactgcctctacaacaatagctgtttgcatatgcgcacttgcatctgaggtaaactggttccctccttgttgttcttcctgcaccattattacgatatccaagcatggatttgttcgatgaactgatgtcggcgtcgtatactcactgattgactcgttaccccatggcgctgccatcttccagatcagattacgcccttcagccagccacgccataaccaatgattcgtactatctaccttttttggaagcctatgaatatttcctcttgaccatgcgcatatccattatcgtggacgcgatattcacggcgcatatcatttatccgctgaattctaggatcgtgggcgcgctaatcgtgggcgtaacagccatttatgcaatttatacatagatttatgatgtcgtaattgtctgtttaaatgtgcttccccaattttcgggttacacgtcaccggcccacgttcggacaaatggcccacgtttggttacgcatttctgtactaactattacacttgcgtaaatgcagtgcataaatgcgggccacctggatcggcccattcggtgcgaccaggctcggctcgtctacgtaacctcgtcggggctccccgcacctatctgaagcccagggcttccattaccatca

SEQ ID NO: 157948 - DNA, 804 bp, Zea Mays
gcaccggacaggcactgtagactgtccggtgcgcccatatcgcgttttaaaaaaaggcctccagcccgaccgagccagaggctccctgttctccttctctgctagcgccttctctgccactggcgattcctactcccccgccggcgatctccgaccaccggcggccaccatctccgtctgtgctccggctacctcgggcccctctccttccctcctcggtgagctgccctgttctcctccctctcggttctgtgagcagaggctcccttatcctccccgtttgcatcaattccaaattcttcaaattcttgtcaaatcaaatgaatccagttggtggaatgtgttcaattgtccccattatgtatccctgcaggttcttggctccttcgagagggttttcactcctcatatggccatttctccgaaaccctaatatctcgcccaccacgtgttcggtaaaatacccaaaccagccaaaaatgctcaaattgaacacaaacttttcaggcacctttacaacacttccagcaacatccttgccaaatttcacgccaatccgagattccaggcttcaatttcactaaattccccgtttcgagcgatcatttccgagccgagtgccctaatccctttttcttcgcctaaattcaaaccaagcacacacttcactcatattcacctatataaacctattcgtgaagtatcggctcaattccatatcgtttcgtgcctcaattcgaattccaaacctcctttgacactatttatccttcaaacgtcgttttcacgtcgtttgacttctcg

SEQ ID NO: 157949 - DNA, 306 bp, Zea Mays
cgaagtcaacgctggaccctccggtgatcatgtgaatgactccgtgatacggctaatcggcgaagtcttcttgttttggtgcttggggtgattttggtggtgtaggtttggttgatgcggaggcgggagtgggagtggtacgacttgtacctcctggtggtgctgatatgcgtggttgggtagatgctgggcgtggccgtggttgtatggttgtgggtggtggtgttgatatgtgtgcgcgaccactctttggttgtcggctagttgtgttcgagacatcctatccctggtggcctttctttccgg

SEQ ID NO: 157950 - DNA, 1300 bp, Zea Mays
gaggacggtgggttgattgtataaaagtgcatgggctctttagtgaaaccgacacggcgaaggggtatgagtaatcactggtcgtcagatcagaagcccacgaccacgattagatctgattcccccgaaccgctggtcgttagatcaaagagcgacgttggagatttaaataatggggatcgcttctcgcccgcccgattgaccataacaccccacaatcaaccttgaggtgacacgcccaggagctgatctaagccgcatgttcaccatcccacggcccaccatgcttcatccgaagcagtaccctgtcccctatcctggccgccccccttgagatcaacggtccgaaagatccttcttcaacctcccgtgcacaggcagtggtgtgggctggcaacgacggcgccatggccgcagccacccagacccgagcaggggaccatcgactatgcttctcgtcgagctatcagcgaggaagacgaaggctagacagatacgagggctctttccactttctgtcatgcaggcgacctcggaccattatgagctgcggatccagggcgagggaaaactccgatgagaaattcccgtccacccacggcatcacgagttccgattcgacttcaattatcatcctcacatgctggtgacgctacttgaccggaatcctgacccccgaacgccatccaccattggattcgcccatggtggcaagctttctctctccctcgatctgtttccctgggttatggtgcttcctatccgatagagaggaagggggggcagcccgatatataagcgcagggatgaggttcctcccaggcggagtccgcacgaacggcgagatccacggcgagttcggtagccatgcgcgcggtggagatctagagaagcacgcaacagactgagcaaggagaacgaccagacggcgggtccatgagctagcgacacagcgcggggagcggctggagggatgggcccggattgtctacgagagaagaaggggaaagagggcagcgctgagcgggtgctatgtgaggctgagcagtgggctccacccgtcagccacacgcgtgagagagcaggccgcacagggtagaagtggagtagttgggccgaggtgggctagttttggcccaactgtaggaatgcttttccatttttttctgttttctctatttttccatagatttgagtttaaatttgctttgaaattcaaacaccagttaaatgcaacaaacaaagaacctcaacatgaatttatgatgtatttaatttatttattggttaattattcccc

SEQ ID NO: 157951 - DNA, 284 bp, Zea Mays
gctgtgggtactcggagattgttgagctggtttctgcctatgaataagcggtggcctgcaggctgcagtggtgcgcggacagtgcgtacgtcggccaggacaggcaaatatctctccggatacacccgctgtaatgtgcccgcgcccgaaaacgatggatctcgtccccaatatgtgtactcctcctacacgggcagatcaatcatgccggctccggactagaggcactgcgaactgcgatagatgccggcaaccacgtacgtgtgcgtaacgttgcctccctg

SEQ ID NO: 157952 - DNA, 1716 bp, Zea Mays
tccacttagaagggcaagcctgaacaaagctgcgcaaatacgtctcaagacattgattgacgcgctctgtctgtccgtccgtctgaggatggtacgccgaactcatctgcaactaggtgcctgatagctgaaataattctttccataagttgctagtgaaaattctgtcgcgatccgacacaatcgattctggcataccatgaagtcgatacacagctgccatgaatacctgggcgacctttagtgcagtaaacggatgacgcaacggcacaaaatgagcatacttggtcaagcgatcaactaccaccaagatagtattgtaagatctagactgtggcagcccctcaataaaatccagcgaaattgcttgccatgcttgggaaggaaccggcaatggctgaagtaatccaggatatcgagacctgtcaggtttagcctgatgacacacttgacaagctacgacaaattcgcgcacagaagtctcatgcgtggccaataaaagagttgcttcactcgagcataagtaacaggaaatcctgagtgaccaccaatagcactgctatgtaatgcaccgatcacagtagtctgaaggttagtattctgtcctaaccaaactctgtttttgtaccgaataacaccatcctggagagtataaggaggttgagctgacactgctaaaacagtgaggagctttaaggcctcaggatcttgttggtaacctgcaatcacctcctgtaaccatgtcggagtggacacagaaatagcaacacattcgccatcctcatgtggccggcgagacaacgcatcagcagctgaattatctaccccttttttataaacaatccgataatgaagacccaacaacttggtgaatactttttgttgccattgagtatggagtctctgctcgttgagatgagacaaactgcgatgatcagtgtaaataacaaattcagtatgctgtaaatatgaatgccactggtcgactgccaacagaattgccaaatattccttctcataggcagataatcccatatttgtcattcccagggccttgctcacaaatgccaatggatgaccctcctgctgcagaacagcccccactccagtaccagaggcatcagtttctatggcaaatggtttatgaaaatcaggcaacgctaatacaggagctgaagataacgcttgcttaagagactgaaaggctgattcctgaacatcagtccacacaaagacagcatgcttcttaagcaatgaagttaatggtttggcaataattccaaaaatctttacaaacttcctgtagtggcctgctaggcccaaaaatccccttaattccttgcaagtcacaggtactggccacgacacaacagtagacaccttggacggatcagtagataccccagcttggctgataacatgtcccaaataagcaatttcctgttgaccaaaggtgcatttggacaacttgacctgccaagaatccttgagcaacaactgtaacacctgctcaatatgttggagatgaacctcccacgtagggctataaaccaagatatcatcaaaaaataccaaggcacatttgcgaagcaaaggctgcaaggtcttattcatggccccttgaaacgtcgcaggtgcccccgtaagcccaaacgacattactcgaaactcataatgtccatgatgagtttggaaggctgtcttatgctggtcttg

SEQ ID NO: 157953 - DNA, 441 bp, Zea Mays
accaatatctggcgatcgttgagcttttgttgtcttctgttctcctgcgatccgtgtccaccgaagatgacgttgacctccctgtcaacgcacgggaaggctcctcctcctccctcctcctgctgctggggttgtcgtggttcttctggtcctccccgcggcggaggaggaggtagaggttggaagggtcggccgtgtccgacggagtgcttgaagtccctgcagttccgaagggtgtggcgcatgtccttgtggtacgggcactggacgtcgaggatgtcgtctagcgtgcgctcgcctcggcgaggtcctccccgggcgcgagaggtaggtggtccggcggcgtgcacttcttcgcgaggtcttttctcccagcgtttgtcgggttgctggttcgcgtcgcgtcgtggcgctgccggtgcgggcttcgctcccccgatg

SEQ ID NO: 157954 - DNA, 495 bp, Zea Mays
caagaatcaattcataaaaattcctaagctactactttcttgttagcttgtttatgtagggaggagtataataaagtaagggaactggacaatgccaaagaaatttgagacacattaaagatcactcatgaaggcaacaacatgaccatgatcacaaagatgaatcttattgaaggagaactgacgaggttcgccatgaagagaggagaagagccataagagacatataacaggctcaacacattggtgaaccaagtgcggaactatggaagcacaagatggctacatcatgacgtcattcgactcatgctaaggtcatttatcgttttagatcataatcttatgaacttaatccgtgaaaaccccaggtaccacaaaatgatgcccgatgaagtccttggtaagttcgtggctccatgaatgatgggcaaggaggcaaagtacatcgacgccgccgcaaacgggagcccactacaacgaagtgcaacccgtggc

SEQ ID NO: 157955 - DNA, 591 bp, Zea Mays
gggccagccgatgctcggtcccgcatggcagtggccgaaaggtaatgtagaggatccggggtacaatcggtggtgcctattgcggggcctagtgtgggaggcgaccacgagcacaagagccgaaagggagtgcaacgggggaggaaggagaagataacgttagggtcgtgcctaagaccaactccagcagatgactaccgttcttccgtattttacaccccatcggccatgggtcccacgaaaaaacggatgctcggtttccagcagcatccctatctggtcgtggctcccagcatccgtatgcatcgaatcacgtgcccgcagaacaatgttaacgtctcgtgggttgcgggggaggagagagaagccgtgtgaaaaggcagtgcatgtagctccacctattttgcatcccgtgataagaagtctgttgggaggatgaacaatactcgtggacgtctgctgggagggtgaaaaatactcgtggacgtgtgaaatatggatacagagcccgtttactgtgtttgatggagttgatctaagtagcggccccgcacatgatgtggctggactcgagtcgaaccaaattagggc

SEQ ID NO: 157956 - DNA, 756 bp, Zea Mays
ggaaaactgtgtctagggtaaactcttatcccaacttccaccatgtttaagagcacaagctctcaacatatcttccaacacctgattggtcctttcggtttggccatttgtttagcgatggtaggatgagctaaagttcagttttgtgtccatacattcatgcaacttctgccataactaggaggtgaactagggtcctctattcaatgcaatcttctttggaatgccgtgcagacacacaatttgtgacatgtacaattctgccaatcgagatcccgaataggtggtcttcactaggataaagtgggctactttggctagtctatccacaattaatcaaatagagtcatatccagtaggagtgtggggtagaccaacgatgaaatccatactgatcccttcccacttcgatttgggtatcttcaacgagtgaagtaatatggctggtctctgatgttcagcttttacccgctggcaaacatcacatactgctacatgcgaggctacatcccatttcatgccaaaccaccaatacttttgttttaggtcttggtacatctttgtactgcctgggtggatagaatagggtgagtcatagacttattttagtatggtttcacggagactatttatttcaagaacatagatcctatttttgaaccagattgtgccttcctcatctttcgtgaaatttggacctctaccctctgccatcaggtctctgatttcttgaatcttggcatcaccaacctgacc

SEQ ID NO: 157957 - DNA, 584 bp, Zea Mays
aaattggggcgagattaggttggttacctcgagagaagggtcagggacgcttgagcgacgacgaggacaccgcgagagccttggtcgacggcggcggagctctggctacacggggagaaggtcggtgagcacggaccgagcgaaacaaaggggttgggggcaaaccagagggtgtctcgtgttgctgatgaagaggtggagctcaccgaggcaacggacgcggtagaagctcgacgatggccacagagcggatggtggaacacagtggagcttcacgggcgcacgcagagcgagagagagagagagagcgaggttgttcggctgagggcacaactgagcggggggagcgagtgagtgagtgtgggctccagaaaagggctcgggcgcatgggggcatgaccgtgaaacgcgcggtcgtggtcgcgtccacgacggagagcgcggacgggaggttagggaagggagtagtggctgacaggtggggtccgcaggccagtgagggcaagcgtgtgaatgggcggtcaaagttgacagagggggtccaccgagcagcaagagcaaacgggcgcgtgcgcaaaaggatc

SEQ ID NO: 157958 - DNA, 494 bp, Zea Mays
ctcaacagatgggtggaggaagccaagtgaccaatatgagagcatgcttccatatccgtgagagaggccatctcattgccaactgcccatacaagaatcaaccagcaccgtcagttttctccaactctgtgaatggaccaagacaaccaactggagctaaccgtaccacaccagctaaaattcaacaatcatttggaaaagccaaagtgaaccatgtatattcagaagaagctgaagaagcaccaggggtgatatttggtgagttcctagttaactcagttttagcttcagtgctttttgattctggaccatgccactcctttatatcatcacattttgtgaaaaagaatgatatacctactatagcccttaagaggccactaatgacccgttcccctggaggtcatataccctgccacttaggtgtcatagacctccctataaacctaagtggggtagccttccttgccaaccttgtggttcttgcttccaag

SEQ ID NO: 157959 - DNA, 651 bp, Zea Mays
caagagttcagtccatgctgtttgtctcacgcaaatatatgtgttacgttgaacgccattcgatagtggtatattatcaacttatcttgtggttaatatgattagcaaaagaataacaccatttgtcactatattttacttctatagtataagtagtttttaggaataccgtgttagagaatttgtgcttggcccaaacaatagttcctatgtatcccaaaggtccaatcacgcatgtatggtacagtgataactttagtaccacattgctaattcaggaggagtgatgccaacttaaatagtagagttatctctatctaattgaaactattgcggagatgtaacgagagaacacacgtgcacgctcgccctcgccttgtcgggcctggcgataggcaatgggcgtgagcgcgcgacatgtgtgtgaatgttccagcgatttctcgctttcgaccttgcggttggcgtggctttcttttgctacttcgtattttttgcatgaaaaattgtgctggcctattttggtaagcaattattctcgtattaattgtgattgatccaattgattgattgtgagtcaatcaagttattgtgattacgcggccaattactcgcctgttttttgccgcgtcgtgtgaatataatggggac

SEQ ID NO: 157960 - DNA, 769 bp, Zea Mays
aaacatgctacctatgatatgctgacgcctatagtagctgatgtccttttcaaggttcgggaatccaacactcttagacagggtacttataattttagcaccagcacggtcgtggatgcatcccacgacttcttcgtcgaccccgccaaagagcattgaccccggctggtagccacaggagatcgcaaattctttcaactctgatatgtcctcttcaaagagttgttggccgcccaagtgccataggtcgaaacttgctccctctgaagaggtctcctcaatcttcttttccttttctgaaactaccgcgaccacctccttctccacaaccacatcggatataagtctgtcaatttcggacagagtggttgtgaggttttcatcttcggctgcagcggcggcttcgacatcggtcggtttggtagctttgtctactgaagctaggggcggggtttgctcaatcgcttgtagtatattcatcatgcgtcgcttcttctggcccccgtctctcccatcagcagccgaagagacttcctttttctataagaggcttgtaagttccaatcccagaggacttagtggtgtgaatgggaaggactcagtcattaccttcaatatttctgagacctttgcagcaaaagacaaagggcttgcagttagttttggcacatcttgtgtctttgtcttctcagaggatttttcagcaagcttccattttttaggagccgataccttcggctccgacattgttttcatattcttcaaagtt

SEQ ID NO: 157961 - DNA, 349 bp, Zea Mays
ttgggagttgccgaaaaacctttttgtgccttcggcactgttacttctgccgaagggcttaaaatttcaaacatttttgttccttcaatttttggctcttcagccttatctttatcagtctttgactcagctggctcgcctaagggtaccttcggcattttagtcggatcttcagccttctgcgtaggagaaatgggctcttttggtttagtagctgaagaagtctccccgccaaactcaggcaccacggccggttcaatataacgtggccggtgggtaaggactttcaactttttgctcttcggcgcagactcatctagagtggtcgaagcagcggttttcctcttct

SEQ ID NO: 157962 - DNA, 428 bp, Zea Mays
ggcgagcgcaccgatgctgatgccttgtgttggcaccgggatgaccgcgtcttcgacctggtcgaggtagaatgcgccatactgagcagtcggtcgacgtcgtcccgccattgcttcatggctcctggtgaagccgtggagcttggagggtgtcacaacaactccctggctgctgacaacacccccggagatgcccttgatggagtccgggatgtttgcgctaccgtgtgctgtcgtgcggtgtgcacagcaggagtgactggtgtcgggcgactgggaacctgcggtgtggaggaagcagcttctccctccaccgcaaagtctaccgaagtctcagcgcggtgctcaatgatctgcaccatcatgcttgggcaagggatcaagcaaaaacctaatgcctaggcccctacctggcgcgccaaatgtcg

SEQ ID NO: 157963 - DNA, 443 bp, Zea Mays
gccgaaggggcacacagtcgtggtgcagttggatgcttgtcgcgtagcagtccaccctttcgaccaccggtttctgcgaagatgggagagtgcttgtaaccgcgggacggttacatgccttgcgtgcggcggttcgtcttcttcgtgcttcggttcagctcgtatgacgtgtgggtcccaacccccgtgtcgtggggggagaaccctggaggatgtcagcggggacttcgcccgtgacgctaaggggtgcaagtgaggaggtctgcctataaaagggggaaacgatcccctgggtagtggccatgccttcgtcctcccctcatgtcttgcgcccttccgccttttgagcccccggatggggtgccccagctttgccttgctcttgctgtcgttggaggagcgcggcctcgtggagatcggtaccttttcagccatcgtttggc

SEQ ID NO: 157964 - DNA, 663 bp, Zea Mays
tcatttttaacataaaaccactcctccatccaggccccaagccatcttttccagtatgttggcaccaggtaacttgcattagagcgggcaatgaacatgtagcaaccgaagttgttctggtattgttctttgccaatagccttcgtctcgtataaaagctcgtgcatactgcagaagcacttcgcgctcggctccagcccctggcttcttacagcccagacaaacatccccatcctaattatagctttgggggtaatctgataaagaaaaatctgaaaatctttaatacctcaaccacaaatttgctcagtgggaaccggagacctgctttcaggaagcttcggtaaataacaacttcgttttcctcaggagcagaggcagtgttgtctcctccaactctgacaatagacatgtcgcgaaaatatctccccctcatggcgtcaatatgactttgtttgatagtcggttttccgaagatagtatgacttggtcgccagggctaatcctcagaatcttcatccccactctccacatcatagttatcactgtcatcggaatcttcggacaaaccctccatgatctccttagtaattttctctgtattcgtttttgccatggactcataaaacccagcgatgaaaggatccgcaactttcttctctt

SEQ ID NO: 157965 - DNA, 327 bp, Zea Mays
tggtgctccgccaccgttgatgtggggctgcctttgggacccctggggtcaccgaaaggacctcgcggcgcagggacttcacgttcctacgagaggtgagctcccagcttccgccatacataatgtacagcttcttgcggtcgtcattgtcatcaccggagtcagagtctccagtgaggatgtctttgaggacttgctcgggggcctgatacccgaggtcccgttctcccgcggctacgtcaccttcgtcgaccttctccttgccaggctagcgccgaggcggtgagccatccctggaggcctgcttgcgccgctcgctgaggcgct

SEQ ID NO: 157966 - DNA, 416 bp, Zea Mays
gcggcggtgctctctggaagggcaaaaaattcacgaccgaggcgtgccggatcgatggtccacgacatggcttaggaggtagggtttctacagacgagctggacagtcggcgcctgatggtcggacagttcgtgcgtgctctgtctgtacggcatgcgtgccgccgaccacacaacacgttcaatggcaaacctactgactactgcacgcattcctgtctctactccgccacacatgtattgtaatttgtatgtataatgaataatatatgtgtgtgttggtgacaatccgggcgccaaacactggaatgggccgcctggcggtgctcactagtagagatcttatcatcgatgacgtttgtattgcatcacggaatatgtagatatcgtcacagataaagatttgtgacgaatttg

SEQ ID NO: 157967 - DNA, 293 bp, Zea Mays
tcatgtaggcataaaggtaaatgatcaggttggagcgaatttcctaactcacaaaggcttgcggcagggagatcccttatccccagttctatttaatatagttgctgacatgctagctatattaatcaatagagcaaaagaggatggtcaatttgatgggcttattcctcatttagtagatgggggcttatctattctgcagtatgcggatgatactattctttttctggaccatgattttgccaaagcatccaacttgaggctcttattagcggcgttcgaacaagtttcgg

SEQ ID NO: 157968 - DNA, 529 bp, Zea Mays
aactggtgcctttgtatccttttgatatgcaaaattgtaacagccaaaattttcatgaaggccatctaccctggccttcgtctggtaatgcagttcgtgcactcggcagaaagcttcggcatctggactcatcccttggcttcggagggcccagatatagacactgagtctaacaatagtgttgggagtcagctgatgaagatatatctcaaagttcaataaaacttctccaatcataacatttaggggggaccgaagccctgctctaaagaagctcttaaaaacgacaacttcatcctctttcggctccagaattacctcttccccggcaaatcgaacaagtttgctctcagcctctccaaaataccccaatttcatcatcataggcatgtcatcttctgttacagtggatttttcaaattcaagatgactaggctttgtcgggttcagaatgttgtagtcttattcactctcatcatcattctcaccaaccacagcttgttcagcttcggcattggaagcaccttcg

SEQ ID NO: 157969 - DNA, 868 bp, Zea Mays
cgctgtgtggggcggctattgcctgctaatttagcagactgaggtgtgaatgcggtttaggtcgattagcttccattttggacaaggcgcactgttttgctgtgtgtgccctgaatttgtccagaatccccgtgaagaattaatgcttggtgaaacgaacaatgtcatgtgatgtttctccagaaatgtggtcccgttcattttttttatatagttggtggtgattgcagtactgaagttatcctccctggaagctggaacgattgaactgtagtggtcggtgttaatatagtacaaagtctagcatttggcatgaagaataatattctgaatactgttttctttcgtcagctgttcctctctcccggcaattcttcttccgttcttgctctaatcatttggccacctacttcatcgcgaaggtaagtcttttattacattctgttgaagtacgtatttcacaagggaggaatcaagcctggtccaatatcgtctgacgtacgtatcagtatcctggattttgtttccccaatttgtgtccgttgcctgtttgactggccttggaacaagggtagcaaagcaattttgaatgtaagggggcagcctcttactccatggtccctattatgcctaaattaatgtgctctacgtactgttgtagttatctagacatgtagggcaagcacacccgctcttcttgtctgttcattttagacatcagtgttgatccttagaaatctgagccattgctttctatgtatcaaaatacttatgaaccacgatccagaaagcatggccatccccatcccacgttttgattgtgtttttaacacctgattttgtggcgtcctaattaaatttgtgtttg

SEQ ID NO: 157970 - DNA, 329 bp, Zea Mays
cttcgaagatagctgtcgaagctccaaaaacagaaattgaggccgaagctgccaaaagccaagtggaaaccgaaactgggctttcagagcctgccaagagggaattcttggaaattggaaaagaaacagaaaaagaacctgtagaagaaattttatctgagaaaaccgccatccctattcctgaagcatcttccgaagctcccaactatgtcttacaccatgcttagggtaaaaatctgactgaaaaagaaaagcgggaagctcagttctatgcgcaaaaattgaaatatccgaaaggggcgctgatattcaatggcagcggagaagaa

SEQ ID NO: 157971 - DNA, 382 bp, Zea Mays
taccgatccgcccatgcacctacatcgtgtagcaccagattgatttgggaatcgcgcaccggaacgcgcagattgggtgggccggccatggtgaccaccgcgggcggaatgctgtgcgccgcctcgttgacagcttggggtggaagaggggtgagggtcgttggatcctcgatgaagggtggaggtgtggcgatgggtatgaccgttggatcagccacggacgctccggatcagtcgagtggataccccttcggatatttgaatcgtgaccgttgattgccgatccagcgcacctcgtagcataccctttcgtgttatatctgagaccatcagatctagatcggatggctctgggtccccgatacctcttcgccgttgccga

SEQ ID NO: 157972 - DNA, 778 bp, Zea Mays
agtgatatgacctctcctccaacgcttgagcctagtgccctacgtagaaagcctgtcaccaagatgataaaggagcaagaaatgaatgagttccggaaactacccaactttatcacaacgcgcgactattggaccgaccttggtgaggacactttggagcgacacgcttgccatgatccatggtcaactgggagaatcatgaaaggttttagacaacgttaccgtcccgatagaataccgtttttgggaagcaaggaagtgacagctgtagtcagttgagggtaagtgcggagggaccctctacttatgtgcccgactggatctcaaaagctaatagcgagcctcaccaactcatttgttgcgcacgaaaaaaaggacaagacaatgtccgacccgggagaagcccccagggctcaggggctactattgggatatgatccctggtttcaggggaccatcggtaagtgagcacacctagaaaaagccactagcaactggggcccatcaatcagctagaggagacatgtagcgtctaccctagaggaacccaccagcgcacgagcaccgcggcaccaagcctggggttgggcatggtggagtcaaacaatgtgcaagcgtaccaaaggtaaaccagtcgagtggatccctcgcctagcccgagacagagccgtcataagtgtcgtccgcattaatagagcctggcaccgagccatagcggaggtgttggtctccctcccattcataccccgagcccctcgaaccacagagcactcgtgac

SEQ ID NO: 157973 - DNA, 598 bp, Zea Mays
gggggataccggagagcttcaaggagttgagatccctgtcgtacctctcgctgaccaggaatagtttcacaacctggcatagacattgcaggtcttgcaacacctgcccaacctgacaagcttggtgctgaccaggaatttccgcggcggtgagacaatgtaggtgctcatcctgacaaactgtctactcatcggcgtaattcccccgtggctgcagagcttgggaagcctcaatgtgctggaaatttcatgtaacaagttagatgggaatatcccgccatggctggggaagctagacaactgcttcaacattgacctctcaaacaattctttcagccgtaagctacttgtcagcttcacacagatgaggagcttgaattcaaataatggctcgagcaagcggtcacccacagagggttcccattgttcagcaataaaagcaaatccgccatcgtcgcccttggactgggaactgtggtcggggttctcctcttgttgtgtttatgtgaccgtgtcaaggattgtccattgaagaatacaggagcaatccaaaggccgtagcgacagccgaagactcctagttctccaactcttgcct

SEQ ID NO: 157974 - DNA, 1139 bp, Zea Mays
gcgggtttctggtacctttaggcatttgcggagttgagacacatggaacacattgtgaatatctgacatggattctggtagctcaagacggtatgctacgggccctattcgggaaatgacggggtagggaccgacgaaacgtggtgccagttttccttttatttggaaccttttgacaccatgcatcggggagaccttgagataaacgaaatctccttcctcaaatctgagttcccttcgtctgttgtctgcgtaactcttctgtcgactctgagcttcgagcaatctcctgcggatcaaggcgactttctcttcggcttccttaacaaagtcgggtccctctagtgtcctttcccccacaatggaccacattaggggagtttggcattttcttccgtacagtgcttgaaatggtgacattttgatgctggcctgatggctattgttgtacgagaattcggcgtacgacaaactagactcccaatccctgtcgaaagttaacatgcaggctctgagtaaatcttcgaggaccttgttgacgctttctgtttgaccatctgactggggatgataagcggtgctgaaatctagcttggtgcccattgcttgctggaggcccttccaaaattttgaagtgaactgcgttcctctatctgatactatcttccgtggaatgccatggaggctgactatctctttaaggtatattcgggcaagggcggctcctccaaaagtggtctttactggaacgaagtgggccaccttggtgagacgatcgattattacccatatggaatcatttcctttctgtgttcggggcagtcctgtcacgaaatccatgcctatttcttcccacttccattcgggtactgggaggggttgaagtaggcctgcgggcttctgatgctcggcctttgttcgctgacaggtgtcacaccgagccacatactgtgctatttccttcttcatccatttccaccagtatctggctttgaggtctaggtacatcttggtggttcctgggtggatggagtaagctaagttgtgggcttcattgagcagggtttctcgtgcttctcccactggcacacacaggcggttcttgaaccagaggactccttgctcatttgtcctaaggt

SEQ ID NO: 157975 - DNA, 502 bp, Zea Mays
ttgagtcgggccgaatccacccacatcggcccattctactcttcccaagcgcgtgcgcaacccacctgtgtcggtcccacgcgtcatctgcagtgatgtgcgcccgtgtcctcgctctcactgaatgtggggcctagctgtcagcactatcccctccgtgcaacaacccggcgcgcatgctcctccgcatgggaatctcgcgcaggacgttcctctccgcgaagtatgcaccctcgtatcagagtataaaactcgtgtcatcccactgtttccctcctcaacccatgcccctaccctaggccaccataatcttgcatctgtgaggaattcgagcgccaccattggactatccctgccttgcccttgactcggcctcgggcgcgcccaaggaacatcgcttggggtctgttgtgactcgtgcgtagcttgattttgcccgggtcagctctgcgcgctcgagatttctcaccggactcgtgactctccgtcgggccgccattcc

SEQ ID NO: 157976 - DNA, 663 bp, Zea Mays
gtacgagagatttaattcaagagcacatagcattcagagtatggtcgcttgtagagagctgggaaatgccgaaggagaccatcaccgaatctagtgaaggtgaactggttcggctgaagtacacattcagatatggggataaattcgatgaaccaaacgatgactggctaaaatgcatcgaagttacaagtgatgaactgcttggatcatattccaaggcggaagacaatgcattatccacagccttcggaggccggggaaaaaagagattgaacagagtttttgatgccattggttttgtttaccctgactaccgctatccactgcgaggtcagggaaagaagaggaaaactgctacttcggccactccagacgagcctgtgccgaaaggcaaaaagttaaaggttcttacccaccggccgcgctatattgaaccggccgtggtgcctgagtttggcggggaggcttcttccgctgctgaattaagagaacctgctcctcctgcgcagaaggctgaagagccggctataacgacaaaggcaccttcggttgagctagttgaaatgaaggttgacaaaaataaggctgaaaggtcaaagactgaagaagtaacaaagatgtcagggattctaagtccttcaacagaagcaatagcgctgaagg

SEQ ID NO: 157977 - DNA, 463 bp, Zea Mays
cacgacgccgaggtggtgtgtgggcgtcgactccggcaccgcgcgctcgcgatgaactgtcccgttgtagtattctccctcctctctgtggactgaatcggaatcgctctctccgaggtggttttcgttgctgcacgtccgctttatcctcttccatccatcctcgccgcgtggtgtagtgcaggtcgtgcgtgcgtaagtggtggagctgacggagcggttgaggttgtgctcgtggggaggaggtcgaggagtgcagcgcgccgtcgtggaatggagggcaccacccacacagaagaggatggcaggcgctataggctgggctgcacaatgggccgcaccaactgttgggccgcacaaaccactgggctgtataaaccgcgacgctgctatggggtttttttattagtgccataccggccacggagagcgtcgaaacatggcttataagcgttagtgtgtg

SEQ ID NO: 157978 - DNA, 583 bp, Zea Mays
tttaggactttgaatggatgttttcgagtggacaaatagtttcctaatgcaattatgtgtaaggtgtttatagtgacacattatctcaaaaagtgttatgtctgcgcataaataagaaataggtgtattttgtgtagtgtggattgattttgggtgcatgtgtcgcaagaaatgaattagtgcgcatataggcaatgaatgagtgtgatgaagtgatgagatgctccttttaatttcattcatagctcttgttaggtgttgtagtgagatggtcgtcggttttgtcgttgtgcatgagtttgtaagtaggtatgtgcacgagtattgttttggcatagattaaaagtacatggggaaaagtggtacatatgtgtatggtagtcatgattgcgttaacttgaacaaagagtctcaagtgcatgccgtgctatggttgtatttgagatagtaaattataagggttgcgcaatatgaggttcgatcgatgtagttaatatcgattggactgtagagaagtggtgacatgccgaagtagtcatcgcttcctctacggttaagtcgaggtcatgtgtgatgatgctat

SEQ ID NO: 157979 - DNA, 765 bp, Zea Mays
gggactcggctacaaaagttccttactgaacggatacaggacttccctagccattggatctgaagcgaactgttcagattagactcactcctgtcgaaacggtacgcgctcacgggggtcggataaaaggtcaacgacccagatttaatgaatccgagatccaaccatgactctctgatcaccatcaaacgctcaggaacacacatacataccgagcacgtgaggcggatggatccgaaaccgatggtccaaagcgaatcgtggcagctgacgctaggtgcactaatccagaccgtttgatagcgcatcgacgaacatcactcgttccctttcaccgtgcccgaccgagacggtggcgggtatccccggcgacgacggtgacgagcgccaccccgggctaatcccgtaatggcggacatcaacagctacggcaatacacacaggcgtcggattaagttggctaggagcattcttaccggccaattatgacgcgggcgcggtcggccacgcagcggggcggacggccgtagaaggagaactccggcgagggaccccaaggtgcggtgacccaattcgccccaggagcgtcgctggcaaccttcaccacgaccggccgaatccaattgaacactcgccaagagcttagtcaggcgcgtcccgagattcaacttcagcggcagaccacggctccctcactcccaattccctcaaccagcgacgctttgaggtggaagaaaggttgggcaagaaccctcccagaaaccc

SEQ ID NO: 157980 - DNA, 1039 bp, Zea Mays
tacaaaagctaactattacactgaatgcacatccagtgcccattcaacaccagcaggactggcctacttcatctgacgatccgaaagctcttcagaattgacatcatccagtgcccattccccaccgcccatatgttcatcttcagcaaattggttattgaaatactcagataatggtggcgacggaccagcttcaagatcttctaaacgatgtgcttcctcctcaagtgactgagcaagctcatacacgcgccacattgcaaagttcactgacacctctttggccgtatctggcgaatccataatctcgtttccggccaaatctttcaactccctcccaactacaagcatttttgcaatggcttgtgcgaggtcactacgaaccgtttcaaatcgggttatctgcgaagggaaaccataccgacattatggattaacatagaactaaaaatttatacaaaccatagccctaaaattggtggaagggaaaccttaccgacactgagcgaggtgccgagcactgaatctgctgctggggagtacatcgcatctggctgttgttggattcgggatcttgctggtgagtttgctgggtgtggaacgtgcctgatgtggccacgcaggtgacgggcttgctggtggagtgctccttgccgctaccgtcgcctgtaggcttggcgaggattgacactgacaaacgactgaaggcggcagccactttggtctcactatccaactcgagatcgacgtcgacgaccagccgtttcttgcctctcgtcggagtcgccatcggagaagaggaggaacgagagagattggcggtgccgtgggacgagtggacttaggttttcaccggagtgcgctgtggttaaagcagggatagaaacgacttttaccattgctgatggaatgttacagtgggcgagatactaaccatactaatttggcgtgttcgcgttctccataataccatcctggcgaagcggagctgcggagtagtaatccggcgaaaccgcgcgacgagagtattataaagtca

SEQ ID NO: 157981 - DNA, 704 bp, Zea Mays
atttacagggaactcaggggcctcggggtaaaaatctgtagacacagagcactattcgtagtactgcgggttaatttccacagaggttagggtctcttttacaaaacctacggtcgaaggggtatgggccacgatgggccgttggattagaatcctacggatcagatcagacctacctgagattgaatcggagcgaggcgagaaccgcacgatccatgatctatggccagatcgcgcactagtaatcgttacgcgactaactaaatcataaccgcccattgaaccacccacgacccagatttaacccagccgaaggtgtatcctatttctaatcgtatccgcccacgcgatgatcaacgggcacgaccacatctccttcctccgaccaaccgagacggtggcgccgccctgaaccacggtggtccattgccggaccacacccaaaactctactctggccgccgtgaattgatccgaggagcgtaaactactgcatatgggtagtgagatcggtggagggcatcataccggagtaattcgcgacggtcgagcgggtccacggcaggggatttctcgaagtagatttgaaatccgacgagcaatcaccggcataccagtcaccaaccgtgaccagaaagaagtggcgcacggttcacgtgatcccgtatggcaccacggttgagctccggacctggagcaccctcg

SEQ ID NO: 157982 - DNA, 749 bp, Zea Mays
cgaggatccaccaaccagtaaaataatgttgtgtgctctggcccagatgggtgatgcaaggtgacacaagttgtttatcctggttcgggcgagagaaagccctacttccagcagagggaggacgagacttatattacttgcatctaagtgcttgcagtagggagtacaaacaggtcgagaggggaggatcccaagtccctagggttgattgaggcaagtgtcaatatcgcagtggaggtgaaaaccgtgaagtgttcgcccgcctccctgaagccacagactcccctatttatagcctcaaggagggctgccatgagtgtcggggttggccgggtatgatgaggaggcaaggccgagcaccttcagacggtatggcctgtggtatgaggcttgtacttgttatttacttatgcctggtggagacgtctggttcctgtatttgcatctttgactacacagagagctgaagccagggccgagggctcggtcacgtacccgagcctacctgatggggaagttgcacatgtcatagtggttggtgcagtgctgagcatggcaaaaagcccctaggtaatatgtcagctccgccgttttcagtaacgtcgggcgcccttttgtcgataataacgaggtcgatgtcgtgctcaggcgaggcggaagtctgcccgaggcagtgactgagctcgcaccgagaatcatagacgtgcgcgacacagttgaaggagtggcctcctgcgggattggtgggg

SEQ ID NO: 157983 - DNA, 468 bp, Zea Mays
ggagggggatgacactcatggtggcgtgtgactcgatagaaggagcataggatagggtttgcaagtcgctgtagcacctcaccttgcgacacgcatgaaccggaagcaacctccatggacacgtcgctgcgacgcgcgtccgaggccactctcggtgtggacgtcctagcgcatacctcgaccaagtagctgctagcgctggtgttgggcttgcggaatggcgaggcaccctcgagctcagtgctctcatgctctgttgggccttcaccgtttcgagacccttctggaagggtcgagtggcgtttggtcaacatcagaggccgtttcgtggactataattggtagccactgatataggatcatacgactgagaaatatgatgttgacgtggataggctaggaggactcgttttgcagccgctttcatatataggaaattggtagccattgacataggatcatacggct

SEQ ID NO: 157984 - DNA, 306 bp, Zea Mays
gagagccagggcatggcggcagacccaagcgccgccttgggcaccaaactacgtgggcgttctgggcatgagcgctggtctggggcctcaaggggttcctcggatgatggacgtggtcgtctcggtcgaagtggtacaccgggatcttgttaattccccgccggagtgatacgagttcgtggttgcgcccctcatcgtgggcaggcgtcgcggttgcacaagaaccggtgagagcactttctcattccttaccttcatctctactccgtgtatcgtccttcggattaaagttttgcggctgggttt

SEQ ID NO: 157985 - DNA, 774 bp, Zea Mays
ttcagtcaactgcagttagtggtggtgcgatttttcctggtgagatactgtcaatcatcagcgccataaaaaactgtttagcatagcagggttggcgtaggcagacttgaggataacatcactgtcggggatggggcgatctcaggagggaggggctgcaatgttttggctgacaatgggttgaagaacacagggtgaaagaacagtagcgctgttaatctgaacagttggcagaacgtcagattacctcttacggcggagacagaacaggaaccacacggtcgtcttacgcaaaaagagcaggaattggatgagtcgaaaaaatgaactttgagttatgcaaaacagtggagttccttgaggtaaaactagttagtaaattggctatgtcatcttcaacaaagcaaatcagcaactgagtcatcttcaaggaacatgccccacacttatctcctctctgcactcagggtagttaaaaaatatttccaatactccactttcgaattccaagttaactctatctacaagctgcccagaatctgctagaaaggataagggatcaggatattcttcagacattttgaaaaagaaaaactagaatctgatcaatcgactgaaatattaatttcctccccacttcccttcgaattccacataagcacagaccttgcccattacaccaaacttgttcaccaagtattggtcttccactttgctataacattacatatctaataatacatgaattttgtgttacattgccccaaagtcaag

SEQ ID NO: 157986 - DNA, 911 bp, Zea Mays
gcccaactccgaatcgtctccgggcggcccaagctcccgctcgcgcgcgcacacccgaccggtgggcccggcttggcagtctcatccgcgcgcgcttagatacgccgggtcgcttccatgtggaccatccctgtcagaatcgtcctcaactacttcgcggggagctcggcggggcttgcggtgccacaactactctgagcctggcgcaattccgagccctcccgagtttaaaacctagcgccgctgttccttatcccttcctctccttccttttccccaattccgcgaccgccaccattgagcggcagcattccgcacggggataactcacgtcgccggggttttgtgtctgcgtcgccgttgcggtcacaattgttggcctgtgcgctcctatccggtctccgggggcgtacgtggtctcggctggcgcgattggggcatagtgcgccggcaattgcttgccgtacttctgctccgctgcagacccgccttctccgtggactgccatcctcgccgccccacctccggtaggatgtcacccaccttgtccgcaatgttctccactgcatgtaggttctttcgggtgggttgttggggctctggtgcgtgatttgcacgagcaccggcgaggttccgccgcgggagctcgcgccaccgttcccggtcggccggattgtgaggagaaccctcggtgctgtccgatcctctttggatggctaggattagaagatgtgtagccgttcgattaattagatcgagtccgttgatcgggtaacggatggacgagagcagatcaacgcatggaggattcacggccgcggatctgtgatccaatggaacacattgcataccggttcagtagagaatggagtctaatcatggtcatccactttagatcgtgcggccaggat

SEQ ID NO: 157987 - DNA, 695 bp, Zea Mays
tccggggtagtctggttacaaaatccatgcctatttcctcccacttccattcgggcactgggagaggttgcagtaggcctgcaggtttctggtgttcgacttttgttcattggcaagtgtcacaccgggccacatactgtgctatctctttcttcatccctctccaccagtatctggttttgaggtctaggtacatcttggtggttcctgggtggatagagtaggccgagttgtgagcttcattgagcaggacttctcgtgcctctccttttggtacacacagacggttcttgaaccaaaggactccttgttcatctgtcctgaggtccggaagttgttctttgcgagctttttccataagtctcgctgtctccgtgtctaggcattgagctttgcatatgaggtcttctagcattggcttgacttttaagctgccgttgtctcccagacatgcattcagctgagctgattccttcttccaatcttctaaaaagttggttccctttatcccaaaaggtttttggctgagggtgtctgctaccacgttggcctttctggggtggtaatggatctcaaggtcataatctttgatcagttccagccatcttcgttgatggaggttgaggtctagctgagtgaagatatacttcagactcttgtgatcggtgaagatgtggtatttgttcccaataagg

SEQ ID NO: 157988 - DNA, 470 bp, Zea Mays
cacgagggtgggctttatagccgttcgcgggcacagtacaggcatgggcacgggggtggccaaccacacgcgggggcgcgcgcggcagcggcgagtgtgcgcttggccggtcagacaaggcatcgagcacgtggcagcatttgttctggtcactttcaagcgtcgattggcctgtgatctcttcatatctacccaaaatccctgtataagatttcttccttgtagtatacccgttgtatctcatgcagtgctcaagtggatttgacctcaggttggcaagttacgaggaggtgaagttgtgtctgtccgagctgtccacactgagacaaaagccgtgtcaagttgggtcaaacgacttagggttgggttcaaacttttccagggtgttctaggggtctttaggcgccattttgtcaattgggccataaggttttgaggtttggaaaaagatgaacatgtgtgatctttga

SEQ ID NO: 157989 - DNA, 947 bp, Zea Mays
cctgaagccaactttaggcaggagaagcagtcacgactcgcctgaggctgaccttgggcaggagtgcataaacgctatatgggcctctcgatgacttgcctctcaaggcatgccctcgggccgcaaccaggctagataagctcgaactgggaggcaaagatcggatgaccgagtcatgcgctgatacctcgggcagggagtttgagcataccgaaagtgctagatactcagagttcactcggatagagggccactgaactccggataagctggaaggcgtctcgtgttaaaaggagaattcagttagagagtgatcatgacttcatagcatctatataaggccgagggggtacccctatgaacccatctctgatctctcagctcatcacatctcagcttgtcaccacctcatagcccattagccctctcacagcaaccacgccactgctagatcaatacaagaactcactctccaccgtacacaactcatctgtgacccttgtaaactagtgatactctaatactcagcctcaacacgaagtagggtgttacacattctagcagcctgaatctatataaacatctatgtgtgatccaacgtgcattcgcacataccatcaagttgccatcaactacgccgtcctacccaaaagcatcacgcggggaacctgtggtgcacagtcgggtcataaaaatcgactgctggcgcaccaagtagggggtgcgacattgattcatgacaattctatggctatcgccttcaacaccctgatggcactgatcatggatgcaggctcgccccacctcacctcagcgtgaactacttcgacgaactctaagacatgaagacctcaaccaacctccacccctcgtaggattgcacccacgtaaatttaaatgctatgaatctgctagattatttctaaaatatccgagttattggatca

SEQ ID NO: 157990 - DNA, 425 bp, Zea Mays
tttggtataattgcccaaaatttcattgcacatagtctcaatcatctccagccattcttggcaaggctctttaaactgtttctcaaacttgaagcgatagggtaatcgaacaagttcattcttcttctttgttccttttagcttcggcatactccattcactcaacgttggagataccatgttagctaggtattcttgcactagatccctggtgctgatttgttcagccaccactctgaattctgctatggccagcagacatgctgaccctggcttcatgttgcacaagggtctggtcatcccgaagcttaaggacagcgggctcatcaccatcgtcatcagtttccctcttttcttctcatcagccttaatataaaaccactcactcttccagccagttggccacttagtgtgatagctgagga

SEQ ID NO: 157991 - DNA, 728 bp, Zea Mays
ggcggacccgcacagccacgacaatggtggcgcggggtggaaccctcgccagagcccatccagcatcctcactacagcgcgaagctccctggcacgccaggatctagttctcggcggcgccatcccttcttgccctctctctctcctcccatgatttctctctgtggccttcggtgatagagccgcacaaaaattgaacacgtgatgtggaatcttcgccagagcttgcctagctcccaatcgatcggtacaggacgctacgagagctggtagttatacacccccgagggcggagtccgtgtgggtgccaggatcccggatcctatcaagtgcgcacggatctaggaaatcgcaacgatgcgcacgcgagctacggaccaggatgcgatctgttggaggaggtggggatagagatgacaagcgggccccacgagtcaatgggagatgacactgcgcagagagttttttttagtctaggatccgcccgaatcgcgcgctctgttcaccagagcctgggttggttgcaggtggagtagaagatggagctgacgaccgggcccgcgcgcagaggctgatggataggggggtccactggtgagtggtgcagggagcgcacgcgctccgtttcctggacgcggcatcatcggcggtctggtttgcttgcggcgtggaagaagatggacctggcgactgggcccacaaagcggcgagcaggcaagcaatgcgcg

SEQ ID NO: 157992 - DNA, 443 bp, Zea Mays
cgatattattattaagctaacgagatgaaatgaatcaaaactggatcgtaacacagaatatattgaataactaatagctcatatattaattacgaagtggcgcacgtgattggtcgaagctaaatcacataaagggccacgaagtttgcagccatgtaagatcatcctgagggagttttgtattggatgtagggaattgtgcgtgcaggaggggtgcatggctgcatgcacatgcatgtgtggggttcaagtagtttttcttaaacgcacgccaaagggataaacaccatgcatgtgggtcccaccggtagcattttctccctcctttctctgcacaactcacgcacgacacgagtggagtagtgggtgagtgacgagtggttacctttcttcctcaccgctcacgcacatgcgggcaggaagccgaccatggcgctgggtgc

SEQ ID NO: 157993 - DNA, 754 bp, Zea Mays
aggagcgtgtagtgaaattattagggataactgtcaccgtttgtttcctatttttgtgtttcgatggcaggcgacgacgaagaagcaaggatccctacatacttcgatgaatgtgttagccgccaagatcttgaggcaaacaacaacctcctgaaggagcaaatggaggagacggtccacaagtcagtgcatgatgccttcattgacatgaaccttggcaagacttacgagaggctggatcgaagattgtcccagatcgtcgacagacttgctgtgttggagacgcaacaacaagcaccgccaccaccacctcctcgtccacgtcttcctgatgatgcggtgtttgatgaagaaggtaattatgatgaagcggccaccagagatttgcgcctccatcgccgtcttcatcaaaacacagaaggtatgccacaccgccagcaaggtaataacaatcgtgctcctgacgacccttatgctaagattaaattttctataccatctttttcgggtcattatgatgctgagggatatcttgattgggagatgatgatagaacagaaatttgctacccaccttgtacctgaacgacatcaagttagacaagccactagtgaatttaaagattttgctattgtctggtggactggtctagttggggatggtagagcacctacgacttgggaagatcttaaggtagctatgcgcgatagatttgttcccccatcttatcatagagaattgtgtaagaaattga

SEQ ID NO: 157994 - DNA, 673 bp, Zea Mays
caagcacttggttggatttgaattctcaaagctagattacccaaagttcgcagggagtaacaagtgcaagaaaatttcaaaggcagagaagcggcggcagtaggtaggtgcaaaagcaataaatgttatggggtcacatgggaccgatcgatttatatacacgagcgggcgcagaagccaagaaaacgtcgtgtccctactcaatgtcttatggaccagaaaatataacccttcattacaacgcttcgcatttcttctcattttcaataacgctcgaggaaggtgttttcaggccttcgacgtaaggccctcgtttgtttcgtggcttcggcatgttatgaaaacaaactaatcctgcaataggctactattggagggaatgcatttgttgaaaaccctcaaaacattgtactaccggtcattttcaagtgtgttccaaaatgacaacgaaactacccttcgtcgaaagcaatgcacaaccaaaaaacaaagctaggaagctttgtctccatgggaccaacgtgtgtacaaatacgaaggaactttgcctccacaataccgacatgagagcaaaggtgaaagagaaggatctagaagcttgaccaccacgtatgtgaaggaaaagtacaatgatatacccttacgaaacttttaatttatgtgtataaaaaat

SEQ ID NO: 157995 - DNA, 351 bp, Zea Mays
catcttcattaggatatctccctgacaaggcctaaagtcttttcctccaggtaggagtatttttttgctgggtgggaagtagcgaaggggtgtctcagagacctccctgctgtagttttggcatagctggcggagggctctttgggtagcattctggcaagtgtctgggaagcggtgtccagtggcggtgacttggaagggagggtgatttgggtagttttggctttctcccaggtagactgccatagagcatttctcaattccgttctcgcggtattctttccagacgtactccagcttcttgcggattcccatacgaagcgtgcaactccgtagaaggtgagggaaccc

SEQ ID NO: 157996 - DNA, 625 bp, Zea Mays
gcggaggcggcaagtccctcagcgtcggagttggatgaaaagcagtccgagtctcattcctcgtcgatgtgtgcatcgcccttcttcttcttgtagattttttttcttctccttccccttggcgctcttgtcttatgactggttatcattgtcaggacattttgctataaaatgaccagacttaccacacttgaaggagacacgcttctcccttgatttttccttgttagataagtcctttcgccccttgagtgcggtcttgaagtgcttgatcacaagcaccatctcttcttcgttgagactggtcgcctcaacttgtgccaccttgcttgggagttcctctttgtcgtttgtcgctttgagggtgacgggttgcgattcgttgtagtgggggctcccgtttgtggcgtcgtcgaggtatcttgcctccttggccatcatttgttcactcacaaacttaccaaggacctccccgtgcatcatcttttggtacttggggttctcatggatcaagtttacaaggttatgatctaaaacagtaaacgaccttagcatgagttgaacgatgtcgtggtcggtccttctcgtgctcacgtagttccgacttggttcaccacgaatttga

SEQ ID NO: 157997 - DNA, 566 bp, Zea Mays
ctcagccccttaggatgctccatatatgtgcttcgtctctcggaccatgctattgacagtacatgttttagatccctcccttctgtccctttgctgtaggtcttgccttgggaatttgggttggttagcggggacttgatcatagggaggcggtcctgggatgaaggagagatgtggtgaccatgtgctcatcactgggttgcttgaggcatttgcgaccgaaggcagacttggccttggatcttgtgactgagtttaaacatattgcgagatgtagggtgaacaatatgaagatgtactaaacacctcttttagctgtgaaggttgagtagctgacgaagcaagctctttctgcttgttggtggtgtgatggcatgttcttctagggtgtggccgttgtcctcaccacaaaacaagcaggatggcttacttggggcacaccaaacctactaccaaagcttcagcctcccttcgtcttggaggaggtggtcgaaatgtgatatgtgaagattgctgctgagagcttgcttgttgacctgactaacattgtgactgggccatccttt

SEQ ID NO: 157998 - DNA, 610 bp, Zea Mays
gtcgggaaccggcttcggacttatcgtgggcctggtgtacttggtgcatgagggggggctgggctggtgggccagaattctaccgggtacgcagcacatgtggaggggcacgatttgaggggactcggatctcggagaggccagatgacacgaaaccgcgacgcgactgcacgagccgcacgtggggcctgctcgttactcgttagcgaccaaaatttgccatgtccaataattaatcaagcgaaagttaaacaaaaaaatatcataattttggcaagccaaatatgaggtcaccgagtctgttagcaaatcaaataacagctaaaatcatggcacaataatatatatagaaaagccaaaacaacattaggaatttaggagtattttatttgcaacaggagtatgggtgtgcatgacagagtttggtcaacaaatgagacacgtgcgccgtatactttgcacgaagctaagcgaacgtcaccaatacatcgagacctacacgtctccgagcatcgatttattacaaatcgaagggccatctgtcgtacggtatcatttgattcaatctgactgccggttcaagccggtaagaaaaatgtggcacggttct

SEQ ID NO: 157999 - DNA, 2440 bp, Zea Mays
gtgttgacataataagtaataaaataacagataaaaggaaaatacatagaagaacaattttagccagtgaaaccagcgtgacatggaaatgtgtatatatgtacagctttattgatagtagatagttcatagtaatagtacacagagagcttgtaccgtcattatatttatcatattttgttgtactttcctatgatcattaaattacagtgtggagacataaagcatagttcatgcataaaaatggtctatatatcgatgatatgaatttgcattaagaagaactttgaagaatcctgcttactttgtgaaatatatattgtattaaaaatgcaattcgtgtgcacatttgtaaaattgttcaaattaattgtttaagaatgttgtgggaatgtgccacgtggtgcataaagattatgtcatcagctagccagagtagagcttgaccataggatttagtggtggtggtggattctgtataattcaggattaaacaataaagaacagaacaaaatcactatttagaaaacagggatcacattgaccaagggtgaccatggcctagcttagccttaagcaagctctacccctgcaattaggccagggataactgtcattgtagtggcactagctactagagttctttgtttcaactttggtttaatttacaagttagaaaatgcaattatccaaaagctatttacattgtttttatatggatgagccgcaacactagagcatcatgcattataatctacaaaagaaactccaaatcaaataatggattctaatacacccctaccctaccccaccggtaaaagagacttgacactacatttgttaccaacagttttcttatccatattttatatttcattatgctcaaaaaaattttctaaaattttcactagattgtgaacgatgtgtgtatttcacttgttttaagaaacgagttttgatactcaaggtttcaaaattttgatagtacactatcagaaattccatgtattcatgatttgaagggagcgtgttataaccactattgaaacctcccacacaagatgaagtctgatgaagataatttctaaatagcttcaccttcgcttattttgaaaggatacttatttgaacactagactgtgtggacacaagcataaatgttatactatcgtgataaaagtatcaaacaactaaatccattttttattctaaggccaacttgaaatctttggaatttaaattaattataataatcatagtttaggtataaatcaattaagttaatatgattgtatatgaaaacacatgcatactactatttgaccatatgagaaagatacctatgtgctgcaattttgttataggggagagaaccaaagagcatgatataagttaaagagtaaaaacataggttggtgacatgtagaatcaattttcatcctttacattatgaacttgagatagattaatatgtgaactttgtaaagctatgcatgaaatgttaaattctaagacaaagcctactccattaagtagatttcaatttcttcaaaataaaatgatccaaatagcgccccaagaatcagtttccaaattaaagtaaattgtttcttcttgtttctagcataaaacacgatgactcttagattgtttccaaggtaaataagtacatttttcattttgccgacatcatcatctacgtttttgtttccccttgtgcacacttactagctacattttgttattattgaggagctcaagaattttaaaaatatactctaacaaatataagacttaaagtagctagatggaaactaccaatacatcattgcttgaagaagaaaattcactttgttatattaattattcgtgccacagatcgtgttgcattccttttttttttacttccacccagtgttatatatacaagttttgaacccttaccaatccataggtttggtgtataattgaaacaccaacaaaccaaatggtaaactaaatgcacttatagagtaagctcaaagagtcatggatattagtagacatgaaatcttgacatatggaagtgtcactacaacacatttaaattagtataaaaatttacccttgatccattcatggcttcatgcatgatgctgaatctccctttttattttagctttatgattttaatttaagtaagtgtactagttaaaaatctaaagctataacttgacatgaaaaacttttccttttgggagctagttagaatcatagatataaaacatatagtcttgcatttaaagccaagaaatttgcaaaaaatattatcatagactaaccatatatattgtgaaatgtttctctttatacttgcatggaaaatctgcctatattttattctgcctagttcaaaaggcaatattggacttttaactgagggcatatatatagatatgga

SEQ ID NO: 158000 - DNA, 669 bp, Zea Mays
agagaagtagaggatgcttgccaattagctctatagagaggctaagactagatacgagcaaagacgctaggctgaggcatagcaacgtctgactgatcggatgctcactttgtttgacaccatctagggtcggtaggactagttccagtagaactttctaacacactgtgtgagtacctttccattcttcaagcacatcctttaatagaaagagattcaatgcatccaccaccatttagatggcacctcctaccaccctatagactctcgtgaccccaactatatagtttgatagatttcaattttatagtctgtatctgtttgtgtcatctatgtaccctactacacttgacttctattcaccagtccaggtatgaccactggttttgatggtatgtcacaagcgatgccaatttcagctctattgacatcgtccgtcactatcatgattgtcactacaccatctaccttgacagtcttattcggtttggtcactagagccactccttagacaattgccttgaatgtatcactagagccttcaattctagttgctcccttaactggtataatagggacactaccctcattagtggcatcatcaaatcctcccaagcctatcacaactcttccaactagtcagtctaagcctacaacaagagctccacc

SEQ ID NO: 158001 - DNA, 408 bp, Zea Mays
gtcagtactggtttgcatctcaaagtgggtctacctctcagcctcgggaagattccagaagggagcaatgaaagcctcaatgtcctctaaggagggtcacactctatggcccggactggcatctcgaacaggaggattggaaatgaaataaaaaagggactctgcgggggtaggttccaagcacagtatgacaagggggcaccagcatttgaaaccctatcccttagcatcaagtcaattcaactcaacaggtcctcattaggaatttgtctattggtaactcgggtagggtcgttgacctcggtgtgcatataagctgggtaaaccctatccttcaggggttggatgttcttgaaaacaaagtcagcgaccatagcttcagcagtcaggcctttgtctttcagcgag

SEQ ID NO: 158002 - DNA, 1036 bp, Zea Mays
gtcaagctcaagataggtcatgctaaggaagttgatctttgttgaagaaggttatgaagatgaggggtggacattgattaagttggtaatcaatgaacatgacttcgagtcagtttggcataccaaggactaaggcaagaaagaaatttgagggactaagcaagggagaaggtcaaaaagattgaggtaccaaaagctaaagtgaagaagagacttcttgcaaggatcaaagctgatcaagctgtgaagagttatgtgatattgaagaccgcaacataagaagacgagacttgaaaccatcgatacaagctcaagaaatggatagggtcacaagatcaaggtgaaagtaccaaagtcataaccttgaagggctttcaagtgtgcatacttagattaaagagccgaagtgagaatctaaggaagaattagtttgtggggaacttcagagtttagaaaagttattgttgaccattggaacacaatggagctcaaagatgtggcagagttgatctaatttagagtttaggttccaagtggcatttaaagtaaaaggttgaagaaaaggagaaatttgagttcaagataaaataaaggtaattcatgacttagaccatttggataaagtataactatgtttatctaaatcattggaaggtgctcaaagtcggtcaagttgaatgatagaagatgtgcagaaaaatatcaagttttagctttctagggcgcactagaccatgggtccatgtgaacgggaccttcttaacagcgggatctagaattggtcttcgatggcctagtgcaccagaccacttttctagagaagtcaaattgaatacttggtggcctagcacattggacattctgggtccaatggctaatacgaggcaacggttgacttcaacgtctagctgacgtggcggttgtgctggcacggtccgatggtgcaacgatccagtccagagctagcccagatggaaagtttctgtcaggatcccatagatagtgggactattgaggtccggtggtgctcccacta

SEQ ID NO: 158003 - DNA, 521 bp, Zea Mays
aaactctggactttcaatagatagaggaagtccaggccagacacaccatatggttgagccgaaccaggtccggatgtttataaaaacaccctagaccctatggattagggtttcggggtctagcggtgggtgcaactgtgtgaggtgtgagaggttgcgagcgacggtcggacgtcgatgacgactttttgtggcgcgaaacgcgagtggcgttgtgatgcgacgtctgtgagcggcagcactaggcaagtggtggctcgagacgcgagcgtcgcagcggccgtgactgtcctaggcacgagcggttacggtgaccgcgacctcctgaggcgcaatctgtggtggtgacaacaacctttcgagacacgagcggtgctggctgcgttgatcgtccgtggtagcatccgaagacaacgatctccttcgatgcggtgcatcagagggcgtcctcctccgacgaccaccttcaacccgatggcctctgaggcgtcctttgatctggcggtctcggaatcgtcctc

SEQ ID NO: 158004 - DNA, 447 bp, Zea Mays
gttgagcttttgctgtctcctgttctcctgcgatccgtgtccgccgaagatgacgttgacctctccgtcgacgcgcgggaaggctccaccccctccctcctcctgctgctggggttgtcacggttctcctggtcctccccgcggcgaggaggaggtagaggttggaagggtcggtcgtgcccgacggagtgcttgaagtctctgcagttccgaagggtgtggcgcatgtccttgtggtacgggcactgagcgtcgaggatgtcatccagcgtgcgttcgcctccgcgaggtcctccccgggcgcgagaggcaggtggtccggcggcgtgcacttcctcgcgaggcctcttctccagcgtttgtcgggttgttggttcgtatcgcgtcgtggtgcttctggcgtaggcttcgttcctccgatgaggtcttgagctcgctcgtcggcgg

SEQ ID NO: 158005 - DNA, 774 bp, Zea Mays
gtcgcttttcaccctcagactgatggtcagtcagagcgaacaatccaaaccttggaagatgtgttacgtgcttgtgttctgtcatggaagggtagctgggaggatcatcttgcactggtagagtttgcttataacaacagctaccaggctagcatcaagatggcaccatttgaggctttgtatggcaggcggtgtatctctcctctgtgctgggagactttgggagagagatccctggttggtcctgattgggtttagcagacttctgaaaaggttcgggaaattcgtcaggatattttggcagctcagagccgtcaaaagagttatgctaatgtgaggaggcgggatctggaatttgctgtgggtgaccaagtccttcttagggtatcacctactaaaggagttgttcggttcggtgtctctggaaagctcagcccgagatacattggaccgttcactatcttggcccgagtgggcagcctggcttattgcttgctactgctggattccatggcaggggtacacccggtttttcatgtctctatgttgaggaagttcttgcgggatccggaccatcagattgagatggaaccaattgcgatgcagcaggatctgattttggagtgtcgtctggtgcgtatattggaattctcggagcgtgtattgaggaagagatcaattaagtatgtcaaggtcttatggactaatctgtctgagcgcgaggctacgtgggaacttgaggagctgatgcggcagaagtatccagaacttttt

SEQ ID NO: 158006 - DNA, 1257 bp, Zea Mays
ggagaggccgtcggtgccgcgcgtggcgcggagagcggagcgccagttggggagggcggagcaccacccgcacgtgggagtgcgggaaatcctggtggtactggtggcgcgtggcgtggctgcacgttgtcatgagggcgtgcagcaacagtggtggcgcccggaggacctgcaggagacatagttggcagccctatgggaaggggcgccgggttaggaaatccatctaggaagttgaagtccgcagcagtgggagtggaggtatgctcggcaaagggaaaaacggactcgtcaaaaagaacatgacgggagatgatgattctattggtggtaggatcaagacatcggtatcccttgtggtgagcagaataaccaaggaagatgcagagggcagagcgcggggcaagtttgtggggagcagtggccgacaaattggggtaacacttacagccaaaaacacgcagatgatcgtacgacggggcactgccaaagagagcaaagtgcggagtggaaaactgcagtgtcttggttggcaagatgtttaggaggagagttgcagtgtgcaacgcttcagcccaatatgaaggaggcatgcttgcctgaaatagaagagagcgaataatatcgttagtggtacgaataatccgctcggcgcgaccgttctgcgaggacgtgtagggacatgacatgcgaaagtgaatgccatgtgtgaggaagaaggtgcgcatgctggagttgtcgaactcccggccgttatcactctggatggccttgatgcgtgcgctgaactgggtggacacataggcgaaaaagttagacagggtggaaaacgtgtcagatttaagccttaaaggaaacgtccagaggtgatgagagcagtcatcaagaacaactaagtaatatttgtaaccagagacactaacaataggagaggtccataagtcacaatgaataagatcaaagttgttggacgctcgagacattgaagaattaaaaggaagacgaacatgtcgtcctagctgacatgcatggcacaaagactccaagcttttattacaaccagggatagccgaagtgagtttggagagtgcctcgcgaccagggtggccgaggcgacgatgccacagagaggtagatgtggagctggcaacaagggagtgagccacgggcagcttcagtgggtaaagcggcccggagctattgcacctgatgatcacgttccgcgagagaagatccttcacagaacaaccatacgag

SEQ ID NO: 158007 - DNA, 747 bp, Zea Mays
ctggaccatctggagactgaagtagttcaggaaataccagtcatgtttgtaggtatgtttccactcgaatcccatcctatagaagtgttattcgatactggagcaacacattcatttattactgcatcatggcagcgcataatcttccaataaccaccatgtcaacaccaattcaaattgacccagccggagggaaggtccgaaccgataatatatgcttgaatgtaagtgtggaaataagggggatagagtttctcgctaacctaatagtgatgggtacttagggaatagatgttatcctatggataaattgtctagataagtaccaagcagttatcagctgtgataatagaacggtgaagttggtgtccccactaggagaggaagtggtgactgagctagtctcacctgagccatggaaaggaggttgtcaccagatggctattgatagcaaagaggtcgatccactcgagactatcaaggttgtgtcaaagtttcctgatgtgttccctaaagatctactaggtatgccacctgagcagaaagttgagtttgccatagagcttattcctggcaccgctccctatttctaaaagagcctacagagtatctggaccagacttggttgagctcaagaagcagatagatgagctgtcacagaaaggttatattagatcgagtacctcaccttgggccgcccctgtcctatttgtggaaaagaaagatggcactaggagaatctgcatc

SEQ ID NO: 158008 - DNA, 601 bp, Zea Mays
ggcatagcagttggcagtgaaggtctctgtgccgatgaggagagagagtcccgggtgaatccctgacatcccaccgcgtctctgttggccactctgatgttgattgctgggatggtggcgaggtgcaagataagtcgagcggcaaggatctggtggatgaaattatgtgtggaactcatgtccagtagtgcgatgagctgatggtgattgatgtcatcatttgcatggtgtcttatgtgcggatgcctgctagcgcgtgcagagatacgacaagagggttagatgtgtcctcccgcgcggcctcctcgtcctcgtgctccggttaatcctccacctccatgtagaagagacattggcaatgatggccatgtacatactgttcatcatagttgtagcatatgccctacatgcgacgctcggttaattcggttggagtgaggtgccgtgtcatggggcggcagcctagatcatggaggccatagagataggctcagggttaggattagtggataaagattagataagattgagttagttacttgggattagattagataagattgatttagttacttgggggccaagtcttcgtatctatata

SEQ ID NO: 158009 - DNA, 1048 bp, Zea Mays
gggaaagtttgaacagtgtcgggctgaatcaagcccaggcggcccaagtcaggcgaaaaacgcgtccacgcccgcgaccatgtggattttgcagaaaagaccttggtttatggaataactggaagcgggttcctatactgtttccttaggtcgctgactacttacaagaagaccctcgagcttctaattcttcgcaggatggggtccccgacggtaaacagtgctcggccgatctccgacgagcctattccagccgaatgctgccacggctggagctcccgtgcgacagagaccaattagacccctaccgcacacttcccctcaatcaatttcatcaatggagcattgaatcaatcagtccatggtgacagggcggatgatcggaggggtgaacatgttccgaccaaccgacgacgtgaatgaccaaattgaatcttgggaaagcttcacaggtttaccagagatgacgcacatactaaaatttggactgggcacgaatagaaatgtggggcgacggagagggtgtcgcggcggcattctacagagcaattgtgtgttccggtgaaaggcttcgaccgaacttagattggttggtactgagagcaataggaggctacaaacgagctagaacagggagtaattgggaagttactaacccgaagagcgctgaccatggtggagtcctttacggcggagttaagaacagaggaggagggaatttgggggctacgtgagtgctccggtgaaattgagccgattgctcagtcactgaggtgcgggatgtggtgaagaagcagaacccgggcgcaatttataggccatcgaccggaattggatgaggatcgcggattttagattgcgcaggcgagctcaccgcgcggcggaatccggtgatggcacggtggccgccgattaaccggggcttgccacctcagtacctctctgccacgtcgccgaggacctttaccgtggccgccaacgacccatcccgagccgcggtggcatccttatcgccggcgaggggctgatccttatctccccccccccg

SEQ ID NO: 158010 - DNA, 509 bp, Zea Mays
cggaaaacctgatggcaaagatgacatccctgtccccactcccggcgatggcggtcagccaggtatcctcaaaacccccctcctaccattctgaaatctgagaatgaactggtgcgtagggttttttttgccaaaaatgcggtatggatggccatcatgctagggagtgttttaaatctttgtggtgcgacatctgtcgcaaggagacccacaacaccgctcggtgtgttcttcccaaacagaataaacccagtatgcctattgttggtatggcggcagatgggctagggttttactcttctcatttcgccaagccattatccaacaaacctaaacgcagttttattggcttggttaaaatcgttgagggtttgatcacggccgaggatctggagaaggatttcgattttcactttccttggggccgcacttggaaagctactaagtgccattctggcttcctcatgcaattcccctctcaagagaggttagatgagatgattaatttc

SEQ ID NO: 158011 - DNA, 586 bp, Zea Mays
cacatgagaggggtctagcattttcatccatacaatgcttcaaacggtgacatcttgatactgtcctgatggctgttgttatacgagaactctgcataaggcaaactggactcccagtttctatcgaacgttaacacacaggctcttaataaatcttcgaggaccttgttgaccctttctgtctgaccatctgtctgggggtgataggtggtgctgaagtctagcttggtgcccatagcttgctgaaggctcatccaaaatttggaggtgaactaggttcccctgtctgacactatcttccttggatgccatggagtctgactatctctttaagataaatccgggcaagggtggctcctccaaaggtagttttcactgggatgaagtgggctaccttggtaagatggtctattattacccagatagagtcgttccctttttgcgtccggggtagtccggttacaaaatccatgcctatttcctcccacttccattcgggcactagaaggggtttcaataggcctgcaggcttctggtgctcggctttcgttcgctggcaagtgtcacaccgggccacatactgtgt

SEQ ID NO: 158012 - DNA, 1055 bp, Zea Mays
cactgatcggacactgaccgatattggtgtataccgattgttggattacacgtggatggttagaatcaaatgcacgagtgtttgggcggtgtgagcacgacagtgttagcctttatgatggtggctcactggctttagctacgtcaggcaactaggggttttactggtgcttaggtttgccgccaagacattagagaccatgacaaactctttgggcatgaattaggagcaaggggatgactgggagggcacaaacgacgacgaggagtactcccggtggtcgtgggaactctggtgagcaattcaagtgcactccgtgtaggtttggacaacggaaggggtatgcgagttttagtacctgatagtgcacctccttatgccgaatagaagttgggtatgcgtctagggactctagttgatagaagcgagggcacgatggagtcaggtcaccatagcccaaggcgtaaagggcgatagagctccggtggaagcttgtttgagactcctcgacctatggcgaagctggtgatgacggtaggtaggtcgaggatgctctggtgatggtggaacttgttctatgaagctctagaatggcaatgtgaacactagtggcaaggggagagagctatggtggctaggatcttgaagcgaggtgaccacagtatgctggggttgggatttatacgatcatgccatagattggagggagacaacaccaatggaatctagggaggagcgagggggaggaatggctagattgaatgaacattgtatccgttgtcgggtgatgtgcgcaaggacgacattcaggccttgcaggggtgagatcgacacagggggtgttcactattgaacaatgaacacgagcaggaggtcagggatgacacgtaggctccacactctagagggagagagggcgtgcattcatggattgcaactgaccagccggtcccacgtattagcaagcgtgggcatgggggactggcgttcggatgataaatgcggacctcgcccacgaccccctccctccgtgctcacatctagcgatcgtacgc

SEQ ID NO: 158013 - DNA, 844 bp, Zea Mays
atcgcatcctatgttttaaactttactttgcaaacattgttaaacagtattgtctatagttccacgtccctattttactctacccgacgaagacagtgttatatgcatgcaccgcgcctcgggtgcgcttagctacagagcctgcgtacgtttattgatctcactttattcactcacgtacgtagatgaagacacataaactggtacgatggtcggcacacatcctgcttcagatcagtcgcctctgctcatttttgtccaattaacgccgagagtactgcaagcttgtcttgtaggcagtgagcaagacggcaccagcttttgctgccagcaccacagctagcatgttcatgcatgtaagggtagccgggtagtagcagggcgccttcaaaccacgggcagtgtgcagcggcgtctccgtacggcgatctgttgccggccgaggggcgggcaatgcaccatgcaatccgtccggcagatcagtatgcatggctggcgcagtggcaaatactagacgacgcccgcgtatgtgcacaaggtttcaaccggggatatgatgatggcgccgcgacacacctgcgcgcgtgtccttccaacgtatgaaatgcatgcatgggccagcgccggccggcagacggcagaccatatgcgttttgtggttgcaactccaactgtacgcatagatcgatcgatgcaatctgttggttgtctgcttatcgtttcagagacgcacacgtactgttggcggtttgatgctgttcgtcccatcacggacacggtggacgcatacggatgctgcaataaaataatgactcgataattgacgctgtgttgcttctgtggc

SEQ ID NO: 158014 - DNA, 565 bp, Zea Mays
attattatatgagaactcaacataaggtagactcttgtcccaactactaccatgctgaagggcacaagctctaaacatgtcttccaatacttgattagtcctttcattctgtccatcagtctgaggtaggccgaactaaaattcaacttcgcatccatattctcatgaaagcttttccaaaatctgggggtaaaccgtgatcctctatccaaaatgatcttcttcggtacaccgtgtagagacacaatccgagccatatataactcagccaattgagatcacttataagtagtcttgaccggaatgaaatgagccacattggttagtctattcataataacccatatagaatcacatcctttcgaggtgcgaggcaatccagtaatgaaatccatacccatctcttcccacttccactcgggtatcttaagtgggtgcagtagtccagctggcctctggtgttcagccttaactctttgacatacatcgcacatagccacatgtgcagccacatctctcttcaatccataccaccaatacttccgcttcaaatcctgatacatct

SEQ ID NO: 158015 - DNA, 672 bp, Zea Mays
ctaacgggggaaggacgacacaagttgtcaccactatgggaagggccattcattgtatcagaggtcactcggccaggatcataccggcttactcaaatggatggcagagaagtggggaacttctgaaacatagagcatcttagaaagttttatccctagcgaggcctcaaaaattcttgaagcaacattgtactctgtaatcgggggacttcatcgtcaataaagttttcgttttcaaaggcattcagactcttgactttcagctgacttcgattcgattggacttgaaattagtgcgcttactcgacctagggtgaccactatatcctgctaacaaagcaatcagcttaagtcggtgacaacttaagtcggtgcgacatgctcacgcttactcgacttggggtgaccactataccccgctaacggagcaatcgacttaagtcggcgatgacttaagtcggtgcgacatgctcacgcttactcgacctggggtgaccactataccctgctaacgaagcaatcggcttaagtcggcgatgacttaagttggtgcgacatgctcacgcttactcgacctggggtgaccactataccctgctaatggagcaatcggcttaagtcggtgatgacttaagtcggtgcgacatgctcacgcctactcgacctggggtg

SEQ ID NO: 158016 - DNA, 476 bp, Zea Mays
ggcctgtagggtgaagacacggtctccgtcgatgaggtccttcgaagttggttcgtctacgttggggacggctgaagtgcttgtccgtggtgaaccatgttttatttcttgtggggtcatggcctccgatccatatagcaggcggaaaggagtgaacccagtcgcccgtcactcggtcgtgttcagcacccagactgcttcaggtagcaggtcggcccatttgcccttcttgtcgtcgaggagcattttcttgatggccgtgaaaatttttaccgttggcgcgctccacgacgccgttggattgtgggtgatatactgaggcgaaggaaagcttggtgccaatcgagaagcagaagtctttgaagtcctggctgtcaaattgtttgtcgttgtcaactgtgagctcggacgggactccgaatcggcaaacaatgttttgccagaagaatttctgggcagtcttcgatgttatcgtg

SEQ ID NO: 158017 - DNA, 479 bp, Zea Mays
tttgaagcactttatggacgaaagtgtagaacaccgctttattggaatcagaccggagaaagtcaagtatttggtccataaattctccaagaagcagaaaagcaagtacagattatcagagagaatttgaaaacagcacagtcgagacagaaaagctatgctgacaatagaagaagagagttgatctttgaagtaggagacttcgtataccttaaagtttcaccgatgagaggaatgaaaagatttaaggtaagggtaaactatctcctcgctacatcggcccgttcaaaattttggaaagaaaaggtgaagtagcgtaccagttagagctacccgatagtttgtcggatgtgcatgacgtatttcatgtgtcacaacttaagaaatgcttaagagtaccggaggaacaattacctatggaagaactcaatgttaaggaagatttgacttattcggagtaccctatcagaattttggaa

SEQ ID NO: 158018 - DNA, 595 bp, Zea Mays
gcaagtccgagcccctgtagcagcatggccaccggaatggcctttgtacttgtggttgacttggatcagggggaggacgtccgacccctatttcttgcatcttgaccgagccgagagacgaggccaggatcgaggatcgcacgcgtacccgagcatatcttgtggatgtgttgtccgaatcgtagttgttggaataataaaaagaatgggaaaaagcagatggtattttgtcccatggtgtaaagcagactcgtcaccgacctcatagttcctgtagccatcccgatgtcagcagtatctgcgaacggataggtagcatcaggcgtcctttcgtcgatgttatctagactgaggcaatgctcgggtgaggcaggggttcctctcgaggccatgatcggacctgcgctgagacatgcagtcgtgtagagagtggttagaacagtcaccagagtggcctcctgctggattcacgaggagttggtggcttgctgttagggcagtcgggcgaggtcgtgctcgggcgaggtggagacttctctcgaggctgaagccatcatcaggcgaggtagagacttctcccgaggttgaagccgtc

SEQ ID NO: 158019 - DNA, 777 bp, Zea Mays
aagatcggactatctggtgcctatcctgctgctgagctcagagaacttgaaacttcctcttgaggtgacccttttcttcttctcgagctctttccacctggatggccttgtttgagaggtgagagaaactaaggaaatcttgggtggcgaggatggttttgagttccggtctcagccccttcaagaaacgggccatcttcttggcttatgtgttgacatcatcaggcgcatagcgaaccagttttgtgaatttgtgaacgtattcactgacagatctccctccttgggttaactcccgaaattcttcttccttgagctggacgatccctaggggcacatgatgctcttagaaagcggcttcgaattctgtccaggtagcatctctgatggcagcgctgaaagtatcccaccaggatagggccatccgagagagttgttgagcagcaagatgaacacgctggttttcaggtcattcgatggcctctaacttcctttttactgtgtgcagccagtcatcagtgtcgagagggttgctagatccagcaaatgtgggaggcttgagccttaggaactctcccattctatcctgaggccttcctgcattcgggcgctggttctcgaggcttctagtgaggacctcaatgagtcgggtttggttagccagaacttgggctaggtctaatggcagctccgaaggtgcggggaggtgggtctcactcccttctccaccgacttctccatcagcacctacgggagaccttgctctaatccctgagg

SEQ ID NO: 158020 - DNA, 766 bp, Zea Mays
gggagctatccgagggcttgtatcgagcggaggagggcgaaaaaggggttggccatggtggttgccctcaggtggctctagcgggtcgcggggaggtcgccggagctgcgggtgagctcgggagagttaggcgcggtacagaggaggcaacgaggatgatgtccgggcactggggtgggctttatagccgcggcgcgggcgtggtcacggggtggccgcgggcgcgtggggtttcgcgtgcgggcgtgctctgagcgcgcccccgagtgtcagcccacgtcgaacacgtgggggtttacttctgccagggttcaacggccgatttgatcgccttagcgtgcagatcttggcaaaacccccgtgtacggtctcttccctgcaccaaatcatatctttttgatgtgagttccaaacaaagatacggtcggagtagagagatatgggggtgagaagtctgctctgtccgagctgtccacaccgagacaaaagccatgccaagtcgtgtcaaatggcttagggttgggttcaaacttttccaaggtgttctaggggtctttgggcgccattttgtcaattgggccataaggttttgaggttgggatcaaagtgaacatgtttgatctttgaaagagggtcggttttgaacttgaaaaaatcctgatttttcttttatgctcttctctttggtgacctttttggggtttttctgaaatctttttggggtcactctgtttctagtttttgtagggtattaagtgtactacaa

SEQ ID NO: 158021 - DNA, 1254 bp, Zea Mays
tggtcaccccaagttaaataagaatgccggtcaatcatgaacaaactgagtattcttgaagcctttctttattgatgacatatttcccactttacagagtacattatcgtcccgatagcttttgaaatacagctaggggtaaaacttcctgaggtgctctatattccaggagttcccaatttctgtgccgtccatttgagtgagacgatatgatcccggtcgagtgacttctgctactatgaatggtccttcccatgagggcgacaacttgtgccgtccctcccccgttagaattcggcggaggacgagatctcccactgaaaaggatcgttgtcgcacgaccttgtcgtgatagcgtcttagagtctgctggtttcgtgctgattgaattactgcgttcagccgttcttcttcgagtacatcaatgtcctccagcctagtagcttcggcttctgctatgctttcgaaggccaacctcggcgccccaaacttgagatcagcgggtaatactgcctctgacccatagaccatgaagaaaggagtgtttccatgcagagctcggctaggttgggttcttaggctccaaacgacgtagggcaattcccttatccactttcctgcgaacttttcattcttatcgaagacctttttcctgagtgcctccaatatcatcccgttagctcgttcaacctgctcgttggctcttgggtgtgctactaaagcatacttgatctgaatgcctttttgcttgcagaaatcaaagaactctgaacttgtgaagttggatcctaggtcagttatgatattgttcggtatcccgaacctaaatattatgtcttgtatgaattccacggccttatatgaggttaaggaagcaatgggtttgaactctatccatttagtgaatttgtcgattgctaccagtacatgagtgtatcctccttgagctttcttgaaaggtccaatcatatccagtctctagcatgcgaagggccaagttactggtatggtctgcagttgctgtgctggtagatgttgttgctttgacaagtactggcaagcttcacaactctgaactaactcggttgcgtcacctttcgctattggccaataaaatcctgacctgaagaccttcccgactagcgtcttggatgctgcgtgtattccacattgcccggcgtggacctcatctagaagtcgcttcccagtagatgagagaatgcacttcatgaggacgcctgatgcaccccttct

SEQ ID NO: 158022 - DNA, 285 bp, Zea Mays
gaccgacgccagccaaggcggacaggtgccagacggatggccgaggtaggaggtgcaaacggacgagacagacatacacaaatggacgaacattgagaggtggacaggcacgagtggacggtcgtcggagatgatgcgggcgagcgtcgggcgatgaggcgaccaacattgggggtcgactcgatgggtgaccacgacgagaggcggacatgcgtcgggggctgaagaggatgtgcggctgagccccgagatggaagaactgtcagaggcaaaggcagacgtgat

SEQ ID NO: 158023 - DNA, 483 bp, Zea Mays
gtccttcccagctgggggagtgttacggagccctgatttggtctggtacctttgtaggattaggtcccaaccctgggttcccatctgcatttgacgaaggaggccccgcctttggctgtggtcattcctggatgaacctatcagaaagctagacccgtggggaatctagatgggtttccggaggaaggcaggcttcagctccgtaggccgggggacatgggatcccgctggtggtccgcctagtcgtcgtcgtcggagtgggagtcttttgcgaagacgtccttcaggtccccttcgggtgactgatacccgaggtcctgttcagccgcagccacctcgccgtcgtcgaccttttctttgccaggacggcaacgaggtggggagccgtctttggaagactgctcacgtcgctcgctggcgcgttcgctgacgcgttttgcgagatcaatgatctcgcgacactccgcggcactgtggcgaccg

SEQ ID NO: 158024 - DNA, 337 bp, Zea Mays
agggagtggatttaaacaagtctggataaaagacacccctcgtcggctgcgttcctgagttataaccatttgagttgtttccagcgagatacacatgtccataggcatgttgtaaacaattgttggcgcgtctggggcagtcatcctttagggtgtttctcttctcggtctgcacaagagaagcttcttcctgatgcaatgctgttggaccagtctttcccctgcaggtcgatattttctagagccttgccaaatgatttgacgtttgcacattttcaccctccttcggcaggttccttctgcaataagttcatgatattgccaacacagattgacg

SEQ ID NO: 158025 - DNA, 372 bp, Zea Mays
ggaacatcgaatgaaagagagaatggaggagaaacattgtatggaggaggatcaccatacaatccatatagaggagcatcatatgaatatccatatgggtaagtgaatggtgttggaggtctagaggaggagtattggtggtacgagcttcaatgggaggaggatgatagtcggcaataatatcatcattaggatgaggtggagcatcctataaggtcggtagggatacaaaggagggtgatataggtatagaatcagaggctgttgagtgaggaaaggggaataggcagaaacattctcttgatgatgttgtgtgcgagaaaggtcatcgaagaactcccccacatcagcagggatgttaggaaactggag

SEQ ID NO: 158026 - DNA, 368 bp, Zea Mays
ttaaataaaatatagagctaaataaaattgtttacgaaggttgcgttatgatgtaactttaggggcttgaacaacccaccacaatctacgcgagtacaagctctattgtatctggcgtcaacgcgtgtgtggccatctgggctacgacaacacaataagccttcataacaaacgcaacaggcgcagttgtgactcgatagtcggggtacaagacaagtccacgcaacgtgcgcaataggcacaattgtggctcgaggcagacagacaatgcctacagggcatgcgaaaaatacgcgactcagcgatgacggtctgactcaacaggagcgatccgattaatgaagagcgcgacatagcaatcacatgac

SEQ ID NO: 158027 - DNA, 673 bp, Zea Mays
gaaattattagggataaccatcaccgtttgtttcctgtttttgtgttttgatggcaggcgacgaagaagaagcaaggatccccacagacttcgatgaatgtgttagccgccaagatcttgaggcaaacaacaagctcctgaaggagcaaatgcaggagacggtccacaagtcagtgcatgatgccttcattgacatgaaccttggcaagatttacgacaggctggatcgacgattgtcctagatcatcgacagacttgctgtgttggagacgcaacaacaagcaccgccaccaccacctcctcgtccacgtcttcccgatgatgccgtctttgatgaagaaggtaattatgatgaagcggccaccagagatttgcgcctacgtcgccgtcttcatcaaaacacagaaggtatgccacaccaacaccgccagtaaagtaataacaatcgtgctcttgatgacccttatgctaagattaaattttctataccatctttttcgggtcattatgatgctgagggatacttgattgggagatgacgatagaacagaaatttgttgcccaccttgtacctgaacgacatcaagttagacaagccactagtgaatttaaagattttgctattgtttggtggactggtctagttggggatggtagagcacctacgacttgg

SEQ ID NO: 158028 - DNA, 338 bp, Zea Mays
tgatgcatgcctagtcttgaagtattgatgagaacctcttcttggagccaaagttctttgatcatattgaggacgataacccgagatatgttgcctcatattagtttggcgagatgactctggctcttcatgataacggtcccgagttcggtgcatagacccgcccccggctcgtgtgtaattctcataaggacggctaggcctgcccctgccatgggtataatgttcattttcatgagaatgaataggtctgctcctcgcatgttcattcacatgagaataactaggcctgcccccagcatgtgtgccttcctcacgcccttgtaattgttgttgaa

SEQ ID NO: 158029 - DNA, 590 bp, Zea Mays
ttcagatttgtttggctacgaagatgcttatttgattcatgatccgaatgaataacaaattccttagaccataaataatgtttccacgtatgtaaagcacgaatgagagcatacaattctttgtcatatgtagaataattaagaacaggtccatgcagtttctcactaaagtaagcaatgggtttacctccttgcaacaaaacagcaccaataccaactccacttgcatcacattcaagctcaaaagtcttaccaaaattaggaagttggagtagcggtgcgtgagtaagcttctctttcaaaagtgcaaaggaatcctcttgtggctgcccccaatggaacgaaatgcccttcttggtcagctcatttaaagggacagcgatggtgctgaaatccttcacaaaacggctataaaagcctacaagtccaagaaaactccgcacttgtgtcaccgtcgaaggcgttggccaactctgaatgtcatacaccttggcctcatccacctcaatgccctatggagtcacaacatagccaagaaacgaaactcgttcggtgcaaaaggtgcacttctcgaggttagcaaataaaca

SEQ ID NO: 158030 - DNA, 811 bp, Zea Mays
tggcattaacaacagtcagtgcggttcaaccactttggatccaagaagttacaaattcctatgtgactgatcctgctgctcaatctctccgggctcgactatgtgtccataatccagatgaacatggttattctttatctcaaggggtgatcaggaaaggaggtctgatttgggtgggtcagaattatgcccttcgcactaaattagtggcagcggttcatgacagcgcagctgggggtcattccgggatgcatgtcacttatcatcgactcaagaagttgtttgtttggaagggaatggaatatgatgtggatgattttgtgaaacaatgccaaatctgccagcaggccaaaggcgaaagagtacaccccgctggtttgctgcacccccttcccattcctcaaggtgcctggcaggatattactatggattttatcgagaagttaccaaaatctagtgggtatgatactatcctggttgtggttgatcgtttcacgaagtatgcacattttattgccctacaacatccatttactgcttcccaagtggcgcaggttattttggatcaggtggtccggttgcatggccttcccaagtctatcgtcagtgaccgggacaaaatctttagaagtaccttttggactcaattgttcaagatcttgggcactaagctgaatttgagcatcgcataccatccacagaccgacgaccaaagtgagcgtgttaatcaatgtgttgagatgtatttgcgatgtgtggttcatgctcagcctactaagtggaagacctggctaccactggcggaattttg

SEQ ID NO: 158031 - DNA, 570 bp, Zea Mays
ggccagtctgaagatgtcaccttttgaagctttatacgggagaaagtgcaggactccactgtattgggatcaaactggtgaaagatagttatttggacctgaaattatacaagaggttgaggagctagtccagcaaataagggagaatttgagaactgcacagtcaaggcagaaaagctatgctgatacccggagaagacaactcgagtttaaggagggtgattatgtctatttgaaagtgtcaccactccggggtatgagaagattcaaagtcaaaggaaagttgtcccctcgctttattggacccttcttaatcttaaagcgagtgggagaggttgcatatcaattggagttacctgatcatcttgcgggtgttcatgatgtattccatgtatctcagctgaataaatgtcttagggtaccagaggagcaattaccaatggaggaccttagtgttcaggaggatttgacttatgctgagtaccccatcaagattctggatacactgactcgtgtcaccaggaataaggttataaagatgtgcaaagtgcaatggagccaccacggtga

SEQ ID NO: 158032 - DNA, 673 bp, Zea Mays
cgccagtgttcttctccacctccgaccgccgcgcgtcttgctcgaaattcgcggccaccgcccgctagcactataaattgacccctccccgaactccgtagggtagtaagctgtccagccaccacgaatcagccgcagtcgttcactggaatccgtgaatttcgaattctccccaaatccactctccgccaccgcaagaaactgctcaccgcggccagccctttctaggtccgttcatccctcactctcccttgtttgagcactcttgtcaccctgtgatgcttaccgagcctccaatttgaactaagagaccaccactcgacgggaacacgaccaaacgatcatggtcttcgcggttctcgtgggcaggctagaataggtcaccaattgtgcgattaacttgggggtattactcggggtagcttggatttggtgtccgccgcttgggcgcgccggtcatcgcctcaatcggccggtacagtggctcgccggagctcctccgtgcgctgccgtcgtcgaggacgtgtcgggtaaagaaatagaaaaccgaggactatgctgtaaactgtcagagactcgagaaaacagtaacggagcccacttcgagttatccaaaacgacgagggcctctgtgcaagtctgccagcacgtgcgcgggcgcgcgcacttctgc

SEQ ID NO: 158033 - DNA, 378 bp, Zea Mays
attgaagagggtgatgctaatgaaggagagattgattataacatcattatgccatcaaagcccagccatctggattttgggaaatcgactgtgtctgaagctgatatgactatgatgacgaagctaggctacttcagagaagccgagaaggggttggttcgctttggcggggaagatactatcccgaaaccagaaaatgatgaagttgtagtttttaagagcttcttcaaagcagggttgagatttcctctgcacggaatgattgcagaagtcttggaaaaatttgggatttaccttcatcagcagacccctaacgccattgttaggctcagcgtatatatctgggctctccgtagtcaaggggtagagtcgctcgcc

SEQ ID NO: 158034 - DNA, 758 bp, Zea Mays
gactatacatggccccctattacaattagtggaaggttataatgcatggtcttcgcacctgagtcttcgcctctgtgttctccccatgcacttcgtaatgtagcaaaatcttcaggccttcgaggtctccaatcttgaatcctctagcatgggcctctcaagcgagggggcattacgcctttgccctaatatttgccctctaagggaccagttcgactaagtcagctgatgccgaagtctatcgtaagatggcaaaaatgttggcctcgctcgaagtggtcccgtgagggtttttgaaatgtgaccattgacgagacatgttactgtgggactgttgagttcccgaggcgctgatcctggctttaaaaagctaggcccgggctaaagcttttcacctgttcaagcgcgcgctgccgaaacctagctctttcatttgctcacttgccctctctgctctcgctctgccgaagatctggcccgcatcaagccgactgctcgtcgccgccgatggtacatgaccatgtcgtcctcttcctcgtcgttgtccactgcgagcgtgtcgccgaccacgccgtcgtctgagtagacgattagcgattctacatcggtggacctgcagcctagtcatacggttaaattcgggacctcgaggatttactcgggtcgagtgctggagatgcagcggctgggttactttggaagcggagttgggcgggctctaggggttgaagatgtccctgagccggaaggggagttgg

SEQ ID NO: 158035 - DNA, 476 bp, Zea Mays
gttctggtgtaagattcccgagacacagagaatagtactctctggatggcgggttggtttctgtttctctcgggggttcttatgcaattgtgtctgagcgaaagggtatctgccaatctgagacttcggatcgacagcggacgatggggattagatcgtatcttataacgaaacggtatgcaacgccgaccatcggatgttatttgaacgctctcgattttatgatgcccaaaccaatctgagccatgcgatcacgatccaagggttaggatccaaccggaaggtaccttcaatctaagccgttaatcatgaaatccacgccccagggatcgtcttcaacctcactggtcctctctctctctcttttcttccccagctagtcccccacggccgaacgccatagccgcgccagcgagcagttccgtgctcgccatccgagccctaacttccgccaggacgatcccgctcgaacccta

SEQ ID NO: 158036 - DNA, 630 bp, Zea Mays
cctggcctactgagacttcgtcttgagaaagtcagattggttgggtcaaattgttgatatcatcatcagactccgcagggaactggatatcatcaaatgatgagctgggttctgcctggccatcaatgctcttctccaaactaacaatctcagctttggcctcctgacgaagcatgttcaacctatcctcgtactgttggcgctgctgagcatattcttttgacatttgtaactggaacatcttctttcacttggcagcgggcaccggctttttcaaagctttgatgttgtccttcagctgtttctggattgcagcctgtatccttttctcctccgcttcaaccttcttctcggcatcagccttcttcttcacagcttcttcagctgcagcctttctcttaatctcagcttcttcggcctcagcctttctcttattctcagcttcttctgccttcttcttctcggcatcagccttattcttctcagcttcttcagctgcagcctttctcttaatctcagctttttcggcctcagcctttctcttatcgtcagcttcttcttccttcttcttctcagcatcagccttcttcttctcagcttctttagctgcagcctttctcttgatattag

SEQ ID NO: 158037 - DNA, 1303 bp, Zea Mays
actgtaataacaagatcaaataagaggttagcgtgcttgaaatcgaaccccaatgattttaatagttgtgtaccagccacggttgacgcgtcttgttcttgagtagtcggagcagaaggtgatccttcggtagcaaggcgacttcttttcttggcgatggtctttttcacacgtggttgtggtggatgacggggagccatggcatcagacattgaggaattaccgacactagcgcatggcatgacagcagttccagcagctattttgggagtagcagatgacacaataggggttgtggctgctgcatcactggtagcatgtggtagccagttcttgttcgaggtgtccctttgtgaggatcaccggtgggttagcgttagtcactcaacaattaagccatccacaatcatataagattatacaggtagatccaaattccaaagtaaatatggagtgggaattatgttctcagttctcaccttcttgtgtcgacgtcgtcgcctgaactttgaggcagtgaggaggaagtcatggtgctgacagcaatggacagtggctggagctaggcaaggatctgtagcggccacaaccgctaaattagatggaatacatggattaataaataaacacaatagcatggattttctagtacgagcctatgagggatcaataaatatgacaactaatcgaatggtgaaggagaggaattgagagatacctgtagcctgtaggcgattaggcgagcatgtggccacaaacctggaatatttttttgtgctcgtgtacacacttctctggactcttgagctggaaccttgaatgcttgatcaatccttgtagcggtgacgggatgtgttgatgtgctcctgcactgcgcaagctgcaactagtgcgcgagcgcgatgcttggcctgaaggctggagccttggtgcggcgcgacctgcactgcgcaagtctgcaactagtgcgttgtgcgcgacgcttggcctggagccttggtgcggcggcgagggggtgttcgtccggatctcctggacgctaggacggcggcccgacgacgagatgaacgaaaggcagagaaagcggctacgaccgtacggggaaagcggtaggaagctagggttccagtcttccggagcacaccgttcatgggccttaattctatgggcccaaatatttgctggcttttatatggggccccgcggggatcggggacggggaataggataccatacccgtccccgccagacccgatggggatagtttttctcccatttaattccccgtggggagcaaattgca

SEQ ID NO: 158038 - DNA, 531 bp, Zea Mays
tatttgaggtcgaggttggactccaaagcctcaagtcaacttgacttgatatctaaggctgtccatgagctccaacaccctacaatggtcacatagaacatttccaaacacaagaatgacccaaactaaaggttagagactacttagctctttgggtcacttctaggttctggctttgatactcctctttctagtgaccatgtccatctccttaagctatgatcttgagccttataacttgaaccatataccttaggaattacctccatggttccaagtcacttccttatgtagtgatcctcattcctcaatgcaccatgaccttcctcagctgatcaaccttgacttttgtagagtcccttattcaccatggctttaggtacctcagtcaccttgaccatctcccttgctctagtaccttgaagatctcgtgcctccatccttggttcaatctagttgactccaagtcattcacattgattctcatgtaatcaatgaccatatttcacttagcttgtgatgtccattatc

SEQ ID NO: 158039 - DNA, 469 bp, Zea Mays
aagaccggtgctcccgagtgactgacaccgaattgaacccctcccgagcatttcccccaacttaatttcaagaatggcgacctagtttgctctggccacggtgaccgcgcatcccgggaacaattcaaagtgttcccgatgatctacttcggtttagtacaattggttgggccgatgagttataggaacacacaaggatgctggaacaagatcaaagacaacatgatcggacctgtggagagctgcccacggcgagcttggttttgcggcgttcttcgaccgatttggaggtaatcccaaattagggagctgtgggaaacgatcggagctgagagttggtttactggatgcacaattacctagcggaacatgctgaggctccaatttataggatgctcaagcagtggtgatcaatttgaccgaatcgcgttggcggccggaggggaaaaggggctctggcgattgaaac

SEQ ID NO: 158040 - DNA, 557 bp, Zea Mays
tgtggttcggccgacgatgtcgtcgccgtcgtgaggagtgccacggctctgccccagcattgtgtcggtgttaggctcctacactcgcatccagtccctctcggtcatttcaccatacgatgcaccgtgccacacggttaatcaggccgagcgcgccgggacggtgttctccggtgagcacgcgggcatgaaattgggtgccctgctcggcctcggtcggaggaagaaggacatgtgggagtcctcggatccgaaatggagggctgggatttgatcggttgcaaacaagatctgggctgcatgcgtttggattggcggtcacgattaggtaattccataccccttcgctcaacaggtttatggccgttcgatctggatcgggtgtgcgtcattagatctgggtatttacaattagaaccgtaggatttaatcgggcggctcaggtgtgttggcggggttagatcccttgaaaatagatccaacgaccgtgatccttgcgtaccccttcactgtgtactcttcacaaaaagcccctcgggttttgtagaataaacctg

SEQ ID NO: 158041 - DNA, 316 bp, Zea Mays
gactcgaatagggtgctcagaatatgtcaagtccggctcaaggacaacatatgtcacttcaacggttcgatcgagaacccgaagacacttcttcaattgtgacacgtggaacacattatgcacagcagacaaggtttcgggtaactggagtcggtatgccactggcccatatctttccaggataagaaaaggaccaatatatcgtggtgcaagctttcctttaaccccgaaacgtgatacgcccttcattggtgaaacctttaagtagacatagtctccctcaaggaaatataagggcattcgccgtttgtctgca

SEQ ID NO: 158042 - DNA, 566 bp, Zea Mays
cggagctaggagcggtgagatttgaggcacgtgcggcgggggaatggggcatggctagtacgagaattttttcatggaagctttgcagtttgtagctctgagtgataccaaaaatgattgcattggaattattaaaacgcacgcacacagaacaccttgagtatgtgttgttggttggtttacatgatacggccctgaacttgtattcgatcacttgcatttcggcttgacatggaattaatctaaagtcctaaaacacgctcgcgtttcagcctctctccgtattcccgcacgacggtcctctcaccttccgacacgtacacacaccaatgcaccacgccaacgcttctctatcacggatgtgcagaacgctcgctccatgctcgtccggtcggccccacgtgacagttgcctggcctctggtctcagctccccacgcacgcatctcgcctccacgtccatcgtcgtctctcagatccccgacctgtgcctgctccaacgcggttgcactcctccgcctacatcttcatcatcgtgggtgcgtcacagcaaagaccagctccgtc

SEQ ID NO: 158043 - DNA, 820 bp, Zea Mays
ctaggacacccaaaaccctaatttggggcccaaaaccctaaggagtgaaaatatcgcccccgtagatgagtacgtgcgctggccatcgtacccacttgcttcacgatcggccgtgatgccattgctggtgtctgccgcccctcatagtcatgccacgtgcttgagggtgttcccacgtcacagtaggtcgtaatggacaaccaattactacccgagacctaactccattgaccgtcacggtagatgaactctggtgactcatctcttcactatagtgagctcatctccatccaaaattcgtagcacccatggctagtctctataaattgagcactcccctcgctttgcctctctgttatgcgcccatcccaccctcagctagcctctctcatgcaccatagccctagtcaccggatttccccaaattaggtcatcgttgctgccatgagacctctcgttgtggccagcccttctcaggttaattcatgtacccctgatccatgttttagcattctttattcctagtgaagctctcggtctaggttaattgaacgctacagcgtcgtagctttgagaacgccgcatcgttgcccgggaacgccgctgtggacactgctcatgtcaatcgaccattccaggttgcctctatccaaattcgtgcaaacaccgttgccctagtaggtcactgattcgttccgagtcattggattgaatgcgaccgattcgtgtaagccataataggctctctagagaccttgctccactattgtcgcggatagacacggattagtggcaagttggtcaaattagtcccttcggc

SEQ ID NO: 158044 - DNA, 357 bp, Zea Mays
gccacgaggtgggctgttagcgcatgtcgaccacgtaagaacgaggcatagtaagagagatcgacgtacggcgacagtgcggcgaactgcgctgagtcacggcggccgccggtgagtaactccggccgagctcaggagatggtgccacgtacaagttacccttttcccggcattatccatccttcaccgtgcatgaatctgggcggcgatcaatggcggcgagctgagctggcgttctgatccacccaaaacactgtaccatggcacatcttcttcagtcgcctgaaccggccacgatccaacccaattttctctggattcttgttagcaacagagcgatctctcttaataaaattt

SEQ ID NO: 158045 - DNA, 398 bp, Zea Mays
tgcagttggtcgcccaccaccgtgcctcgtacctataaaggccgctcgagcactcagtcacccccttcattcctcactaattccaacgctcaacttccttgagccattgcctaactccggtcagctctacgcgcgtcgcaaccgcctccgtgagccggccaccaaggcctaccctctctggccatcctctgctcaatctagccccacaatcatcttccccgagggcccgtagaaccttcccgagcttgagccagagctctaccatgccagagaagggagcttgacctcgccgaaatcctcacgcccgcaggtgaatgtggaccgagctccacagtttgtcgtcgtccaattacttggaccagcaactccaccatcaccccttgaagctccccggccag

SEQ ID NO: 158046 - DNA, 406 bp, Zea Mays
ctcagccatcaccactatgaagttgggcaatgggaaaactaccaagttctggactgatgactggctggaatttagagctattgtggatcgcctgcctgcactcacaagacatgcaaagcacctggatgcttttgtccccaaggtcttctccgatggggtgagccaacacctaatcctccgcctcagctcgactacaaggcatgaattagagacactctagactgctctacttgatatcatccccacggacctccctgctcggcgcctaaatttgctgatcgatgataatggtagtctgaaatctagataactatacaagccgatacaattcgtggatgcccctctccttgaaaaacctaattttgtttggaattccttctccccacttaaagtgaaaatattcata

SEQ ID NO: 158047 - DNA, 1104 bp, Zea Mays
ctgggactcccctcgcgcgtcgcgcgtgcgtattctctgtggtgtgggcccacgttgccattctctggaacacgcgcaccctctccagctgctgttgggtgggaccggagcgtcagctccttcctctccaccgaaacggacggaatccgggcacaggcgcggcttcggaacaacctccgccgaagctcccgggacgtgaatccgatcttttcttccccctttctcgggccgtcctggcgtgtcctcacctcgcggctataagaccgagccctcgtaccatctcgccatctaccttgagccacgccgagcggtgttagaggagggagggcgagtgtaggagagagagaagaagaactccgccgccggtcggattccgcgtcgtgcaccgggaagggctcggaaatgcgtcctggctggtctccgggttgcactgaagtcgcccaaagcccggaattgcagcgctattggcatggagcgccggaattcctcgtcgcaccttctcctccgccgcggcaatacgctcagctgtggacatagctcgtagcggcaaaattctcggtgagaacctccctatcctgtccgcctcgaccctgtacgcgttttgtacacacccgtatgggttttggcctgcttttgcgccgtgttgcctgctcgccggacttctccgccgttgaagtgcggcggcgccgccgtgtttcagggcgggattgggagaaatgatggtggccgttgatcttgcgctgaacgactcagattagatgccccagtaacccttcgctcgggcgaatcgaaccgtagatcgtaggatggatggtccttactgggtcgctggtattttagatcatagccgcagatctccgatcagacggtttggtttactcgcaggtttggtatgcgccagatctaatcggcgccgttcgtttctaatcggatggccgtactcggccgataccccttcaccgtgccacttcgcagaaaaccccttataatattagaaaactaacccgccatcctgcgtggggtgaatatgagtcttgggaaaatttatgtcgtgcccctgcactttctaataataatggcgcagtccaggaattaaataaaacc

SEQ ID NO: 158048 - DNA, 843 bp, Zea Mays
ccaacatcgacacgtacgagcctaagcaggaccctgggggctggttggccgtctacatgaccgccgcccgggccgccggggcaacagaagacgtgatgacgacatatttgcccatcgtccttgggcaagatgcactgcagtggctacgacacttgccatgacactgcattgacaattggagcgactttagtcggtgtttcattgccaacttctagtccctctctgacaagccggcgcagccatgggacctcaaatccatcaggagatagggcgatgaaacacattggttgtacctcaagaggtttcggaccatgagaaatcgcatccctgaagtcaccgaggcaacagtgattgaagatttctaccagggatccagtgactcggccttcatccgagccatacttcagaaagcgccaaccacctctgaacaactatttcgagaggtggacctctacatcaccgttgacgagcgggcctaggacctcattgtaggaatgaaacctgcgccactagcgccacggcgtgacatgaaccagcaacccgacaggcgctgggagaaaaggcctcgtgaggaggtacacaccgccggaccacccgtcgctcgagcctgaggtgcgtcccgcggaggcgagcggacactagatgacatcctcgatgcccagtgcccgtaccacaaggacatgtgccataccctacggaactacaaggacttcaagcactccatcggacacggccgattgttccagcctctaccacctcccccaccacgaggagggcccagcgagcctaggcagcctcagcaaccagaagggggagggggtggagcattcccacgcgttgaca

SEQ ID NO: 158049 - DNA, 624 bp, Zea Mays
gccaatatataagaattagaaatagcaaaaatttgactagttggatatattgttgtttcatgtggtcatggactgaaaatagaagcaatgcactaattgtccagcactaacagatgtttgatgtcagtcttgtacaaaacaggtaaggagataattaacaaacaatgcactccatgtaagaacaaacattgctttaatgcgagggttgtacaaaacattgtaggatacaaaaaacaaggtatgtactccatgcaaccacaaacataatgaacataataaataactgtctgctcataccataacttgcagaagaaaacttaatgttaatgggaagatattgtgaaataagtgagggttatacacattactacaacacaaataaattagttgttgtatgaatatagaaagctactatatgaaggtggacaattgtttattatcgtccactcgtatacaagggtgacaaacaaattggggggtagtacagcaacacaattagggttcacatacacctaacactatgaatgaacatgaggcatactaagttcagaagtaatgcccccgctgattatgtcaatgagagttttacaaaggataataaacaatgaacattacactgagttg

SEQ ID NO: 158050 - DNA, 547 bp, Zea Mays
cttgacccgatggaggactggctcctgatggatgaggtggtgctttctaggatccatggcaccctcacggccgaacttcaggacatcgtccatgtgtcggacgatacgactcactagatctggggtgcccttgaggctcagtttctcggcaaccaccaaactcggattctatatctcgagaccgctttccgccagcttgcttagggctttttctctatggacgagtactgccgctagatgaatacaatggcggacactctccgcaccctcggggcccccgtcaccgatgagagcctcgtactcaaccttctacgtggcctgagcccttgtttcgattgtttgacacccatcctcacctgcatgaagccatttcccacctttgcggaggtgaagaatgacctacttcttgaggagcttcgcctctccgccactacgacatctgttttcgccatggtgctctacagcacgcctcgagctgccccctctgactccagggggttcctcttcattgcccttcgaccccatcgtactctggagctcttcgcca

SEQ ID NO: 158051 - DNA, 652 bp, Zea Mays
cccgaactggtaccctatcctggccgtcagatcgccatccaacggtttaggttttatacgggtgagatcgatctgcacgcgcaggatcgggatcggacgaatcatatccactcatacgaaacgatgccccagattctaatctgcgacgtcaatcacgtgatcagtggccccggcgcatcttctccacacgaacctggtacggcagtgccacccagtgactacggtggttcctcaccggagctgcgctatacgaggcaccgggacgctaaactccacaacgatcggtgccatacgaaatggagatggtggcagacatagggaggcaacttacctgaccagaaattcggtgacgagagcaaccatggcgaggagcggacccgcggtgatgcttgcccaccggtgagcaattcaccaggaaggggagccgaaatttcccacgacgactcaccgacatctacggcaccgagacccgcgaacacccatgactgcgtcgagtactccgaatgccggtgaaggtaagggatcttgacggcggcaagcgggcccaccgtggacgaacacccatggcagaaattcctccgcgcgcccatggtccccgcagtcggaagctctgcacatttccacggccccgggctccaaaccctgacctccc

SEQ ID NO: 158052 - DNA, 1037 bp, Zea Mays
gtcggctggatggattgaatgaaaggcgttactgtgtgtactattttctaattattgtgcgtctctgttcctcttgcagtctcgctctgactttgactctgcgcgcggcgcgtccttgtgaagagttgaagacaaaagcttggcacatgcactgcacgtataaaacaaaaagatacaggatgggggttgagtgaaagacgtaacttttttcctccttcgaaggccacacagggtatacactagagattttcagtaagtttaagattcatttttgtaggcatcgatttatcacatggcgaaaatcttgtatgatctgagttgttttttttctttttgaactactgatggtcacaagtgcggtggctgcttaatcttaaatcaagatagatacctgtttaatgaacagcacatgagactaactaaatcgatttcaaaagaatgaacccaattcagttccaactatccaagtaacctgcttcttcgggaaaaaaaagaagaagatctggagctatgccaatttattgtcttctgctagtgcaaggaattgggatcggtgatgttggtttatagcagtaattaagatagctaaattcagcagcttgtgttcatagctccgtcgtctctgcttgccacaaaaaaaaagatcatagtaaacttaaattcaattaccacaacatcatctactggccgattcgaagtgacttgctatcccaaatcttagttcagtctagcttcatgattgtctttgtgatctgatacctttttgcaagctttttccccctttgtgattgtctttgtgattctgattctgacgtagtttctttctttctacagaagtgtccgtgagaccgtgacgtgctctcttgtagagagtgtactgccacagtggacgaggtgacatgaggcgatgtactgcacagtggacgaggtgacatgaggcgctgttgttgtactatatagctagccgcgcaatcccaattccaattccatagctgcgctccgcgtctggctcagatgcacggaccctcgaccaaaac

SEQ ID NO: 158053 - DNA, 353 bp, Zea Mays
aggatagttgcaacagccattgtttcagcagggaccgagtcagaagaatccccagccaacatgtccagcatagcacttatctctgcatcacctggactcgtaggcatctcaaagtgaacttgcctctcatcattgggaagatcaccaagttaagcaacaaggacctcaacatcatcaaaagagggtcgcactctaagacccaaaccactatcaccagtaggaggattggacacaaaattgaaaaaggacttagaaggtggcagattccaagcagaatatgcaacaggagcaccaatatttgatactttgcctctcaagatcatctccaatcggctcaccaaatccacagcagg

SEQ ID NO: 158054 - DNA, 376 bp, Zea Mays
gtcgccattctgagctatttatttcctaactttgtacataattttttacaagttcttgtttgctggtagtttacaatcacatgaacttcatacatatacaacgacacacataaagtgggaaaaactttcgagcacccttttcttgaagttccatatgaaatttttttagtgaatgtaccacaaacatgctaactactctcactttgagcagattttgcttcaataaatgcactgaaacatagttaattaacacaatctagtaacaactcttaagagtatacacatttcattatactatcctaaggttttattttctgctgtgctaatccactcatctacttgggattgaataagtcgtttggatggtttataatct

SEQ ID NO: 158055 - DNA, 616 bp, Zea Mays
tgtagccgttgcgacgtggccggaccgccggtgtcatcgtggacactccggcgacctcaattatgccacgccgtgactctttactacgcggtagtaaccgtggcacacttgagcttaccctctctgacccactgcactggtgaacgccacaattgcgacaccagtgacatcttccttctctagccaccaccgcgccaactccaattcacgcgctaccgcccctggagcatataatttgagcgtaccgtcgggttcgtaaggtagttaagcacccaacccaccaagtcgtgcctccaattgctcactagcatgtcccaatttgggatttccccgaaatcaaccaagaacaccgcgcggtgtgacctcgccgtggccaacgtgtttcaggtccgttcatgtcctctggttccttgtttcagtatccttgggtgctcttgatactctctgacccatccaattgagctagaatcaattggatcatcgggaacatctcggtcggtccattccttgcactttcactttgagcagggtgatgtagagctcgaatccagcaattaagtgaggggaaatagtcgcgtagggttgaattcggtgtccagcaaaggggagggctagc

SEQ ID NO: 158056 - DNA, 448 bp, Zea Mays
cgaagaggagatggtagcgaacatacgaaagggagaattaccagaaatcatgcacgcagaggttgccgaccccggcacttggcggtcagacggcggcgctggattcacggcgagcgattgccatcgaccgctaaccctcagagaccaattagcagtgcgtgcgcgatcaacacggggtggagatccccccagaccttccacaaacgccgggcgacaatgagctcgaaaggaagccccagaggtctgattcccaatggttagggcggacgacggtccggctggcgtcgcggcggcaagggccgacgagggtagtcccagctttataccccgatgccatccaaccatgtagcgagcgcaccaggtcaacaaaacgcgtggtttgcgtgagaatctattgcgcttaaggccagtcgccgcaatcccggggagagacatatgaccgagcggt

SEQ ID NO: 158057 - DNA, 443 bp, Zea Mays
attttctccattggtcccgattaatgttggatgaagctgcacattacctggtctaatgaccccgatattcaaagaagaattctcaactgtagagccgttcctgggcttccactcatcattgcttcctcttagctctcgaaaatattgaatgttggattctcaacttcaaagagcaagccatacttcttcaatagctgaggcttatagatctctggttcgcttttggcttgatatatgccttgtaatttagctttcgcatctctatttgtttagttgtgcaatgtttcaagctagttgccttctcttcggtggaatgtttataacgagaaaggtggataattaattttatgataaaatagaacagatccaatggctgtaaatggcgacaatgactataccaaattaaatgtattcgattgttgtgacgattttagaattatagc

SEQ ID NO: 158058 - DNA, 402 bp, Zea Mays
gatgaaggaatataaagcaaaaataaatcttgtcttctaccttcgtcaaggcgtgcagcagaggagtagataagcagggaacttccgcgaggtcgcagcacacagcaaagtccggcgagtagatcggtgatgaactccagacgcgggagttccggacgcaggcgatttcggcgacgacgaactttacggtggagagtagaagatcgaccgacggtggtcggcgcgagcagggaactaggcgggatgcttgacggtagcagggaggatcctgggagatgggggagcgctcaagtcgagcttcagcaagcggcacgtcgaacactggtgagcagcacagagcggcggcaagctgtgcaagcagcactggcgagtggcacagcagtgtggtagaggcaggaggcg

SEQ ID NO: 158059 - DNA, 962 bp, Zea Mays
actgcacttgccggttcgacggtttgttcgctaccatgttcggttatgatgcacgcaagattagctgaaaagctgctcagattcccgtaggagattatactaatccggcatactgtcatttggggctgtgcacatcccgtggctgtgctagctggaccttttttgccatgtgtgttcgcatgtaccgtctcgaatccgtcgcatgcatcgtgagtaaacgaaaaggagatttcttcagttttttacaggggaggagcatagttttgccagagaacatgttgcacacaaggctacataaaaatagaaaaggagttacaccaagaggcaaattcttcatgcttttcggccacgcacccgacgtttccatagatgagcttcttcagctgtgtcgtgtcgatgattgaccgctctaggacttacgttaccctcctcgatcgagtagcacaatagtagtgttatttttttactcatgtgaatatgctgctgcttgtctcgttgctactccctccagggcctccactccactgtgaatccatgtgtccgtggcacttgccgctgtctccaactgtgcatcccgtgtgtgatggacagctggtcctccgatcctcttcacgggcatatagccggtctggttctcagaggcatccggagaaacgagctcttcttgcgttgtactcctacgtacgtacgtgcaggcacctcattaactcgggttctaattgtcctactcgtcattaataccagctgagacaacagcaccaccatattccatgctactccggagtaccctcccaacttttctgtctgagctctgctacacaccgcggcgcggcgtagggcttattagtacgtatacataaaaagaacgcagcttaatttggccatatctgatgcatccacactgttcctcggcagaatccctatatccagatatcctccctctatgcttaggctatactagg

SEQ ID NO: 158060 - DNA, 563 bp, Zea Mays
cgctaccggaactcaccaatggagcacatcacgcagctgccaatagaaaccccaaaccataggacgatgaagtcggacaaagattgcacaaacggaggacaccaaatggagcacagcacgcagctgtcggtagaaaccctaaaccctaggacgactaagccatacagagtgcacatacggaggacaggaaccctataacgacgacgctgaccaaaatactgaggagcagaatggcgtcgaaccggagaaagcggacacgaaccctagaaccacgatgacgaaatagcggagggagagcggacggaacaaacctattgcacagagcagcaaaggaatgaggaggcggagggaggaatggcgagtagcaaggagcttacgtgaaggagacggccagctgaggactgaggcggtgaagggagcaatggcgagcagcagccccgtactaggcccaaaggaaaccatggtgcgtactgtcggcggaaggatccagaaatgcagccaaaccaatataggaaaagccaagagtccaagactaagtattgaccattaattacagatccaat

SEQ ID NO: 158061 - DNA, 511 bp, Zea Mays
gaacaaatgaagatgcatggtggcacatatgatgaatatttgttaagtgaaggtgcttctcaatgtcaaaccaggctcgataggatgtcacaatgacctttttccgtccatttccagttggcagtcatcgcatgtatggcaaccattggtcaactgttaattagtagcttattggctccctggtggagcagtttgtctttcttcctctcctgattggtactccttactctccctcctttccctcttcgtcatcgtgtatatatgtggtgcaccattttaggcacgagcttcagctgccgtcgactgtctcaattttctatcatttggccactcctatcttcaaagctacaacgaatttttattggattctttctaaatttatatcgatctatgaattgttgcgctaatatttgatgtccccatctattgagtctacaactataaatgctcctcggctaattttgatgtgtgcgtacatcttagtagtaccactcctatgtcttatttcccc

SEQ ID NO: 158062 - DNA, 569 bp, Zea Mays
aaacagatgagttggtgagaagttaccacaacattcattgctattgcaatgttgtgctgttgaatttttttactgaaaccgaagctttttgtcgtctgtgcacttgatgtgtggccttcgagcaatcgtcaagctagttgaaatttagctttgtcttaagaactgaaatggctaggatcagttctactgctaggctaacaaatgaaggtgaagaggccaaggcaattgagacaaccccaatctcagaagtaataagatgttctgggttggttgttcaagagggagaaggggctattctcgagaaggatgatgttattgccgaagttgaacatactattgccaaagctgctagcgatgacgaagaagatgatggcatcttgagtccgagcaagcctagtcatattgaatttggaaaatccactgtgaaggcagaagacttagttttaatgaaaaagcttggatattttgggaaaaacgatgatgagttgataaggttcgccaaagatgaaatagttctagagccaagagatgatgaagttgttgtttttaagagcttcttcagagcaagg

SEQ ID NO: 158063 - DNA, 315 bp, Zea Mays
agacaggcagctcattacacactcattggggagacactatacagaaggggagcatcgggcgtcctcatgaaatgcattctctcatctaccgggaagaaacttctagatgaggtccatgctgggcaatgtggaatacacgcagcatccaagacactagtcgggaaagtcttcaggtcgggattctattggccaacagcgaaaagtgatgcagccgagttagttcagaggtgcgaagcttgccagtacttgtcaaagcaacaacatctaccagcacagcaactgcagaccataccagtaacttggtcgttcgcatgc

SEQ ID NO: 158064 - DNA, 333 bp, Zea Mays
aaagcttcggcttcaccactgatccatctgataaccctgtcaggatcaccacgaataaagttctgctcaataaagaatgcaccaactttagcaaaactatttttcagtttgttgcaacattccgtagcgacggtgtagcactcctcttttgcctgatgaagctcctctacatttttctgaactctcaaccgttcggtattggatatctcacgttttgtttgttcaacgttaaagttttcagtgatttcatcaagcttcttctccagtccctccacttcagatctgtgcagtcccacttgaatagatagagcatattctaaatcagcaatacgc

SEQ ID NO: 158065 - DNA, 728 bp, Zea Mays
gaaaagtgtatggccgaaggggtattctcaaatctgggccgtcatatcgcaaatggacggtgcatattagatcccgattcactacgaaccggtacgcaacgtggggcttcccattaaaatcctacggctaggattttatgaggatgggatctaatctcggtcatcgaactaccatcctacggctcagatttatttgacgaaggggtacgctacacacgaccatggccgtccaacacgggatcgacggcgcacaaacgattttctctaatctaatcttggccgaccacgtatggatccacggatgagaagcgatcccctaatctgaaccgctcgtacacatcctacggttggcgccttcactctctgcttcatttaatcctagccgttaaaaacaggatcagtggtccccatgtaatctcctacacccgcccaaccgaagcaactacggcggcggccagctccggtacagagaagccatggccgagaacacatcctgccacgatccacagccctaaacaccgatctgactgggggtatacgacggggcgacgacaacgaaattggacaagggctaactaccggctataaggcgatgaagttgtctgtccatggattggggaagaaacagcggcgctcccccaccgtcagcaagaaatcctgagcaccggtggccaattcccgcctgaaccgactgcgaccacggacgaggagcaccgaaaaggttatgc

SEQ ID NO: 158066 - DNA, 384 bp, Zea Mays
gctggacatttgcatgtagtgcttcaacttctgcgagagcagcatctttatgccaaattgtcaaaatgtgatttttggctaaaggagatcaaattcttgggtcacactatctctcaggcaggtatagctgttgatcctgataaggtgcaagaggtgatgaactagaagccgccaacgactgtccgtcagattcgaagttttctaggattagctggttattatcaaagattcattccagatttctctcgaattgcaaagccctaattgaattgctgaagaaagaagccaagtttgtttggggccagaagtgcgaagatgacttccatgtattgaggcaacatctgaccacagcaccgttgttaggacaacccggcagcagcaagc

SEQ ID NO: 158067 - DNA, 667 bp, Zea Mays
gcctagttacatgtgaaataattgacaagctagaagtgtggttgttaccaatgggacaatccttgcattgatgtccctttttcggcatatgtagcaaaggcgatcttcaagttttgaagatttcttctttccttgtttcttgcttgctacatggttagttaatattttcttttctaacactatgcctttttgttttaaatagggacaagacttaattaagtgtcccctctttgagcatttaaaacaaagtttatcatccttgttagtaatcaagtcattttttatatagggacatgacctaatcgagtgtccctttttcaaagcattcactacacttcttacttctcttagtatgaagtgtgacttgattattaccttggatgttacctttcatggaggcatggttgaggcttttggaagaggtattgattttcttcttttgttccctcctcttggtaatcctcaagtccttaacattttctttaagggttttagtgcatgccacggttgttcccgtctcaagcttcttcaccatgtggtcacggttatcttgagaaggttgagcaatgcacttccctttaagttgtgtcaagctcatctttagcctcttattttcttcttttagcttttgatatgtatcatcttttgttcctgtaaattctagctc

SEQ ID NO: 158068 - DNA, 737 bp, Zea Mays
aaaaagggaagccagccctggcgtaggtctgtaaggaattccagggctgagtttcagctgctgggctctcccaaatctacgcctaccatacacatacaaactatggctccttgtatccggaaatgaagatgtgagcgattcctgcagatttgcccgatctccagcctttccaaataaacaaggaagcaaatttgaagctgcctccggcggccccactaacacagccgtacattccgccttcttcaacccttgaacacgacgcccatcgtcgtaacttggtttccggcgctcttgcgccattgataggacatctccaagtgtgagcttcggcgaacaccgtggcgatggcaacttgccctgccatggcttcaccttactcctagaagaagaggtcaaaggaggaggatgaagcggactatgaacaggcgtccgcataggtcccgacctgcagacccccactgcgcattcaccaacggactgcaacgtctccatccactcgaactttgccggagctgagtcccatcccggtttacagccaccacctccagccgcagaaacattacccagatcaggcagcggagatgcagaacacgctggcgaagaacacgtactggtaacctctccatgatgggcaccagtaacattttccgcatgcaacaaattctccgttccaccgccaaagcacgaatgccatctgcttctgtaggcgcaagcgttttccggcgacaacccttccg

SEQ ID NO: 158069 - DNA, 1029 bp, Zea Mays
ctgggctggggctggtgtgtttccgctgtggtgatgcgcatcgccatgcagagtgccagtggagtggcaggtgttctctctgcagttaggaccacaaggatgtggtgtgtaggaggaatcctaatgggaagctcagatgggagctggtgacttcctcctcttctcagggcactatcaacatgatgtcaagtgctgagcagtagttttcagttcctcttcctccgcagcagctttttgtgcctgggacttctcagttcgtgccgatgcagagttttcctcagtatcaggccgcgcctactcctacaccgtctactcctatgtcgtctcagtttggagctccgcgtctgcctcacccggtggctcagtggggttcttctgttaatttcactccaggagcttcctcttctgcgggtatttctggagcttatgtgctacccgctgaggatggcagggagcaaggagacgtggtgacaggtacgatttcagttgattcgtttgcagcccatgctctttttgactctagcgctagctattcgtttgtttcggaggattttgtgtcgtgggctggtctttcagtgcagaggttgggtcacccaattctagttagatctgctaatggctccattagtagcggttcagtttgtcaggggtgttccgtcattcttgctgatgaggtcttctcggccaatctggtggtgatttccttgggggcattcgatgttatcttgggtatggattggttatcccagtatcgcgcggttatatcctatttttggaagacagtgttattgcaggcgccatcgggtaaggaggtggtattcttgggaagttccccgaagttcacgttatccttgttggcacaattgcttcctgatcgccggtcaaggaagtcggggatctttttctccatggtggtggagggtgaggctgccttgcgggtgcaggacatccgggtggtgcgtgactttgctgacgtgtttccggcagagcttccgggcattcctccggagcgcgatgcaacttttgaga

SEQ ID NO: 158070 - DNA, 304 bp, Zea Mays
ggaggtctcggctcggtgtaaatgggaagatgaagaatgggggaggaaaacgggtgcctgttcggtattccacaacgcagggagacggaacaacatgggaaggggagaaggctgggcgcggatgcccaggcgtcaggccagcggcggcgctgcgcttcgaagcctgttcctgacttcctgtttgtgcgagcatgaaagagaacaggaaagagaaaagcatatgtattggtggggtccacacgccatacaaagaaattagtgaacgcaattaaggatggactattgggcttcgtgtggggtctcc

SEQ ID NO: 158071 - DNA, 1257 bp, Zea Mays
ctgttcaaagagaacgtcaatatgaggtagcggatatttattcttgattgtcacttggtttaaagcatgataatccacacataacctcttgcttttatccttcttctcaataaataataccgggaaagcccatggtgacctgctaggcctagtgaaacccttagcaagcagatcatccaattgccgcttcaattcaacctgctcctttggagccatccgatacggggccttatgaataggctgcgtacccggaatcaacttgatctcaaaagccgcatcgcgctctggtggaatgcctggtagctccgctagaagcacgtcggcataatcacacaccacacggatgtcctgcacccgcaaggtagcctcactttccaccatcatggagaaaaggattcccgacttccttgaccgacgatctggaagtaattgggacaacaaggaaagagtgtactttggagagcttcccaagaataccacctccctacccgacgacgcctgcaataacactgtcttccaaaaacaggatataactgcgtgatattgagttaagcaatccatacccaaaataacatcaaatgactccagggaaatcaccacgagattagctaaaaagacctcatccgcaagaacgacggaacaacccgggcagactgaacaactactaatggagaccttagcagaactaacaacaattgggtgacccatccttcgcaccgaaagaccagcacacaacacaaaattcttcgaaacaaatgaaaaactagcgccagagtcaaaaagagcatgggcatcaaacgaatcaactgagaccgtacctgtcacaacatctccctgatatctgtcatccgtagagggtaacacatatgctccagaaacacccggagaagaggaagctcccagagtgaaattaacagaagaaccccatggagtcacaggatgaggcagacatggagctccaaactgagatggtacaggagtggtcggtgcaggagtgggcgcggccaggaactgagggaaacctagcataggcaagaactgaggagtaccgggcatataaaaccgctgctgagggggtcgtacagaaaattgttgctcagcggttgtcatcatgttgacagtgccctgcaaagaggaggaagtcaccggctcccatttaagcttcccattgggattcctcctacacaccacatccttgtgatcctggctgcagatagagaacctgccactccactgacactcggaacggcaatgcgc

SEQ ID NO: 158072 - DNA, 622 bp, Zea Mays
gtgaagtggctgcgggagaacgagaactcgggtatcaatcacctgagggggacctcaaggacatcttcactggggattccgactccagggatgatagcgaccaccgcaagaagttgtacgtcatgtacggcgagagctgggagcttacctcccgcaggaacgtcaagtccctacaccgtgaggtcctgtcggcaactccaggagtcccgaaggttgccccatatcaacaatggaggagcaccaccatctcctttggggcacctgactgcctcgacaacatggcaggggccggcatactgccactcatcaccgcccctatcatcgccaacatgcgactgcaccatgtgttgattgacggcggggcaggcctcaacgtcatcagccatgctgcgttcaagcagatgcaaatcccacgggaccctcacgcccattctccagagtgggcccacagccggtgtatccccttgggagcatcgcactcccggttacattcggaactaaggagaacttccgcacggagaacgtcgttttcgacgttgcggaagtcaacctccccttcaatgccatcattggcaggccggccctgtaccggttcatggtcattgcccattatgggtatttg

SEQ ID NO: 158073 - DNA, 392 bp, Zea Mays
gggatccaaatctatgcgggtcctgcagtctggggtatcatagtcgaagcgaccacggggcggcgaacggtaagggtgctgaatcccgacaggggcgggagaaccaccatccagatagtggcgtgccgcgcattcagcacgcaattccgcaacctccgcccgaaccttgcccaactcgtcaagggcgtggtccaactctgtgttgagcacggtgaccaagttgaccatgctgctccgactgggattgccctcaccaactggcgagacaatcacacctccagcactgtcggtcgaacgacgagggtagtacttcaggtcaaggccatcagctaccccgctgaacaacgagcaatattgagaaagtgcccatcgtgctgcatcttgcatggctg

SEQ ID NO: 158074 - DNA, 1060 bp, Zea Mays
cctgcaagtcctagaaaactccaaatttgggtgatcatcgttggtgtaggccagtcctgaatggcttcaaccttgctgctatccacctcaatgccctgcggagcaaccacataaccaagaaacaagacacgttgcgtgcaaaatgtgcacttttccatgttaccaaacaagtgagcagcacgcaaagcataaaaacagcacgcaaatgttctaaatgctcctctatagacttgctgtaaataaggatatcatcgaaataaacaacaacaaacaaacctataaaggcccgtagaacttcgttcattaaacgcataaaggtgctgggagcattagtcaatccaaatggcataaccaaccattcatataaaccaaatttcattttaaaagccgttttccattcatcaccgagtttcattctaatctgatggtaactgctacgcaaatcaaccttagagaaaataacggcaccactaagctcatctaacatatcatcaaggcgtggaataggatatcgataacgaactgtgatgttattaatagcacgacaatctacgcacatacacctttacccatctttctttggatcgagtaaaacaggaaccgagcaagggctaagagactcacgaatgtaacctttatcaagcagcgtctgcacctggcgctggatctccttcgtctcatctggatttgtacggtacggggcgcggttcggaagagaagcgctggggatgagatcgatctgatgctcaatgccatggagcggaggaagacccagtggtaagtctgtaggaaaaacatcagtatactcttgcaaaaggttaacaacagcaggggtatatccaaagatggtgcatcatcaagcggaacaagcatgcgcgagcatacaagtgcataacagggcatatgaacttcatggagatcatcaaaatcagcatgtgtagcaagtaaaacaggagattgcaacttgatttcagatttaataggtgcggctgatgtcgatttgacttgttgtgtagttttagcagccctagtacgatcatctttcaaaatttggtcaagg

SEQ ID NO: 158075 - DNA, 491 bp, Zea Mays
cccgcgtcgcgcgcccgcgctccttcccccctctccccggcccaggcggcccaactccacgcgcccgtgcctccgctgatagttcggccccaccagtcagcaactcgactccctccctctcgcgccactccctctccctggcagctcgggctcgcctgtcagctccgtcgttctcgcccatgcctcaccggcgcgttcgccgccgagcgcctcacgccctgtcgcctcgccattaaggcttgcactggcctcagcgaccaccccgccactgtgcccgagtcgtcccctcacccctcgcctgcccgagccgtcccaatcgccgttagctccattcccgccatcatggcgagctcgtcggtgctcgccgtcccctccatccctctccctctcccgggcgcctataaaaggagccgcccgagccccgtcctctccacaccagctccggccaactcctccgcttctccccgagcaaatcaagctagcgccgccgt

SEQ ID NO: 158076 - DNA, 467 bp, Zea Mays
tcgcatcgggccacatactgagctatttctttcttcattcctttccaccagtatctggttttgtggtccaggtacatcttggtagttcctgggtggatggagtaggccgagtcgtgagcttccttgagtaggacttctcgggcctccccttttggtacacacagacggtgtttgaaccaaaggactccttggtcatctgtcctgaggtccgggagttgttccttgtgggctttctccacaagtcttgttgtctctgagtctagacgttgagctttgcatatgaggtcttccagcattggtttgacttcgagactgtcgttgtttcccagacatgcatttagttgcgctgattctttcttccaatcttctaaaaagttggttccttttattctgaatggtttttgactgagggcgtcggctaccacgttggccttcctggggtgatagtgaatttctaggtcgtaatc

SEQ ID NO: 158077 - DNA, 359 bp, Zea Mays
caaaaacttgcgaggggatgtcacggtcacgaccggtgtgtgcttcagtgcttgcatgtgcagcttttgtattggagcttggaggaggttgtagcccaccaagaccaacccgcatccgagcttgcgagtgatacaacgaggagctgaggcaaaggtcttgggtgtggggtgtttggtgacacgaacttgaattgtcgagtcgggccagacagtgaggtggaccgtaaaagcaggaatacaaccaggaattttctcggacgaatacgggaaccattaataccgtcgagaaacaaccattcctgattctgtccccattcccacaaatgtttttcccatttcccgtatctcctaaaaaacaa

SEQ ID NO: 158078 - DNA, 467 bp, Zea Mays
tgaccaaggcgacgatgccaggtggtagaagacgtggtggcagcaaaaacagcagctgtgtcaggtgacgaagacgaagaagatgtggcgtgcggaagccgaagggtgtagagggggccggtgctatcacatctaaggagggggcaccgagttgccaagtcctttacagtaagaccagaagagtcaaactcgacagaacaagaattatcggcaataaactgacgaatagaaagaagattatggaccaaagaaggagcgacaagaacatcgggaacacgaaaagagccgggagggccagcggcacccacagatgtgacaggaagacatgagccattcgccaccatgatggacaaagggagagaggaaggagggcaaacagaggtgagtataccagggtcaggaatggtgtggtaggtagcaccggtgttcacgatccactcgagacccatcggcggagtcagagtggg

SEQ ID NO: 158079 - DNA, 714 bp, Zea Mays
ggccactgaatttggtgaagacgcgtggcagccggaatgaaggggtgagtcaccggcgcgatttaccgtggcactcaccggttgaggagctacggcggttatcggcgagctggtgcggctagtgacgacgtggttaaaggcctggagtgtggcacaatcgcggtgaagaacggcaactccggtgacggccgtaaagccacgtcgtcggtgcaaagggtaggggacagcgaggccacagtagctcatacccatctgcgacgagatcttttcatggtgagcgaaatccacacgcccgcagcatgaatcccgacggctagcgtgaatccggggcaaagaccgccggcgacgagggggctgaaccagcgatcaagttcagattactataccatcaaacgcttcttcagtcagtctgacatgccagttttggggtgaatttcctctcaattttccatggcaactagaccaatgctctgcagcaaagttgtagcttaatagaccagctccaactttgctacattgtgcatccacaaaatgtcacaatatcctacttaaaattgagctctaagttcatgcaatcccactgttagtctgactccagactttaagtagtccgacatcacgactttgggcacatgtttctccaaatttttcataacaacaatgtttaatcccttaagcaaagttgttctcctaacatagctctatagatttgat

SEQ ID NO: 158080 - DNA, 621 bp, Zea Mays
gcctacatcaccctattcggcccaccaggaaattataccgcgccggcccagctgattttggcgccgacatcatgggcccaccggtcatcttcacgcgcgcgcgcgctcgtttgtgtgtcactgccaactcgggcccacgcgtcagcgctttctactccctcgcgaccgaatgaactcgccgcgagctccgcgtgcttctcgggcgccgttccaaccaccgcgcggattccgggtccaaggttcaccagcgcgggggggaaataaagactcgaccgtgccgtaggtacctgcctatcgtgctcttgccgctgttccacaagcaccatcgcgccgccgtgggttcttcttgttccgccacaagtgaagctcgtcgtcgctgggactctgtcctcggggttggcctaggctgggtcgccatcgtctagggtggccgtccgcgacctcaattggagggcggaccttggggagcgcgggtaattcctcaccgtgatcccgccaccgtcgtacttccgcccatcgccgtggccacgctcctgtgcctcattccgttggtaaggaaacccatccaatcgactcgcctcgtcctcctctacgtttagctcggtccaatttgggtttggt

SEQ ID NO: 158081 - DNA, 762 bp, Zea Mays
ccagctcatcggtcgaacggataacctcgccgccatcgagctgttgtcgttgcgcgccacgtgcttaagcactagtcctcatcgtggtgactcacggtgtgcatgttcagtgatcgtcggaccagtgcggctataaatagcccatgatccgcggcaaggtatgaacatcacgcacaccgtaagttgatccgaagcaaaaattcgtgctgcctctgccccctcctcccaaattggttgtgcacagtaaaaatagaaccccttatggccgtatagccccaagccccgccctcaattccactcgtgaacgccgctgcgccattttcccccaattcagtccgccgcgccgccatgaacaactcgtccgtggccagaccactctggtaaagctctgcatctctcaagtgttgttctagcagctatgtaggcacgtaaagctcaccgtagcatccgtttgaccaattcgggcgtagataattaagaacacggaatcgacaccgcggattccgccgtgcatgtggacaggccattctcagtgcgttcgggtcaaattgatgtgtgttctgaagccatcttaggtcagtgaagcctccctgatggttagtccgggcagttatcgccggccatggccgatacagaccccgtccaggatgaacggcgagcgcgccgtggactggggtgtagttggagaagaattagaagtatgggggtctttctgcgaatgtcagcgactcgccgaaacagtgctctgaccccgctttaggt

SEQ ID NO: 158082 - DNA, 634 bp, Zea Mays
ggcggtggtagtgattgccggtccggttgccgacactaaagacgtcgcccgggaggacgtacaagatgtcgtggagatggcggccgcgtgcttccggcgtgaccctgctgatgtcgagtagttcatacctgtagaaatgaggctagggatccgcttgaaggcggatgtaataacttttgtttttgtaagatgcttttgggaactatcaattaaacaactcttatctgtatgctatttgttcttgctgtgtgtggcgttaccaactcctccctggtacttggcccccctgggatgtaggctcgatgtgtcgaggctggatgccagtatacttaagaaagaattggtgacctggcccccaggaggtagtctcgactaggacctggacctgcacacagccttggctagggagcgttagtagcacacccatacgacccatcgtctggtatcagccatcctttgattcatgcaacaggacctgcaggatttagcctgggaagccaagccacgtgcctagaccccctgaatcacaactccagatactaggacacccatcgcagagtggtggagcgtgcacgcttagggttcgggaccaggctaagcggctacacagttctggaccaccgcaagaaacgtg

SEQ ID NO: 158083 - DNA, 614 bp, Zea Mays
aatgtgttggacaaaaattgagtgatggtttcagtgaggactcacttaacattgagaaccaaaatgaagataatattcagctaacattcagtaccaaatttcagcaacattaaactaacacccataagcaaatttcagcaacattcactcaacattgagaaccaaaatgaagctaacattcaactaaattcaaccagaattctatacatgtggctccttcaccatattcttcgcattctttcctttgcgaggcttcaatagttcttttgctctcttgattcttttacttctaccctttgatcgaacatcatttggagggtgtatttgtatttctggtggaattttgcaaccaataaaattctcatattcttcttgtgtaggttgcactatgctaggtacaatgtgtcccaaggaatcacctatgttgagaacacttgaaactaagaaatccaaggcttcttttgaactctttgctctttggatcgcctcttctatcttgtttcgcaccactgctatcttttttcttttttccacttcattagcgtcttcgggcttttcttccaataggttgccttcatcatcatacacacacgctctaaggtaacatgtcaaaa

SEQ ID NO: 158084 - DNA, 411 bp, Zea Mays
gcggcagtgaaatcggggaaggaagaaagagggtcgcgatgaatttggggtccgggcggcaggatcggggtgggatcgggcggctggtgggcgagatcgaatggttgaaaccgcagaacaatggattggacggttgaggttgcaggatggcagaacggcagaacggcaggaggcagactactcttacactcttaataagtagtaagactactctttaatctagtctcataatataacacgctctctctcataatataaggctgttatttatttattactccgtcctgcaagctaatctgatgcttggccataggaagctagggaccggaggcgatgccgattgccgagcacacagcagtgcatgtgcgtctcgatcagtcagtctcagtcgttgtctcgagtgtttgctga

SEQ ID NO: 158085 - DNA, 720 bp, Zea Mays
gagtatcgacctatttgcttacttaacgttagttttaagattattactaaagtcctaacaaacagaataggggtggttgcagataagcttattaatccctcgcagaccgcattcatgcctggtcgcaatatccttgaaggtgtagtcgtgcttcacgagactatccatgagatgcaaaggaaaaaattgagtggcctgattctaaaacttgactttgaaaaagcctatgataaagtaaattggtcgttcctacaacaggctttgcgaatgaaaggtttctcaccgaaatggtgtgcttggattcaatctattgtttctggggggcatgtcgggattaaaattaatgatgaagttgggcctttctttactacacataagggccttcgacaaggtgatcccttttctcctattctctttaatatagttgtggatatgttggcgatactcttttcaagagcgaaagaagataaccaattcgcgggagtggttcctcacctaatggaagggggactttctatccttcaatatgcggacgatactgttgtttttatggatcataacttggaacaagcgcgtaacgtgaaattactcctgaccgctttcgaacaaatgttgggtttaaaaatcaactttcacaaaagcgagcttttttgctatggtttagctaaggagtatgatctaaattactctcatctttttggttgcgggattggttcatta

SEQ ID NO: 158086 - DNA, 498 bp, Zea Mays
cgatgggcatggatacgggtaagaaatctcgcccacgggtaaggatacgggtaacacttctcacccgcggttaattgacagatataaaattttgcccgcgggtattacccgttacccgcttaatttactagcccatcaaaatatccccatgacaccggcccacagaccacaacccaatcaatcatgtttgtggacttatgtttgagacttatgtttgtggatgatcgatcttgtttgtggactttgaagtttgaactatgttccttgccattatattatgtctgtcaagttgttgatgttcttggtgaaataaacatgaccacatactcgaatggtattttctggcgggtaatgggttgcccgatatccgcggatatcctgtgggtacgggtcgaaaattttacccacaagctctcgcgggcacgggtaaacactagaggcgcggatatgttgacgggcgggtaaatggcttatccgcactttacccgacccgctgcc

SEQ ID NO: 158087 - DNA, 430 bp, Zea Mays
aacggttctggtggcggagataatttagctacagtggaaaaaattaatccgtccaaagccacaaaaacaaatgccgaagctagatgccgcgaaacaatacttacgcatctctcacgctctgcagcttcttcaacttgttttgcttgtactcgggcgtcatggatgtctttctcacttttcttcataatttcgtgagccatctctcggccaccatttacccagatgtcattgtaaaatttcccgcccattaaactcgcttcagctgagggatcctttgtatcatccacagagaaggcaacttcggcctgggccagagtcttgacatggtcgcatcctgccttctccaggatggctaaaattccccttgcaccgaagaacgcgcacacatccccgcgatcacttaaaatttcttcaaaagcttcggcctctc

SEQ ID NO: 158088 - DNA, 451 bp, Zea Mays
cgccgagcgcctcacgccccgtcgcctcgccattaaggctcgcaccggcctcagcgaccaccccgccactgtacccgagccgtcccctcacccctcgcctgcccgagccgtcccaatcgccgattgctcctttcccgccatcatggcgagctcgtcggcactcgacgtcccctccatccctctctctctcccgggcgcctataaaaggagtcgcccgagccccgttctctccacaccagctccggccatctcctccgcttctcccccaagccaatcgagctagagctgccgcacttccccgtcgctccggtgagctccattctcccctcccaagtgaatttcagtcgaattaaccagtgcgtgaagctccgccacacgctcacggtcacagggcaccccttcccgccccctattgcacctgactgcctcaccggcgacctcaccgccgtga

SEQ ID NO: 158089 - DNA, 380 bp, Zea Mays
gtaaatcttctttttataacttgacatgcacgagtgtataccaacaggccgggtttatgagggcggaccttaccgggctggcgtacgcatatgtgaggcctgactacaaaagaagaaaatcttaacccctcggacttgcttctatgggcagaacttacatacatgctccagagatactcctttagttgtagcaaggtaggcaccccccggggttggcatatttccatcaccttgaagggttcctcccagctaggggagagattgcggaccccttcttggtacttgccgtaggactaggtcctgaccctgggctccctactatgcacgaactgttggccgtagtatatgggcgccgggctaccaagtgcatttcgggttgc

SEQ ID NO: 158090 - DNA, 898 bp, Zea Mays
cgacgagcgccgggcagagagagcagtcgagcgccagggaagatggcgcagacagtcggtcgtggatccgttctaagaaatggactgccgtaactgacgagaagctttagccagcagacaaaagtgtgtcagatttaacggacgacaaggacgtccactatttcagcgaaacatttacaagtcattgctggatgccttgcgaacgacgagaaacactatatttaaggtacaggacgctttggcgtctctcgctggagacagccttagaacacacacatttcagaacttttagaagtgaactcattttatttatgtgcttgtgaacaccttatgtgcaactcagatttcagaacacatttttgtgcaactcagattttcagaacacgtgtgtgcatcacagaattcacatttcataatacatttcagacagtttattaaatataagtctacaatttaataattgttaaatagcctctaaatttttatgcccgccaaataatcacaccaaatcagccatcccgccaccaaattctagcgtaatctatatacaccatcgcctttaactctagacctaaaagaaattctacaaccaaccgcatccaccgcgccatccgtccacctcgccgccgcatccaccgccccatcctcgtcgccacagccccatcgtccacctcgctgctgcatccaccgcctcatcctctcgtcgtcgccccatccgtccacctcctcgtcgtcgccccatccgtccacctcctcgtcgtcgccccatccgtccacctcctcgtcgttgccccatccgtccacctcctcgtcgtcgccccatccgtccacctcctcgtcgttgccccatccgtccacctcctcggcgtcgccccatccaccgtcgtcgtcgatccgc

SEQ ID NO: 158091 - DNA, 804 bp, Zea Mays
caaaggtgaaactcatattcaaattcaaaattggattcaaaataattatgaataaagaaaaacagaaaataaaacaaaaaaagagaaaacttactcagcctacgctagggcccaaaccctaatccggtcccattcctcctccacgtgcggcccatccttccaccgcgcgcgctctggactgaccgatggaccctggtcgtcaggcggcgggcgaacgcgatgacctcactgcaccatggaccccacacgtcagcggcatcggtaccgcgcaccgttcgaactagcctcccactaccgcgcgggtccgcttcgccagctgttcctcccaacgccactgactgctggacccgagcagtcagttgtttctcctccgaagatctcgcgcgcaccagaatccccgctttgaccgtgcacgtccatggccgcgccaggtacttcgggacgtggaggctataaccgaagcgccggatgccctacctcggtccatccgtttcccaactaagcgaactccaacctttagcaagcgcgtcatcgggtgagaaggagagcacgaggtcgccgccgtcgaacacgtaaaccacgggctctgggttacccatggggcactctggagttgcgccgtaacccctagacaccttgacggttgctaatttctccgttgggatctctgcgcacgcggaatttctcgtcggaagtcctagctccgccacggaacccatcatgccgtgacccgccttcttcaccgcgtgactgccggtaagaagtacctcatcgcctttgttactgcttactctatgtattgca

SEQ ID NO: 158092 - DNA, 1032 bp, Zea Mays
aaagcatccagatcaagtatgcatcagtggcacacccaagagccaacgggcaagtagaaagagccaacagaatgatattggaagcactcagaaagaaagtcttcgacaagaatgaaaagttcgcaggaaagtggatcagagagttgccgtatgtggtctagagcctaagaactcaacctagccgagctttgcacggaaacactcccttctttatggtctatggttcggaggcagtgctacctgctgatctcaagtttggggcaccaagattgatcttcgaaaacatagccgaagctgaagctactagactagaagatgttgatatactagaagaagaacgattgaatacagtgattcagtcagccaggtaccaacaaactctgagacgctatcatgataaggccatacgacattgatccttcgtagtgggagatcttgtcctccgccgaattctaatgggggagggacgacacaaattgtcaccactatgggaaggaccattcttagtagtagaagtcactcggcctgtatcatatcgtcttactcaaatggatggcacagaaatagggaactcatggaatatagagcatctcaggaagttttacccctagctagatttcaaaagctattgggacgacattgtattctgtaattgaaaaatacaccatcaataaaaagacttcattctcaaaggcactcgaaccatttattgtcaaactacatgctcactcgactcagggtgaccactataccctactaacggagcaatcgacttaagtcggtgatgacttaaggcgttgtgacatgctcacgcttacttaactcagggtgaccactataccctactaacggagcaatcgacttaagtcggtgatgacttaaggcagtgtgacatgctcacgcttacttaacccagggtgaccactataccctacgaacggagcaatcgacttaagtcggcgatgacttaaggcggtgtgacatgctcacgcttacttaactcagggtgaccactataccctactaacggag

SEQ ID NO: 158093 - DNA, 815 bp, Zea Mays
ggggtacttataggtgcccctagccacctctcgttcatcggatcccgaccacgagtagagcgaacgggagcagtctagtggagaagaagtcgccgtcgatgtgtgctgcccgtgctgccggtctgcagacgggtggggctgtggtcgttcatggggccgtgctgaacctgggcgtggaatcgcaggagctgggaacaggcggaatcatccttaattcctcgccgttgatttgggcgccgtcgtgggccgctgtgccgcgcggttagtgctcctgcacgtgcgattctcggtgagttttcccctatgattttcatcgttatccaaactacgtgtagcaatggttcttttggcgaatcctgctcctcggtctcggatggcgcgtaccggcggcctgctccaccctcgtgggcgcggcggcgccacccagttcagtcggaggatgaaggaggcaacctggccgttcaatcggctatcgacgaccaggattagataggcgttacccccttcgcatgtgctgatctgggtcgtggatctgtgatccaatggctaacgcggttaaagctggtgagggtgccctctggccgtagatctgtgatcgtacggtggccaacgcgtaccggttcgatgtggcccggatataatctgagccctaaaatgttgatccaacggctgtgattgaaacgtaacccttcgtcgtttacgttttctaaaagagaccctatagttttaagtaatcaacccgcagtccactatgactatagcctgagtctattatttcttgcgcagaagcccctaccctttcctgtttttgcacg

SEQ ID NO: 158094 - DNA, 822 bp, Zea Mays
gaagatgatgtttgcctgactaccattgtcaacaagtactttgtgcagatcccaccctgccactctaaaatttatcacaaatgcatctacatggggcgcactacggagatcgacatcccttgcattgaaggtaagcggcacgtgggaacacttcgtttgaaggacgggcccggtgaaggctacatggtttacccttcggtagtggtctttcttctgtcgttttatttcgaacttggaactagaccctccagtaatcatatggattcctcctcggaagggttgatcggcgaagtcctcttgctttggtagaggtgggggaggtggtagtggttggtttggatgttgaattggtggaggcggtaacgctaggatttcttggtgttgaaggcgttgttgttgcggaaatatgttgtggttttgctgttgaggataaaagtgttcattttggaattgatgttggttgtattggtagggatggtaggtgtgggcgacgactctttggttgtcggccgacagggccctggccattcgatcctttgttgctttagtctctaggcagtccctggttgggtgtgttgagtccttgccatggaagggacaatataatcttcattgttgttgaggtccccgacccctacctctgcctctggctacattgcccctgcggccttgctgcggagggtagtcgtgacgacgaggggtgttatctcctgtttgatgttgatttgcgatattatgtacttgggactgggcgcggtcttgcctagctagatctggtcgtgaaggcctgacccatgctctgctagactgtggagtctcctt

SEQ ID NO: 158095 - DNA, 581 bp, Zea Mays
gcccgcccgagaccttctcaccgccgttctcccctctctgcccgtggattcatggcctcttccccgccattgagttcgccgtggcgccctcttcccctctgcccaactccggtgaccccggagccaccatagctcgcgcttgcctcaactccggcgacctcaccgccgcggagagaggcgccgcccgcagccgtctgttttcccctggtctgatcccctccgtccgattcagatcgaacggctcggaccgcgggataccgcttcgcgcacgcgcgtctgacatgccctggcctgcctatcagcgctgctcgtagccgctcatccttcctggtctgttatcccccgtccgaccttgatcgaacgacttggaccacctcggaccccctcagaccctttcggacccccctcggacccccttgaaccccttcggaacccccctcggatcccaggatatcacttcgcgcccgcacgccctgactccctggcccgcctgtcagcgcccaagccccctagcactgggcccgctcggtcagtgcgctctccccctctgtcgctgacactccctggcccgcctgtcagcg

SEQ ID NO: 158096 - DNA, 431 bp, Zea Mays
tccttctgttgtctgtgtaactcttttgccgactctgagcttcgagtagtcttttgcggatcagggcaacttcctcttctgcctccttgataaaggcagacccttatagggtcttttcccctacgttagaccacatcagagggatctcacatcttcttccatacaaggcttcaaaaggtgacatcttgatgctggcgtggtaattgtcgttgtacgaaaattctgcatacggcaaactggactccgagtttctgtcgaaggttaacacacaagctctcaacaaatcctcgaggactttattgactctttatgtctgtccatctgactaggggtggtaggcggtgctgaagtctagcttggtgcccatagcttgctgaaggctcatccaaaattttgaggtgaattgcgttcccctgtctgacactattctt

SEQ ID NO: 158097 - DNA, 684 bp, Zea Mays
agcccgactagtccctagctttgacagtgcatcagccgctacattgtgatccctttcaacatggtggaattctaatccttcaaacttgtcctccagcttccgcactgctgcacaatatttgttcattgagtcggtcgagcaatcaaaatctttgtttacttgacttatgaccaccagtgagtcaccgtacaccattaatttcttgatgccgagtgaaacagcgatgctcagcccgtggaccagtgcttcgtactctactacattattggatgctggaaataagagctggagtgcatacttgagttgttcacctccgggagtgataaagagaatccctgcccttgctccttgcagtctcagtgagccatcgaagtacatcctccatattttagtgacctctgggctttccaggacctggtgctcagtccactctgatatgaagtcgactagtgcctgagtttttatcgccgtgcggggtcggaactctatatcatgagctccgatctcgcacacccacttggctattctcccaacagcttccttgttgtgaaggatatcgcctattggaaatccggtgactactatgactttgtggtcgtcaaagtagtgccgaagcttgcgagcggttagaagtaccgcgtataacagcttctgaacttgagggtaccttatctttgagggtcc

SEQ ID NO: 158098 - DNA, 596 bp, Zea Mays
tgcactaccacgaagacattagcaatagacttgctatagggacccatatggtatatgaacaggtcagtacgccatgctgggtgtacgactacgcatgatcctaccaaagatttcaacgatactacatcgaccaagggcaatatatcaccccttttgccagtagagaataggtctcatctgtaaggctctgcccttgaactataaaagggtaggccctctatttctccaacacacaagcacacgagttgtaacacaatctaatacaattccatgatcatcactacactggactagggccccagtatgaaccagtataaacacatgtcttagatttctcatctgagtcctagtggttcaccatttggagcaagtccgcgctagcactcctaccgaacacaaatcttattgtcccccggtttccgaaaccacgacaaaaggcatcccctagaacaacagaacccaggggtggccctcatagaggggtagatgggacaatcatagacattcagcttcctttgatctctgttcgtaacaaacgctaaaggagatgggtggcccatgcaaatgaatgacccttaggtaaagctggtgagact

SEQ ID NO: 158099 - DNA, 438 bp, Zea Mays
ggcaagcgctactccaccggcgagcctcacagcggcaatcggcacgagctctctctcacgggtaacagcgcgtttcactctccctccctgatttctctctgcaggcgacgcggtgcatcccgactcgtgggcaactgcggcagcgatgtcatgcgcatggcgatccggggtcttatcccacgacgcggcggactcggtcagtcgttcctcaaatcatgcgtggcggcggagatttcggtcatggctgttgcggaggtgcgggatgacacgcgggtcccagccgcagcggcgtgcgtgagatgaatgcgacagacagacgaggtcccatattccagtgaaacggatttgcccaacgcgtggatggccactgacaggcatggcccgcctgtcggcgcacgtcagtggctgggttgtacagggcaactggttatctgggcc

SEQ ID NO: 158100 - DNA, 493 bp, Zea Mays
cttgtggtcaccgccagttgctctgaaggctgtccatgcatggtcctaggcgcacatgagaaacagaagaagtaccaccgcacttagttgaggagcacccagcactgtagtactcttgggtggttggggcatatgtgatgcttctgggttccagcatatgtgatgtgagtactattatttatgggaccagaagatagcaactgcattcagaaatctagcatgtcaactgaagaactgggcacatggaggatttataagtttgttccggaaaaattctagactttaaagatcaaagcacgttgcaaacaaactcgtttaactttaccaaaataagatatgctcaatagctgcagcataagggactcaattctatcgaagttgctacaattttttgagggaagcatgttaaatatatcaaaactgcaaacacgagtcctgagagacgaatgcaattccccagcctgcacaaaaaggaggatccaatgaatgcttt

SEQ ID NO: 158101 - DNA, 375 bp, Zea Mays
atttagaaagtggttatgaaagcatgggtatatataggtatagtcaccttattgtgtaggatgaaagataggttagggcaagaataacctaaggtaagaaagtttatggtgagaaagaatttcgtgttgagtggtaatgcatctgaagattgagtttgacttgactcctcccttgacgaggttggtcttttctcctccgatcttggtctcattgattcgcggtgagtgcataccatcgaggttgggggcatatggttaggatagatatggatgagatagactacatgatgttggtcaaaagtttggatagtctgattatgtaattcatcatgactctactggttgagttagatctattaggatgacataaaatct

SEQ ID NO: 158102 - DNA, 521 bp, Zea Mays
tttctctacaaacaaggttagatagcaaaccgaagtgccatatgcatagtaataggtgtatgcaacatagttcaacactcaaaccttgcatgcttaacctttttcatcattttgcaccctttggcctgtttgagcacgggataggactccaaagcatcaagttgccacaatttgatctctaaagctgtccatgagctccagcaccctgcaatggtcacatagaacgtttccaaacacaagaatggcccaaactaatggttacagtgaacttagctcttttgggtcacttctaggttctgactttgatacttctcctctttcttgtgaccatgtccaactccatgagctatgatcttcagccttgtgacttgaaccataatccatcagagttacctcaatggttccaagtcacgtccttatgtatccattctcaaatgtacatgaccttcctcaactgatcaaacttgacttctaccgagcctcttcttcacattggctttaggttcctcagtcaccttgac

SEQ ID NO: 158103 - DNA, 612 bp, Zea Mays
atattattgagatgcaaggatttagcaggggtatcaataacagcattaccaatattgctaatgttcatacctgccccactggctgcgaggatctgatctggtcctttgtatgcgttttagactgtcagcttatccagttctgaggtgatgtgatctgttgcagcagtatcagtgtaccagtttgtatcaacgccataacctgtgggtagcagctgcaccagtcttgctgttggacgagtagttctcatcaaatctccaccagcaatcaagagcaatatgtccagtcttctcacaaacctgacatatgatgtcagactttctttctggcatctgatgacaccattctttgggcactacgaccatgacctcctctgccacgaccagaaccattacggccatgaacacaaggtccatatctaggtccagatctaccacggccacggcgagcagcattgaccgaggcttgtatccctccgtgaagcagttccatcctgttctcgaagctgagaagctgagaatggacatccccgactgagacaggttccacacgagcaacaatggctgatacaactggattgaattcttcatctaatcccgccaaaatacacgaga

SEQ ID NO: 158104 - DNA, 624 bp, Zea Mays
gctgacactgccaaaacagtgaggagctttaaggcctcaggatcctattggtaaccggcaatcacctcctgtaaccatgtcggagtggacgcagaaatagcaacacattcaccatcctcatgtggccggcgagacaacgcatcagcagctgaattatatacccctttcttgtaaacaattcgataatgaagacccaacaacttggtgaatactttttgttgccattgagtatggagtctctactcgttgagatgagacaaactgcgatgattagtgtaaataacaaattcagcatgctgtaaatatgaacgccactggtcgactgccaacagaattgccaaatattctttctcataggcagataatcccatatttgtcattccgagggccttgctcacaaataccaacggatgaccctcctgctgcagaacagcccccactccagtaccagaggcatcagtttctatggcaaatggtttatgaaagtcaggcaacgctaatacaggagttgaagataacgcttgcttaagagactgaaaggccaattcctgaacatcagtccacacaaagacaacatgcttcttaagcaatgaagttaatggtttagtaataattccaaaattc

SEQ ID NO: 158105 - DNA, 790 bp, Zea Mays
aaaaaatatattttataagctttgaaatgaatctagcctcacatcaatatcacgcacgtacgtgagcaaagtcgtcaaatcatcataacgacatgttgctgttcttgcctatcactacgacgtatagtaaagggcttgttattcacatttgtgacctggtccaagttagagcaagacccaactatatatacaaagaacaccaaacacctcaaggatgctctctctcttggccacccctttcatatgtgtaattgttagtttgtttgacttgtgttttatcttgttattgtttgtgttctttgattcacaaatagggattagctttatactcaatcggattacgcacggttgataaccatggtaacaagcagggtaaggtagtagcagtcagcagcccgcgaggaggacagtttttatttggtgtcaggcattttaatgaatccctgacccaacgtcgtacactcgccggaagttaatcaccactaactacactcccgggccggggggcccagctagcagacctgacctggatgtcgatctcatcctcatctctccccggcccggctgcatgctacacaggaggccggccacacgcaaaaccactgtatggctgcactgcagcaggccgccaagagcttgtagcagcagatgcatgcatgatgcatcgatcaatcaacagcttggactattatatataacccggcctatcacgtacagtaccactaccacacttgacactgcagctaccttcgctcgtcttgcattgtgtgtacgccaccccagaccagca

SEQ ID NO: 158106 - DNA, 522 bp, Zea Mays
agaactttgaaatataccttcatcagctgacccccaatgctattgttagacttagtgtctacatatgggctctccgaagcctgggaatggatgcgaatgccgaagctttctgccgggtgcacgaacttcactaccagacaaaggctagagcagatggccttcataggaactttggctgctacaattttgcgtatcggaaggatacgaaggcctcggttattggctatcgtaccaagtggacgaatggatggactaatgaatggttttacatgaaagcggatgagaaaaagagggagaagttaatgagcatcgttttgagtccgttaaagttgaacttcggcatgactcaacccttatgcaatatgcaattggggttaccctgccagttggctgaagtagaatttagagtggtagtcgagcacatcagtaatagagacttagtgcaagagtattcatcaaacagaacatatctgacttctagtggttggggaatgccgaagagaaaagtcgtgggaaataagc

SEQ ID NO: 158107 - DNA, 427 bp, Zea Mays
gtgatgttaaactcgggggactattggcacttgacatgtgacatgtccatactcaatcacggaattttcaaatccaccttctgccacttgacacacaatcagtgaccagctatatgcaaatgaataggggtactcagattcaaactgtgctggtttttgcatatcataattttgcatgaatgtagcattgcactattgcagtactagtgagttttatccctggttaatgaaatgccttgacttaccatttgccactacatttttaaccacatcactctaaagagcttattgtctcttcccgaagttctacaacatgcactttcttgatgatcctggagtggcaatgctaaacgttgctagcataccacttcatgcttcatgtcagtttggaagctgatagttctcttaacatatcatgcaatattga

SEQ ID NO: 158108 - DNA, 488 bp, Zea Mays
atataaatatacgatgccacacaacacaatcaaacaaaatataaagtgaaaacaaaattgtttacgaaggttgcacataatgtgacttcaggaccttgaacaacccaccactatccacgcgggtacaagctctagcgtatctggcgtcaacgcgtgtgcggccatcaaggctacgacagtatagcaagccttcgtaataagcgcaacaggcacaattatggctcggtaattggggtacacgataagtccacgcaacgtgcgcaacaggcgcaattgtgacccgatgatcacggcagacggacagtgcctacagggcttgcgaaaaatacgcgactcggcgatggcggtctgactcaacgagagcgatccgattaatggagagcgcgacatagcaatcatatgacgcagccaagttcgaacggcacaaatactgcgtcgtgttgccagggcgcagccaatgctcagccaatgccataactcagccgatt

SEQ ID NO: 158109 - DNA, 433 bp, Zea Mays
aatagccgaagaggtctcaccgccaaattagggcactgtggccggttcaatatagcgcggtcggtgagtaagaaccttcatctttctcctcttcgacgcgggctcactcggagcagctgaagtaacatccttcccagaagttgcactctttctcttctgcccccttggcgggtaatggtagtcaggatacataaatccaatagcatcaaaaactctatttagcctcttctttttctggctcccgaaggccgcagataacgcattatcttccgctttggagtacggcccaagcaactcatcacttgtagcttcgatgcacttcagccagtcgtcgtccggttcgataaattggtctccaaacctgaaggtatattttaatcgaaccaaaccaccttcgttagggtcgttgatggtctcttttggcatctcccag

SEQ ID NO: 158110 - DNA, 616 bp, Zea Mays
tgtggaagacggagccgcagtccagctcgctctccaccaccgcaaggctgatgaacatccttgaagctaagcaccggtggaagagcgccgcccccacgaggccgtgcacctccagcagaagaaaggcaagatcgacagcaccaacccgctggggagattgaagacaaagagcacgaactctctggcggcaagctcgccgaggaggagggcgccggcgcaaatccttccaccaaacacagatacagatctttccggcgaacgccgacacaccccatccgagcaggttgcgcaccaagttgagtgccacctcgggctggaggcgctcgggagggtctagcaaggcgatggcggctacgacgacataagagcgcggagagctcgagggcgaaagggcactgatgagaatggctaccacgcttgggggagtccctttttaaagaaggattcccccactgacgccctgaagcgccgcagaagacctcgcccgacgcgcgccaaggtgacccagtctctggcacaggggcccgggcccacgagtcatactctttgggcgtcggcctccgtgtgcggagaaggcgaaccaccatgtgaggagcatgccaccgcctacggtagt

SEQ ID NO: 158111 - DNA, 504 bp, Zea Mays
caaaaacagcgtctccaagactttgaatctacgggttgttcacttcttcagacaaggcatctttgcccttcgaagatgccaaagtctggccaccttcgtcaatgcccttcgtagttatcaataatcaagtcagtgttggtcccaagggacttagagtggaagatggcagtggttgggtcattacctcaaggattcatgtacaacccaatgacgaagtggtagcagtgctcccttttccttgctcttgtgcggctggaactttcttcacagaaattttagccttattcttttttgggcccctgaaggtgactcttcatcattatcagactcatcattctttgttccatcgtcagcaaccttctttaacgctttgcaagtagcctttgcaactctcttcctcttttctccagcttcgatgttggctacatgatttttgtagtcagggtactcaaaccctataacatccataactttattcatccaaagcttcccctagctttcgaa

SEQ ID NO: 158112 - DNA, 374 bp, Zea Mays
aatgtgggagacggacagccagcacgacagctgagcagaggaggcaagcggcactagcgagcatcaatggtgtatggcagttactagcagcgcatgagtgcgggagagcagaggacaggacgaagcacactggcgtgctccacagaagcgaggagacgcgcacggagacgaggagacagctaacaggcgagctagcgcggtgtcgaggcagcagaacaggtggcggcgacgttcgaatgcaagaacgaacagccaagtgaacggataaaggtgatgtgctccgtacccacacgtaataggctgaaagaaaagaaaaaaaagctagggcgagcgtccgacgtttggtgtttttgtttttttaatttcgaaattcc

SEQ ID NO: 158113 - DNA, 466 bp, Zea Mays
ctggcgtcgatcaacgcatcctaccccgtaggaatttgatacccttcttagacagggtgcgggaaatggattgtctaatttcatttcttggttaaaacagaaggtaccgtccaatctagctcgtacttagtttgtcatttgaagttgctcttacgtgcgaataatataacgatctatcctgcttgagcttgtagggccaaagggatgtgtctatgagtgccgagttgagacaggttgccgatggctttgcctatagggtcaggttattttccggatatgacgtgaatggatatcactttcgcacaacaagctacgagcaaagttggcccaatcgaaaaaccacaagttctagagtttttacacctggccttgatgaggtcgagtattatggaagaattgaagaaatatacgagctcaagtttcatggttccaaacctcttaatcccgtcatattcaaatgccattg

SEQ ID NO: 158114 - DNA, 494 bp, Zea Mays
accgaccatcagccaccctataaatacctctgtcctatagctagacacaacatgattgatacgacatttgagcttccaacaatacattttgtcgtgccagctttcatcctctctcctgactgcttgggtccacagttctcagtcccaacatttagcgcccactgtgctcatttcgaagaccaacccacgatagctcccaagaaaacaacacactaggactagctcccccgctcaggacgtgactgcgaagggccaccaacaattcccaccattagaagatgagggctttttcactatggcgaaggcctaggcatcaacaccgaagaccaacagctgttacacagccttcgcatgacaaatagccaccttcaaaagcaaaaggaaaccctggcagccaaggggaaaaactagacatgcaggcaagaaacaaacatttgatctgggaagagatggaaaaagcaaggatgctacaacaagaaatcacagatttgcag

SEQ ID NO: 158115 - DNA, 305 bp, Zea Mays
ggcgtatgtcgtcgtgcgcttcgtcgcgtgatgcttcacgtctctttataattcatgcaagtgtctcgttgtgcgctctgtcgcgcggcgagtcgtctacttcttaattcaatctaaatgtcgtatcgtacgtctcgacgtgcgaccactcactttcattcatcttcaattgtttataataattaaatgtggaacttgactttactttatgctaaaacgtagtgtccaaattaattcccttccattgagcgagtaatttaattcataatcatgtaacgtgatcgtttctcgactgtctttttctc

SEQ ID NO: 158116 - DNA, 787 bp, Zea Mays
gaagcacgcgcggaccaccatcccctcatcgtcgtcgtcatatttatcctcctcctcctcggtgccaggagaggactcgagtgagagcccctcccttgcctgcgctctgtgacgcttctccagcaagtcgtggaccaccatctttttgcgggcccggctcttcgccttgtccttcttccgcttctgctcctcggccgccagccagcgcacctccctggctgtcgcatcctctgggactggtggtcaggcggtctagaagccctggagcccctaccaacggaagagaaggtaagaatgggatggggaagaagaaattgagcacaaaaaatgaaaccaaaaggctcaccaaggacatgtagctcgactcggggcgcatcaccaccacagcagagtaatctgtcttccccactgttcccttcacccactgaagaagtttgtcggtggagagggcggccgaggccatccgggaactttccacggaggcctcggtggtcatctcatcgaggcagagtcggcaatcgaccagcggcagcacccgccgccggtggaaggccgcgacaaccccggccgcggtgagaccataatcccggagcttccgcagcgcctctagcagtggctttaggtgggtctggagatctcgcggtagcccccacttccacttctcctccgctccaaggacgacaggtgtgtaaacgccggcagcagcccatcgtcgttgcggaggtagaaccatcagctctgccacccttgttcgaagaggtgagggtggcggggatgtatagttccg

SEQ ID NO: 158117 - DNA, 413 bp, Zea Mays
ctgccgcccgggctgctggggcaacggaggatgtcatgacggcgtacttgcccattgtcctagggcaagacgcgctgcagtggctccgacatctacctcggcactgcatcgacgattggagcgacttcagttgcctaatgtaacctttctctgatagctcatcgatctgcttcttgagttcaaccaactctggtccagataccctataagctcttttagaaatggggcggttctaggaagaagctctatggcaaactcaactttccgctcaggtggcatacctggtaagtcttccggaacacatccggaaactctgacacaaccttgatagtctcgagtgaatctgcctccttgctatcaatagtcatctgatgacaacctcctttccttggttcaggtgagactaactcggc

SEQ ID NO: 158118 - DNA, 624 bp, Zea Mays
gaaaggctgagaccgaagaagctgagattaagagaaaggctacaactgaagaagctgagaagaataaggctgatgccgagaagaagaaggcagaagaagctgagaataagagaaaggctaaggccgaagaagctgagattaagagaaaggctgtagctgaagaagatgtgaagaagaaggctgatgccgagaagaaggttgaagcggaggagaaaatgatacaggttgcaatccagaaacagctgaaggacaacatcaaagctttgaaaaagccggtgctcgctgccaaggtaaagaagatgttccagttacaaatgtcaaaagaatatgctcagtagcgccaacagtacgaggataggttgaacatgcttcgtcaggaggccaaagctgagattgacagtttggagaagagcattgatggccaggcaggatccagctcatcatttgatgatatccagttccctgcggagtccgatgatgatatcaacaatttgacccaatcaatccgactttctcaagacgaagtctcagtaggccatgctgatttcagcgagtttcaaaggatgatattcaagcgcctaggtgatagagtgctgaagaagcctagggagtacatatccccgt

SEQ ID NO: 158119 - DNA, 361 bp, Zea Mays
atcatgtcaatatgtcatgcatgtgtgctgatctccactaacttatatattatataatgatgatgcccattgtagcgaggctgatctcaactaactcagattatatttgcagattaaactaccacaaataattatgttggtataaactacataccaacaacatagtttttgtttcaaagtaagttggattaagttggggatcaaaccaataagaaacaaacatattgaaaaagtatggaaagagtaaaagacagtgagctaaaattctttgttacttctataaaacatgtatgaagcaagtgtggattgtaatatgtgttttttgttgcaacaagagtagacaactgtttaattgtgggaa

SEQ ID NO: 158120 - DNA, 400 bp, Zea Mays
acgctaaaatccgcctgaactcccacgcacgatcaactccatatcttctgttccgatatatacggtaacttccagcttcgtgggcgcgctaatcacggtggtgtgtggacccacctgaacgaaccaatgaaaagttcgttgccgctcccatgttatgcaagtctgaaccattaaatatggtagcataaacacgagtaggaaccaactacccgaccagcgaacacgacgctgacccaccttcgtacatcccaactcgaccccaccacgtgcgcaccttctgtttacgcaaaatataaaacatgtttacgcatgcataaacgtgctccacaatcgcgcggacgtacgcgccccactggctcgacctgaccacgcgcgtgaccactaccctggctggggcttc

SEQ ID NO: 158121 - DNA, 365 bp, Zea Mays
gtccgatctcgccctctgtgttattgttccaacacccttccatgctcttgatgctcaccgaaccgtccaattgaactagaccgccacccatcgccgggaacacgatcaaatgtccgtagtctccgctgttctcgtggacagaagagaatagatcaccattcgtgcaattaagttaggggaaacgttctccaggtagcgaatttggtttagtccgaagctgaacactggtcttggcctcctccggccagtctgcgtgctcgctggagctcgggtgcgcacaacaccgtcgaggacttggccgtgcaaagaattagaaaccgaaggggttatatgcaaaccgtcagtgacacatagaaatagtaaaa

SEQ ID NO: 158122 - DNA, 961 bp, Zea Mays
ccctttttggtattattgtattaaatctgaaatttagttggacttcgatcatcatttaggaattctccagggtcaatcctgcaaaatccaagacccctgagtaacggtttccttaataacttggactgcgggttgtttccggagaaacataaggactcttatgcaaaatggtacggctgaaggggtacgaatggttctcggtcgtcggattaaaaccctacggtcccgattagatccaaccacgaatgaatcagtacaacgcagcggccgttggatcgaacatctgcgttccagattcaaaataaccctggccacttctcgccctcacgatcttagcttcacggtccagatcagttagcgtgaaatggtacgcgcgctataatcagggtcgtccatgaccagataaacagcccctgcgtgccatctctcaccttggcctcgcccacggcgacgaacgacaccacggtggcgccatggcaggctgtcctccgaagtttggaaaccaagcccctaacccgcaactaactcgtaaatcgtagagaagaagactaggcgaatcatcctgagggttttcttaccgggattagagcgatgacgtgagcgggcgacgaggtgaggcagatccgaggcaaagtctaactccggcaagagattcctaatgccaccgccgtcctccgcgtgattgttcgccggcaccaacttcgccacacaccgacgatgccccaccaagccaaatcggtcgagacatcgtctagcccgatcttcgcggcgatttccgctcctctgctccacgttctgcgcgcatatctatggcagggagtttaggagaggtgaagggttctggtccaaggggtgggctcgacttttatgcacgcaggcagaccccattacctagttgacttccccccggcattggcccacgccagcgtggtcgatcccgacggattgggcagagctccgc

SEQ ID NO: 158123 - DNA, 312 bp, Zea Mays
ggccaggattaaaatgaagagtaccctttcgtgcgataaaaatcagaacccttggttttcgatcgtgcggcgctgtgtgttcgggggggaatcgtatcactagggtcgtggatcttcgatccggcgtgtgggattgtgcgcgggttcgtggcgggcctagatctaatctggtgcacacgccttagatcggacgaccgagatggcttcataccctttcggcctggcattcttgcataagagacctcctgttttcgtgaaaacaacccgcagtcctgtgctccgcgttctgtgtcttagaagattttacccaga

SEQ ID NO: 158124 - DNA, 430 bp, Zea Mays
ttagggactaggtgtaagcctaattccctttcattttcctttatagctaatcatgcatgggtgcgggccaataggctgggtttatgggggcagaccccaccgggttggcgtacccgtatgcactacctagttacaaaagggaaaaacttcgacccctcagacctgctctatagataaaacttttagagatatttcgacactgggggaggcattccttcggtcgtagctagacagttgcccttgggtcggggtactcccattaccatgaagggtccttcccagctgggggagtgttacatagccctaatttggtctggtactctcgtaagattaggtcccgaccctgggttcctatctgcatttgacgaaggaggccccgcctttggctgtggtccctcctggatgaacctgtcagaaagttggacccgtg

SEQ ID NO: 158125 - DNA, 387 bp, Zea Mays
gagaatagccaagtgggcctgcgagctgggatctcatgacattgaatttcgacctcgcactgccattaaaactcaagcactggttgacttcgtatcagagtggaccgaacaacaagtaccggataacccggaaacagcagaagtatggcaaatatatttcgatggctcgttaaagctgcagggagcaggcgcagggatcctctttactgcacctggaggcgaacacctcagatgtgcccttcagttgttatttccagcctctaacaatgcagctgaatacgaagctctgattcatggactgaacattgctatatcgctgggcatcaagagactgatggtatatggagattctctggtagtcataagtcagataaacaaagaatgtga

SEQ ID NO: 158126 - DNA, 930 bp, Zea Mays
ggccgagggggttttaggcgtcggcgcctgcttggcgttgtggtggtggtggtggtgcgggttcttgagcaggctcttgtgcagcgcggcgggggacgggcagcaccagaagccctccggcgtgacggcgatcggcacggtgcgcggcctccccggcgctggcgatcccctcctctgccgctgctgcctcgatccgtccatcatcctccccgtgctggccggagcccggattcacgtccgaccccgccggaagaacctgcgcgggcgagtgagtgaacgggttgcaggatcagagacactcaagaaggaattgaacaaccgcaacgtcgaaaggtggcaggtccatgattgcattgcatcggaaagaagaagagttcagtcgagcgagaacacctgcaagactcctgcaattgctcacttctcgacagcgacttgccgctcaacgacccagactggccgcgaaacggactcgccggctcaccgcccgagctgctggtctaccagtaccaggctactagagtactgtactctactttaccaagaattaggataggagtacattccggtaggtgaagctgtttactcctttgtatgcttcaaaggcgagaggcagtggtcagtggagtgtaaagtggcgcagaagcgagctgccatgccatgccccaattgcccatggcagaggaagaagtagcaggctatcgttgccccgaatccaatgcctgttgtccttgctgtttgggtgaagaacccagaaccagaggcgagcacgcgtgggtctttgtgtgcgcacactgttccaggacgtttaccaagacgtacgttgtgactcgtggacgaaaacgaatcgtcctgctcaccgagtcaccatggggcatgccgcctgaaactgaaagcatgggaggttggggagagcggacggagaccgatcac

SEQ ID NO: 158127 - DNA, 601 bp, Zea Mays
agaacttgtagcaacagcagcctgtcgaacatcagaaacataacagttcatcatacctatgccaacatctatcagcagtatgtccagtctttagacaaactttgcactgtggaggatcagatgaactgttatttgctcgtgagttattccctggacgcggagcactgttgacatgacgcccaccatgtcctccatgttgagcaaggcgttgagcaggtgcagtgcgtccaccacgacgctgcccagctagtccagtggagaagcttcggcctccacgttcacgccgacttgcagcgttggcagatgatccggaaaagttgcctccgttgttgcgaaggtctagccgaatttcaaacgcaagcagttgagagtacaactcgcttacggagatggcctcggttcgagcaaggactgatgagaccacggggtcaaactcatcgtccagcccggtgagaatatattcaaccagctcgtcatcttcaatgggtcgtcaagctgtagccatctcgtcacctagaaaacgcatcttcccaatgtactcagttaccgtcatgttacctttctgcgtggtggccagggccagatgtgtgttcactgcgcg

SEQ ID NO: 158128 - DNA, 531 bp, Zea Mays
ttgttccgtttgggtacctcggatgtgggtccagcgctcaaggtgcgcctgacaccatggtgggcggtgggcgcgtcgtggctggtgtcaccatgccggatggcgacgggagtttgaagataggtttatagccgtcaatcccacaatgagcggtcacgattagatctagaaaacattaagccacgaccattcgatgctagttgaacgtttggaattggaactcgcataccccttcgcttaaaagatctgagccgtaggagcccgatccatcgatcaggattgtttactgattcttataaagcgtgggctaatcctggcggtccgttttggatcggacagctctgagtgaaggatacccgttcggcttggatttttgcataagagacctctggtttcctttaaaataacccgccatcccgttctgctgtgcaccgagtcttaggactttttgcaccgagcccctgcgtttctgtttaatatacgcgcagcccagagatcctaggaattgaataaataatatcaggaaatgat

SEQ ID NO: 158129 - DNA, 545 bp, Zea Mays
ctctcgctgacgagccagccccacctgccagccactccctctcgcgcgctccctctcgctggcagaccggccccaccggtcagccgcttcgtcgtcttcctcgcgtacgacgcaccgccgtcccctccatcaccgtcccctcgcccatcccctcgccgcacaggaaagttcggcaccgccccgtcctcgccgcttgaccgcgcccttgctcggtaccgcccccgccgtgaggtctcatcgtcgccgctgtgcgacattaatgccggcgctgtgcacctcaccggcgcccgccgagctccgccgctcccctcccctcgggcgcctataaaaaggtcgccccgggcacctccttccccgcaccggactcggccacccctctcctcccctcgcccgagctcaattcgcgaagcgccgccgtcttctccctctccggtgagccctttccccctcttctccctccctctctgttggtccagcgagcgattaagttggcctaccagcttcaccacattgtcgcgaactcagaacaccactcccccgcccca

SEQ ID NO: 158130 - DNA, 367 bp, Zea Mays
gaataattctaccacaaagtagcagtggtgcatcacattggtttagttgtgtctttgaagtactagcaatttgttttttacatttactccaaggaaaacattcctagccatctagtagttatgattatgaaaaacatagacaaagcctgagtcatccagaggtgtgcaagaaaactgccagtttaattggtgtgcaaggaaactgccagtttattagggtttaatggctttgttggtcatgtgaataagtttaatgtgatcattttaatgcagcattaggtttagcttacttccattgaatcaacactcctgccactacttgttaactggcttgtgtgattagagcaatcctagccaacactgtcaa

SEQ ID NO: 158131 - DNA, 384 bp, Zea Mays
taagatttgggttcggtaaggggactagcgcgggctcactccaaatggtgaatcacagggactcgagcgtggatttatgatagtgggtttatactggttcaggcttacgcccctagtccagtatagcgttgattgttgtattgctttggagcgtattacagtagttgtgcttgtgtgtttagcaaaagaggcggtccttcccttttatagttcaagggctggactctacaatggggacttgtattctactgggaggagctcgaccggtggcccttgtgcagcgtggttcctctgatgctctcggtagggtcgtgcatagccgtattcccatcatggcgtactgttgcgtccgctcgtcgtacgagtttcttttgtcggtcttcc

SEQ ID NO: 158132 - DNA, 394 bp, Zea Mays
aaaagcgaacacaacgggggtcttcttaccgctcatggtggtggctgcagtcctgcccacggcttgaggcgggtccacggcggggctaagcgacggcgagcaattatctatcaacgagacccacaacgggccccaggaagctccgcccagattcctcgtgcgccgatgatcctccagggtcgcccaccgaggcctgaccgacgatatggacggaggtagactgcggcgggatctgccttgctccaccatctgcccgcatggatctcacggaggcgaaattcgatggaatcccatggcaacttgttggatgggcaacgacgtaggcgttttgtatttatcccaagcgaggaagacccagaacccgacgatcacgacgttcacccgcggattccgc

SEQ ID NO: 158133 - DNA, 398 bp, Zea Mays
gtaatgatttccgctagagaagggaagagctacacagatgcgcagaagcagctagggcttcgggggaaggttccaccctaggcatgttcgaagcattcacaacttgatgcagggtgaagaaaagatggcccagtctcaagctcagttgggtctcagcaagcaagctcccaacagcaaccttcacgtaagacgtttcatccacctgctttgagaggcggaaggggaggctgaagtttcggtggtaggttcaatgcacccctaaggaagccattctgcttgttttgtggtgaggacaaaggccacaccacaagaacatgccatcatacaatcaatatgtagaaagaacttgcttcgtcagctactcaatcctccagtcgaaggaggtattgatgagtaca

SEQ ID NO: 158134 - DNA, 605 bp, Zea Mays
ataagatgttggtcgaagtcttaaaaacttttgaaatttatctttatcaacttacccccgaagcttttgtcaaagtaggggtttttatatgggccatgtggagccaagggttagggtcagacgccaggtgcttctgtaatattcacgaattatcatatcagacgaaggcaactaggaaagaacaataccacgacaacttcggctgctacaacttcgtgccccattcagaggccagttatcctgtgcctacatttcggaaaaagtggccaggctcttggatgcaggaatggttttatgtgaagattgacctgagtcagagggagtatataaaagggattattcagcgccatatatggactcgcttcggcattaggaggccactcattgcacatggaaatgacgtgcaagcatgccagacagctttcaacacattgtgcacttatatcggcacaagagacttggtccaagaatatattgcttacatagtgtggccacttgcaaatggatgggaaatgccgaaggaggctgccgttggctctagtcaaaatggtttggtctatctgaagtatatctttcgatacagaagccaatttgatgaaccgaac

SEQ ID NO: 158135 - DNA, 744 bp, Zea Mays
gggtgcgagaaatggattgcccgatttcatttcctagttcaaacgtaaggtacgtgcttagtttgtcaaagagatctgtctatgaactcaatttagcgtcttttaacttgcgaatacttgcagggccaaagagatccgtttatgagtgccgagttgagacaagtagccaatggctttgcttatagggtcaagaaatattctgggtatgacatcaatggataccgttttcgcacaacaaactacgaccaaagtcggcccaatcagaaaacaacgtgttctggagtctttactcccggccttgacgatgtcgattattttggacgaatcgaagaaatatatgaactcaatttttatggttccaaacctcttactccaatgatattcaaatgtcattggtttgaccctcaagtgatgagacgaatacattctaatcttgggatagtcgaaattcgacaagattccaccttaccaggagacaatatctatatcgtggcccaacaggccacacaagtgtattatctcccatatgcgtgccaaacgaaagaacatcttaagggttgggatgttgtgtataaggtatcgtcgcactggagattacctgttcctaacgatgaagattataacttagacccggacacatatgatggagagttcttccaagaagatgcgctagaagggcgatttgagatagacttaaccgaagctatcggaatggacatagatattgaaatggttgttgatgag

SEQ ID NO: 158136 - DNA, 1618 bp, Zea Mays
attgccgacttaagtcgattgctccattagtagggtatagtggtcaccccgagtcaagtaagcgtgagcatgttacactgccttaagtcattgcagacttaagctgattgctccattagtagggtatagtggtcaccccgagttaagtaagcatgcaggtcaacagtgaacaattcgagtgcctttgaagtctttttatttatgatatattttccagtttacagagtacattgtcgtccctaatagcttttgagatatagctagggataaaacttcttgagatgttctatgttccatgagttcccaacctctgtgccatccatctgagtgagacgatatgatccaggccgagtgacttccgctaccatgaatggtccttcccatagaggcgacagtttgtgttgtccctcccacgttagaattcggcagaggacgaggtctcccactgcgaaggatcgatgtcatatggccttgtcatgatagcgcctcagagtttgctgatatcgggccgactgaatcactatattcaatcgttcttcttctagtatatcgacgtcctccagtctagtagcttcggcttctgctatgttttcaaagattaaccttggtgccccaaacttgagatcagcaggtagcactgcttccgaaccatagaccataaagaaaggtgtgtttccatgcaaagctcgactaggttgagttctcaggctccaaacgacatatggcagctctatgacccactttcctgtgaacttttcattcttgtcgaagactttctttctgagcgcctccaatatcaccccgttggctctttctacctgcccgttggctcttgggtgtgccaccgaggcatatttgatctgaatgctcttttgctcgcagaaatcgaagaactctgagcttgtgaagttggatcccaggtcggttatgatgctattcgatattccaaacctgaatattatgtcttgtatgaattccaaacctgaagttagggaggcaatgggtttgaattctattcatttagtgaatttatcgatggcaaccagtacatgagtgtatcctccttgtgccttcttgaaaggtccaatcatatccaatccccagcactcgaatgaccaagttacgagtatggtttgcagttgctgtgctggtaaatgttgctgttttgacaagtactggcaggcttcacacttctgggctaactcggctgcatcactctttattgttggccagtagaaacccgacctgaagaccttcccaaccagggtcctggatgttgcgtgtatcccgcattgcccagcatgaacctcttccagcagttgctttccggtggctgagagaatgcatttcatgaggactcccgatgcaccccttctgtacagcgtttccccaatgagagtataatgagttgattgccttgcaattctttctgctgcatttttgtcgtctggatcctcctcatttttatgtacctgatgatcggctccctccagtcatcagaatttgactctggttggctcagagcgttacattcctccacctgatctagtgagatgctcaggtgcagtatttcttgtacgaaaactccaggtgggacctgagtccgactggacccgag

SEQ ID NO: 158137 - DNA, 518 bp, Zea Mays
ctttggaataagtgaatgtgaagcatcctatctaaataaataaaatgaaactttgcatcattctgggattatactggttgttgcatataaactggaatttgaaattgaaaacagatttgaattagtgactcatttaaattcaaaatatttaaaacaaatagacatttaaattagaaaaggaaaaagagaaggaaacctgcgtctaggccgaatctccatttcccggcccaactagtgcacctgtaccacactcccgcgcagcccattttttcccctccctgcgccgtcagtcaaggtctggtgggccccgtctgtaagtccctcaccccactgacgcgtccgccgctcgggttcgctaacagctgggcccagaaagccagggtcttcttctccctcccgtattctgctatggttccgcgggcgccaacaaatcgcgagattctcgccgctgccttcgccgacccgattttccccacgcggattccgccgagtctgttttgcttgcccctataaaattg

SEQ ID NO: 158138 - DNA, 279 bp, Zea Mays
ccaacttcttgacactgaagactgccttccaaagtcaacgatgcgcgagatactgctcgagatacctctaatcccacgtctggaatttcagagcaaacatccatcatatcgccagcagtcggctctgacagcatatcttcaggaacgacatcctcaagggcctgatcaaaatccattatggacaattcttgaaggctgacaagagcagacagagctggagaaggaatatcactatccccctactacctctgtaacaccggctattttacgaattagcgg

SEQ ID NO: 158139 - DNA, 485 bp, Zea Mays
cggccgccctgggcccccgaagctatggggcccctaaatatgtattaagtataagtatatgatgtgtgctatgaatatttagtaattggtcttggatcaaacactattcaatagtctgttcactagctgtagcttgttggaaacctaagaaatgaaccgatgagcctattgctgtcacatagaaaacaaatcgtcgcagactcctaacacgacgtggcgacaccctgagtgcgtgttcgatagatgactatagctgtagtgtatagtgtactaattcttatattatatgttatatgtgtgtatttttgcaatctcacgaactaatgattgttcattgatatattctatataggattttaaagtcaaaacttttatcccaaactcttattttactttggcaccaaatgagtaaaagaccaacataagagatttttgaatggtgtattgtctgctacatgaatttttgagaatttcgtagaggtgga

SEQ ID NO: 158140 - DNA, 433 bp, Zea Mays
ctttgagtcatcagggtggaagctagctccttttgcttttgttctacaatcatgagatctcgtcagctcatgtagtacagtagtagtagtatatgtctcggttggttggttggtatgtaggggtaggaataggatggtgaaaaatcctcgtcttttgctttcttgtgtgttggaatgatgcacacacaagctagcgcgtcgtacggtcgtggctcaacggtacagtagtgtatcaccccatcccaccacaccacatgtttagcatcggcctcctcatttagggctagtttaggataagaggaggcaaacccagggagtgaataccctctttgaataactaaatactttattcagatgatatcctctgagaatactattagaagaaatgacagagatcctagagtgcattaaattaacccttagggctagtttg

SEQ ID NO: 158141 - DNA, 417 bp, Zea Mays
tttctaaatctatttttctggttttatttaattcctggattacgcctcaatttatatagaaggcaggggccctggcgtaagattaccgagactcagagaacagtactctctggatggcgggttgatttgtaatttgctcggaggctctttaacaaaaagtacccgcgaaggggtatccatagatgtggaccgttggatcgtaagtagtcggccaagattagaaggctattaatacgaaccggtatccaatctagaccttcggatctaaatctaacggtggcatctctatgcaagcgagatcgaattggatccgtcggatcatatccaacggtccacgatccactaccgaaagggtatggcttaggtctaatctcgaccgtagatccaaaaatcaacggccccagcgccttcgcccac

SEQ ID NO: 158142 - DNA, 717 bp, Zea Mays
ctagaaggtacataacataaacatagtgttcgaaaagggatctggtcgcaaacttgctctgagtgaagatgtaaatgtgataatgtggaagaataacttaatattttggcaactaccttattaggcaattttagatgtttgccactcaatcggcgtaatgcaaaatacaaagaatctttgtgttaacatacttacatatgggaaggacaaagatacacttgaatcatgggaggacttgaaagctatgaaataatgagagggtctgcacctggaagagagggatgcaggacgacactatctaggtcatcctgatatactctcagtaagaatgataaggacaatatgtttgaatgcttcaatagtatcaaagtcccaactgactacattaatgtaaaaaggctgataaataagcaggagaagaaatttgtgcacataaagtctcatgactgtcatgtgttaatgacacaactgctttcgatcgtgctaaggggtgtcctttctatcaatgttacaaaaacaatcacaaatctatgcactttcttgaatgtggtgtcatagaaagtaattgatccatgaagcctaaataagctacataacgacgttatgcaatgccttgccaattgtaaactaatttttcccctgttattctttgatattatgaaacaacttatggttcacattatcaaagggattggtattcttggacctatctttctg

SEQ ID NO: 158143 - DNA, 853 bp, Zea Mays
cgcagccggaagtggagacacaaaagcagacgatgtcttaggaatccaaacggacacagatgacttcaacctcctcttgggaatacatactctcttcaccttcttaaatgcacctttctcagcgttgaatatccctagggggcctagccgtttatggaccggcaggcgaggcaccctgactccttccttcacaaaggactgcacgcgcggcccaagccgctgatgaaccgacaaccgaggcaataccactgccgtcgaactttttctgggagcagtaataccaaaggacgacctcctagatcgacgccgcctccgccgccttccctgatcgggatcgtcctccgccagaggaggtgatggctggagggactgcagcatgttcggtcgatcaatgatcttcaccgacacccggatagggtagacagttgaacggcgcagcatcccaccatcggtcgtgacaggatcaacaatttcaagcttaaactccctgggaatggagttcgggctggaacaccaggcggtaaccttgaacacctcacgctgccgctcacaatctgggtgaagatcaacaatccatcaccactcgttgaggagagcttgcacagttgccaattcccaagcatgggcagggatgctagacacttcaatctcaacttgaaaaggcagagacgccgccgcagatgagttaagaattctgctccatctcataacatggattttaattgtgggagacaaattcacaattcttccccatcaaaagcatgatccgccatttctaaacttggaaggataagaagaaaacttgcaggacccagtcgacacatagacagtgagtcatgtacaagctccagcc

SEQ ID NO: 158144 - DNA, 683 bp, Zea Mays
aaacaagctaaaaacccagagacgaaaatgtaattgtccttgtgggtagataatcaccggtaaggcggcatgcgtgagcagatgatgagttgaccatgtcacttcgcttttacagttaatccggtgagtaagccgccactctcagtcagccgtccaaaaccggtttaaacgtggcgtgcacagggaactaacgtacactacagttgcccggaacagtaatctaacgcccatgagattgcatcagatcagactggtagtcggtagttttcccggcaaacagtcgcatccacaggaagcaaccatgatcctctcgccacatgcgtccccagtgcttgcctgacagcgcaatcttgtcctgccccagcccctgcacctgcacctgccgggagacaacaattagttaaatttttgacaatcatcgccttgatcatcgtccaacgcactaccgagctagctaatcaatcacctcttgactgatggagaaggacacaagcatgccggccgcggcgctccaggagtgagctgagccgagagcagttgaggaggtgagtgccagagcagagcacgcaggcaggagcaggattagccaccaaatccaccacttgacgcggccacacccgctcacacctgtgccgcggctgccttaccatgtcccctaccctgccgctccccctccccctccc

SEQ ID NO: 158145 - DNA, 527 bp, Zea Mays
tagcatttgcttgaatgtaagtgtggaaataagggggatagcgtttctcgctaatcttatagtaatgggtactcagggaatagatgtcatcctagggatgaattggctagataagtatcaggcaattatcagttgtgataagaggacaatcaagttggtgtctccactaggagaggaagtggtgaccgagttagtcccgcccaagctaaagaaaggaagttgttatcagatggctgttgatagcagcgaagtagacccaattgagagtatcaaggttgtgtctgagttcccagatgtgtttccaaaggacttaccaggtatgccaccagagcggaaagttgagtttgccatagagcttcttcctagcactgcccccatctttaagagagattacagagtatctgggcaagagttggttgaacttaagaagcaaattgataagctgtcagagaaaggttacatccgaccaagcacctcgccttgggccgcccctgtcctattcgtggaaaagaaagacgacactagaa

SEQ ID NO: 158146 - DNA, 749 bp, Zea Mays
taccggtttcagtaaccaaccggtactaatataaaacctcttcctcttccgccgcctcggtgcccagttgtcatagagtcttggatagagtgtgtattataaaacctcttcctcagtcacatactcacacccgcttctaccttcctcttccgccatcgccgcctcaatggacctattggatgccctagcagcgcacctcattgcaccgaccctagaggagtggctcgcaacgacaaggcgcatgatcaactcccaatcggtattgatgccccatttacaaaaatgattactttataattctatctagatttagattttttagcaacattgtagttcggttgacacaagatattttttcattgtccaacaaaggatttatcctaatcaatgacaacattgctcatagaagttggcatgggagactgtgtttgctgtaataatctataaagcattcgacatctatgttttttagtgctcatttgctatttttctttcggtgaatttcacctcctacgaatgcaaataatatgttcagccaaaggtctaatcaagcggtagaaattataaacactatttatttgtaggtgcgccacaatgatttgcgatttagttggcaagaaatgagattatttttgacaagtgcaatccaaaacttattcttgtttatggagacacaaacctcttatgcgtatagttggaccgatgtaatgaggaggcgttgttcgtccaagcatgcaacacaattgaat

SEQ ID NO: 158147 - DNA, 1156 bp, Zea Mays
cgatcactaatctacggtcctgatttaagaaacgacacagcataacctgatatctaatcgtggccacacacttgggatcaacggttaggggcttatccacttcatcattttatagccaccgttgatcaccagatcaatggactccatgcgtcttcctgctcccgaccgcatgacagggcggcagaaggagagctccgccccgcgacgaccggacacggtgccgcagcgccatcaacgcgcaaccccgacgagcaccgcccatgcagccacagcgaagcacggatcgaattgcctaatcgtgaaggtgacgtcgctctacacggttgggaacataccggcgcccaggttcgaacaggttatccctgggtggagcgacggaagccttgtggttcagtggtgacgacggtgcgccggcccgccgttcttgcgaagcaccggatgaatccccccccgggcagagcggcgattcaccaaggaccacccccctgactccgcccgactgctctcctccacccacggcggcgatcccacgacactcactctcggccttctcttttttttctgcgttccccatggtggcgccttcgagtgctaatcagatgagcgagggagaagaaaggttgacaagtgcgtttatagaggcaggggagaagaagtctgtgccgagaaggtcggtagatcggcgacgtagaatcaggtgtttctgttacggtgcccgcgatcccggcgaggaagacggatgccggcctgaccaggtgccccaccatgcagtcccacgtgcacgcaaccagggggactggccatgcggcccacgcggcagtgcccaaacgcgctgacgcacagaggctgaccgagggaacgtgggctgaccgcaggacccgttcatcagtgggcgcgatgcgtgcgtaagaggaagagcagatgcgaaggaaaccaagggtggcggctagggtttgggcaagcgcacgcgttaatgggccaggcgatgggccagcgggtgaagctagggtggccggttgagggagtaggcccaacagaaaactgtttcctttaacttttcttttttgttttgtttgctcttttatttcaaatctgaaattcgaatttcaaattttttttgtatcaaatttgtactccaattaaatattaaatttta

SEQ ID NO: 158148 - DNA, 625 bp, Zea Mays
caaattttccataaggcaaggatttagttttggcacaaaagattctacagaaacaagggggcatgtattggtacctaatcctagtggggcacaatagactcgaaaaggcgcgtcgggaaaccaacagtcccacagtaaaatttcacctgtcaacggtcacatttcaaaaaaaactgtggggaccacttcaacctagtgagggcagtgtttcgtccatctctccgaaaagacttcgggaccagctcaccaagttgaatcggtccctcgaggggctagtgttggagcgaacgtcgttggccccctcattcagtatgctttaaatataaattgagcaggttccatcagtcacaggaggcgaagggtacttcaacccgtaccaaagggaaagccttggtcaaagagctgacgaaggcttggaggcgaagggacctaacgttcaaagcgggggctcttcaagacttcgctcgccataactctgagtacaagtcttgacaagattcaagatccgacacccctgagcgaagacaaacgctccctgttcgtgtggactgtggaatgggaccacacggcgccttgctggcctactcgggcccatttgtaagccccatcctgggtagggtttatg

SEQ ID NO: 158149 - DNA, 462 bp, Zea Mays
cgaggctcagccagcctcctccttcgacgaaggttccggcccagccatgcccgcttcctttgcgacttgacttgccactcttgtgttccttgacaggctaccaaccaccaactctctgactctacggccaatcgacccgatcaggccggaaaggtctcggttagctgcggcatgcgggtggagttggggattaagttgtccgtgtctacggcagcggcggcggcggccatgaggatgtacgccatgtcttcgtagaattgcgatagccttcgctgaaatcggaggtctacttttgcggccgtgcatgatctggaagcgggttctcgaagcgaggaagcatggacgtggtgcaggtcctcgcgtcggcgacccagctggtctccgcgatggtgtccgcggtcggggcactggagcaggcggcatccgacttggcggaggccccgaggaggctgcaggtgctcg

SEQ ID NO: 158150 - DNA, 586 bp, Zea Mays
ttaaaatcagcacgtgtggcaagtaaaataggagcattcaactttatttcagatgtaacaggtgcggttgatggagatttgacttgttgtgcagttttagcagccctactaagatcatctttcagaatttggttagggggtcattggatgtataactattttctggcctttaaacatgaaagaataatgattcgaacgaccatgatgtaaactatcagtatcatattgccaaggtcgacccaataacaaagagcatgcttccatagggataacatcacaatcagcataatcagaataagaccccagcgaaaaggggatacgcatcaagcgtgttacctttaccaccatcattaagccattgaatgtgatacagatgtgggtgtgtgcgagtgggtaaggataatttctccaccaaagctgtacttgccaaattattgcagctgccactatcgatgatgatacgaatcgaccgttctttcacaacgcccttggtatggaatagagtgtgtcactaatttttttggcctaggcaagctgtgtgctgagaacacgttgcgcaacaagactctcatacctatcggcggcg

SEQ ID NO: 158151 - DNA, 477 bp, Zea Mays
gggcagcatcagctggtggggggtgcgagtttggagatgcgtcgtgggagaaagactgactatcttgaaatcccgcacaaggatagtatcaagggatggcgcttggagtggtttattattgagaaccacggaaattctctccccctacggtcagggagacagccagatgttcgcactccgagttggaccgagtcccccacggaccaggaggtggctgaggcaggggctttgctggctgaagttggactgctgaaggagaggggtctgactacagaggctgtggttgctgattttgtcttcaagaacattcagccgttgaaggacagggcatacccgacttatctgtaccgaggtctagctgactcaactcgggtcaccaacagaagaattcccgttgtagacttggtgaaccggcttgaaatgattcttagaggcaaggtatcaaatgttggtgcccctgtggcatactcggcctgg

SEQ ID NO: 158152 - DNA, 351 bp, Zea Mays
cctatctcggactgtttggccttagtacctggatcgtccggcgtacacaggacaggtgaccgtgatcgggtgtccgatcatgcttgccccccggtgcctccggtctttcttttgtctgaagttttacgagtaaccattctgcgtgacatatttggtgtacggggatcaccaatgacgatatttttatctttgcttttatcggccgcacagggccgaactatgacttttttgcttgtcggctctaatgtggtggcagggacaggtggcctgtcaatcctcacctccttttgaaacctcaaccagcctttgtttatagccgattgtatttgccgacgaaagacatcacaatca

SEQ ID NO: 158153 - DNA, 285 bp, Zea Mays
ttcttcagcgacatcagggaccgagcacatgttgacggaagctgggagcgcagccaggcagcgacgtccaaatcccaagtacactggaccgatgtgggtcgtgtaatagtgtgtgggttaatcgcctgtgggtcgagtgggtagctggtggcggtgtagtcataagagaacttggctggctgagcaggggatcgaacaagagaaacctaaacagaatacaccttccccttccccaagttcttctcgtttccctctcgttctcagttctgagttctagatccgaac

SEQ ID NO: 158154 - DNA, 1126 bp, Zea Mays
gccaaaagagaccatcactaaccctaacgaaggtggtttagttcgattgaaatacaccttcaggtttggagaccagtttatcgaactagatgatgactggctgaagtgtgttgaaaacactagtgctgaactacttggagcatactccaaatctgaagataatgcactatctgcggccttcgggagccgaaaaaagaaaagactaaatagggtttttgatgctattggatttgtgtaccctgactatcgctactcgccgcgggggcagaaaagaaagggtgcaacttctggaaaggctgctgcttcggctgctccaagcgagcatgcaccaaagaggaaaagttgaaggtccttacccaccgaccacgctacattgaaccggccatagtgcctgaacgtggcggtgaaacttcttcagctattgaggcaaaaggacctgctcctacgcagaggattgaagagccggctgcaatgccgaagactgacaaaattgaggaaccaagaatcgaagggacgtaaacattagaagttctaagcccttcggcaggagtggcggcgccgaaggcacaaaaaggtatagcagcgaccccaagagaaaaaggatggccagtgtactagatatgctggagacgataaaggcttcaagctctactccagggaaaattgccaaggcttcgaaagtgcaaattgaaaccgaaacaaaaccgaccgaagccgaagcttcagtgagccaagctagcgtcgaagctgggccttcagagcctactaaggagaaacccttggaaactggagaaaaggcaccggaggaagaggctatagaacaaattttgcctgaaaaagctgccgctcctactcccgaagcaccttccaaagaccttgattatattattcgacatgcttcgggaaaaagattatctgaagaagaaatttttgaagctaaacattatgcccgagaactgaagtacccaaaaggggccttagtgtttaatggtacagatgaatatgatttcttgtactgcctcccagacaacaaagaattatccgtctgccgggaaatggccagaagtatggggtttttgaagcttgaggctggcctctgtgccatgacgaaggacgatcttgcgga

SEQ ID NO: 158155 - DNA, 596 bp, Zea Mays
agttaacaataactaatccataaatgataagccatcacatatgtaataatactatcgggtatcataattaggggtacctggaatgtgcccataaacatacctaacacctgagtaccgagaaatcataaaacgtgttccccgaggtcaagcagggttgaatcacgattcacccgaggtctcgctcaacggacgctcaaaactatgctcggacgatggctacacccatgagaaatccttgactcgctcgagggtcccctacacggaaaagcaatttccatctcgctcgagctcatatcgggaaccttgaagatgtgcgcattaaatacacacgatacggatatctgttctatgtcacaccgcagtaaaatagaggatgatggggtcccatctactttcaccaactacgatgacacacgcccgcgaataccggacactgctcccccactctggtcactgttctcgaataaccccagatgggacatgcacgcatttgggcgcagcctcaccctcaggagagaactctaccttgcccgaagatggctccagcctcgggagaaaactctgcttcacccgagcatggcctcagccaactactc

SEQ ID NO: 158156 - DNA, 1309 bp, Zea Mays
gcttgcctcgtgactctgtccgggttgttcggacgagtacgaggcccccttcgtcgaattctcttgggacgactgcgtggtcgcgccaggccttcgtttgagcttggtatttgttgagggcctgtagggcgaagacacggtctccgtcgaggaggtctttggaggttggttcgtcgacgtcggggacggctgaagcgcctgtccgaggtgacccatgttttatttcctgcggggtcatggcctctgatccgtatagcaagcgaaagggagtgaatccagtcgcccggcactcggacgtgttcagcgcccagactgcttcaggtagcaggtcggcccatttacccttgtcatcgagaagcattttcttgatggcagtgaaaatcttgctgttggcgtgctctatgacaccgttagattgtgggtgatatactgaggcgaaggcaagcttggtgccaatggagaagcagaagtccctgaagtcctggctgtcaaactgtttgccattgtcgactgtgagctcggacgggactccgaattggcaaacaatgttttgccagaagaatttctgggcagtcttcgacgttattgtggacactgcccttgcctcgatccccttggtaaaatactcgatggcgacgaaggtgaacttgaggttcccctgggccgtgggtagtggcccaacaatgtctagcccccagcgctgaagtggccatgtgtgggcgatcagctttgtgaattgcgaagggttgcccgaatggggggaaaacttctggcaggcttcacacgacctcgtgacttgattcgcggtgcagattatggcgggctagtagaaaccttgacgaatcaccttggcagcaagttccgcagtggacttcgcgtaggatctagaggcctttggtttctgtgacacatttgagcatgggttgactgattcctttcttgtatagatggccctcaatgagtgtgaaatcccggcttcggtgtttgaggcgcttggcctcgttgacatcacctggatggtaatatccttgcaagaacagggttattggggcccgccagtcttcggtcatgatgaggttgatgatgcgatggccctcgacgtcagtggttatttgcagaccctctggattgcggacggctggtgtgccaatgatgtggtagaacacgtcggagggcagggcttcgcatctggctgcggctttggctaacacgtcgacctcttcgttccttgcgcggtccacatgctgcagggtgaaacccttgaattgtttttcaagactacgaacgggcgtgagatactgcatacgtg

SEQ ID NO: 158157 - DNA, 484 bp, Zea Mays
aaaagactgaacatggtttttgatgcaatcggcttcatttaccccgattatcgctacccgctgcgagggcaacagaaaaagaggaagattgctgctttggtcaccccagttgatcctgttccgaagggcaaaaagatgaaggttctgacccaccggccacgttacattgaaccggccgtggtgcctgactttggcgcagggtcctcttcagcagccaaagcaatacaaaccgcttcgactgtacagggcgctgacgaaccaactgtattgccaaagacgcatatagttgagccagtcgaagataaggttgaaaaggctgaagagccgaagattgaggaaaaaatgtcaaagattctgagccctccgatagaggcaaatctgccgaagacgcaaaagacttatgctgcaactcctaagaggagaaggatggccaacgtactggatgcagtgctggagactacaaaggcattgagtcctgctcctg

SEQ ID NO: 158158 - DNA, 474 bp, Zea Mays
gagatttggatttggaaagtaaactagaaaataaaaaaacaaaatagaaataggaatacaaatggatatggagaaaggagagctacgtacggcctaaactccctagcgtgcaagcccacatcttgtttttttatatttctttattatttaaccggatgtctatgtcaccataacatcatggatgatgtcaccctggctcaatgacatgtgggaccattgggtggagcttcgttctccctccagtccgtgcgtagcgatctcgcgtttttgttattttctgttttcggtgattcaccaaactggtacgccttccttccgcgataaccgcgcgtagtaaccaacccagccgcgagctagctgacgtaacctccatccccgattgctactcctcgtacacggggatataaacacatgccgcccctcatctctgggccatatcagccagctactcgaagaccttatgccatgaacaca

SEQ ID NO: 158159 - DNA, 530 bp, Zea Mays
taatattgggggtagaggaactattgcagccgggggagccccagtatatttctttagtaaagagacatgaaacacattatggatgcgggcgtgagatggcagggcaagcctgtaaggtactgtcccaatttcctctagaacctgatagggaccatagaagcgaggcccaagcttagagtaggcggctggtgtgattcctaaagctgtacgctgttgcagtcgaacccacacccaatccccggtagtgaactgcacttcccttcgagacttatcctgggattgtttcattgtgagttgagcctgtatgaggcgttccttgatctgagctaaaaagtcatcccgatcttgtaaccgagtgtcaatagcagctacaggggaaagtcccggttggtaagagataatagctggagggtctcgtccatacacaacccgaaatggtgaacagcgaaggttgtttgaaatgaagtcttataacagtactccacctaggacaaccactgtaaccatgtgcggggtcgatccccagctaa

SEQ ID NO: 158160 - DNA, 891 bp, Zea Mays
cacatttccctttcagaaactctaggcccaaacctagcaaatcagtcggtgtttattccagcaaaaggggcgtccgggggaatttttgttgctgcttccgatcgttttttcgacatacaaagtctcccgtctacgccacacactatttctgctaacattgtctttagagcggatggcacttgttggacaatttcttcagtttatggcccacagacagagcaagacaaaataaacttcctcgctgagctctcctcgcttaaaactacagtaaaaccggcttggttgttacttggtgattttaatctaatttgctcggcgcaagacaaaaacaacaatagaattagcatgaacatgatccagcggttcaatagaactttagacgacctgcaagttatggagatcgctctcaacggcaaacgattcacttggagcaatgggcaagattcacctacgttgtccagaatagatcatttctttgctacaacagagtggcttgatctcttcccaaattcagaccgtcaagtgatagcgtccatgggctcagaccattctccattattcctacagggtaatgttaattataacttttataaaggttttcgctttgaagcattctgatctacccttcccggtttcttagagatggtgcaagcatcttggagccagtcagtagatacgagagacgcaatcctaaggctacatattaagatgcgacgtttggccacatcaataaaaatttggaaagcgcaacaagttggtaacattgagctacaattagccattgttcatgtcgtccttctctgcttagaaaaagcgcaggagcggagacagctctctgagattgaacttcacctgccccgctccttgaaggctaaatctttggggctagct

SEQ ID NO: 158161 - DNA, 1129 bp, Zea Mays
ttcaaccttccttccccgacaaagttcaaggctagccccacctactacttgatgctatccacccgccatcccttgctttcaatggtagagatacttccatagtccaaagtgtgggctaatcccaagatagtcttcgctgagatgcacgaagatggcaatttgaagaacagaatcgggttcatgtgagtcagattgagggagtagaaatcaaggaggccacagaaaaagggaaaacaggcaaacctagtctcgaatcaagaaagggacgaaaaccatagactcatgggtatcctccgtgggcacggtaatcccttgccaaatgcgccataaactcaactccttcgaaagaagaacaccaatatggacctagtggagcaaatcaaatacagaaacaatggaagcatagttaccacataagaggagttggttgttggggccgatacgggggatgacggtcgcctcatcccctacttcttcttcctgggtgccatgagaccttttgtaagcgcggaatcaagcatggagtcaccaaggcacaagaatttcataggggagaattgaggtgaaagaatagatctagggtttgtctgctagaatccattaggaagtgggcatgtatactctaggcctaccataagcaccagcacaagggaaacatatttttagatcgaatggaaggaatgctaagtcggacgaactaagttggacagaaaacatgtttctacgcaaaatcagttgggacacaagaaattgaacgaaacaaggaactcaataccaacaatcaaacttcaaatgcaggatgagaaactcagtactcaaggtagataaggccagcaagttttattcatataagcagaagtaccattacaaaagaagagctagttcattaggaaatgacccttgcaaaagacccctaccactactactacttctactactacacctacccactactactacactacactatactaatatctaagttggtggtgccttgccaccgccgttgccgccgttgccaccatcgtcgtcatcgtcgccaccaccaccaccgccgcctttgctgccgctgccctcgccaccgtcgcctctggcaccgctgtcaccaccgccctcgcctttgctgctg

SEQ ID NO: 158162 - DNA, 340 bp, Zea Mays
cgggatgtaatctgtccaggtgaggtcgcggtcaggttcctcgcgacttggtgaagtccctagacccgatgccggggtattatcgacggtgaatcgcagatcacaccggcagcagccaccctggattccggcgctgagctcccagtgctccaccacggttgcagagggaaagaggaagcggtggacgtagggagagggaaggggtctgtattttatactcccaggtgtccgaaatttccccccgtaacaaccggatcgaccaaacggatctgcgcgattcatggctctcggtcgcgttctgttggtagggatagaactgactttaggggcccacacgtag

SEQ ID NO: 158163 - DNA, 451 bp, Zea Mays
gcagcgttatgtgagagaccaaaccaagagatgaagccacctagtagtggaaagacatgtagaatgcataaggccgatttcttcttgtgcaaggcctagtggatcaagctgttaatgttctctaatgggtatgcggctaacctgagtcgggggtgaacttatctactatgcgagtcttagggatgaagagtcatgactaccacatatgaactgaacgaattcttccggtgatggttcgaggctatgtcccggagcatgtctggctagttcttgcagagttgagctatttctttcgcatatttgtgcaaaagagttatctcgaaccgtgattgcatacttagaaaaaatggcactcgtgttactgtgtaagctggagaagatctttccacctggcttcttcaatacgatgtagcatttgattctcgacacatagactggcaaaggggcccac

SEQ ID NO: 158164 - DNA, 351 bp, Zea Mays
cttattggagtgaggtttatctttcctccttttcccttgatcttctttagggttttagggtgggtttgaactacaagtcaccttaataaatttccaaaaattctgtaaaaattacagtggcttattactggtgtatgattctctgtctcaaaatttaaggttctagaagtgaatagtttctctggacaaaattgccaaattttagggcagaaggggtgatttgaactacaactatcattcaattgtaggtaattctctaggacttatttttgctggcattttgatgctataacatgacttggtacaaatttctagacattaatactcattagttattttactaggattttc

SEQ ID NO: 158165 - DNA, 894 bp, Zea Mays
gcctagagtgtctgcgtagagggtgaaaccgtggtagcaccaagcgcccacattatgttcttaatagagtagtatagatatatatgtttatttctaaacactaaggtacgtgtggtctagtggttaaccccaaatttctagagcagggggcgtgggttcgagtgtttgttctgcactatttttgcgcggtgtggtagctgcacgggcaaggtcgggtgctaggaaggcgcactagttggttgtgtgggtgctacgggtccacaggacaatagctgatagagctctgtgggggcattgggtgagggtgaagccgttatagcatcatgcacacacattaggttcttaatagaagatatgtgtggtttggtgattagacccaaatttctagagcaggggggcatgggttcgagtgctcgcgttctgcactattttttgcatggtgtggtagctgtgtgggtggggtcagatgatagacaggcacagtagctggctgcgcgggtgctagggatccacagggcagtagctgagggagcgttgtgcagacgctgggtgtggggcccacatggcacggtgccaaagcacggcacttgggcacgggagaaccagtcgaagcgagtagggcaggcctagagtatcagcgcagaggctgaagacgtgatagcaccaaacgaccacattaggttcttaatagagtaagtatagatatactcttcttaaaaccatctccagccatatctctactatattaaaacaccagtttcaacggtcgttccgcatcatctttttacaaagaaccccttgtatttcttcaaaatcacctgcagtcctagatcatatcccttgtatctatcctatttgttctcacagtagcgttctcgcaggtgtcgctctagc

SEQ ID NO: 158166 - DNA, 551 bp, Zea Mays
gccatcgttctgggcctcgggcaacacagattttgggaagagaacttgaacattattatgccgcctcctagtctcatctgtagtgtgaataacaactcaagaggtgcaacatcaaatgaacgattgaagaaccaaaagaacacagagattaccatctgaagaggtgctcatgtcggttaagttcagaacagactagtgaagtgagcactgaactctgaagtgagcactgaacagagttcagaacagactggtgcaacactggagcagaggcgagcgccggagctgagcagaggcgagcgtgacggagcagatgttcgctagagctgaggaccaccggagcagagggcagggcagcaatggagcagagtgtgagagggggcagaggcggaggcttaggtatttagggtttctaactttctactgtgcggcacagtggcagtagagcttctttctactgtggagatagtgggccgccagcccatataacagaggagtagaggacgcattattttggaggcccaaacctggcacaagctagtcggacatggcac

SEQ ID NO: 158167 - DNA, 747 bp, Zea Mays
cactgacattgcacaaaaccccctggacctagccgaaatctaacccgcgctccctggctggcttaaacagtacccgcggcatagattacggcggcgaggcttactggcggtggtagagctccggcggggtggtcagtgacgtcggggaggtcacgacggtcacgtcggtgtgcgggtcggcgtcggaggtggtcggagctaccctggccacgagcacaggcggcgggggtcgtcggcggctcctgttccggccaaaccacgacggtatagttcaattaaagtgcacgaggagctccacggggtgatgtagaggccatgcgcgcaacgaatttggaaatggtgcaggggcttacccggtccacgtgctccggcggggttccgaactccggcgagcacgatttcgctattccggtggcgcggatcctcggttcaagctcgtgcaggcttcacggcctcccaggggagctatctgagggcttggatcgagcggaggagggcgggaaaggggatggccacggtggttgccctcgggcggctctagcgggtcgcggggaggtcgccggagctatgggcaagctcgggggagttaggcgtggtacggaggaggcaacggggaagacagtcgggctctgggacaggctttatagccgtggcgcgggcgtggtcacgggcggacacgggcgcgtgggggttcgcgcacgggcgtgctctgagcgcgcccctgagtgtcagctcgcgtcgaacacg

SEQ ID NO: 158168 - DNA, 428 bp, Zea Mays
ccaggttcgaagcggctcattctcttgcagccacaaccaattctagagttgtaactagagctatcgatgaccaagggaaggtgattaattatcatggaggcattgctctttccaactcactagattgtaattcctagccaagaatgtcagtgagagaggtttggaagcttgtatgtgctcaatatatggttcaaatggccaagcgagatgttcaacacccggactccatctatttatagcactccccgtaaaactagctgttatggcaaactgccccctttctgcgcactcatggacggtgtgcgccctatggcctgatggtccaccccttactttaatggctactttccatttgaaaagtttttacagctatcagaaaaattgaggtgtggatggtccatcgaccccagccgaacggtccgccgacc

SEQ ID NO: 158169 - DNA, 618 bp, Zea Mays
gtgcaccggcgacgctctgttcgtgttcgtgttcgtgtttcctgctctcgtccggctcctcctggcctgcctgcgacttccggaactgttactgttctgccgtaccagtgcagacattttttttaatgtgtccaaacggatttttgagaacagccttttctctgctccatcgcgtgacatacgtatatctatctatctatctctgcaagagtgggagccatatctgtgcaaaagtagccatgtacaaggatgccttctgcgccatgactccgactactgtgtaaccacccactagctccttctgggacatagccgacatgtcccatccccattgccgtgcttgaactcagaaggaatctactgtgttgccggtgctggggccgaggcatcagcttctgtacctcaaacaccattacgctcgtgtctggtacatgattcgcggttctgcacacaaaatttaaccgagcatcttatccagctactgaatccccggcgtattatttaaccttttctctgctctgggctgtaccgattgtaacaactgtacacccagcacttcgccatactttacagaaaagccagtcaagaaatgcgttattccttttcctacggacgaat

SEQ ID NO: 158170 - DNA, 464 bp, Zea Mays
gtctagagatgtcatgggtggtatgctgacaaattgtagggtctctcttctcgcccctctcccaaggggtgagatccagttgttgttggcgatcgtcgccgctcatgcgcacacacgaatcgtctaccctaagttgcgaatcgttcctaccgtcgtagagagcacgttgttagtgattagcaccagatcgacgccaacacattttttgcgactccgctggggacaactgagattgaatttatcagatcagatccataactaggtttgacctaccacagaacggtcccatatggccggttgaaaggataaccctgatatctcccctagcaacatcatcgagccgactatggagggcatgttaattgaggaatttaagaagatggaggacattaggaaaaagctgctggaagaaatcgacacaaagttcttggctgatttcaaggtcgatcgacactacaagctcg

SEQ ID NO: 158171 - DNA, 587 bp, Zea Mays
taactttcgactttgttttctagatctttgatggtagcttcgtttttctcatcttcaagatcttgttgcatcgtcagcactttacttagtaatatactctgtcaaaacaaccttcgttagaaaacatcttaattcaaaaaacaataaaaagttgagagtttttaccttgaaattagcatagagcaagctaccggcgatatgctgtcgctggtacctgcagaggtccgcttcaatcttcggcaggccaacgctctttgagaaagtcctaacaaccttggcctcggttcaattccgaaggcatcctagtttcccttcattgactccgccaaatagcagagaccctggtttgtatccacaggatatagcatatttctttagctcttctttttcagtttctgataactcttgtccaagtatatcttgaaaattaaagttttcttcttccaaagtgtcttcaatttgctcttttcctttctcaattgtcgtgtccactgcggccgcagcagcttcttcttcagccattttcagaagtatgttatcaatatcaccaagtgtggtttctagattaggatcttcggtggtctcgg

SEQ ID NO: 158172 - DNA, 669 bp, Zea Mays
tgtgaccttgcatgctacttagatcagagagatctttggatttcctaagtcgtcgatgaggatccacagcctgtgctatggcacttcagatcctcctcatcgccctcacgtcggagtagcccctgccactgctcacatcgtcgccctgtttcgacctccattcacagatgggtagtggtgttctctagcagatttcactccagcagcgaagtttctatatgagctcatgaggtgtacgctgctaccgaggatgggctacaaagaggctaccactcatatccagctctagctactcggtgccttgatcactcactctgagtttgacgtggtcgacttccttatttgtgagattgaggatacagttttggatggtcttcggggttggcgtcagctgccttatgcacactatctctgccacatttttgcttagctgatctggcctcctcagttccaggccacccttgaggcctccagactacagtttggtttctaccgccgagctcttgaagacaaaactcttgttccagttaatccactggcaccagatatcagggttgaggacgagaccatcagacagtttgaggatcagggtgcagctgatgatacttcttctgacgatgatgaagatctggggattctaccaccacctcctatgctacctcgttccca

SEQ ID NO: 158173 - DNA, 498 bp, Zea Mays
tgagattgtcattgaggccatgatcaagggacttcgcctaggcccaatgacacaatattttgctacaaagcctccccaaacactggagaagcttttctaaaagatggatgaatacatcagagccaataatggtttccgataaagaagggaggaagcctacaaatattctaagatgaccaggggcttctaaggaaggcttcatccaaggcatgtcaggacaatacacaatcccagtcaaagtgaggacaggaataatcataaccaagggcaccagcacagttcccagtcaacatgggcccaacaaatctccttcagaccgccgaccctaagaggtagaggaggacgtagcttcggagggagattcaactctcaaccaagaagactgttttgcttattctgcggagaggacaaggggcatacaacaagaacctgccaagttacgatacaaaaacagaaggagatagctgaggctgaagcacgtcagaaccaatcgaagca

SEQ ID NO: 158174 - DNA, 666 bp, Zea Mays
ctttaacacggtctgtccacggtgacagcgggtaagacggacagtcaaccgcgttcccgacgatctaagatagcttagctcaatcgagttggtcggggagtatcaggggcacacaataacgctaaaacgagagggcagagggtatgagcggacctgagacgcgctggccacggcgaggtcaaaccgagcgatgttcttgagtgatttgggggaaatgagcgattcgtggtctctggtggacaattgaagacaatcatgggtgctatggatgggtgattacccgatggagctcgcaatgcgctcaatttataatgggcttaggcggtggcaggatatttggatgaagacgcgcggcgaccgtgtttccacggtgtgatatttactgacctcgggcgctatccaactgatctgagcgcgaatcatgacggcgatagcacgaatccacgcgtggctcgtcggcagcgagggggctgaacttggaattctgtctgttactgtaccatgggaagcatttgacagagcgcctgacagaccactttgcagggcttagatcttaggtttttacataataacatgttgaactgccagtagcaaagttgttgttcgatgatcccgctataattttgttataacaatcatagccaaataatgactagatcatgatcg

SEQ ID NO: 158175 - DNA, 557 bp, Zea Mays
ccggatcgtctccggcaacaccctcgggggctgggtcgcagcttgcgctacccatccgagccgaatcatccccggcaacaccctcgggggctgggtgagcgccaacaccatccttgagggccgagttctctgcaacagccacctctaaggctgaaggtccctcagtcacttccatgggagcagggcaatccaagtcagcttcctgaccctcaagaccgcgctccaaggtcgatgaggcgcgggacgctacccgagatgaccccaacccaacgtcgagcacatcaacacaaacatccatcgcgccaccatctgccggctctgataacagatcttctagaaccatgtcttcaagagtttgatcaaagttcgccagagataattcttgcagaccaatgagggaagacaaggcaggagaaggaacaccactactttccccactagctacgtaacgccggctgttcttccgaatcagagggattttgtcctcttcttcatcatcctcatcaacaacacggacagcacacccattggggtcagcgtcagacgggtcacaccca

SEQ ID NO: 158176 - DNA, 844 bp, Zea Mays
gtttgtatatgattgtgtgattaaaggtgttgttgattatgtatactgatgaaaggtgttgttgggttgcattctttttttatagggggtactactgcaccactttcaagtgttacgggcctgggatgtctccaatggtaacctcaactctgacctatgtgcaggcaataccctttgtcaggatacactacttctcgggggagtcgtggatcccgtccctaccacccgctgaagaataagctattgcaagaaccatttagagtcatatatgctactaggagcacccctaaagtcaaaacaagaaagttgttttgtcagacatgaattctgcagtactaattaaatatccacatttgttggccatgatttttaattttaatacaccatccacattatttatcaagggtttcgtctacatatataaattgtatatcgtctttgactttttcatgtgcatagtttttttaccgtgcacgtaaatatagtgtatgcctccctctctttggtgtgcgcgtgccggaggagagccagagcagagatcatagcatgcagtgttgataggtaggccggccgtaggtggcataggcggcggccgccgcaatgtcgatggccggagcggtgcaggccagcccgcccatccgacgatccagtgctcgaccgagatgcagcagcaagatatggttgggtatagctagagcgtagttggccggctaggacaatgctaggcgagagagggaagtggtggtgataggaatgtgagaggagagggattgttatctgttaggtcttatgaatatggaggaccggcaggcagcaaacaaaaaagtgaacactcatcatagct

SEQ ID NO: 158177 - DNA, 604 bp, Zea Mays
taaaaaggattaagcataaaagaaaacaaagaaaacatatataaataaaagaaaaaggggatgagagttacctgggctcagattcctcctttcggcccacctgaaggaaccactcgcgcggcccatcctcaaccaggttcacgcgcagacaggcagaccccagcaaccagacagcctcgctcgtcgccagtccgcgccgtgcacccgttacaccagctggtgggaccctagggacagacacagcgaacaccccgcgcgggttgaatcagtcgcttgcgcgcgggacccaccttgcaggcgcgatcctcttcttcccgtggttctcggcgcagttggttgaccaccagatcccgtgaagctcggcgcacgggggaagtggaggaggaggacgacctggtataaattagtgctctgcttggtcacctttactcccgcaaacgagggccagcacaccgtagccactgcaccgccgccgaaaccataggaaggccccgccgccgccgcggactcgatcgacagccgctggtgaagccttcgggcatatcctgggtgcactctacggagcttgggcgggtcgccgttatagcaccgtgggtaatcagcg

SEQ ID NO: 158178 - DNA, 540 bp, Zea Mays
ctgaaaatgaacccacgtaaatgtgcttttggagtgtcggttggtaagtcctttggattcatcatgcatgaacatggtatatatatagaccctgaccgaattaaatctattaggaatgtggatcttcagcctgtaaggtcgaagtgcagaagttcctcggcaagataaattatttatggaggtttatttctaacctagtcgggaaggttgattccttcacccctatccttcggcttaaaaatgatgccgaattcatctgggggtagaacaacaggaagcgtttgatcacatcagaaaatatttgtcttcggctcccgtgttaaaagcaccacaagtaggagtatcgttcagattgtacattgcagctgaagataaggttattggggctgttctgacgcaagagacctgaggaaaggagcatgtggtgacctacctaagtcggaagctggtggatgctgaaacaaggaacacttttatcgagaagttatgcttatgcctattttatgcatgcaccaagtgtagatgttatttagtgtctag

SEQ ID NO: 158179 - DNA, 711 bp, Zea Mays
cgcaacataacaagacgagtcatcaccaaaccacgtccaggctttgggtacggtgtcgaaaggtccctatcgaataccgacagtacgccatcatgtattgtctcaaagaaacccctgctgacataaggggccaataaaccctattcatagggacctcggtgtcagagtctctacaatgacttgcatactgtaaaggacactatggatacaccatacctagtgtattcctgcgcacgctggcaagtgatgcaggcccatgacgataagcgaagctgtgctatgtgctaccgtgccatgggactaacccgtgggacccaccgcacaccactacaaagatgtcagcggtggactcggtacagggacccatatgatgaatgagcgagaaaatatgccacactaggagaatggctacacatgaccctacggacaacacaacacctggagcaatacatcaagccaaggcaactgatcgacctaataccaagtagagagaaagtcacccctttgaggtcctacccttgaactataaaagggcataccctctttcttcttcacaaatgagcacactagttgtaacacgcctttagcaatactacgatcaacactacaatggagtagagtgcaaacccgaaccagtataaaccccgtttctcagatctctcgttgagtcctagtgattcaccaattggagcgagtccgcgctagaacccc

SEQ ID NO: 158180 - DNA, 400 bp, Zea Mays
ggttgagccaatgtaatatatgatgccctcgttgtgtgtatgtaaccgctatttgtatgataaggctgcgcgccttcgttgatccggtcgcgctcgtgggcgacttctgcacggagagtcttttggaaagtacttcgattttgcgggcctattattccggctgcacccttaggcgacttttgcacggagagtcttttggaaaagacttcgattttgcgcgcctattattccggctgcacccttagacgacttttgcacggagagtattttgggaaagactttgattttgcgcacttgttgtgctagtctggctgcacccttaggcgacttttgcacggagagtcttttgggaaagacttcgatattgcgcacttgttgtgctattctggctgcacccttg

SEQ ID NO: 158181 - DNA, 550 bp, Zea Mays
cctgaggaaagagcatattttgcagatttcaagcaatgactaatcgtggggtttggtgttataaataccctccccccaaaacagcccattcaagacaccaatcaccactagagttgtgcatcattcctaaacatttgtgcaacaccttgaatctattttgagagatctgagcaccccatttgtgtagagatagtcattctagagagtgtgctcttgtgatccgcattcttggtgttgttttgttatgtttcttgctcttgtgtgggtgatactctattgtaaaggctaacaagaggctccaagtttgtgtagtgcctcgtggagactctgtctctcattctactagttctgagggctcaagcttgatcattgggtttgcttgagagggttgagaaagacctagtcctttgggataccttatgggggtgtcggttctttggaaacaaacctcgttaaaacaaattgtgtgtcttattatgttctttacttttcattgcgatgtgttctctcccccatctaagttctcttgttttagttctcatcctgagtc

SEQ ID NO: 158182 - DNA, 382 bp, Zea Mays
tccagaagcttacggggtcattagccgcccttagccgcttcatttcaaggctggctgagagggtgctacccttcttcaagctgttgcggaagtccggcccgttctcttggaccgaagaggcgcaacaagccttccaagagttgaagcagcacctggtgtccctaccaatactggtagctccagaacctggggagccgttgtacctatacatcgtggcggctgcagaagtagtgagcatggtgctggtcgtcgaaaggatgacacaggaaggccaagagccagagggctcgggaccggctacaggggtccgaaccatctagaacctggtctactacgtcagcgaagtcctccatgaggcaaagaccaagtaccttgagacgca

SEQ ID NO: 158183 - DNA, 413 bp, Zea Mays
atcaactttgaagccagattatggttcatttagtgaccaaatgactagaatccttatgtccaaattgaagctggtatataggggaacaactttgatatagtcgacttggtggtttgctaaatgaaaatcgaagtaaaagtaacccaaacttgctctgtcagatagtttcgaagggaaattcagaatgaacaatatctgaagaatatctcaggtgcagtgcacccgttgccagtgaatccgcgcggtgatccacgctcgccagtaagattcatgcgtagggtgaagtggataacaccagagggtaaaagatctcggcatagagatgagctcgagccctgtcaccggtcggttcaccatacccacttgcctgagtagatgtcgctacagagctcgctgttgttctctgtaaacac

SEQ ID NO: 158184 - DNA, 703 bp, Zea Mays
acgagcctccagtacatccatgcgtgtaacaagttcagcaactcgtctatcaagctgctcataggatgtcgaggcagagtcctagtattttttaaaagcttcagtcatcgcgcgcatcatctccttcaattccatttgagagacacactcatcgtcgttaagtttaggccccttgtccttgtccatttgattctttggtcctgtcattgttagcataaaacagagtcaaaaaggcaacaaacaatgtgaaccctacaattatctctcagggtggtggtggaggtggtagtggaatacaaattatgaagcgtcttaccccgctcttacaacgttcttaccagcactacaggtggcaaacggtgattggtgtgactgtccaacgagcgtgggtgtgattgcaaaggagtacctgttctgctcgagagaaaattggagctatgggaaggctgactaaatatatatatgtggcacacaagtcagtaacagatagcaatgctgaataagtgtttcaactactcgtcctagttgctgtcctagaaaatataatataacagttggaccaaagcacaagaaaggaggtacaagtgtctagtgggaatggcaattctgtaaatagggcagatttttcagcactagtagaaatcaaaggcacgtttcaaaaggagtaccatcaaaagagctcaaaatattctgaattgtttac

SEQ ID NO: 158185 - DNA, 407 bp, Zea Mays
cattcgctctgttttcagttcagttttagcctggtaaaataaaagatagccactccaacaaaaagttgctaaaaggtaaaagctgacatattggcctggattgataaaataagtgatagacttccaggttggaaagcatcccttatgaatcttgctggtagagcgacttgggtgaggtttgtgctatctgctatccctattcatgtgttaattgctgtcaaggtgcctaaatggtttatcagagctgttggaatgtgaactccttgatctattgcatagaggactacaatatatagagacaaatccttaaggcaatagtgtagactaggcacaaccatgcccccacctccatctcgaccgtccgattgccggatcaatcccgcctccatcccaaccgtctgattgcc

SEQ ID NO: 158186 - DNA, 435 bp, Zea Mays
ctgcggatgctgaagttgtgcctggtccgagtgcttggcgtaggcggcgaagggcggttgcaaagcgtagagtgagtgaggtggatggcggtcggcttcgtgtgggcagggctggcaagcaggaaatgttgtcctcgccggccgttgcgagtgtaggtgagggggagttgcgaagtctttttgagggtgaggagcttaggataatgttatttaactatagggagatgggaatcattctaaaggttgaaccgatgtgaggtgtggtgccctcgctgtaagtatgttactatagtttgtatgatgaggtcgtgtgccttcgcgcatccggctatgtctatagggacgttgtgcgcttggtcgggcgcatttattatgttggtctggttgcgcctgtagctggtctgtgcgcggatggtttcttggtgtagacttgtg

SEQ ID NO: 158187 - DNA, 348 bp, Zea Mays
ttgctagcatgcacacccttcctctctcactgcctttctcatacagacgtccaggccataattcatcataggccataattcatcatctacctcacgtttcactccctggtgtccatctccttactccttgtcgttcagctttgccaggagccaccgagccggtcctacgccatcgccatcgtggatgttgcctcagccttcagctgccctcgtgtgcccctcctctatatgcttttgctcatcaacatcggcatacacgtcaggctgctcgcctccctatgtctctcatcgttcctgctcgtcaacaccagcgagctcgaccctgcctagatccaatcgcctttgttc

SEQ ID NO: 158188 - DNA, 1002 bp, Zea Mays
atggactcttctttcctaaaaatcttatattttcttttatttaatcgttatctagtcccattattcttctctattctaggctcctccaagggaggagggggtggggggtggggaggatgatgggttccctagagctgtcgcctcccctaccgtgcatgcgacagactgccttggcttaggttctgatcgcccagggccctcctttgggtttggctgagcccaacacttggagccagggattgacccatgatatctctttccacttttcctattagtgccttctcactgaattaccgctcaagtggagatacatcggggggtagaagagctcatgttggtatttcctccagccttatgatgagtcgtcaaaacaccataactgaaaagtggttttgttatgttctatcgaagagaggtgggtgaggtactttagagagtcgatgcaatagtggaggtagaaccctgatgttggggctaaggcgtatcgtcattgttccatgggcgtcgatgatatggcaagggacacaatctcctagtagtaacatttgtatagatcgtgcgagtctattgaagctaggtacctggagtccatcgaagttgttgtgatggtggtggatggtattgatgtcattgcatactgtagattatggttgtcttgatgtagaagacaatgtagttgtctcgcctcttgctacgcagcccgtgcctcccttcccaccgtggagtgtcgaggatgacatgtgttgcaatttaaggctactagaagagctttgatctcatatgtcttcgcgtcaacgtgaagagggatgtcaaagcaggtaccacagtaggtgattgtcatcggtaccaatgaagtccaaagatattgatgttggtgcgacgttcgacgttgcccgccagtcgtgcgaaggttgtgttgatgatgttatgcgtggcgtctattaagttgcatgcaccaatcagtccaatccaaaagcttaagctgttaggagaaggtaagca

SEQ ID NO: 158189 - DNA, 481 bp, Zea Mays
gcgaactccgtcaacgcggagcacgcgcgccacttcgcattgtcctccatatgcatcttgcatgacagtagctaggacgtggatatatgcatgcatatgcatgggcttccttgttccttcctctattctaaacgtgcccccaataacacaattatgttactgcccgctgcttcgacctttcgagtccattgtccatctgatctttcttcttcgtgctagatggcggaccggaggtgtgagtttactaggggttaggtgtagtagcaatttggcagcttgccacgccatgcagcctagtatatctagcttattatctctagctaggctatacgtctacatatctagctatggctagcttgcgattactttgactaaacacccaaatggaatcgttcgtttcgacgcacgctgctagcctcttcgattcccatgcagcagacgcaacgtgataaaattcgatctcatctcatctcgtcgtcgt

SEQ ID NO: 158190 - DNA, 968 bp, Zea Mays
gccaaggcaagatgatcttcccagctacccttccaagaaaaaacacaagcacgtagcatatcttccaaggtttggatagttcgctccgactgaccatcagtctgagggtgaaaagcgacactaagtgagagcttggaacccaaagcactgtgaggactctcctagaatttggatacaaatttggagtctcgatcagaaacaatggacttaggcaccccgtgaagcctgattacttccttcatatacaagggaaccaactctaaagctgaatttgtggtcttcatgggaatgaagtgcgcagacttagtcaagcgatccactaccacccatatagcatccctgcctcgaggagaacgaggtaagcccaccacaaaatccatggtgatatactcccacttccactctagaatttccaatggcttcaataaacctgcaggcctcttatgctcggccttcacgcgctgacatacttcacaggcggccacatacttagaaacatcaaccttcatcctcttccaccagaagttttgcttcaaatctctgtacattttggtttcgccagggtgaacggtgtaaggcgttttatgagcttctctcaagatatccatcttcacctctgacttctgaggcacacaaagatgacccttgaaacgaaccaaatcattctcatcaatggtgaactcacggggtttaccatcgccgaccctctttcgagcttcctgcaacaaacgatcctgctgttgagccacgcacactttctcgagaagggaagattgaatgagcatccgagtctcctctctagcggtgccgacatagcacaaagcggcccccatacggtccagatctacgatcaaaggcaaggccacttttggaaccccggacctgctaagggcatcagccaccacatttgccttccccaggtgataatgaatggatagatcataatcctttatcaatttgagccaccg

SEQ ID NO: 158191 - DNA, 548 bp, Zea Mays
cacagagtttttttgaggaggatggatatccaactccgcatccgtcccagctaaactccccatctcaccatacgacacaccagcaccataatataacctaccaaacccgtgagaatgagtactttccggcccccagaaggttagaaaggaatggccagtcctatgagcctcatagggcatgtattaacgcgccgcaaaacccaaacaaatggggaggaaaacaacataccaacatccaaacaacctcacccatattggaccaaagagccagtggtctcccaccggctgccatcgatatagtaagagaggaaatagctggggcgtttcgagataagctcggagttagtatagtccctgggggcagtcatatgggagaccttatgatagccaatttgaccgtctcccatacccacagggaccagaatacccgaattcgcaaagttttcgggtgaccaaggaaagagcacgcgtgagcacatagaccagttcttagcacaattaggagaataggccgacaccgaagcattctgtgtgcgattatttttatt

SEQ ID NO: 158192 - DNA, 1048 bp, Zea Mays
gcgtcatcaattttaaaataccatgtaagcttttgtggtcctctttcgactcctcttcacgttggcactccatagttgtgtcaaaccttagccagaactcaacgaacgataattttgataaatgaaacgattgaaaaaagaattttcactctctgagtgcgatgtagtcctaatgatgcctgagagaggtatgtccatcaagtatgatgggatccacaattaacgaatgagaaacctagtggagaaccattcattacccatgagctgaaatttagtgacaaaacaataccattgtgtatcaaattcctctatagtttcaaagccccatacacatgattttagtgtgtcccaaaactcttgatcctcccttagagatggactggccctctcaggtaccttctccatgatatgccacatacatagctatcggtgtttagtgtccgaccgcacacccggggtacccttgtggtgcttttggataggacggtgtcgcggatcgtaactcgatggttcgtaccgggggcacgagaaagagagagtcaagcgagtttctgcaggttcgggccgctttgaagagcgtaataccctacttcctgggatggctttgtatgtgagagatgtttacaagtggtgtctaccaagtggttaggtgctaataagatgaaaatgatagggatcccccttggccttatatacacgatcgtagggtgcctcccgcgtacacattgatcacacctttcctgcttatctcctagctaatagcgaacaaacttcgctatcccgaggaaaacccggcgcctctgctccgagctatctccggcgtttgaggatgtcgggtgcgagaaaagcgaacagactcaacgtgatcacgcccaagctgcgagtaatctgggtgtgggcccatcgtactcctgggtcggcccgtttccgccgtttctcttggcccagcccacgacgaggcatcactgaggggcgactggcatgtggcgccgatcagagttttcgctcccgagtggacccgggggatatttgtcccccataagccccc

SEQ ID NO: 158193 - DNA, 668 bp, Zea Mays
ctgaagggttttgccgggtgcacgaactccactatcagacgaaggctagagctgatggtctgcacaagaacttcggatgctacaacttcgcataccgaaaggatactaaagatcctgtgattggttatcgcacaaaatggccaactggctggaccaatgaatggttttatgtgaaagctgacgagaagaaaaggaatatgagtatggtgatgagccccttaaaactgagcttcggcatgacgcgacccttgtgtaacatgtagcttgggtccccctgtcagctggccgaggtggaattcagagttgtggcagagcatattagaactagggacttagtgcaataatacttggcaaataaaacatttccaacttctggagggtgggggatgtcgaagaaaaaagaagaggggggaaaatatgaacttgtacggctccgctaccgcttcaaattccaaaagagttttggcaagccgtgtgccgagtggttggaattgatggagaagaagtgcaacgaaatccttggaaattatacaaagaaggaagatcaactaatgacagctacctttggcacacgggtgatgtatgccctagacttcgagtatcctgattatgaaagacttgatgacaaagccaggggattaaagagaaaaagggttgtaagtgtgtta

SEQ ID NO: 158194 - DNA, 641 bp, Zea Mays
tgctaactctgtgggggccatgcggtatggtctctttgcgatgggcgcagtgccaggaatgagatctatatagaactccactcctctttccggtggcattccgggcaactcttccggaaatacatcctcaaactcttcgattacagacatgttttctgctgccagattaaacatcattggatcgtttgcgggcggctgggcttgacaggatactgcctttccttggtgatcggtgagaagaacagtcttgcttgcgcagctgatgatacctttgtgcttagttagccaatccattcctaggatcacatcaatcccttgggatggcaagatggttaagtatgccaggaacactaccccacttaagagaattctgacttgagagcacctgagtttgcacaggaggtctgatcccggggttcgggtgaccaaagggacagctaggggtgtagaggggatgccatgtttttccacaaacttagcggctataaaagaatgggatgctcccgaatcaaaaagcacagtagcgggagtaaattcaacaaggaactcaccgagcactactcccggggcttgctgggcttcttgagcgtcgacgtagttgactcgggctctgccctggtactgagtcctgctctgctggc

SEQ ID NO: 158195 - DNA, 463 bp, Zea Mays
ctggaacctgccatatgaaacgccctgtgcaaatatttctcgcgcgtgaagttgatggactcaattcgttgctcgccgagggggacttcaccatggagctcgaacgggtggggatcgccgggcggatcggacccctggtcggcggatacctccactagcggggagcaaccattgctccgtctacctcgcgaagggaagatgatggaggatcgttggatgcgccatcaaggattgaggtaagaggattgttatcggccgtggatcagaaatccaaaggctagaatggtttaatgcgggagagagattttggaccgtggatcttggatcctgtggtgcctaccgtgtattgcttcatgatctattctgagcctttggatcgggatcggatggctggcgatcgaagataccccttcgtcgtggcctaattgctaaagagccctctggtttttgaaaaacaaacctg

SEQ ID NO: 158196 - DNA, 525 bp, Zea Mays
aacttcggttcgttcggtgtgggagggggagctggaaagattgaaatttgatggcgtctggagttggaagcttgtggaggagtaggggatccattaaagacttcagttacagctgaacttttgggcattaactccgcaggaaactcgttcatttgtctgcggaatcaaaccatggctctggcagcggaattctgagcacctcaggttcattttttttaaactcttgcacaggaaatagttcgtagcatgattacttggattcggtaaaaaagggggaaaattcctttctgggttgcaagtctattgtgattgactgaatccactgtcattggacctatgggcacttggtcagattacagcgagaatcgtgatgagggtgtcaagacggagtgtattaagcattactcttagatgcttcactcgtggccttctatgcttttgcagcaaagatttttgcctgatgcaggcttttgtcgatctatcagtattggttaccagtccaaatttgtccttcttaaaaccctt

SEQ ID NO: 158197 - DNA, 422 bp, Zea Mays
gttcccggtgaccagagggttcttagcgctattacgtgggtcagcaagcatcgtggagttataaggaaactcaaacgagggtaaggggaggctgaactgaccggaatggggctggccacggtgagcagttccttgcggtggcggaaacttgatttggggggaattggaaattcacgcgtgctggtggatgatcgagggtgggagcgggcgctacagcttcacgacaacatggcgcagctacgggcgaggtcaatttatagagccctcaagcggtggtggccaatttggtcgagcaacgctggcagtcggagatggggaagaacctggcgcggtgagttcgtgtccatcgccgtggcaacctcaccggcgacgatgggacagccgtagcgagtcacggtgtcgcggtggaaagtaaagccacg

SEQ ID NO: 158198 - DNA, 791 bp, Zea Mays
ctcatctgccgccttcaacctcctatactctgcacgctttgggctgtcataaaaggcatatttcccgtacctacacatgtcgcgtatgcgatcgttaatgtacgaatcgacgagctgagatccacaacacatcttctgtcccattagtctcttggactctattgtgcgtatcacctctcctttgtcgtcataactctcccaactgcatttcctcgtctcctacaaaaaaatagtaagtaccgctataacattacagctggtgcaaaaaataaataaatacgaacctcatcgtaatcgaccatatgtccacaaaaatatccaacaccaagctcggaaggaactaaaccatactggatcaaacttcaactcttccgcccactgattttttttcttttcctttacctctggctctggctaatgggacaaaggaccatacaaccactctctaaaacgacacttacgccacccgtatggctgcaggagaataaattagtaatctattgtaaaaaataactagtttatacatttagcgcatcgatgggctcacataatcaatgttcggacacacgaactgcttctcatggtcttcgtcgatgacagcacggtctccacaatcgcatcgaggcggtgagtccatccgtctttctattgctacctccttctccacatccgtcgttggtggaggattcgggggtggaggtacccaacgcttaaaacgctcatgactagtccttccacacaaccaattagcgaaaagaagatatcgagggtcaaatttattaggaccatcg

SEQ ID NO: 158199 - DNA, 827 bp, Zea Mays
acagagaggaaaacaaagagaaagagatgcgggtgcagggagccttggaatctgctgcgcgccatgctcatctccctatgaatccgcctggaattcttggtcacgggtgaatgctggggggctatgggagctcgcgcactggcagggtaaacccggagtcatctcgtggacaagaattgttcatcggtgctgcgtcaccatcgccatggcgctccgcatcgacgaccgggatactggtgcccgaacctccggggagaacgcctccgtttggctcgccatgccgcgacaaatacgtatgtggcttcgcctggctggaatcgcgctctgcgcttccggaaccgtacgccggtaatcacccttccgcctgggtccgtcgaccggcctcaccaccgcaacagcgccggtaagcatccctttcctgtgttcgccatggcctgttcctcgtgttgcgggcattggattggtgtttggatcacgacaggtgtggcaatgccaccctccggcgagacctccgccgcgaccaggactgcgctgccgctctgggttctcggttggggaagaagtctcggggtcgttggatctcgtccggacggcggtgattagatgaggagataccctttcggcgatttgatccgaaccgttgggcagatcggatggcccatattggatcacgttacattaaatatcgaccgttgatccaggatctggcggccagtagtacgtaccggttcggagccaggacttctaatctgcatccttgatttgtgatctgacggctgcagatggcccataccccttcgccatgtcggttttactaaagtgcccct

SEQ ID NO: 158200 - DNA, 380 bp, Zea Mays
cacatgtggctgtaacacatttacaaggagacaaatcatgagcccaaccccgagagtgtggtgggaaagtaaaattgtaattttcacacataccataggccatcgacctttatcctaacgtacgtgagatccaaacgcactggatctaacagagacaaagaacgcatggaaacacacaggctgcgacaactgtgctagcctgacatggggcgagggagattcaacctgggacaccaagagagggatgctgaggatctcatggccaccgacgccggagagctgtctagctattggggaggagctgccacgaccgaggagctgcgttgtggcaagggatgtgagctaccactggatcgtcgaaaaggaggacgttagggaga

SEQ ID NO: 158201 - DNA, 619 bp, Zea Mays
gcagttgatgggcacaattggatgttccccgttgcttttggattcttcgagtctgaaacggaggacaattggaaatggttcatgcagcagttacggaaggccattggagatcttcctatactagcagtttgttctgatgcttgcaaaggtttgaccaacgcaatgagggatgttttcccaatgcagagaagagagagtgtttcaggcatctaatgaacaactttgtcaaacaatttcctggttcggaatatatgtaccctgctgctagggcgtacagcaaagaagtttatgatatgtacattgcaaacgtgaaacagaaccctgccatcgctgattggttggataagtttcatagtttattgtggtaccgcagtgcttttaaccctagcatcaaatgtgactatgtgacgaataacattgcggaggtcttcaacaactggattaaggactacaaggaccttccagtatgcgaccttgctgacaaaataaggttgatgatcatgcaacttttcataagagaaggcgaattggatgaggttagaaggaaagatactaccctccatcatagcccaactcaatgcacgtactcgagggctcggacacctggaagtcataaaag

SEQ ID NO: 158202 - DNA, 816 bp, Zea Mays
tttcaatggttttgtcatttgccacctcatcctccgcattgctaatgatgtttggggtatggggggtgatactcacaagttgccagcatcggcgtgcgtagttacaccttaggaacaagtggctaacaatttcttctctttgcaagatacaatttttataggtgtatgattccaattcgatactccttctgagcagtgatctagtatttagcatgtcctttaaaagtagccaaaagaagaccttgtgctttggttggcatttcgatttccatagccagcgatatatcggatagaccgtttcatggccaatcatgtgcttataggctttctgcgacgagtactgctgcgatccccacatgtactaccaacggtctagagtatttgtgatctggtgtttctattgggcctccccaagcagcataagttgttgaaatgcttccgcggacatgaggatgtggaatatctctacggggtgtcctagagtttttgcctggaacatggttatatgtttatttactacaaacaacattagtttagggtacgtttgtgcatgcacctggctatcccatctatcaattcatagctgaatggattgcccgtcctccacatcgacttaggcaatctccttgaaagtgttgagtgtttttaggatacccttcaaccagaacgacccaacccttttggaaaacggcagcatctcatccttataatggttgtcctagacaatattcacccacaggatatccatcctgttaaacgttttgtgaaggtttttcatgaggagcgcttcattttgctttggcaggtcaagcagac

SEQ ID NO: 158203 - DNA, 917 bp, Zea Mays
agggaaatacatttgttgtaattagtgttatgataacaaaattagtattggtgcatatttattagtgtataaatgttattatttttagataatatagatgtagttagttaattgttctttaccatctaaaaaatggtttatcctatttatcctatcacatagcaatatggattgttggaaatggaaatcctaaccctacttaggacggacacttgtatatatatagtgaactatacatggggttgggtcaaagaccattacattaataacacatattctacatcctctgcatttgtaattctagccattacaaatgttagattggaatgaaactttgagaatatcatggatggaaggcccttggtgaagatatcaacgaggtggtcgggatgtggaggatgcgaacatcacttatagtgacatgctcgcggacaaagtggaggttgatttctacgtgcttcatgtgctggtgctccatgagattggtgttgagggctatgaatctgtaagaaaagctgatgaagcgagaatgccttgaccacattgttggttacaacgtgatactcggcctcaactccacagcgagagacaagctgtagtttcgaggactaagagactaggttggtgcctaagaacacgacatatccgaaggtggacttgcgcatgtcttagcaactagcctaattagtgtcggtgtaaacgactagctcagaggttggatagggccgaagaagatggtcatgttcgaggatgtcgtagtgttagcgaagaatcctctttgcagcggtgaggtgtgactttcgcggggtatgcatgtaaaggcacgaacataggtgatgtcgggtgggtgaaggtgaggtactggatagccctagcgaggctttggtaggttgtcacgtcgtcggccaggacgccat

SEQ ID NO: 158204 - DNA, 527 bp, Zea Mays
ggtgaactcatacaacccatacttggtaatgaatgtcgtcttcggaatgtctgaaggtcgaatcctgagctgatgataacctgacctcagatctatctttgaaaacacattggctcctctcagctggtcgaacagatcttctatttcgggcaaggggtacttgttcttgatcgttacctcattcagagctcgataatcgatgcacatctttctagtaccatcgttcttctccatgaataggacaggggcggcccaaggtgaggtgcttggctggatgtaacctttctttgatagctcatcgatctgcttcttgagttcaactaactctggtccagatactctgtaagctctcttaaagatggggcggttccaggaagaagctctatggcaaactcaacctttcgctccggtggcatgcctggtaagtcctttgggaacacatctaggaactcggacacaaccttgataatctcaagtggatctgcttcactgctatcaatagccatctgataacaacttcctttctt

SEQ ID NO: 158205 - DNA, 659 bp, Zea Mays
agggagggaagcagtgctcccgactttgcccttctcctccctccacctccctaaactcgcgaccaccccagttcggccgtggtgaaaacgacgccggagagatcaagatccgcgccaccatagaaattcgtgggttggtaacagttcggggttctctggtgatcggtgaagtattgccggtgctggtaacggaggttgcggcttgaaacaccacggcgcgctggtggaatttcactaattcctcgtcggtgtcgatcggcggaaccgcgtccaccgtcatcgctgcttgtcctcaacctcatcgttcccgtggtaagttggccatggctcagttccatttctggttcgcaacgcatagcgagatttagatcgggttggggggcagtagggctggaaatcgacttcatcggtggcctctctgccgtgtggggcaagcagcgccgcccaggtcgttgtgggtgtaggtgagggggtcctggccatcggatgcaccaggaacgactgcgattagaacattgaaataccccttcgctagatagatctggcccattggattgtaatcggatgacttagatcagatcgggatgaggacgcgcttcatccgttgatcatcgatctaacggccttgggcgctcgctgagtcacttaaacctaaatct

SEQ ID NO: 158206 - DNA, 791 bp, Zea Mays
acaagtcatttagagtaagcaaaacttggtccctaaagaaatgggtaaaggctcaacacgaccaagcaagaaaagctagccctcaataagaggcaaaagcagggttcaacaccaccagctagaagccaaaatctcaacggagcacaaaaggctttattagagcataaaaaaacaattcagagcataagatcagcacaaaaggtaaaatcaaagctagttcctcctgaaggaggcaaacagctcaacacaactagcaatagctccaaataacacatctcgccctcttgaatgaggggaagcccgaaagacaaaattccccccctagatagaggaaacaggaaatctcaaaatctctcccccttgttgacaagtgaacttatcaagcacaaacaggggtaaaaagaaaaaactctcccttgacaagagaacctcccctgagaaaaaaatagaaatgcaacaaagagtatgaaatagagaaaatgcatgagcttcaggagtatgccagttagagtgtagaaaatgctctaagtgctgttgtgctaaatgtgcagcaataaatgcacgtgctagcagatgctcaaactaggcatatgcacaagatatgtgaagtgtaagtattttgattcagttttaagcatttcacagaggtgttcaccacaaagacaacactaagcatatagtaagcaggaaataaactaagtgccagtcacaagtgaacaaggtgacctaccccaaacagtgatcactcatcaagctagaaacatatctgaaatagatatcatttgaaattt

SEQ ID NO: 158207 - DNA, 621 bp, Zea Mays
ataaaaccaacacttaaaccaagtttgagggtgtactttgtctggtttttatagtttgagggacctagatacctaacttcatagttcaaggttgaaaatcgaatgccagtttgtaaaatggactttgctctttattcttcacctctgaatatccacattgccaatgtcttctgtcttcatcgcagagagcagtcaattgattccaaagacatgtcttctacttcactttcttttccttttcctagtaaggtttttagttagcttcaacaagttttgtcccgatatatattgttcagccttgatacattaattttggtatctatgccctgaacttctaatgtcttgtttatttccctagttagtagcttgggtaggtttatgatccagcgcagaggcggatctacgatccagacgttcggtattcaaaatcacattaggtgctcaaaattttgaagaataaagaaaattttcccttgtcaaaaatgtacgtatagtgtatggaaattgtttttgtgtgaatcatgggtatttgacataatgcccattatccttctgtgcctgcccctgatccagcgtatgatggcaacgatgagtaaatagttctaacttttatgaatcatg

SEQ ID NO: 158208 - DNA, 904 bp, Zea Mays
agcggaacaagccactgttgagaggaatgatctgtactggaaattggaggaaacaggacgagaagtgtctcagttgaggttggagcagatgggaagagagttgggcgaaacatcgacctctactcaagaacatggtggagatgttcgaaggaatcaacaacagtctcgtggtgatcaggatcgtggtcgtgggaaccaacaacgaggcatgagaggtgatcctcgtcagtctgctgattcaggtaatcaagcaatacccaaactaccctttccaaaattcttggagggcgatcctgttgtatggttggactagtgcagagagtatttcacaatctaccgtgtgcctgagtctatctgggtttctgtggcctctgaatttggaaggcataacacctcagtggtgaaagagttacaaattgagaaacggaattggaggttggcaggagtttgaggagtttgagggggcagtaacagctaagtttggggctaccgcatatccaaaggattaaggagattgatgtcgctcaaacaaactgaaagtcttgctgcctatattttagagtttgagcaagccagatatggtgtcacagtttacaacccacagtttgatgaaacatattttgtgacccaatttgttaggggcctcaaatttgaaatataaagtgtggtagaggtacaactgccttcaacagtggatagagccattctattggcccaaacccaacaagaggtgctagagaggggtaagatgaaggtaacaaggccatatgtgggaggcagaatgttgaatactggagttagaggtgaaggaagggctcaaacaggaggtgctgatttatccaaagaaagacaaatgagggagtttagaaaactaaatgggttgtgctatgcttgtggagataag

SEQ ID NO: 158209 - DNA, 479 bp, Zea Mays
gtgatctgtccctctcttttggccctgtttattaatactgccagcatgtcagcaacaatattaaacaaggtaggagagagggggtccccttgtcttaatcctttcttagtttggaagttattacccacctggtcatttatcttaatgttaacatgacctttctgggtaaaagccttgacccaatcgcaccatttttccgaaaagcctttcatgtttaaagtttgtttcacaaaggaccatcgaactttgtcgtatgccttttcgaaatcaaccttaaacaccaccccactctgctttttccggtgcatctcatgaagagtctcctaatgggctctaagatggtacatgtgcgaacacaccaaaagacggtgctgcgacaccttgtcagattctgtaatggtaacttatttcgatgatttttgttggtttatgatgagttttgacgtccaaccaaagctattggttagcttatcaaactg

SEQ ID NO: 158210 - DNA, 466 bp, Zea Mays
tgatatggctatgatgacgaagctaggctacttcagagaagccgacaaggggttgattcgctttggtggggaagaaactatcccgaaaccagaaaatgatgaggtggtggtctttaagagcttcttcaaagcagggctgagatttcctctacacgggatgattggagatgtcttggaaaattttgagatttaccttcatcagctgacccctaacgccattgttacgctcagcgtgtacatttgggctctccgaagtcaaggggtggagccgctcgccgaagccttctgccgagtacatgaacttcattatcagacgaaggctagggaagatggactgcatgagaacttcggctgctacaattttgcttatcgcaaagacatgaagacaccagtggtcagctatcgctctaaatggccgaccggctggaaatctgaatggttttatgttaagattgatgagaaaaag

SEQ ID NO: 158211 - DNA, 375 bp, Zea Mays
tagccttcgtctcgtataaaagctcgtgcatactacagaagcacttcgcgctcggctccagcccctggcttcttacaacccagacaaacatccccatcctaattatagctttgggggtaatctgatgaagaaaaatctgaaaaatctttaatacctcaaccacaaatttgctcagtgggaaccggagacctgctttcaggaagcttcgataaataaccacttcgttttcctcaggagcaggggcagtgttgtctcctccaactctgacaatagacatgtcgcgaaaatatcaccccctcatggcgtcaatatggctctgtttgatagtcgactttccgaaaatagtatgacttcgccgccagggccgatcctcag

SEQ ID NO: 158212 - DNA, 507 bp, Zea Mays
cctaaagcactcatgtgcatatgttatcagattgttcttcaatgttttgcaaggactgactcatgaacgctactcgcctccaataattattgggctgtgataacgctcatataagacttctaatcgatcaacaagacatttatctatccaaagggaatggaatgcaataattgaccaagcaaggcatcgatcttatcatgcacataaaagcatcacaagcatatttacgccacctatcggttaacttgatcgacacactacacatgttcttcgcccttcaaaatttatctcacaaccgaatttatcccacctgctaatgacaccgacaagacctactgatatgttattcacatcacgagcacagttacacaccgcagactagtttctaacatgattttcacataactcgtaattcaactacttgctaacaataaatcacgcacgacaactaccacatcaaatgctttatgtatttggaacaccgcttagcgtaccactagtaccccg

SEQ ID NO: 158213 - DNA, 419 bp, Zea Mays
ggggaaccttgccatgctatagaagataataatcaatagagacggattatactaccttgccatactatagaagataataatcaatagagacggattatactacgaattgttagagcaacatggggataaaaaagaggaacctatttagttaactctcctaacaattgtccggcatacctgttcatcatttaaataatctaacacggagtgtcctttcttgagtgacgcgccaaacggtgtacttctgttgtttcttgagtgacataaaatggtgtacttctattacctaaggcataattctaatttataaagagaaggtaatacagccacaaattagtaacatctaagcaaatacagcactgcttctggaaattttatcatctatattcagtaagctaaacccagccactattaagttt

SEQ ID NO: 158214 - DNA, 1723 bp, Zea Mays
ttaagtaaacaattttaatctatgtttaatgtctaaacagagttactaggtgataaataatattaaaacaaaattaacgccaccagaatggattaaaaaggagctaagataaattttctatgaattatataaattctggaattatttttatacctgaaaattcatttcttaaataaattcctgattaattctctgtttgggttgcgtgtgcaaaaacaggagagtgtagggacttcagcgcaagaaataatagactcaggctatagtcatagtggactgcgggtttatttgtgaagagggaaggggctcatatgcaaaagaccatggccgaaagggtaaggactgctctgggtcgccagattagaagtctacggttcagattggactataccattttatgaatccatatgcatccatggccataggatcaaggatccacggcccgaaactttcgtaaatcgaagggggggtacgcgattctaatctcgaccgtcaacacagggatcaacgacggggatcggattcagtcaaaccactacccgacccaatccgaaccgtcactagagaatccaacggtccgcgccccatcttctaatctcggccgcatagctagatccaacggccgcgagcacgtcaccaacctgccaccagccgtccggacgaccgacggcgagcagccgcacggtggcgccatggctggagttcctaggcccccgataccacaccctaagcactaaacaaagagcgctacacgatgccctacttgcgacgatttcagcgagcggtcacgtaccccacaatgtgtcgccgacgagcttgaccacggtgagcggcggatctgcgaaatcagttgggcaccggcgtgaaattaggccgccatcccgcgcccgatgcaccgacccacaatctccaaggtttctgctgcgcaaacgagtcccccccccccccccgtgatggccgaagcacagcgcggcttggaaggtggacggcagaacctacggcagtggcctcacccctattgccgcggcagccatccgaccatagtgcacaattttcttctcgccgagatggaggatgtgcagatggggagaggaggggttcacggtttatatggccgctagcgcccaaagtccgcgcaggagcagggaacgaccgccgagatctccgccgcacttgttagccgagcgcggaatgcggggaggggatgaatctgtccggtggagcccacccccgaagccgcaatgcgcgcggcgagtgactcagggtagcggcctaggtggaggtcgtttctgacggtgacccgcgccagcgccgcaaagacaacggggaatagcttccaccgagctcgcgctccgtggaagatggaggactgcggagggggccaacgcgtcagcgaccgagttgactcgtgtgcgtatgagaggtgaccgaccatgtgggcccgcgcgtcattggtgcagtggcatactgcgtgaggttgggccgcgtggagatcacagatcaagcgggcccgcgtgtaggcgaccggagcggaagcaagcgagcgggtgggctggcgcggtggaaaagtagtattgggccgaggcgcgcgagaattcggcccaaggtgagttttcccctttttcctttttctttattgtttctattttcctttcttatttcaatttcaaatcaaaccaagttttaaattctaaatttcaaatttatgcacaagaaaaacttc

SEQ ID NO: 158215 - DNA, 826 bp, Zea Mays
cctacatccagaggggctctttaacaaaagtgccagcgcgaaggggtatggaaagacttcggccgttggatcctgatctgcggtcaggattagatcgagacccagataaacagatatacgctcctagctgtcggatcgagcacgtgcggtcaagatttaaaataacaaggagcaacctagcgcgttggatcaagatcgtgtggcacagaccaggtcccaccgaaccggtatccaacttctaatcgcggtcgtcgcgcaacagatgaacggcgcctggtccatcttctacccccggcgcgatagagcggtggcgcggcatagaccgcggtggcgccctcgccggagtcggcgaatcggtggcctaccaacctaaaccgagcgaaactacaccgagggaaaggggagagggaggcgaactcgctagatcggtcataccagcctttcgtcgcgaggacgagtccgacgacatgatggcgtggctccctggtccagttcgacaccgacgagcaattcagtgctccagggacgaagacaagcccgggagacccttgcgccggcttcaagggatcacggaggtgaacccgcacgctcaacggagggcaaatcgacggcgagcgacacttggcgcgcggtggactgagttctaccacggcggtggcgcttttgagttctagagaacgggagacggtcaagggtgtcggggtgacggaaacgcgatcattaaaacatgtaggagcgcggccgttgcgcaactccgaggtccccggagagctccccgcgcgaggtaggcgcggtccgcgcggcgaggatctcgcggcttcgttac

SEQ ID NO: 158216 - DNA, 888 bp, Zea Mays
cccatcttgttacatgccaattcactatccttaggacctagatcctttgtgagactattagctaactgattacgagacttgacatatttcaacttcaaagccccgttgtcaatcttctccttgatgaagaatctatcaatctccacatgtttcatacggtcaaactggactgaattatttgctatattgagtgcagcaacattatcacaatgaagtaacattgtctcatctttcaacacccgaagctctttcagaagacctttcaaccacatcatctcacatagagctaaagccattgctctatgttcggcctcagcagtagaccgagaaaccacaacttgtttcttgcttctccacgaaacaaggttacctcccacaaacacacaatatccagatgtggatctccgatcgtctctactacttgcccaatcagcgtcacaatagccctccagattcagatgttgatttgatctaaaccacaaccctttgctaggggttcccttcaggtacctcatgatttgattgaccaactccatatgtcttgttctaggatcatgcatatacctactcaccacactcactacataagcaatatccggtcttgtatgacaaagatatatcaaccgacccactatcctctgatatctttctcgattcaccgggtcacctgactcggcacaagtttggtgattcttatcaatgggtgagccacttggacgacacccaagcattcctgtctctgtcaacagatcaagaacatacttcctttgagagagaatgattcctctagatgatctagcgatctcaatcccaagaaagtaacgaagtagtcctagatcctttacctcaaaggctctacttagctttttcttcaatttcttaatctcc

SEQ ID NO: 158217 - DNA, 343 bp, Zea Mays
taagttttttctagacaattctaaagatttaatcaggtttaaattttcaactgcatcattaaatgaagaacctaattcaacacctaatttgttagccacatcaaagagaacatcattatcagtattcaagaccgagaaaggattacaggacatacctttattgatgaaagcatctttcgccatagctcttgcagcagccttatcagcaatttttacttcctcagacgattccaatctgctactccttctcacaccttcagaagcttcaatttccataggaccacactttttaccaccagcaatcttgctagcatcctcaacaatactcatatgtaatttcttt

SEQ ID NO: 158218 - DNA, 282 bp, Zea Mays
tagtgttcttaatcacttttatgctttttcttagtgatgaaatgaagtttttaatctttgcacatgtctttcccagacagagacaacataatcctacacctgtttcattattggagtaatgcggtgctacatgtatggttctcttcttaaagctgtaagactaaggatcaccttttcctcttcgaacaaggtgacaagtcattatgagtttatcacagtgatttgcttgttttctgcacaacacatgtccatacatatgttatagttgcactatttttaccc

SEQ ID NO: 158219 - DNA, 281 bp, Zea Mays
gagatagcatcgttcacgggcctgtactttgcagaggaacacaatgtcaatgcccatacgttgcggtatcatgtcgacgagccccctattagtgatattgaaatttttcaatggaggggcaaaactgtaggacccagcacaacatactgtttcaccaacgacgaatggaagactgctttactctacatgtataacaacatggaagagatgagccagtttctcctgtaagtgtaaactttattttagtcattggcgctagaatttttgttgtgatactaaaa

SEQ ID NO: 158220 - DNA, 1003 bp, Zea Mays
aaaaaaaatagggacggagtactatgttactagaaatatcctgttgccatgtgccatcgcttgttaatcaagcccttgtatgaaaataattttacactaggtaaaattagagactggattgtttgaaaacatgaacaaacaatgttctgctctttatttatattcacattagaactttcgaggctgcaaacagtcatcattttgtagtaattttttaaaatgtacaatgtgaacactttgggtggaatagttaatttgtacattgcattttgggtttctttcatcatttgatcattatgttttcatactgtcggtgtttcgagtaagcaccggctagtaaacttgtgatgtgcgttttgggactcggatggtgtgcaagttggacacaagccactctagtcttctgtggcttgtgctaccggcactagattgctcgtattaggggttacaagttgaacgagtgaagaaagagttcccaagtctctggttcgttgtgcgtgtagtgtgtgttctcgatgtcctttttgtcggtccccactcctcccttttataccttaatggtagggctagttacaattgttcccttcccgatggagtaccacgaagaaaaataaaaaaaggaaggataggaagtaggaacgtcctatgtcgactagtgacgccttctttccccgtcgtttgttagtattgtagtttcatgcttttcgactcgtcctagtcaaggcgaccccatacgcgtgcgtgcgggtgcagtggttcgtgtcgtagtatgtccttggttctgatggggtccctactggagttggcagcacactgtcgttcttagtggaggtgcatgttccggtgtggcctgacacgatggagggttcgctcataccctccatttccaccgacccccataccccatgattagtctattgtgtcatttcccattcctgtacgagggacgtgggagtctacaattgattcagacataatgagtatgggggttagatgaaacgag

SEQ ID NO: 158221 - DNA, 548 bp, Zea Mays
acttgtggaactgtacaattgccctttttcaccggtctgtagtccaaaatttcagaggcagcacaacctgagcagactgaggcaaatccaaacgtatgcaacttctcccacacgctccacaatcttgtaaggccaaaaacaatagaaggcaagcattggacatggtcgagtgaccacggtatgttgcgcagacagttggagtttgagcaacaccatgtcacccacttgaaactggcgttcagttcggtgacgatcatccttcaacttcattctgttttgagttgttgccaactgctcccttaacattgatgtgaaccgagccccttccaaatgttctccaactgctgagtcatacaagactgaaatcagcttagttctaagtgctgaggtgctacccacccagatttggtgatgtatccaaataacaccctgttgaactgagaaacttgttgcatcttgactgtgaataactagtttttgcaaaaaaaaatctgagcagcagaaactgtcacataggaattatgtacttccatgatccaaattagttg

SEQ ID NO: 158222 - DNA, 1062 bp, Zea Mays
gactatacctatgcatgaagattctagtccccaaggtataataaccgtgtatggggaccagcaagtcgcccataacatcgagagagactttgttcccagccagcgctaagtacatcgtctcaccaccaaaggcaaggaccctagaagcccttgcccaaaaaaataagatccagttagggcccagatatagagtaatgaaggggacaaggatgtccccctagatgttacagtccccaatcaaacagtcctaatcaatgaagacctaagcaaagaggaagaagacaagatgttgtcctgtttgaatcgcaaaaaggatgtatttgcatggtcagttctagacctcatcggcattagtcgcacgatcatcaaacacaatctaagcaccaactcaacagtacagcccaaaaatcaaaactatgcaaaatgtccgatgagaagatggaagcagcgaaagtcgaggtccaccgcctgcttgaagcaaagttcatcgagcgaatcgactacccaacctggctcgccaatgtcataatggcgaagcggaagaatggaaaatagagattgtgtataaacttcattagtctcaacaaggcctgtccaaaggacaacttccccttactaaggatagaaaagattgtcgagtcaacgacaggatgcgaagtaatgtctctactaaactgcttctcaggataccatcaaattcacatgaaataggaagacaaagcaaagacaagttgcattacttgcttcaaaacatattgctttgtgcgcatgcctgaaggcctaaaaaatgttggctccacattttcaagactcaccaaaaccacccttgagaactagatgggccgcaacatagtcaattacgtcgacgacatagttatcccaagcaaaaacaaagaagaccacctcttggaccttgcagaaacattcaccaacatgcgcgaagctatctcaatctagataaacacatattcgacgtccgtcaaggcaggatactagggtatcttctatcacacagaggcatagaagcgacccagccaaaataaaagcaatattgaacacgac

SEQ ID NO: 158223 - DNA, 2135 bp, Zea Mays
tccaccacatgtggagaatatttgaaaattgaaaataagacacatacaaaccttaaatattgatgctaaagcttccactataccaatggatctaaattgatcaacaaagtcatctgatacagacagtaacatcttgtgtgcccagtccataaaactgaaaatgaagagaagcaggagaactcgaaacatttcacaatgcaacattgaatggaagtacaatgaaaggatcaagtgtgtaatattgatgttcaataattaaaaaaataaattgttgttttagtgataatggtaatccttcagtgataggatatgtttgaaggcacaagttactacagcaatttgaaacataaatgaatgtgatgtgagttgtacaaaataattgtaagaatcacctgctgaaagcttttgccatgtcaggacgagtcaagagccttgcaagcaataatcctgacatccttctcattggaccagaactggagagataatccttacagatgtccagtattcttgtcaccagtggaacgacctcaggcccatcgacgttatcagcagtagcaatgcttgtatccacagtggatatgtcaaatgggatcaggaccagtatataaagccacaatagaacaacacatttagtctccatttctcctgtgctctcttgcctaagagcagtagctgaactcattgtatgacacttctcaagaagagcaactgcgagctcaagatctgaaacctggtgagggaagaatctgatgacactcttgtacccgcacactgtgacaagggtgtagatgatgatacacagaggcttgataatgtcaagaagttcatcagtactagcaccaagttccattgtctttgaccgaaccaacgacataagtggtgaaacaatgttctcaaggtatggctctaatagttgaccctcttcttgatatttgtccatctattgctcaacagaaaagataaaatttatcatgcaagctcttaagcatgatagttttggcataaagtcatttcaatcgttcacttaaacaattgagttcaaaattgatgctctacaaacattaacactggatatatgaaaatgatatgtacagatttttcttagaagtactatcataattgaaagtagtggccaaagttgtgctcaggagaccatgtggatgtctaatatatcattcatctgtgagccaaaaaaagtaaattaatccccctgttccaaattgtgaagtgatttggttttgttctaagtcaaacatcaattgttttcctaatgttaatagttttcacatcatgtggacctttgctcttgcctttatctatagaggtggtaatcgatcattaatcataactctccccaaaaccattttatttacccaggaaagcagaatgtaattcctaaataacatgtcattctaggacctaggattgatttatgtaggtcatttgtatctcagatgagcttttgctagcctatattagcaataaaatgtgcattcacagactaacctcaaccacctcgaccaaacagtttaaaatgcctcctagacgactaaaagattgcaagaaattgtgcatgatgtattcgaatttggctgttgtgcatttaaatcagacgctaaagcagattacatcctttaaaataaacaaacaaaagtcaatgttgctctcagagctacaccctcttctctcagagatctaaggttcagcggcaggtagcatttgaaaatagggatagaagagtgcttacgatagagcggatcctatggacatcggcggattcggcaacgccgccgccggcgacgacacggtggaggatcgctgagaccagctcccactcctggaggaagtacctgcgcagaacgacctccttggagtcgtgctcatcgtcaccaacagcggtaggatcaacggaggcttcagcatcaggaggggatctcatgggctcggatgggacgggcgtggcggcattagacgcccaagcagcggcggcggcggcggcttcctccatagccggagctcggggcgggtgtccgactggtggtagtgtgcgcggctgtgctactgtacgtctgtacctatgcgatcgagtgccttctgctcgtgttctcagtttccgtgtttgctgtcacaaggcg

SEQ ID NO: 158224 - DNA, 725 bp, Zea Mays
aaattttcgtacggtctaaacgtaaatttttttcaaaaaagatcaaaatgcaaaaaaatcggttttcccccagacctacagctctcccaaagacatcctaatgctccagcgcgtcgattataacagcgattgttgcttcaaaaatcatagcgcacgccccctaactctccgtactgtattaacagaaaataaaggctcctgaacagacggtggaaaacaatcatagcgcacgccatctactgctaatcggtgatcataccgcacaggggtcaggaggccacgatgggtgaagtccctggtctacttcgcaactgcgccagcagactaccaacctttcgttgctctctttctcttggcttggcggcaagaagagtctgtcaatagttgcttcggctgctcacacaaacctttgcttgccatggctagttgctttgaccacgagcatctgtcttctctttttgacgtcaaccgtgagcatctgcctgattgtctggtttacttaccgctgtcagtgtcaccagatcgccatacctttccagcggacaggaacagttggtgcaaacctttccggacgagctgccgatgtgctgcacctgcactgcttcgccataaaaagcagccaccctgccaatcttctcctggcgcacgccacacggccacagcgatttctgctccctccaccaccctaagaaaggagtccagttctggtcgattttaggagtaca

SEQ ID NO: 158225 - DNA, 581 bp, Zea Mays
tcgatcctggcagcaagcaccaccgccacctcgccagcagagaccaggggctcatcactgataacagaaaccatgactgcattagcgagatcctcctcgccactagccacctgatcgctccagtcaatgatacaaggaggaggcacatctccacgagcaggctccgaagcaggctctggttgctgaaccaccaccatagcagggtcggactgaccatcacccatggccccgccgataccgcggacgccggcgacgacgagaccgaccctccatgccgccgcgatccatggcagagagccccccatcgccctgcgtcgcaccggcactacctgccatatccgccggagtagaccgtcgcggaagggcagcactagagacaggcacagttggagagatacgccgccacatatccgccggagaagaccgtcgcggatgggcagcactagagacagccaccgctggagagatacgccgccacatagaaacgcgagccggagcggtactggcagcagggctcacgctgaaggccgcccgcgggcacaccgaagaacgatggccaagggacttgcagcggaagcagc

SEQ ID NO: 158226 - DNA, 436 bp, Zea Mays
taattttgagaagacatgcggtggccggagagaggggagatcactggcgcaaggaattcgtggcttttaccgtggcaagttcttagacgacagatgggctatgtattgtgatcaattgcgacgtggtaagattactaacggtgtggcatgactgcgaggaatggcggtacgacggtgatggtcgcgcggccacgtcaccggtaagtggatgagcgacagagcgtccactatgctccaagttcatccacgacgaggtctttttacccagggatcgttatctgcgtttaacggggcgtgaatcgtggcgcctgtgcgaatctgagcgcaaggtcaccggcggcgaggtgcactacacctactgatctttgtcaggcactgtaccattgggactccattcagagcgcctgatagagctaaatgaagcgccttattctcc

SEQ ID NO: 158227 - DNA, 574 bp, Zea Mays
cgtcagcccacccttcctcaccgcgttcatgacaccatgcaaatcatgaccaaaaccgtgtgcgcacatccaatcagcccgcgttcaccgggaatttgttaggattcacctcgaccgtgaggattagccctctccatttggccatataatccgaagccttgcctcatctcatcaaacagtgaccccgcgccaccattaacatggggaccaagggaacgccatgaagattgccaccacacgcctatctccccttcgttgctgctcatagctgggggaatagtctaggagcttcgtcggagcatgtggagagtagtcgcgttatcgtcgaccagacctagtggctggagccatgtcgattgctcgttggagcattaccactgccgtggatctgccctacatcgagtgtgggagtctctacgacatcatctccggtgagaactcttcccaaatgttcaccttctccacctctttgcgtagcgcttttcagagtggggtctcgttcaccaaggcaatgaattctaattgctccagggggtcacgcggccgtgacaggagcgccgccgttcccagatta

SEQ ID NO: 158228 - DNA, 929 bp, Zea Mays
gttgttcctgatgacattgttgcagacgtcaaggctacacctgatgcttcgagtcacccttcctccttgattgctcctgcaaaagacattgccaagtagagatatttttctgtgtttagaagatacttaatgcatttgtgaaccatatgtgtgtgtgatcaccgcgcttgaatattaggtaggatattagaatgtgtttttggcactgaaaaccatagtgttttgtttctgttgttagaattcaacagttgttacgaatgattgtagaagtaagtgcagtgtgctggttttgaaatcttttcttaatttatgctaattgatcagttggtagggcatagagatcaccccaatatgagtaaacacgagcatgttatactaagttgagtaagaaaatgcatgctgcaccatcttaagtcattgccgacttaagccgattgctccgttagtagggtatagtggtcaccctaagtcgagtaagcgtgagcatgttgcaccgtcttaagtcactgccgacttaagccgattgctccgttagtatggtatagtggtcaccctaagtcgagtaagcgtgagcatgttgcaccgtcttaagtcattgccgacttaagccgattgctccttttctatcaccggcaagcaaaaatcctccgcgtcccgtgtccagctacttccaggtctgctcctgctcgttttaatcgtgtttcagcaccaatatacactcgtgatactcattggctccgcccttcttgcttggccatgctcaatcacccggaacacatgaacttgtgttcggtattgcccgccaccgtggtcagactaagtcagagccataaccacgcgattgaagcttgttctagggttgtctcatgtccataatacttacccaataattaaattgggcagccaccaccaatcttggccggtccgtg

SEQ ID NO: 158229 - DNA, 325 bp, Zea Mays
tgtgaacctgccttgtaacgttgtgtgtcttcccttttatagctcaagggaggcacatacaaggatgctgagccccgacatgtgggcccaggaacataatggaaggaatacctagagtaactaatgcatgtgacgtctgtgcaatctctaggcccatgttgtccgcagcacgcgcagtattgatatgcgacggacgcttccttggtaacgtacgagtaatgatgggcgtagtgcacgcggcagtatgggcgtgtagcctgccagtggaatggacaagcatgccgcctatggaatggacaggtcgctgcctgccagcggaatggac

SEQ ID NO: 158230 - DNA, 612 bp, Zea Mays
aacaaatttaagtcactctatcaccatgactcatgttgctcccactagtgtatctatgaactataatcacttgtcctcagtgtggtgtaaagtgtggtgtcctcgggattcctctggcttggaggaaagtggtcgaggccgggccacttggaatccgtcgccagaaccgccagaattgctcaccgtacttcgggttccgccgcgcgccgcaggcaggggtattccacttgttaatcaaggtacgaacgcgttcacgtgttcgcgtttccattcaataggtatgactatagcgaattagagtttgtgtcaccgtggtgcggagaatccgaggcggcgatggctgcgccaccgtgaatctgtaccggggttggggaaggggctgcgatagccgttgatcggggcacgagcggttgtgattaggatctcagtgtaccgcttcagtcgtaggatcctgaccgttgatgtaaaattggtcggtgtagggggggggatcggcgggattttagatcgtggtcgttaatccccgatccgagggcggctggcgcatactagtttgcgagaaggaataatctaatctaacgcgttcgatgtggatcgaacggccgatatcgc

SEQ ID NO: 158231 - DNA, 676 bp, Zea Mays
tggcgctcatcacgggcgaaattcctcactagagattttgcgccgctgtgatctgcacctcaccgtggacaaaggccaacgcagcaaaatacatggtaacgccccattcctcgtttcagtttcatattctcatcgtgtagcatcgatccgaatggtgggtagcttacaagtgccccctagatcgctcaccagagctatattccattgcggatccgcttcacacgtggggagcagagtagtcgccataatccataggaagtagtcctctatcatgctcactgttgtcgacactttgttttgcaccgtgcagttgacggaatagggcattggataatgggttgggcggggcaccggtggagcaccgtcgggcgttgcaatgcgccgccgaccgtggtgctcggggaagaagaggtgtcgactgacatcaatttgagttggacggctaggattaaatcgcagggataccctttcaaagcttaaaatccatgccattggttcatccgcggacagctacgatttgatcgtgccttcattgaatctagaccatggatcattgatccgacgacctcgattgtgtaccgcttcataaactttcggggtctgatcggggcgatttgattttaatcggatggctctagtgaccccataccccttcagctaagcagatttacaaaag

SEQ ID NO: 158232 - DNA, 458 bp, Zea Mays
tttctagccactcttggcagggctccttgaactgcttctcaaacttaaagcgataaggcaatcgcacaagctcaagtgtcttcttcgttccctttagcttcggcatgctaaattcacttaacattggagacgtcctgttagccaagtattcttgaactagatctctagtactaatttgttcagccaccaccctgaattctaatacagacagttggcatgctgaccctggcttcatgttgcacaaaggcatggtcattccgaagcttaaggacagcgggctcatcaccatcgtcatcagtttccctcttttcttctcatcggccttaatataaaaccactcactcttctagccggttggccacttggtgcaatagctgaggaccggagccttcgtatccttgcgatacacgaagttataacaaccaaaattttcatgtagcccgtcttctctggccttt

SEQ ID NO: 158233 - DNA, 966 bp, Zea Mays
ggatgacacagattcatctgcgcaaaacgcttccctccatctaatccaagccaatcatcgccagatcaatggtactggtttctctccctctcccgtcactcctgctcgcaccggcgaaggttccacacggcggcaccattgccgagggtcacccccacgagccccccctgcatccaaactcgacacccatggtgctacaggaagagtgcaacccgacgatcagggttaagggaatcgtgtcgcggatcgctcactcatatgcaccaaccacggcgcatggcggaagcactgggatgccctagtccgataagcaattatgctcccccgcataacccaaactcgactttcgatggctactaagtgctaccataaccaatttgagtaggtggggaagaatcttactagagaccgtggagcaatggcccagtccacggcgagatgtagcacggtggcgaggttcctgctccgatgagcaatctcccacacgccgatgggcaatccaacccgagtgaaccacgatcacgcgcggtgagtgcggcaaagccctaagatctccctccaatggtgtgccgaggctggggatcgtggtcgtcaatggcggtgaagtcctcttgtttcccctcacaattactgtacaacgacgatgatgaatgaaacacgacggggagagaggatttgggacccaaggtactcagcttttatggttctcgtaggccggtccgagcgcaggcaacggactcccgagtctacgacgaggttccaccatggtcgggcgtggttgttggatggatgggctgacggctcgggtccacctaccggtgataaaccagcgccacacggaccagccgagctgactaacccaccgggcccacatgtaagtcactcagacggggaaaaggaaaagggaggaaaaggctgacaccatggtcccagtagtcagcgcgatcctccccagttggacaccgg

SEQ ID NO: 158234 - DNA, 646 bp, Zea Mays
cgagtatatttttatatttgtgaataatgtaaactcgttatttatgaccttcgtctaatatctgttatacccaagaggggataatgcttcggaggatgaaggtctttaacatataacagatgtgttgccttgttcttggttcacaataatcaaaaacaagtgaccaacattggcacccacctccggtgaactcgaacgaccaccttcgacaacaagagctctaacaactaccttcgccatgccgttgaagaaggcagtggcatcaggggctgcccttgcactgttggacatcaatcaagaggggctccctctgagggaggttcgaagccagaaaaggaaggcattaacccaacaccataggaagaagagctggatcaagaaaaaagagatctagaggctatccaccaacaagtggagagaagaagggagaaaatgcttcggctatctgaactccagaagaagattgatgaagctaccgaagagatgtgccagatcacacaatacaacgagcaagggcgaaggccacagtagagagagcttcgttaggaaagcccaagctatgatgacgtatgctatgacaattttcgacatgataacattgcttttgatgatgcttccccctagccacagaattgcaggctacccc

SEQ ID NO: 158235 - DNA, 562 bp, Zea Mays
taggtaaaacattaatctgcttagctaataaatcccccaaagtaaccggattcgtaattattgccttgtctacttctctctcttaccatatgtatctaactcagatggtcaataccaggaggggtggtggaattgatttgcctccgaatcgacacactcggaggatatatagacaacctcagccacagccagcagagatgaatcctcctaatcctccaccaggcggagttgatccactgattgcagctcagatgagggtgatgcagcaaatggcggacactatggctgatatgcgtgcccagatgcagcaagaacgctaggagatgcgtcaggaaagagaagagatacgccaagagttgcgccaggagagagaagaaatacgccaggagagaagggcgcaacaacagctgcagcagcaatttcagcaacagcagcaacaacaacaagtaccattgcctccaccaccaccaccagttccacctcgtgataagcaccgggagtttatgagccataagccaccgaccttcgccagctcgccagatccactagatgctgatgattg

SEQ ID NO: 158236 - DNA, 489 bp, Zea Mays
gtgacaggcgccgcgcacaggagcgcgcagatcgccaggagcacgatctggggggggcgcagatctgggagatcagcaggaacctatggaaagtagtggctaggaaggaaattagaagaatggaaagttgagggaaggaaaggagagattgattagtgattgattagtgttaccatgtttaggcttgcctaaaataaaggctccaggacagcaggccgatggctatatatgcggcacagggagacaggaaagggcagcaaacaagttatctcctctccacctctctaccatctaagcctacggctgtgggggataaccacgccggagaagacgacgaaccgcggctacgaccttcgtagccgagggccccctgctctaaacgcccaggcccttgacactaccaaatatcagtttcccctcatgtagtattagtatgtagactggagttgaagcaggtatttttcagcaacattttttagatcgttattc

SEQ ID NO: 158237 - DNA, 395 bp, Zea Mays
atcgtgggggggggatactgcgccagaaccgtctgtatcgggatgaacgatccagattagatagaggataccagttcagttgggtacaacgagcgtcgtccgattcggatcggttggatgagaatcgatgtgggatactttgaatctggcacgttaatgttagatccgacggctaaccttgtgtaccacttcgatggggtcgcgatctaacatgggtcgtcagattcgatcggatggcagtgatcactcgataccgcttcaaccatgtccttttaactaaagagaccctgaagattttgggtattaacccgacgtccactgacaacgcatagtaattccgaatgtgccctggaatttatagaatggaccctgaactccctggtatttctgtccgc

SEQ ID NO: 158238 - DNA, 893 bp, Zea Mays
acggtgatagcggcaacaacggaccactaagtgcgttcccgatgatctaaggcagctcggttcaattgggcgggtcgatgagcatcacagttacataaggacactcaaacgagggagtagaaggtttgaactgacctcaattgcactggccacggcgagggtgttcttgcggtgggatgaaccgatttggggaaaactcgaaattcgtgagctctggcaaacgattgagggtgggagcgggtgctttggtttcgtgatgacatagcgcagctgacccggccttcaatttatagagggcttaagcggtggtgcttaatttggtcgagccgtgctggcggccggagagaggggagattactagcgcagtggattcgtgtcttccgtcgtggcgacttcaccggcgatgagtaactatcgcaagccgagctactgtgacgtggtaaactgccaggacaagcggcgcacgacagtgatcgatcaacgacggcgaggtcttatcccgatccaccgatgagcaagggggtacggcgggcttagccacggccgagctcgggctgatcccacgcccagatctatactttaccgtagttatccacccgccagtgaacacgaatcgcggcgacggcgtgaatcacggcgtagagatcgtcggcagcgagattgctgcgctggcggtctgatccaatcctggtactgtacaatggcgaaggatcttcagagcgcctgacagacgaagtttagagcagattttctcctaattctttgtgacaacatacccaaggctctatatcaaagttgtacaaggatttaactacaagtttgttatagcagctatgggtaaattcctactaaatcaagctcgaattcgtgcccaaagtctctgtaattacact

SEQ ID NO: 158239 - DNA, 451 bp, Zea Mays
tgatgtcagcctttatcctgaggaagtttgcagacttggttgggcaaggagtaaaaatggataaagggttcaaggaggtccatgtcaactctgttgccaaggcactgtctgaattcagtggccaagaagtcacaggcacccaggtctacaatcatttgaggaagtgacgtcaaaaatggatcagggtttgtaggctcaaggacctaagcagtgctcattgggatgagaatacattcacaatcatccttgatgatgaacacctgctgggccatacaaaagacaacccaaaggatgctgaattcctcaatgtgctaattgaaaactatgtgcagatgcaaattatatttggagctgggcaggctactggcaggtatgccatggcctccaatgagctccttggcaccatctcggatatcactgaaggtgctggtgcatctgaagaaccatgtct

SEQ ID NO: 158240 - DNA, 298 bp, Zea Mays
gcagcatcgtgggcagtagtgtatgaatcccaccaatcagcagcaggacctatcagacgaccagaagcatatagaaccttctctcggtcagagcactgagcaatattcagcatcttctctacatacttcagccaatcatcagcgtccaatggatcatgagagttggcaaatgtcggtggcttgtggctcatgaactcccggtgcttatctcggggtggaactggtggtggaggtggaggcagtgttgcttgatgttgttgttgttgctattgcgcccttctctcctggcgtatctcct

SEQ ID NO: 158241 - DNA, 403 bp, Zea Mays
aggcggcggatctcgcctggcgggagaaggacctcgccttcagggaggaaatgcttgagaggcgggacaagctgctggccgattatgagctcgaggcggaggagaaggagcaggcgctggaggagaaggagcggatgctaggggagtgggtctgccagttcgaggcagctcagacagcgtaggcagcccaggcggcgcaggtggtcctaggctcccaggctgtggaggcgatgaggaagacaattgaagatctctgggcggagcatcgcgctggggtccaacgtatcgtcgcctgggccggcgaggcgagctcggcactagtgccgctgggggtgagccccatcccagtgtcggagcagccgacgtccatctccgacgcgctcccggtgctggattccgccgc

SEQ ID NO: 158242 - DNA, 671 bp, Zea Mays
cttcgttgcctcagatgaccccatagaacgatgttctattcaggtatgcgtttgtttcgtaggatcgtcttatggagggtctcggcacaaaggatgatgagtctaatgatagtgtccatgaggaccatggagaggtgtgtttcccatgatcaagttaaccacgagtgggtagcactctaggtgggagacatggtcgggatgattgcctcgattgaagattataaccatctcagtccaccgaagccacatcagggcagttatggtatcaagggtgatcaactctcgcttgtaatacaccattagtgcttcaacttataggtctgggccatcaaagatcatcaagagctagtcagggttgggaaacttgatgcccttcctctgcttgtcgctagttcccctatttagccccatgctcatgccattggtccagtgccatcgttcgtacgtgtacacccatgtgttgccatgtcacgacttttccaatcaaatccacaaaaccgtgaaactagagttgacctctaaaccaaacacttttaaaaaactcaacaactttatcgtgaaggtgttttgtgatgaaattgatgaagctaaactcaaaaatatgaagtcgagtagtcccaaacacgcttttaggatatcactagtagtttacccatatccatacttatatt

SEQ ID NO: 158243 - DNA, 384 bp, Zea Mays
gttttgttcatttatcaggttcaaccatatgtttgtgtcaccttatcagcctgtcaaagcttttgtatatgctgcttagaatagccctatcgcttatcttgctgctattcaaatctatggtaaacaatggttgtcacttctttcacagcacaaggagaaagcatggttttcaagttcagtgaagtcgagattgcagtactttggaccacagccaggcattccggttctagatgatgagcatgtgatgatgagcatgttaagggcgttcatctcgatcctttagctggtccagtagatgccttttgccttctggttcttgatccggaaaaggttaggcatccctttttttcactttcctgttgttgctctcatgtattgtactac

SEQ ID NO: 158244 - DNA, 295 bp, Zea Mays
aatagatgtcatcctagggatgaattggctagataagtaccaagcaattatcagctgtgataagaggacagttaagttggtgtccccactaggagaagaagtggtagccgagttaatctcacctgagccaaggaaaggaagttgtcatcagatggctattgatagcaaagagccagattcactcgagattgtcaaagtggtgtctgaattcccagatgtgttcccagaagacttaccaggtatgccacctgagcggaaagttgagtttgccatagagcttcttcctggcaccgcc

SEQ ID NO: 158245 - DNA, 392 bp, Zea Mays
ctttggcttgggcgccactcgaccgttgatcacttgtgctatgatcgggattagattggcgatagcgtttatgatgggatgatgtggaccgttggatccaccttaggcggtcaagattagatcgttggggtgctgttcggttatattggatccgggccatcagatcttgatctaagggtgggcactacgtaccggttcggggaaggactcgatataatccgtgctgaccgcttttgatcgggcggccgtgatcaaactgtacccattcaatcgtcacttttccacatgagcccctgtcctttgagttattcaacccgccgtctgtaggtgttgttcgcctgagtctaggaaagtttatttattaacccctagactttcctgtaattgaggcc

SEQ ID NO: 158246 - DNA, 576 bp, Zea Mays
ccaaaagagaccatcagcaaccctaacgaaggtggtttggttcgattgaaatatacctttaggtttagagaccaatttatcgaaccagacgatgactggctgaagtgtgttgaaaacactagtgatgaactacttggagcctactccaagtctgaagataacacactatccgtggccttcgagagccaaaaaaagaagaggctaaatagaatttttgatgctattgggtttatgtaccctgactaccgctacccgctgcgggggcagaagagaaagagtgcaacttctgggaaggatgttgcttcagctgctccaagcgagcccgcgccgaagaggaaaagggtgaaggttcttactcaccgaccgcgttatattgaaccggccacagtgcctgaatttggtggtgagacctcttcggctactgaagccgaaggacatgtcctcacgcagaggattaaagagccggctacaatgccgaaggttgacaaaattgaagaaccaaaacccgaagagacaaaaacatcagaaattctaagccctttggtaggaatggaggcgccgaagatacaaaaagat

SEQ ID NO: 158247 - DNA, 684 bp, Zea Mays
catcattggcaggctggccctgtaccggttcatggccattgcccattacgggtacttggtcctcaagatgtcgtcccctgctggggtcctcaccgtgcagggcgaccgccccgctgcgcttgcagctgtcgagaagttgcacgccctggcggcagaagctgcacgcccggatgacggagggagggaccctcgacttcctgtaccaagacgcctgccaaggtgcctaaggtgcagccatctagggcagacgacgtccccatctagaccattcggctcagcgcggattcctcccagaccactcgcatcgcgggtgatctagaggcaaaataggaaatcgcgctcgtcgccttcctccaggcaaatgccgacgtatttgcatgggaaccgtcgcaaatgcctgggatccccagggaggtgatcgagcaccatctgaagatccaccctgatgccaaaccggtgagtcagaagcctcagagatagtccgttgagcgataggacttcatccgtaaggaggtccagaagctgctagacgctagcttcattgaagaggtccatcacccagtatggctggccaatccagtcatcgtccccaaggctaacggatgcttcagatgtgcatcgactacactagcctcaataaggcctatcccaaggacccatatccacttccacgaatagatcaaa

SEQ ID NO: 158248 - DNA, 885 bp, Zea Mays
acgaaatttaggctacacttattaattttccatagttacaaatagtgaaacagattaattatgaactatgtttcggctctaattatcttggtctagtttagttttgcatccgtacttttgtcgttggggtctaatattatttgctagaaaccaaccacgattataaatcctcggacgtgatgtttcgattaacgagaggggaccaaattattttacacctaaaaattttagtcgtcgagttctatttaatttgtttcggacgaaatcagaggactgaactaaattttcaaattcgtatttgagcgatcgatgaattctaaatgatcaccagactcgccaatctccggaacaaatatgttctaacctcacgaagctgttagtacaggccggatagacagagacggaaaagatatcgaaattttgataggtgaatattagaacatagaaactattattatcgccgatatttcgcgcttgagtccataagcacagtttaacatgaggtaaacaccaggggtgttacacacactttgtaaaatcatcaatgcttcgtaaacgatagatccctctttccacatcagaactgatgaagctgtaattctcagcttactttgtgtcttggcatcttttcattttttgtaaagcattctccaaagatcggtcttgtttccaattgatgtcattgatgtgatatgatgtatgatgtgatgttatgcgatatgatgcgatgatataatgcaaagaatggtgctaatgccgaagacacatacccacgctaaaacacaatatctgcgttcccttaggaaccatcaaaatctctttgccgtttatttttcggcttcaccacttatttttcggtgtaagttctgcatccccttaggaacg

SEQ ID NO: 158249 - DNA, 476 bp, Zea Mays
ttctggctcatgtcgttgaggatctggtgggtggtttccccagttcttcctctcacttatgagcaggaccgtaacttcaagtctgataacgaaacatgtgatggttgtatcttgacactgttgttagatcaactatatgacatacacatgcaccacgaagtggctcgtgatttatgggaaaccctggaccggatgtataatgaatcagatgttggacgtgaactttatgttaatgagcagtaccatgaatactggatggtcgatgaccattctgtcgtggaataggctcatgaaatctagcttctagtgggggaacttgcacactttgattgtgtcttgcctaacaagttcgtggttggtggcatcattgccaaattacctcctacttggaggaattttgccacgactctcaaacacaagaaggaggcaatgactgttgaaagtctaattcctactcttgatgttgaggagaaggc

SEQ ID NO: 158250 - DNA, 802 bp, Zea Mays
ccattgccgccgatcttgcgtctcggctttaccttgcgatagccgctgtctcgacatcgttcggactagggcgctcgggtcgcgacggccgcctgggcaattaagagttatcttcttccctccccgcgtcgcgtgagagcgtgtggtcatggttgggagctcgagttgcgccgctggggaattgtggagatccacattcgctacttcgatcatcgtgagttctctcttgaatctacccctgtttcccctcgttcgtttgcgcccgaattagctcatcggtaggcatttggtcgccggcaatttctcatcggagatcgagggcgccgcagatccgcatcacgccgtgggcaatgatctacactgcgtaaccgccggtaaatcctggatgaccgtgttcgcctttccctcctctgtcgatcacgctatgcatcagcctgcatgcttcgttgtttcgctgggtgggcaatcaccggtgagggcaccgtcgttacccatgtcacgccgccggacggtgaacaaggagagtgggaaaagggggggtgatatcgggaccatccatctggtcatgggtgactcagattaaactctagcgtacctgttcggggccgcgttgtagccatcgaatctagatcgggcggctctgagcgcatagcagttcggtaagtaggaggttcatctgggcccttggtttctaatccggcgtctgagatccatccataccccttcgcggcacattttgcaaaagagcccctgagtaaattggaaatcaacccgcagtactgcaaacaggattctgagtctc

SEQ ID NO: 158251 - DNA, 1107 bp, Zea Mays
tttggtcagcagacatgagctacatggtcaaatcaggaacaaaagaaacatcaggaacctgagagaagggtactctgaccaacaacgcaaagggaagacctgttagcagtatggacaatgagagaacgagatgaaggactcacatctgaaagacaaatgcaacgaggagttatatgaaagtaagcaccagagtctatccaaggacaagtacttgaagtggaagggagagatggccccttaatggaagacagaactagtaacagaacctgtaggtgtaggactgagtcacagaaccaacaaatcttgtagatgtagaggccgcaaggtgatgaagtagcctccatagtggtagtcaaactcccccgagatcctatagtaccagcaccaccagtaccctatgaagaacggcgagcctaagccttcttgaatcagtagtcttccacatacccgtcacaatcacataagcacaatgaaaatcaccacgttccatgcacaaaaggcgcaactgaagacgacattgtcactgtagtagcaggtgatcgtgaagacaaagaactaacaaagactgcaacaggctagcattacacagacgagtctcttcattacagacactagcaagcacatcaatcagagagacacaatgatgatgagcgagcaactgagcacaaaggggttcaaactcattacgaagccgggtcaagaagtcgtacgtacgacgaagctcaagtgcaaccttctaaccctggcaagactgacaagtatctggtgacatctcgggacaactgacaccaaataacaatcatctaagcgaaaaactcatcaattgtagaatctcgatttcataagagttggtcccagtgaatagtagcaagataggtagactaagtagtaggctcataatgaccacacaaaaggccacatccgatgtttaccaaacacacaaacatctcgctgtcataagacctgctcccgacgaatagtagcaaggtaggtggaccgactagtaggctcataacggtcatgcaaaaaaggcgacatctgatgttcaaactcaaactcaacaatattagcaacaagacgaccctccatactagaggctagaataac

SEQ ID NO: 158252 - DNA, 1164 bp, Zea Mays
gggaaaatggatcagagagttgttgtatgtagtttggagcttaagaactcaacctagtcgagctctgcatggaaatactcctttcttcatggtctatggttcggaggcagtgctacctgccgacctcaggtttggggcaccaaggctggtcttcgaaaacataactaaggcagaggctaccagattagaggatattgacgtattggaggaagagcgattgaatacagtaattcagtcagctagataccagcaaaccctgaggcgctatcatgataaggctatacgacatcgatcctttgaagtgggagacttggtccttcgccgaattctaacgggggaaggacgacacaaattgtcaccactatggtaagggccatttgtagtagcggaggtcactcggccaggatcatataggctcactcaaatggatggcacggaaatagggaattcatggaatatagagcatctcaggaacttttacccttagcaaaatttcaaaaagctatcggggcagcattgtattctataattggaaaatacatcatcaataaaaagatttcattctcaaggacactcgaactgtttattatcaatcagcatgcttactcggtatagggtgaccactataccctactaacagagcaatcggcttaagtcggcaatgacttaagacggtgcaacatgctcgcgctcactcagcatagggtgaccactataccctactaatagagcaatcgacttaagtcggcaatgacttaagacgatgcaacatgctcgcgctcactcagcatagggtgaccactataccctactaacaaagcaatcggcttaagtcggcaatgacttaagacggtgcaacatgctcgcgcttactcggcatagggtgaccactataccctactaacagagcaatcggcttaagtcggcaatgacttaagacggtgcaacatgctcgcgcttactcagcttagggtgaccactataccctactaacggagcaatcggcttaagtcggcagtgacttaaaacagtgcaacatgctcacgcttactcgacttagggtgaccactataccctactaacggagcaatcggcttaagtcagcaatgacttaagacggtgcaacatgcttacgcttactcgacttagggtgaccactatacc

SEQ ID NO: 158253 - DNA, 646 bp, Zea Mays
tgaccgacacgcgggcccgtgtgggcagtggtcgcgcccgcgcaccgtgtgacaccgccgtgtgggtcctctctgtcggatctatcctctcccctctttgtctcctttcaacagaacgcgaaatcgcgcgggtgtatcggtgtcgcaccgtgatcttcggggaaaacgttgggattcttggccatggggcataaatagcagtgctgcatcccattctcggcctccaagctaatacacgggtctcatggcagaccgggggatcgtggggaagaagcctggcgctgagaagaatggcgggccgccgcggttaatcccagtcttggctgccggttcgccgtcggggcctccaaactccctggggatgttcgccggttctctctaggactttgcgtggcatcggtgagccggatgcgtctggggcactgatccagtttgctcatcggagcatggcggagtggcggaatcgcccctcaccgttggctggctaactcgctgcaaggtttacggtagggacatcctcgttgaactcatcctttcctctgcttcgcgtagcacgtttcaggtgtatgaataacggactgatggaccggttagctgttcaccggcgtgttctgccaccatcgggctcatggcgccgccggccgcc

SEQ ID NO: 158254 - DNA, 1300 bp, Zea Mays
ggccagatatctccacaccctcgataatcactatgacgtcctttcctcccactgtacccacctaaactcccgggtggagagcttagagcaataggtcaaggaacttaaaaaggagaaggcatccctccaagaaattctcgaaatagcagaaggtgaagaggccaacactcgtgaagcctaccgaaccctgaagatggattacgataagaagctaaagaagctcgcccccacgaacaaaatccagaagaggaccaagagccaaggatgccagactgaacggaaaaaggaagcccctccagcactacatccctccaggatagaaagcttgtccaacatcgaggatatgtccctagctagccttgacgaccttctcaagggatttggggacactttagaaagggagtttagaaataccgtagaaagcgctcgcgtgtagtgcaacttgtggtaactgtatgcttgtaatgaacttgtgtgatgaataaaataacatggttgaattttttttggcatatgcatagtagtaattctctcccccctggtagatggcttcggataaaaccacgcctaccgcctccgggattggagcaaggtttcccctaggagctgaaggagaagccagtggagaagggagtgagacccacctccccgcacctccggagctgccattagatttagcccaagttctagccaaccaaacccgactcatcgaagtcctcactagaagtctagagaatcagcgcccgaatggtggaagaccataggacatgatgggagatttctaaggctcaagcatcccacatttgcttgatccagcaatcccctcgatgctgatgactggctgcgcacgataaaaaggaagttagaagccatcggatgccttgagaatcagcgtgttcatttggctgctcatcaactttccgggatggccctatcctagtgggataccttcagcactgccgtcagagatgctacctaggcagaatttgaaactgctttccgagaacatcatgttccccaagggatcgttcagctcaaggaagatgaatttcaggaactaactcaaggtggaagatctgtcagtgagtacatgcacaaattcacagaattggctcgctacgcgcctgacgacgtcagcacagaagccaagaagatggcccgctttttgaaagggctaagaccagaactcaagactatcctcggcagccaggatttcctcagcttctcgcacctctcaaacaaagccatacaagtggaaagggcaagggaagaagaaaaaggtcacctcaagaggaaattc

SEQ ID NO: 158255 - DNA, 704 bp, Zea Mays
ggaggagataacaaagctcactggagtgaaggggaaacgcggcggtgctagctcaattgggcttggggaggtgtggaggagatggccggggctggtgtggaggaaatggagctcgggtggtccttttataggcgcccgggagggggaaggaagggaggggacggcgagcgccgacgagcttgccatgatggcggggatggagcaaacgacgataagatggctcgggcaggcgaggggtgaggggacggctcggatacagtggtggggtggtcgctgaggccggtgcgagcgttaatggcgaagcgacggggcgtgaggcgatcggcggcgaacgcgccggtgatggcatgggcgggacgatggtcctgacaggcgggcccgggctgccagagggagagtggcgcgcgagagagagaggggtggagccgctgaccggtggggccgggttgtcaggcgcggcgcgggcgtgcgcatctgggccgcttgggccgtgggaggagaggggggagcgggcgcggcgcggtttgggccgaaaacggcccagccgaggggggaaagggtttttcctttttctttttctgttttctatttcacttccattttttgtttctttttatttccttttcttttgaaccaacaatttgctaaataatcttaagtgttaaaaataatctatgtgaggtgtttctaacaatccaagtgta

SEQ ID NO: 158256 - DNA, 308 bp, Zea Mays
tagcgtcatcattaggttgcagctcgaggacgacctgcttgtctaggaggggtgtagtgtcagggcttaagagggcccgctaaagtgccgctgcagtgacgacggtactgtagcacacccttaggttggttagataaagataaggctagtttggaatatgattagaattagagataagataagatctagtgcttagaagtcaagtaaccctctctatataaggagagggattgtaccaattgaagtaagcaagagattagaaggaaatcccttctctcttgccggtcgtggggaaatccctgcggccg

SEQ ID NO: 158257 - DNA, 859 bp, Zea Mays
gcatttccaatccatgagaaactgcatccccaacattaccgagatgacggtgattgagcacttcttctatggtcccacgatggggcatttgtccaagccatccttcaaaaagctccaacgacctccgagcaactcttctgggaggccgacgtctacatcaccgccgacaaacgggcccacaacctcatcattcaaccaagggctcaaaccctagaaggaggggaaccaaccgcatgacaagcgctgtgacaagaggccgagaggtgaagtccatgcgacagagccaccgatagctcgcgcgcgcagcgcccctcacaaccacaatcgacggatgctggacgagattctcgatgacccatgtccttaccacaaggagatgtgtcacactctgcataactggagagacttcaagaacttgcccagcgatgaccagccctttaatcactccctcctcctctgccccggtaggatcaaggcccgcaaactcagcagtaggggtgggtggaggggagtttcccagcatttacagggaattcaacatcatctatgggagccacgactcctaggagaacaagagtaaacaaaagatcaaccatcgataggtcatactggccatgaccgatccaccgacgccataccggtggttggagacaccgatcccctttagttgagctgaccattggcttaaatttgatcatccggacaagtacactctgcttgttaacctagtgattagagacaactgggtcaagaaggtccttgtggatgggggaagcagcatcaacgtcacattcccctggaccctctaggcgctcgggatctccctcaccaaactccaccaatcagacactcccttcat

SEQ ID NO: 158258 - DNA, 726 bp, Zea Mays
ggaactctgattttaaaatacttacaacagctgaagcttagaaaggttgccaagggaagctggtacttctccaactaaaagattgtcctctaaatctaagcttgtcaagctagatagattgccaaactcctcaggtatggtaccagtaatcctgttaccagccaatgacctgcaacatcatatgctatacagtttcatagtagtccgagaagtatcaccaagcttgaacagtagttcatgtatgacaaatatctaaaggtctggaataaaatatgttagcatatgtgacactggtataatgcaatccatatcatcctagtttacttgcacagatggctagcccactatgatcttgtttcagtacatatcagtttgccccaaaacatgaagagaagcagaagcaatagagtcatagaacagtaagattcaatagagaaaccgattcctaatttctgacatgcaaagtgtctggaatgtattcattataaatttattgcatgtactcattctataatcttactttgaatatcatgatgtaattctctggaaaaatatattaactattgctatagtgtaagggtaaaccatccccttttgatgtttataaaagtgataatgtcaaaggcatatataatctacagaataatacaacgtactcacaggacactcaaattttggagttcgccaattcttggtgacaaaacaccagtgaatcctcgcgcagcc

SEQ ID NO: 158259 - DNA, 538 bp, Zea Mays
aaaaggcgaaggatcattactgtttttgatgctattgaagaaacgccaccgccggcctcggcgtcaaaaacaccggctgccgaagataccactgcaaccgaggttgcccccgccgaagctgtagctgccgaagctgagacggacgaagatacaaatctagaaggcactttttctgatattgataagatgatcttgaacatggctgcgaaagaagctgctagagctgccgaagagaccttggccccagtgcccaggaaagagaaggaggttgccgaagagactttggaggaaaaggattttaattttcaaaacatacttggccaaaagcagtctaaggctgagaaggaagaactgagggattacgcaatatcatgcggctatcaaccaggagcattgctcttcggtggtgttgccgaagagagtttaggatgcctctgggatcgggttggggcgaaggttgtcagcactctgtcgaaaagtgttggctttccgaagcttgaggccgacctcagcagataccggcggcaacatatcgccg

SEQ ID NO: 158260 - DNA, 579 bp, Zea Mays
agcttttgaaatatagctaggggtaaaacttcctgagatgttctatgttccatgagttcccaatttctgtgccgtccatttgagtgagacgatatgatccaggccgagtgacttctgctactatgaatggtccttcccatagtggtcataatttgtgtcgtccctcccccgttagaattcggcggaggacgaggtctcccactgggaaggatcgatgtcgtatggccttgtcgtgatagcgcctcagagtttgctgataccgggccgactgaatcactatattcaatcgttcctcttctagtacatcaacatcctccagtctagtagcctcagcttctgctatgttttcgaagattaaccttgatgccccaaacttgagatcagcgggtagcactgcttccgaaccatagaccataaagaaaggagtgtttccatgcaaagcctggctaggttgagttatcaggctccaaacaacatagggcagctctctgatccactttcctgcgaacttttcatttttgtcgaatactttctttctaagcgcctccaatatcatcccgttggctcttcctacctgcc

SEQ ID NO: 158261 - DNA, 770 bp, Zea Mays
gcaaactctgttccaaaaaaaagatgacttctttccattttctagcaggctgggcaattctggaaatagacacgcgtatatagttcagcccaaatgttcaatttggcccataaaaattgaacattgttttctgatgggctaagagaactaaagatcatgctcgttttggcccagttcatttaaccctaaccttaactttacttgtcctcttgttcctccgcatctcttgccatccgctggagaagagtcaatcgcggcggccccgttcaatggtctcacgacggctaccgtgaacacgacgacgcacccgcgcgagatggcgacctcctcggcgtctatctatggcttggttgctggcgaggctagtggcgatcttgttgccctccctcaggcgggtgagtcttgcggcgggcgcaaacacagcgggtgagctaatggcagccaatgcaaccggttaagggcacacgtccggcaatggcgccccgtactgtagtgcctatagtggtcagcgccaagccctatcaggtacgtatcaaatccacccctcacgagtctttgaagattaggattcctgataaagggtggtgtttggtgttttcgtgaactgggggttcctgaatttattattatttttttggggggaagaactggtttgtcaaactatggtttcaggaattgaatttggtcgtgatttgctaatcccctcattgtacttgctgttattctctacgttagacatgagccgaatctcaattaggcttacggcccgt

SEQ ID NO: 158262 - DNA, 1254 bp, Zea Mays
tccttgttaaaattagaaacataattcagccaaacaattgaaacttcggccatcaatattttatggacatttcgattgtcaatatgaggtatatcagaaagtacttaaacagtacactgtttattgagaatatgaattattatctggtaggttcatccatataaaagttatgttttgtcagcagcttcaatgtcaaaattgactagatattgagttgtgactggaagggttactaacaagaaaaaatggaagatcgatcaccttttatgatgcacaagtgaatgacatagctgtagatttatgaaatttctgcttttaccaaccatttgaccagaagcataaaataggactaatattagaatgcatataccagatctaagagaaacattatcgctgtcactatttaaaaccaatatgtgaaatggtggaggctagataatgatatcaagtaaaaggaaaatcttgaggaccgggcattaatagtgcaagttgatccatgtcttgctaaccttgttgatgagctatcaccattcgatttgaggtatcatccgattccattatttctctgtgtattgcacttgatgacatgcactccctagaaatgacatattggactgccgcttctttaggttgaatgatagctacacaagcatagcttaatatgccacactgaacacatggcaaccgcccttgatctaagagcccacctccttgatgtgatctaccttttccaattactccaatctgaatatctgaagttgataagcaaaatgcagtactactaactattccaaattttgtttcgtagaactttctttggttacatgcagaggaagtggttgattcactcatgttctcaacctctttgatttcatcaatttcatcaccataaacaagagtttcctcagctttttgctggctaatactacagggaccagcaatcaagccttgcttatcagagacttcaggtgccctcgttgtaggaacagatggaaggggaaattcaatctccgggataattatacaagaactcttgtcaagaagggtgctcagaaaactgttgttttctatcacacttccaacaaatgtttctttgatcattctttcaccttcattcttcttcttgtcccttagacgagagcttctaggcatatgagaattcttaggctccctataaaaggaaaatattgtctagattcaatctccagtaacatgatgacccagagaattacacaaacagaactgctatttgat

SEQ ID NO: 158263 - DNA, 480 bp, Zea Mays
atagatctcgtgggggagtggatttggtcgtggggtgaagcttatcaactgcgcctgtagccgtgcgacgtggccggaccgccggtgtcgcagtggtactccggcgacctcaattatgccacgtcgtagctctttaccgcgtagtagtaaccgtggcacgcctaggcttgccattttagaatcgttgcaccggcgggcgccacgactgagccgccagtgactcacctctctctccggccgccagccttccccttcaaaattcggagccacctccctcgggcactataaattgatggtgtcgctagctccgcaaggtcatcacgaagccagagcaccctcccttgccttcgattagccaccatagcctcccaatttctctcttcccccaaatcgggtttccgcgccaccgtgaacgtcgcgacgtggctagctctctacaggtccattcacgccctccacgctcttgtttcagcacccttg

SEQ ID NO: 158264 - DNA, 501 bp, Zea Mays
ttagctccttagtattactttgggagcttggacagtttggaatcacagaaacaagtgtacctttgatggtctagcccccagtttggctcaggtgcttaggcaatcaaaggaggagtgtgatttatgggtggcggttggagccaagggtatctccctgctgttggcaggcactcagatgatgaatggggtggtgagtcagttgtagatttgtttgtgttaatgagtgtgtttaggtttcttagtttttggcctccttgatggggtttgtattagagtttgtccttttctccttgttaatataatgatgtgaagttctcttgcgcgttccagaaaaaaatatctagctccttaaaagggtggcatatgttggagtggcacagatagatctgattatgggccactcgattcaacctgtacggatcatagtttttgacccgcaacaatcacgaaccaggcacgtgccatgatttttgaaccaaacctaacccaacctaaaaaacc

SEQ ID NO: 158265 - DNA, 824 bp, Zea Mays
cgacggcgacgagcttagcagagctccggtgagctcacagaccggccgattggggcaacgattggcaccctacttcggccgaaaccgaatttatgccccaaccagtgtttcccctaagttaatttcacgggtggtgacctactccgccctgcccacgggaacagcggaggctaagaacttttgctcgtgttcccggcaatgggtggtgatctaattcaattggacgagttggcgagcatcaccatcattcagagacataagaacaatgcgtgaattgtatggtgccttaccagaacgggctggccacggtgagctcggttcttgcggtgttttgggtggatttggggaaatcccaaattgaagctctcgggtagataattcagggcatggattgatgcaggagtttcttgactacatggtggagctacgggcgaggtcaatttatagagccctcaagcggtggccgcgaatttaagcgatgacgcgcggcggccggaggaggggaagagtactggcgcagcggcttggtgtctaatgccgtggcagttactccggtgagccacggggagtcacaaaggttcacggtgacacggttgaaacacttaaatacgtggcacaaggccggaagacggcggttcaccggcgagcttatctgctcaagccgcagagtaagggggctacgacggtgagtcaccggagctatccccagccgtcgagctactacctggcagacttatctagttactgacgacgtgaatcgcaacggcggcggcgtgaatcttcgcgcagagaggtcgccggcggtgaggatccgacgctggcag

SEQ ID NO: 158266 - DNA, 339 bp, Zea Mays
aaattctacagctattacaataatgagagatcatctcatcacatcataaaagtgtttatggcattcgagccatgcatgcatcaaatagttattacagaccgattgttcattacaaaaataaaggggtactacataaagggtactgcataataaactttctccccctttttggcaacaagaaccaaaaagagagagaagcgccaatccaatgatcaccagtagggaggaggatgatgaggagtgaagaggtggtgcgccaggtcagaggcaaagtgttcctctccagactgggccggaggaggagcactgccagacgggtcctggggcggagggtaagag

SEQ ID NO: 158267 - DNA, 661 bp, Zea Mays
attaaatccattcgaaaggtgggacctctgacctgtaagcttgagatgcagaagttctacgacaaggtaaattatgtacgaatgtttatttctaacctagccgagaagattgatgccttcactcatatccttcggcttaaaaatgatgttgaattcacctagggggcagaacagcaggaagcgtttgatctcatcagaaagtatttgtcttcggctcccgtgttaaaagcaccacaggtaggagtaccatttagattatacattgcagttgaagataaggttatcggagctgttctaacacaagagaccagaggaaaggagcatgtggtgacctacctaagtcggaggctggtggatgctgaaacaaggtacacttttatcgagaagttatgcttatgcctattttatgcatgcaccaagtgtagatgttatttactgtctagtcattgcactgttgtgagtcaaaccaatgtgattaaatacatgttgcaaaacccgattatgagtggtaggattggtaaatgggcttatgcacttagagaatatgacttggcctatgaaccattgaaatctatgaaatgtcaggccgtagcggattttattgtagaacattagatcgatgatactcataaactagacatatcatacctcactgttactc

SEQ ID NO: 158268 - DNA, 399 bp, Zea Mays
gggcagagaacgtgcgccgtcggatccttaagggacggactagattagatcgcgcgtacccgttcgccacttcgggtaggagccgttagatcgggatcgtgcggtagatgatcgatcaacgttatttaaatctagagcgctggtgttcgatcgaacagttggatgcgttgagcgggattcagatgaatgtagccgtagatcttccatctgatggcgcgcgctgcataccgtttcggtggtactgcgttttaatctggagcgtaggtgtatgatcggacggcttagatctgtccataccccttcggccttggcgttttgcttaagagccctcgtactttagcgaaatcaacccgccatccatacgcaactgttctccgtgtctagaaatacttaccccga

SEQ ID NO: 158269 - DNA, 1177 bp, Zea Mays
gtttgcatatctcacatttaggttcttgttcaattaacactgctagtcgccctctcactctaaataatgtccttcacgttcctgaaattgccaaaaatctcttatccgttcataagctatctcgtgataataatgtttattttgaatttcacccatggcatttctttattaaggaccgagcaacagggcgacttctcctgcaaggaccgtgtgattccgggttgtaccccatcaagtcatgtgatgtcacttctctcaaacaagcttttttgagttcatcagcaagaccagcacagtggcatgctcggctaggacaccctgctcctcaagttgttcactccattcttcatcttaataaactcccttgtctcaaggagactgatctcggtaccgtttgtaatgcttgccaactcgcaaagagtcaccagttaccttactccacttcaattcatgattccatagctcctcttcaacttattttctttgatgtttggggacctgccccagtatctgttggtggctacaagtattacataagttttattgatgattttagcaaattcacgtggatttatcttatgaatgatcgcactgacgcacaacgcatttttctgcagttccaaacccacgttgagcgtcttcttgatactaaaatcaaatgtgtccaatcagactggggtggggaatatcaaaaattgcataataaattctttacttctcttggcatcgctcatcgagtgtcatgtcctcatgctcatcaacaaaatgggtctgttgaacggaaacatcaccatatagtagaaactggtctagccttacatgcacatgccgatgttcctctcagattttgggatgaggccttcacaaccgcaacatatctcataaacagattacccacccgactacttaacaatttatcccctcttgagcgcctcttcaaaatccaacccaactattccctcctcaaaattttcggttgtgcctgttggcctcacctacgaccatacaacaaacaaaaactttcatttcgttcaaaaccttgtgtttttataggttacagcacatcacacaaaggctacaagtgcttagatcttgacaccggccgtgtgtatatttcccgcgatgtcatctttgatgaagccatctttccctttgctcaactttcatccaacgttgc

SEQ ID NO: 158270 - DNA, 343 bp, Zea Mays
ggagagcgagcggtggtgatcaattcggtcgagccgtgctggcagccggagataaggaagaatactgacgttgtggattcgtggcctcaaccgtggtggtcattccggcgatcaccgtgcatgcgagacgcgacttacagcgacgtggtcgaatgctttagcacgtggcaggcgaccaacgagcagccaacaccggtgaactgatctacaccgaccgcaaggcatggagatacggcagccagccagagtgacatccagctcacgacggcgaagatcttttgacccgcgacgctatcgacttaccccgagtacaaatcgggacaccggcgacacgaatcttcgc

SEQ ID NO: 158271 - DNA, 881 bp, Zea Mays
gcgcgctgctgctggtctgaatccgccactggttgcttcgatggttagtgcttcattgaattacgcgtccaaggtacaatagctaatagtaatgccatgccatccatttatgtcatcgttatcatatccatggttgatggtagtacaagcctccaaggagagacctgacggcgcatctccggcaaagagtagcgagagggcttcttcttcctccaagcccccactccccgaccgttcaatacacgggaagcacaagcacatgcaggggaaggaggctaagaatggcaggcgcctttctaataataaagcgagtgccactcccaaaataaaactcactcctgtctaaccctgccagcggtccggggcctcctcccctattcggacaggaaaggggcagatgacgatccatagaaaccgattcatggattgcagacacccacaggaatcatccatcattcggagctaatcattcatcgggcctttcggctctttctgctcgcgcacaatcttggctagctcgtcctttccggcgacacccgcgctacgttcgaggccgcgaaagctgccgcacactttacaggtatgccggcatcatggcgatctttttttacatgatctcggcgggatacttgacggagccaccggctgtgacgtgaaccgcggcagatcgctcgatgaacgccggtgcgcagcttgagcggcggagctcggtgcggcggtcgcagagcatggtgcaggaggaggacaggggccagccgcccgacgaggagctcatgtcccggagccagggctccagcacggagccgtcgggcggggcgctcaggaccggcggcgccgtgcccgacaaggacagcgcgacgcccaagccgcgcctcgccgaa

SEQ ID NO: 158272 - DNA, 346 bp, Zea Mays
cgtggaagctcttttcatgtttagtgaaggtgatgacctagaattttgtggatgatatgcaaatggtcagatttatttggttttgtttcagttatgttattgatgattaactcctttatatctttgtttcagttatgttattgatgattgactcctttatatctttgttgcaggtctatggcagaaccgtactacatttgcattgttaggaagaggataatctcatcaaaggcatgaccctctgtccttcgctcctgctgaatggatgctggtttattggctagcaaatatcttttctatcacacaagcaccctaaaacatattcctaaaaataattgtattttga

SEQ ID NO: 158273 - DNA, 447 bp, Zea Mays
attcaaggtttaatccgatgcatcggatcttgatcgtgcgactgtggtcgctcaataccccttcggccatgaccttttgttaaagaacccctgctctttttcatatttaacccgccatccattccagctattcatcgagtcttagaatacttgcgtcgtggcccctgtacttaccagtaattgaggcctagtccagacagtgagaaaaacttataaaataatttagaaaagggatttttttatgtgaaaacaattcctagaacttgtatagttcctagaaaattcatagggagcccaaatttattcattccaattcctataattttgtaataatgttgtttatcatatagtgtctctgttttgacatggaagtcacattaaaaaaatatttctcaattaatcggatgccaagcacatgaaaccttaggaaattcgtatcttcttcgt

SEQ ID NO: 158274 - DNA, 1011 bp, Zea Mays
agtaaatgtgtcttttcatagcaacatcttgggctagtatatctagttcaagttcaaaagttacaatcaaaatttggatttaaactttaggattcaaaaaggagaagaaaaggaaatagagaaaaataagaaaagaaaaagaaaaagtttaaaacgtcgcttgggccgggataccacttccgactcactaccccagttcctcgctcatagcccagcgcctcaaacgccgctccggcctctgctcactcgagcccgctcgtcagtggttccgcatggatgcgcgggctagatctatcgctggcacgaagggcccaccgggcagccgcgcggccacgttcaatccccatcttctcactggctcgtgaacccgctcgtcagcataggtattccgcgctcgcgttgctcctgtttatcgttggtgtgtgggtccgggcggtcagatctctctccaacagactcgcccgacaacgtcgagttctcgccgacgactcagagaaggttgttgcctagccttggcccaccttgcgcctatatggggagttatgaaccctggtcgacccctccttccacctttaagaccctcactgagcagttgtgccggggcgagaaagagggcagcaagcgcagggcgccgccgcgtgtgagcttcgggctgccgtcgactagcgccccggggtggagaacttgggcattcctgtggcttgtgaaaaggtgtccgtggccgcattgtgtgggattcatcatcggcgttacctaaattgctcgccgacatcgcggaaccttggatttccgccatacgccgtggtcgggtcacctaagtgcataatccgcggtatggctacaacctcaatgctcgtcacttcccctctccgtttttttgcataatcgtgttaagattagggctcgctagcactcgtgcagggtgcactgcccatggcgccgccgtgggatttcccttccgccaccgcggtccggccaacttgggtaaaccgccctcggccgttgatctgc

SEQ ID NO: 158275 - DNA, 442 bp, Zea Mays
cttcagatgaggacttggattattttgcggcgctggatgtggctgcagtggagccttcgccgtgcacggagggttccgaggagctcccgggcgcgagtactgggcataggcggcaaagggcgatggcgaaatggagagtgagtgaattgtcgtgaagtggtaggcgttatcgtagtgagatggagagtggtcgtcttcgcgtggacgggactggtaagcgagaattgttgtcctcgccgattggggtgagtgtaggtgagggggagctgcgaaatctttttgagggtgaggaattgaggataatgttgttcaactacagggagatgggtatcatcccgaaggttgatccaatgtaatatatgatgccctcgctgtgtgtatgtaaccgctatttgtatgataaggctgcgcgccttcgttgattcggccgcgcccgtgggca

SEQ ID NO: 158276 - DNA, 505 bp, Zea Mays
cgcaagggagcgacagccaagtgggtcccccctgtcgggtacgtgagcgcagctgaggcggaggcatgggccgcgcagaggtaaagtgttggtgggccgaaaatggggtctagagcccagttgagctttccttccctttttcttttgtttttattttctgttttcttttatttataattcttttgaattccaaattttgaattccaattcactgtggatttattatttcaaactaacacataatctgaatatactagtatcacttttatgatatttattttatatattttctctatagtacctctcttctccctctccacttttctttagagatttgttttccaattagaggttaaattctatggatccattaatacattgttaatgaaacatttattttattatttacaaatacgcaatcaaataaaactcggcatgatgcatgatttgtctaggtgtctttggttatttaatccctttttggatgatgtttattcacatgtga

SEQ ID NO: 158277 - DNA, 431 bp, Zea Mays
gtgccacacctccgcaaatcttcgtacggcacgaagtctcgtccacgggttcgcctagccggggaacaggggcaccgtcgttggcgttgtgagatctacggcgcgctgcaagtctccgtgatcggctacacctgtgcctcgaatgcggtaagaaatcatcctcgattcaccactcgtcgttaaatcctcagcacattggtgttatccacacttcgacccacaactgcaagtagctgttcatcgctcgccagggcttggcttcctggctctggcaatggccgccctttggaagctaggtagaagacgaaccccggcccctcgatttcgcagtgtgcggctacgattagatcgtgccgtaacggttcgtttggacgagggaaaaccatagatcgatgatcgtggggctgtgggtgattcgggtttcatagaat

SEQ ID NO: 158278 - DNA, 903 bp, Zea Mays
ccaaaagagaccatcagcaaccctaacgaaggtggtttggttcgattgaaatatagcttcaggtttagagaccaatttatcgaaccagacgatgactggctgaagtgtgttgaaaacactagtgatgaactacttggagcctactccaagtctgaagataatgcactatctgcggccttcaggagccgaaaaaagaagaggctaaatagagtttttgatgctattggatttatgtaccctgactaccgctacccgccacggggcagaagagaaagagtgcaacttctgggaaggatgttgcttcagctgctccaagcgagcccgcgccgaagaggaaaaaggtgaaggttcttactcaccgactgcgctatattgaaccggccacagtgcctgaatttggcggtgagacctcttcggctactgaagccaaagaacctgcgcttacacagaggattgaagagtcggctgcaatgccgaaggcatcctcagccaaattagctgagccaaaggccaataatattgaagagataggagtcgagggaacaaaaatattagaagttctaagcccttcggcagaagtgacagtgccaaaggcacaaaaaggtcttacagcgacccccaagaggaaaaggatggccagtgtactagatgtgctggagacgataaaaacttcaagctctactccagggaaaactgccgaggcttcaaaagtgcagactgatacaaagctgaccgaagccgaagctacaaagagccaggccgagatcgaagctgggccttcagagcccgccaaggagaaatccttggaaaccggagaaaaggcaacggaaaaagaagctgtagaacaaattctgcctgaaaaagctgccactcctactcccgaagcactttccgaagttcttg

SEQ ID NO: 158279 - DNA, 552 bp, Zea Mays
atcagcctttgccgatggatatggatgactcgggggcaaacgatgatgatgagtttcaggatcaaaacaaggaaggcagtttgggcgaaaaagggagtaggggatcggtgctgctagatcagtcaaatggttctactggtgctgttgacatggcatcatccgcacagcaaaacaacaaggttgggactaaatctgggagagatgggggtccggttgccactcactgtcttgcttaggtggatttggcgtagccacaggagaccgggtttgatgttggcattgtcagcgttgaagctctaggtggtatccaggaagtgacaggaattgtgcatgatctctgtcgcagtaagcgtcgcgccgactcgatgagcgaacactcgcttgatcgggcagaaaaacttaaggcgggaaacaatctggacgatctgccttccaaaggtaacaatgatacttttgttgatttcccagataatattatttctgagtcccttaaatccattggtattctggcgggtagcaatcctagttcagtttcaatgtctattagtctgc

SEQ ID NO: 158280 - DNA, 561 bp, Zea Mays
tggtttagtgacttattatgagcctacagacaccggaaaacttaacaactttgtctaacaaatcaacaacacagtcgtagtgcttcttttcaggctctaacccgtaacttttgtttgttgcattgagggatctcagttggagctcaatttccccacgtgtcagtaagaagtgagtacataaatgaatgcaacattagtctagctttagccagacactacacggatcctcaaactgaacaaacactactcagtgttatggtctgaagaacctataaattcaacaaccacaggcaggtaagaaaaatgatgtccattttgacatgtgttggcatgcttagaatgtaaggccttgcgactgaaatcatatggtttttcctattaaggcatcatcgtttaacagtttttgattgttttagtatgtaagctgcagccgatgatccatagttgcttaaaacaacttttttcatgtgagaatgttagaattgatatatctattattgattaatatgaactataacatccaactttaaatagttcacataggtgatactttcattactc

SEQ ID NO: 158281 - DNA, 775 bp, Zea Mays
gaagtggctaagggtggcctgggaccccgtaagcttctagacgtccttgatccggactggaggcctcatcgcctcaattaccctaattttctctaggttttcttcaatgcctcggtgtgaaaccaggaatcccaacaacttcccagcggagacaccaaagacgcacttgtccgagttcagcttcgtgcgcgtcgcccgcagcttgtcaaagaccagggtcaggtcttccaccagagtcgaccccctcttagtcttgactatgatgtcatcgacgtatatctctatcctgtccctaatgaggtccccaaaggtcttactcatcgcccgtacaaatgtcgacaaggcgtttctcagaccgtagggcattacaacatagcagtaaagcccatccattgttacaaaagcggtatgttccctatcttccctagccatctagatctgatggaacctagagtaggcatctaagaaggacaaaaggttgcacccggaggtagaatccacgatctgatctatgcgtggaagtggatataggtccttgggacaagccttattaaggctggtgtagtcgatgcacatccgaagctttccgttcgcctttggaacgatgactgggttggccagccatacggggtgatgaacctcttcgatgaagccagcgtctagtagcttctggacctcctggcgaatgaagtcctgccgctcaacggactgtctccgaggcttctgactcaccgtcttggcatcagagtggatctttagatggtgctcaatcacc

SEQ ID NO: 158282 - DNA, 544 bp, Zea Mays
cagtgcaacgaaagaagggtgtgatgatgtagtggaagtagttatatattctcatgtaccaggaacaatatgtttacccatgctcctcatgttagttgtttacttacaccgcagcaacaatagtagtgtcttcgtggtatcgatgcgtatagggatgaaccattacgatgctagtgtgctagaaccacacacacagtgagaggaagaagggcagcagtttgggcgcctgtaaccccgaagaggcaatgacgtctaggatgtgttttttgattctacaataaacctcatcgtatatatagacccctgctaatgaattttttactctaaagtgacccctgctaatgaattttttactctaaagtctattaaggttgttatggatcatgattgtctttcgagtatataatcaacacataaggtattctacaagcatctcattagtatttgtggtattctaagggactatgtcgatcctagaaggtgcacctcttaacatgctacttccccgccgattcaatttctattttcttcatggcagataagc

SEQ ID NO: 158283 - DNA, 422 bp, Zea Mays
caaaaaatagtacttggcttgcccaaaacattaacacaacaattactatgatcatcttgactttcctttgaatagcttctatttagtaccggagagctccatcccatcccttgtctccttgcaacagctacagaaacacatatatagctaaccaaatcagaaattagttggtcttgattatatagaaacaaaacaaggtaactaaattagagcatgcaaagagataagggtttgtggagtgtcttatcatggtcatcatcaagacaccaagagctcataagcagacatgatacaatgcttaattgaacaccaagaaattgtagacaatagtaactttgagcgataaattaagcaagaataaacaagaagagtggtaatatgcatgcatagttttggtcaaagcagtggctgctggtaatgca

SEQ ID NO: 158284 - DNA, 680 bp, Zea Mays
gaacaattggaaaagcatcattcgagataaggttgtattttgcagccccaaatatacatgttgtttctgatatataaaaacatgcgtttgattctcatggagatggcgacatcaactagcaaatcccaacctctgctcttgaatagagcatgtatgtggtcagtgacaaaagaaaaaataactttacttgtgaccttttgctatgttggttttgatcttttgccctagccttcattttaaactatacctgcacattttaatcagtagagagagtcattgaattgtactccaggttagatatgcttctgtcctttatgttgttttgagcactgtcttgttcatctgccttttcttttggttgctttgccttctcctgtttgctgatgtattttcctcttgtccaaagcttgatgtatgaacaagatggcagcttgttctatgtgttcaatcttgtttatgtgaatttatttgagcttgttcaagatgtcctgctgttttttggatagctacatatgttcactgcattattctatgaacctatgaaaatttacatggtagtgcggtgtcgttctgatgatacttaactttaggggaaaaggaggttcagatcttgaaactcatatctgccatattagtatcaagtaggcaggtaacaatttgctagaatttagtggacatcc

SEQ ID NO: 158285 - DNA, 540 bp, Zea Mays
agtgcattccctcggttactgggaagcaactgctagatgagatccacgccggatagtgcgggatacacccagcatctaggactctggttgggaaggtcttcaggtctggtttctactggccgacaacaaagagtgacgcagccgagttagtccagaggtgtgaagcttgccaattcttatcaaagcagcaacatttaccagcacagcaactgcagaccatacccataacatggccatttgcgtgctggggactggacatgattggacctttcaagaaagctcaaggaggatacactcacgtgttagtcgccattgacaaatgcaccaaatggatagaatacaaacccattgcttctctaacttcagccaaggcagtggaattcatacaagatataatattcaggtttgggataccgaatagcatcataactgacctaggatccaattttactagctctgaattctttgatttctgcgaacaacagagcattcagatcaaatatgcgtctgtagcacacccaagagccaacggttaggtgg

SEQ ID NO: 158286 - DNA, 681 bp, Zea Mays
atttccatgagtctatgttcaggttgcaggttctcctttgcataggtttatattgaggctgcagataaacttgtgctaggagaaataggaagagataagccacgatgatttgtcttttttctctccttggtcaagtttttgttgggtttatagttgaatttttggatgccggtggacagttgtgtattatagccatctatgttgtgaacaacatttttggtgccatgatttacccacggtttattttgttttggttaataggaagaaaggtgtcactatgttctgtctttttctctccttccacaagtttttgtttggtttgcatttccatgagtctatgttcaggttgcaggttctcctttgcataggtttatattgaggctgcagataaacttgtgctaggagaaataggaagagataagccacgatgatttgtcttttttctctccttggtcaagtttttgttgggtttatagttgaaattttggatgctagtggacagttgtgtattatagccatctatgttgtgtacaacatttttggtgccatgatttacccacggtttatcttgttttggttagatatatgccttggcttgttaattgtcttatgctaggagaaacaagaagagatgagtcactgtgttttgacttttatttctctacatgcacatgtttttgt

SEQ ID NO: 158287 - DNA, 476 bp, Zea Mays
gtctttgccttcttcaaaattttctcatcttcctttattagccgagtagcttgtctactcaggatgctgacaatccttttccttttcacccctttggcccctttgtcaagcctgtcatagtctggatattcgaagtttaacgtgtccatcacctgattcaaccttcgttttggctgggtgccgaaggcgacagtcattaattgatcctctttcttggtgtagttgccaagaattttattgcacattgtttcgatcatttctagcactctttgcatggcttcttgaattgtttctcaaatttaaatcggtaagggagcctaacaagttcatactttccccctctgtatttaggtggtgaagtttggctaagacttgcgaatgtgacgtgaggtgctgttgatggctatataagcgatgggtgatgtgtaatggagttagtattgtgtaggtgtgcttgatgtactatttcatttcat

SEQ ID NO: 158288 - DNA, 618 bp, Zea Mays
caatgacacaaaaccacgcacgctatgtcttacgttcataacaatgaccagcacgacaagtggacctgcaccaaatgcactgcgacaggagcctaacaactcatgcacgccgctccataggagaaggagaaagcggtttcagcagacccacacacgctgcatcttccatgcatagaaacacagggaaagcggtttcagcagctgcaggtggagccgttttactcatcctaatccatccaccaacctggctataaaaagtcgtatcgaggcccctcaggcgatagcggtggtggatatgctcgtcgttgatggcctgacgctctccagctactccgactcgcctacatcctccaagatacgcacgtacatgcatctgagtttctagctcactaactccacgggcatcttcacacgcatgtccaccgagttcgtgtcgcgttcgtgggacctaatggagatcgacgctgtcaagatggagggcatcggcggttaggcacgggccacacggagggcatcggcggcaagtcaccaacctttagcacaacgacgggcattggcggcaaggcgccaaccttcggcatgacggcaggcattgacagcagtgtcacttttggcatg

SEQ ID NO: 158289 - DNA, 1162 bp, Zea Mays
tcccaatttccgtgtcgtccatttgagtgagacgatatgatcccggccgagtgacctctgctactaagaatggtccttcccatagaggtgacaacttgtgctgtccctcccccgttagaattcggcggaggacgaggtctcccactgcgaaggatcgacatcgcatggtcttatcgtgataacacctcaaggtttgctggtaccgtgctgattgaactaccgtgttcagccattcttcttcgagtacatcaacatcctccagcctagtagcctcggcttctgctatgttttcaaagaccaaccttgacgccccaaacttgaggtcagcaggtagtactgcctctgacccgtagaccatgaagaaaggagtatttccatgcagagctcgactaggttgagttcttaggctccaaacgacgtagggcaactcccttatccactttcctgcgaacttctcatttttatcgaagaccttttttctgagtgcctccaatatcatcccattagctctttcaacctgcccgttggctcttgggtgtgccactgaagcatatttgatctgaatgctcttttgctcgcataaatcgaagaactctgaacttgtgaagttggatcctaggtcagttatgatactattcggtactccgaatctgaatattatgtcttgtatgaattccacggccttagctgaggttaaagaagcaatgggtttgaactctatccatttagtgaatttgtcgattgctaccagtatatgagtatatcctccttgagctttcttgaaaggttcaatcatatctagtccccagcatgcgaatgaccaagttactggtatggtctgcagttgctacgctggtagatgttgttgctttgacaagtactggcaggcttcgcacctctgaactaactcgactgcatcacttttcgttgttggccaatagaatcccgacctgaagaccttcccgactagtgttttggatgctgcgtgtattccacattgcccggcatggacctcatctagaagttgcttcccagtagatgagagaatgcatttcatgaggacacccgatgcaccccttctgtatagtgtttccccaatgagtgtgtagtgagctaactgtctagcgatgcgctcggctgcatttttgtcatctggttcctc

SEQ ID NO: 158290 - DNA, 480 bp, Zea Mays
tgatctttatcgtggccgcagacccatccccaaccgcggtggcgatcttatccccggcgagatttttctgatcttctggtaatccgcctgatttcaaccgacgattgctcctaatttcgtgtggttgctcgcagactaatatgtatcaaacttgtaccttgatcaacgttctttcattgtgctgtaatgactatgccaaaaattcttatggatcgatcagaccagagcgcgcaaaatggcgcgataacactgcatcctgatcaaaattcagattcagtgaatagatgcagatcaggtcgactgacagcccaacttgatgctcattttactccaatttctcttcagtacaagtgtttagttacttaagtaaacttgttctcctatgaattcaataactttgatgtgttgatctagggcaaacttctcataattttgaagatacagggcttcaaagttgagccaaatgcactgaaaatcaga

SEQ ID NO: 158291 - DNA, 741 bp, Zea Mays
gcttgaaccaataaaatcatggtttggtatatttacgttgatggcgtcgatgccaactgaagatgcccacatgtactagtcatgcaacactttaatactagtcagtgagaaagaggatgagaaggtgtcgatggtaggtgaaaaggaatatgatctacaataggatatgcatgtgatgactcttgcgttaagggttgggcatgggacaatgacggtggtggatcaaccaattggacatcctgttgaggacaaaggatgaaattcttgatagcctctccaagtgtctcaatacctttgggccaagagatgtctagcatgtcgtcctcgaatccttggatgaccgtcgtcacttctacccgcaataatcttttggaatgtcttttccatggaacttacgtcctgggatcacaaggcctgtggctactttcttcatacaaatattgttaataccatatcttataactagggtgcacatcataggccttgtgatgtcattaactggatagcagaacttatttcccgtagacgttatagagcttgggacggttgtacaatttgtggaagatggcagttgagcttctggaattagttgcatctgtggaggttgagtggtcatttgttgaacaaacatcacactcgccaattgctgcatcaattctggaggaggattcgacaacatttgagacatcgggtcattgaactttttttagcttctccataaaatactctaccattgtttcc

SEQ ID NO: 158292 - DNA, 1446 bp, Zea Mays
tccataaggcttttgacacaatcaactggagctacctcatcgaagtactgcgtgctttgggctttggtcagcggtggcacgaatgggtgtccattctcttccgcacgaccacctcctctgtgctcattaatggccgactgggcccaaagctttttccatgccagggggtgcgtcagggagacactctcttgcctttgctattcatcctagctatggaccctctgcaacgcatacttgaccttgcaaccaaccatggcacactttccccgttgcccgaagagatagctagacggagaaccttgttataagcagatgatgctgccattctcctaaacccggttagataagacatgcaggcggtcgtggagattctccaggcttttgggcatttctctggtctccgcataaagctagaaaaagctccattcatccaatacgttgtgaagacatcgagctagaccacgtccttgagcccttcaatgggatcagagaatctttcccatgccgctaccttggcctgtagctccatacacgccctctaaagaaagtgcacgtttagccgctcatcgaaagtattgctcacagactccctggttggaaagggaagtagctgaatagagccggtcgtctcactcttgtctcatcggtcctctcttccataccaacctatcatctgaggtgtcaccgcttgcagtttgggcccataagagaatcgatagaatcagaagatccttcctctggaaaggagaagaaaacgccaacgggggccactgcctagtgaattgggcaacattcataagaccgaaggacttggccggtttagggataccagaccttgataaattcggcagggctttacgcctacgttggttatggcaggaatgggtggacgataccaagcattgggctggcatggataccccgacggacgacactgatcgagcacttttcactacctcaacaagggtcgtcgttggagatggccatagatgtcgtttctggcatgacgcttggcttgatggagaagcgtcatgccacttagctcctagcatatttcgatatccaggacgaaaaacggatcggtgttcatggagctccgggataaccactggatcaacacgttgcgaggacgaatcatcactgcaacctagatgcaggagttcatctccctttggatcagaacccaggacacccaccttatgcctggcttgagggactccattctatggagatggacggtagacggaacatactccgctcgctcagcttaccgtgtccagtttagaggctcctttaggcctttccggtccagcctaatctggagagcacatgctgaaaacaagtgcaaggttttcacatggataatggcagtggaaaaagctctcaccgcggacaatttacaaaaaaggggctggcctcaccaagatcactgcactctttgtaatg

SEQ ID NO: 158293 - DNA, 324 bp, Zea Mays
ggggtgcctcgtgaccgtgagcgtgtggcggagctcaagcactaggttaattcgaccgaaattcacttgggaggggagaacagggctcaccggagcgacgggggagtgcggcggcgctagctcgattagctcggggagaagcggaggagatggctggagctggtgtggagggaacggggctcgggcggctccttttataggcgcccgggagagggagagggatggaggggacgacgagcgccgacgagctcgccatgatggcgggaatggagcaaacggcaattgggacggctcgggcaggcgaggggtgaggggacggctcgg

SEQ ID NO: 158294 - DNA, 371 bp, Zea Mays
gttctccgacttttcacggcaagtgttagttctaattgttttctgaaagcgatgtggtctttttcctgtatctataatggtactaacataaaaactactctttgttgaagtagaatgatttatgggagaccaagttctgggacaaagctgaaggtggcctcataattcatgaacgagccaggggcgttagggtaatcggtagcttttgacgactggattaagagattttttatccttcttggccgatagttagtcttaattgtttggtggatcattaactacgatcaaatttccatgcttaaattcagcccagacctgctagcctgctctgttggctagattctcatcatcatttccttgtatacttttgc

SEQ ID NO: 158295 - DNA, 718 bp, Zea Mays
atcagattcatgaagaaggctggtgcattcgttagaccaaaggacataacagtgaactcatacaacccatacttggtaatgaatgctgtcttcgggatgtctgagggttgaatcctgagctggtgataacctgacctcagatctatctttgagaacacgttggcccctctcaactagtcgaacagatcttctattctgggcaaggggtacttattcttgattatgacctcattcagggctcgataatcgatacacatccttctagtgccatccttcttctccacgaataggacaggggcggcccaaggtgaggtgcttggccttatataacctttctgtgacagctcatcaatctgcttcttaagttcaaccaactctggtccagataccctgtaggctcttttagaaatggaggcggtgctaggaagaagctctatggcaaactcaactttccgctcaggtggcatgcctcgtaagtcttctgggaacacatctgggaattcggacacaacctttataatctccagtgaatctggctccttgctatcaatagccatctgatgacaacatcctttccttggctcaggtgagattaactcagctaccacttcttctcctagtggggacaccaacttaattatcctcatatcacaattgataattgattggtatttatctagccaattcatccctaggatgacatttattccgtgagtac

SEQ ID NO: 158296 - DNA, 438 bp, Zea Mays
ctctctcgcaacgacattgtaggcatcgtcacacatcatctgaagccaaccttttggcaacgtattccgagcactcactaacctacatagcattatttctgttcagatcattccagttttggtcccgacagaaatgtgcgcgcgctggctgttagcatcagctctgccaccagcaacatgtccgctagtagtccagttatactcgctcgctccctccattattaaccagagaactccctccaaaattgttctccttttgataacgtagtgtttgcttatgtgtattttctagctacaaagtatatatgcatgtaaattttattcatactagctaggctaagattccaaaaaaaacctttagcgtactaaatagcatgtgtgtagatacatatcctgatttaatttgctattagctacaggtatagatgtatgtaagtt

SEQ ID NO: 158297 - DNA, 443 bp, Zea Mays
cttcgacggggaggaaatcaaacgagtccttagtgccattggtgtctgttctgttcgctgtagtgtgatttgcgaagtcaacttgctgcatccgttgctacgtgcctgtctttgccccccctccgtataagaaacacagatcagaatgcattcagccctcagcatgctccatgatctgatctgactaatgaaatagacgaatggcctggatcgcagctacagtcaccgacgcacaacgccgctttagatccgaggtgacttgacatgtatgaaatgaacacttcgctacgaatctctgatggctgaatgcatagagctccagtcttctgccagctcagggaagatagataatctaatacaaactaaatgcatgttagccccagcaaacatcttgctgtaaacctgatagagaacttgtccggaaaaatatttcacaaggatcg

SEQ ID NO: 158298 - DNA, 547 bp, Zea Mays
gaagtctactggacaaccatctcctctccgcataagagggcatttaaaaattgtcaatcatgggatctagctgacattgagagggattatggggatgtggacacggaggctgctagacgaccaagtttatgtggttcctgcttgtcgcgcgaattggggatgcagagagggagtttggtggagttggtcttagtccaacttgagcaacacgccacatccccattttgcacgctctaagccacttcactacaacaaccttactattgggccgtttaaaatggaggcaaccgcttccactcccttttcctatggtgtattcctcatctgcgcaaagcaaaatggggatggagagtgggaaggaaaggctgctggagtgatgaacaacgtcttgtagcgtatagaatgggggtgcagagtgggatggggaggctactgaaagagacgaatgtgcgctcgttgcctagatgcagatgtagatgcatgccactgctagaaacggagtgggaaggggagactgttgtacacgctggatagggattgagaggag

SEQ ID NO: 158299 - DNA, 402 bp, Zea Mays
cgtggcctcagcatcgttggcaaagcttcggaatgacctgtccgtggcaagtgatggctgcacgttggtgcatgagagcagagcgaaggagggtgcatgagtgagaatgctggcacatggaagcaactgggggcttaggcagtttatatagggccatgaggggtagcggaggaggcatgagccatgctcgattgctcgccggagttaatggctagtgggggagagggaatggtggtggcgcttaatgctcgatggagaaggagagaaacgggcgtggaagtggactctccactgagtcaaggcgagcacaaatgcgggcaattactgaatgcgtggaggcaagtggacgtgggggcacgggcgcacgacgacttgaggaagaagaaagctctcacaggtggg

SEQ ID NO: 158300 - DNA, 673 bp, Zea Mays
gcagcttgtgatttccgttacatttcagacaggagtcataccagcatgaaaccagaagaaatcaaggagtacagaaagcagaagcgagcaaaggccgagaagagtctagatgcgtatgtgcagatggcaaaggctgttacatttcaggttgcctgtgcgaaagtaataatcgagacggatgatgtagctgaaggacttgaggagctcatctctcttaataacgtaactgagtttgtcatgggagcagctgcagaccgacacttctctaggtacggatcagactaacaaaatcgctctacttccttaaattggatgcacatcttacttccatgattctgaatgattaaccagaacgtcaccatactctctcacacttgaggacctgggatacttaaacaagttttcttacaagctggttatgtggttgcagtaacagaatactctattttctcttctaacaagaaatggataggaagctatagcatactcagaccaagcaatttcttaagagcataccttgcaatcgcgcattctaacagatgctctcaaactgtagagaaatgaacacgccaaagtcgatgacagcgctcaagcttttcaagacagcagctccatcatgcaagatgtggtttacttgtaaaggtcatttgatatgtaccaggtaaagggcgag

SEQ ID NO: 158301 - DNA, 703 bp, Zea Mays
ttgactggaaaatctattccttgaatcttgaaattaacatggaggcatgagtgtgtggccttcatgtcacctcccggtgaactaatgtgtaacatcttcttaagagggtgctttggtatgttatgtttttccacgaatgactcagttataaattaatgcgatgctccagagtcaaataaaactgatgcgggtatggaattaataagaaacataccatacaccacgtcggcatcctcaggaattgattcagatgtgacgtgattgacccttcctctactctggttttgcggagtcttgttctgtgcagatccacgagcgggggtgttctggtcattcctctggttgttgctcttctgaggtgtctgctggttgcgcctagggcagttgttagcataatggccaagctcaccgcacttgaaacaaccattgggttggactggtgcgttgttgcttttggcctgcgtgttcacggcgccaccttgacgagtctgtgaattcccaccagaccattggttggtctgagagttgttccactgctggttctgactttgattgcttctctggtctcgctgtccagagtgttgcacttgataattatttccaccctgatttccagagcggaactgagaaccctgcgagttgttcgggcgggtgttcctgctagactaaccttggaacttccttttatggtcagacagttccc

SEQ ID NO: 158302 - DNA, 1295 bp, Zea Mays
cgtggttgcaactaatatccatccgtgatcatatccgcgggtaggaaattatttctatgcccgtggccatctggtttcggacgggtttcgaatatctatcggatatgacatacacaatcattttttaacgattgaataacataattaatcaaatttctttccaccgttatacacaattaaaaatttaataaaagaattattattgattggagcttgaatagtgctagccgcctacggtggtgcgacctatgatatttggaatggggcttaaggcacattgcaagaaaccaacaagactagaaaggccggtcaatggaggagaattgggagcattatacatgaggttcatggagttaggttttgttctttgctgtataatatagtctagacaaaaaaattattggtcaattttgattatccaacagatatcccacacgtgtgagataatatcctaatttataccggtccgacttcggatcaaatacgggttgatccacgggttaaaaaatatatttagagctagtttgagaacccatttttccataaaatttgtaattttctaaaagaaaataaactaatttctcttggaaaaataaaaaatctttggaaaaatatacctcccaaactggccattatatccggcttcctgcggtcgaatattatcatcctcctcccgccacgcggccaccactcaacgccaccctccctgttctgtggccatcgtcctcctcgcgttcccctccatggccctaccttctctgattctgtcgaccagataagcacaagactgctacttcaactattgattccccgccttgacgctgcactcttgcctgcactgcctcgccaacctctctgcaaacgcttcgacggatacgagtacagagagttcaactgtgcacagtgatcaaaaaggtattttcgcggaaaaaggatccgatccgttataaacctgcgtgtagtgtagtgtagtgagtgattcacgatcacgagtaggagtaggagcacctgtcgtctaagttggtagcatcatcaggttattcagctcggattcgttgttcgtaaacaatcgtagccgatgaaggcgtgcaagcgacaccgccgatatatatatatggtagagataagattcccaatctcccaggatgaacagacgggcagcaatccaagaagcagcagcccacatcatctctgatggtacgcaacggagtatctgtctgtcgcaaacaactggcgcctctcccacacacagataaataatgcagcgcagcgcacacagtggaaagaaaccggag

SEQ ID NO: 158303 - DNA, 577 bp, Zea Mays
gcaggctgctcagatggggtacgagagctacctggtgaacgcggagaacaatggtggcggaaggatgtctgcatgggggaccgtcgtctctgcagccgcggcggcagcagcaagcagcaacgacaacattgccgccgacgtcggccatggcggcgcgcagctcttcagtgtctggaacgacacttaagctacgcgggccggcctggctctccgaatccgaaccgatcgatgcgtcgtaaaacgtacactgacataagtaacaacacttagggttcttcatggagttgttaccagtaagttgttacttgtcatatgttttaagttctcaatttgtagctggaaggaaagctagggtttcttctgaagggtagggtgatggcttgtgaagagtgccacgcatgcacggggttttctccatgatgacggtaccttcacttgctgccattttggggttcaggttcagaagatggataccgagtagcagtattaaccaaaagccatgtttaaatgggatgggtaggaaattgaaccggcaagcttgcttgtaaatggtagctagggtggatgagctgacacg

SEQ ID NO: 158304 - DNA, 336 bp, Zea Mays
ttagggcacaacagtcgaaagaagagctaatggatacgttgaatcaggacatgtactcaagggaggtagacgtgctgccatgcctatgttacgtgccattaacgatcatgggccagagaagtagagttaaagcaaccgtcttagaaagtcattagctttggtttctgattgacagttgtttgatggcaggtgacgagactaccagtgacatcgtcttggactagaagaagatccctcaggctcttcttcttcaccttgacgactcttctgtctttgttgacgcccgacagcctaaggagcaactaaagtttccgcttaatcaacgacttcttcgac

SEQ ID NO: 158305 - DNA, 481 bp, Zea Mays
ttccttgaatggttgcaggaggagctgctggtgctcccgaccattgtgatgggtttcatgtccttcgcctccctcgtcacctgcgagggggccgtgaatgctttgtcccgtgaggggtgcaggcattacaaggtcttcgaccaagcggacgaaaactttgaacgtgaaaacttcaaggtcgaagaccctgtgctaaagcagtcggcgggggcactcttcgataggatgtggggtccgcacggccgagaggcggtcagggagcggtccgacctagcaatagagcaggtaaaggctggtttttgtgtggttatatgtgtgggtatgtgcggttttgctgaatgagtgtgctgttgctgcagatggcacatgccgaagacgtcgaggaccttggtggtctggacggcgcgctgcaagaggccgcagaggtcgatccggtgctgccatcggatgccggtgaaggcccctcggcgacccccgcgcc

SEQ ID NO: 158306 - DNA, 2459 bp, Zea Mays
ggacaaaggaataaagtggccatactttgtgaatttgtccacaacaacgagaatacaatcagcagtactagacctcggcaagccttcaataaagtctaatgagatagtatcccaagctacttctggaactggtaatggttgtaattttccagggtatgctgttcggtccggtttagcctgaagacagatttggcactgctgaatgaaagtatgaatgaattgtttcatatttttccaagcgaacagttgtttgatgcggctgtaagtaaccgggatacctgaatgtccacccaccgccgaacagtgaagagcagttacaatacgagtatgaagctgtgcatcatcaccaatccacacacgtcctttgtaacgcaagagtccattgtccaaaacaaaatgagggactgcattagggtccacagacagcttagtgagcatagactgtgttgcagaatcactggcatagctggattgcacatcctgcaaccattggggaaccacaactgatatagcctggatagaagattgagcacatctggatagtgcatcagccactcgattttcagaaccggatctgtaatggattttatattgtagccccaagagtttcgtaaagaccttatgctgccagggtgtatgaaggcgttgttcgttaagttgggagagacttttgtgatcagtgacaataatgaattcagcgtgttgaagataagctctccaatgttgaaccgctacaatgagtgccatgtactctttttcataagtggataaaccacgcgacttggggcccaatgacttgctgagaaatgctaaggggtgtcctttttgcattaacacagcgccaatgccagaatcactagcatcagtttccaccacaaaggaagttgaaaaatctggtaatgcgaggacaggagcagcagcaagggcttgtttcagtgtttgaaaagtcgtggtatgtgcatcggtccaaacaaataataccccttttttaagcaaagctgtcaaaggttggcaaatgaccccaaagtgtttgataaacttcctataataaccggcaagcccaagaaaactgcgcaattctttgaccgaattgggcacaggccactgcgttatagcgttgattttcagtggatctgtggctaccccctcagcactgaccacatgacccaaataagctaccttgcgttgagcaaacgagcacttagagagttttaccttccactgttcacggtccagaagttggaatacttggtgcaggtggttcaagtggtcttccatggtaggactgtaaaccaaaatgtcatcgaagaaaactaatgcacacttgcgtagaaggggagccaaggtattgttcattgcgcactgaaaggtgccaggtgctccagtcaatccgaagggcatcactcgaaattcaaagtgacccacatgagtttggaaagctgttttatattcatcaccctctttcatcaagatctgatggaatccagcgcgaagatccaaaatagtgaaccaagcagcaccaaaatgttcatctagcaattcatcaatgatgggcaccggatatttagccttgaccgtgagagcattaagatgtcggtaatcaatacaaaatcgccaagaagcatctttctttttaactaaaagcactggggaagaaaatgaactagtgctatgctgaattaggccagtattcaacatttctgaaatttgggcttcgacctcatctttcattgcaggggacaaccgataaggtctgatgtttaccggtcgagcaccatccaccaatggaatagagtgatcacagaatctgcttggtggtaaggatgtaggtggatcaaagacggaagcatattgctgcaacagttgtaggactggtgctggtagggataattcttccaatgagcacaactgaggcatattagactgatgttctaacaccgggtagacttggacaatagatccagaaggcagtgatggaggcacaccttgcagcacaataggtctgtccccgtactgaattgtcagtcatttatgtttccaatcaacaaacatggggctgaattgctctaaccagtccatgcccaagatcatatcatagaagggaagtggcaccagcttgaatgtagaggtaaatgtaagtccgtgcatggtccacgatgcatcaggaagttgagtgttacaatagagcagctcgccattggccaccttgactgttaatgcttgttccatagcaacaactcctgatagcttagtactataagaattatccagaaaacagtgagtacttccacagtccaatagaattagcatgtcaacaccttgtatactgccacgaagccgaaaagctttagaattggcaggaacaactgtggcctccttagatattgccatgaggaattgctcagctgaatcttgaaactccccatcagactcatccttgtcaggtaataccatatccc

SEQ ID NO: 158307 - DNA, 347 bp, Zea Mays
ctcctcttggtcacaaaagcacaatgttccggatgagggaggcctcgcttctttaacctgtcagctgtccaacaacggtttccaatggccatccaaagaaaaaccttgcactttgtaggcgcccaagacttccaaagcctcttccaaagttcgaaggagatagaaccattggagaaggccctaaaagtaaggatccctgctgacaaggcccctgggcctgatggttttactggtcgcttttacaaggtatgctggcccattataaaagttgatatgatggctgcaatctccgctatttggggtaggaagtttgataattttgggtgccttaattctgcatatataac

SEQ ID NO: 158308 - DNA, 876 bp, Zea Mays
acatgtcttcaaggatttgatttactctttctgtctggccatctgtctgcggatgatatgcggagcttcttattgcatgggtcccaagtgattcttgtagctgctcccaaaagcgttccacaaacagtgctcctctgtcagatacaatggtctttggaataccatgcaaacgcactatttgatcaacatagatttctgcatatttctctgtcttatgggtggtatgcactggtaagaaatgagtggtcttggtcaatctatccacaatgacccaaatggaatcatggtgccaggaggtattgggcaatcccacgataaagtccatgcaaatgtcctcccatttccaagatggtatgggaaggggttgtaaagggcccgctgccttcaaatgattggctttgattctctggcaggtgtcgcactcggatatgtacttggcaatttccctcttcattctggtccaccagtataaggatctgagatcatgatacatcttgttgttgtcggggtgcatggagaattttgaaaggtgagcttcatccattatcttctttctgagctcagggtccttgggaacaaccaatcgatctccaaaccatagaattcctttgctgtcctgacagaagcatttgtatttttctgctttctgcttgatcaattccttgataacctgaacacccttgtcttcaatctgtgccctgactatttgctcttgtaatgtggctccaccgagatataatttaaagcacttgaagaaacaacttccaggttcagcttgcacaactcatcacacagggtggtgacttttgcatccatgctcatacaattgcactgggcctttctgctcaaggcatctgccacaacattggctttgcc

SEQ ID NO: 158309 - DNA, 752 bp, Zea Mays
attgcgccaacaaggataacgtgtactttggggaacatcccaagaataccacctccctacgcgacggcgcctgcaataacactgtcttccaaaaacaggatataactgcgtgatactgagataaccaatccatacccaagataacattgaatgcccccaaggaaatcacaacaagattggccgaaaagacctcatcagcaagaataacggaacacccctaacaaactgaacagctactaatggagccattagcagaaccaaccaaaattgggtgacccgacatctgcaccgaaagaccagcctgcgacaccaaatcctccaaaacaaacaaatagctagcgccagagtcaaaaagagcatgggccacaaacgaatcaactgaaatcgtacctatcaccacgtctccttgctctctgccatccgcagcgggtagcacataagctccggaaatacccacagaagaggaagctcctggagtgaaattaacagaagaaccccactgagccaccgggtgaggcagacgcggagctccaaactgagatggcataggagtagtcggtgcaggagtaggcgcagccagatactgaggaaaaccctacaccgactcgaattgagaagtcccaagcacataaaactgctgcggaggaagtggaactgaaagttgctgctcagcgcttgatatcatgttgacagtgccgtgagaagaggaggaagtcactggctcccatctaagcttcccattgggattcctc

SEQ ID NO: 158310 - DNA, 821 bp, Zea Mays
ggaatggcgacctttttaatgagggcgagcgcgaaatttgggggatagttgttgtgattgcttgaccgagatcgtgctttccaatttggtgacgtagattgtgctttccaaatttgtgggtgcatcgcataggagaaggcaatgctggagcctagagcacgtaggggaacacgatgctggggctaggcgccattgaccaagcttccaaatttgtgggtgtagcgcgtaggggaaggcgatgcggggtcttgggcgccattgtcgcgcctgccaaatttgtgggtgcagcgcgtaggggaaggcaaagcagatctgggcgccattgtcgtggcttccaaaggattggtcgctggtgcacataggggagccgggaaggctttgcgggggcctggctagtcgagcggctgcgctggcaagcctggcatggctggtcgggcatgtgcgctgagggatagccgaggtgggtccagttggcagtaggaatatgtgttgtcgaggtgggtccacatggaagtcggcaagctgcgcgtaggtggagtcgaggcgggggcattggtcgcgccagcgcccacactggtgtcttaatagtagtagggattggtgcctatcatccctttgccgcacgacgggtcccttaatgatccctctacaaagaaagtacaaaagaatacaattaagtctactgcttattggtgggacgatagacacctatttttttaatcatttttagttttgaaatttcgaatattaaatgtaaaatagaattgtcgctagatctcgtgcagagtttcttaacaaacgtttcgcgtgctaaatcgaaa

SEQ ID NO: 158311 - DNA, 731 bp, Zea Mays
tttgtgtgaaactgctttgtgtttgttggtttcaggtgatcctaagattatccaccgtgacatcaaggcggcaaacatacttctggattacaatttcgagcccaaggcaagtgatttcagctcaaggcgtgtgaattctggatgtcatgcatttgtctaaaaaaatgaacatctggtgtgcaggtttcagactttgggttggccaagatacagccggcagacgacactcacgtctccacgcgtgttatgggaacctttgggtaaacctcttgtgactaagaagtctacgactgtagtagaaactagaatacatgcatgcactgtcagtgacgaactcgtttcgttttttttcttcagatatctggcgccggagtacgccaccaccggcaaagtaacggaccggtccgacgtctactcgttcggggtcgtgcttcttgagctgatcacagggatgacgcctgtcctgtcgccggagccagacaacgacgagactctggtttcttgggtgggtttttaccttggttgttttgactggctagctgttcgtgcagagcgaggtgactgactctgctgccattctgcctgtggatgtttttggtgcagtcgaagcctaggctggcgagagctctcggagaggacgccctggacgagctgaccgacccgatcctgggcaccaactacgacggcgtcgacatgcgccggctcatcgcctgcgccgccgctgcggtgcg

SEQ ID NO: 158312 - DNA, 401 bp, Zea Mays
cggtgagcttggttctgcggtgttcttgaccgatttggtggtaatcccaaattgaagttctctggtggacaattcgaggcacgagttggtgtatgggttgcttgactaccttgcggagccaatgacacactcaatttataggccctgggggcggtggcatgtgaattggagatggcgcggtggcggccgaaggagggagagttcactggcgcgtgcgattggtggcaaccatcgtggcaaggccttaggtaatagaaagacggtgtgtggcgatcaactgcgacgtggtaagatggctgacagcgtggcataaccgcgaagaacggcggcacgccggtgatggacatgcggccacgtcgccggtaagtggaggagcgacagagtggttactgtgccccaag

SEQ ID NO: 158313 - DNA, 803 bp, Zea Mays
ggacgatgactcggaagtgggagctggagcgacgagctggtggagtagctccatctcgaaccaacgacgacctgcgagagatagttagccaagttaccttaggaatgcagggcgggtcctctgtccaggcccagagacagagggcacgcgtgtcctcctttctcagcgattgaagctcgacatagtccagatcgcaggccctcgccaccacacgcttggcgatgctctcgttccaagcgtgaaggggaatcccctccaggcatagccagatgtgatacttgaggtccacagggtctgcttgggtcatcggtagccaccgccgaacgcggatgtcgaggttgccggagaggaattccctgcgctccaaagtcgtctccctgtggtgctaatgggagaaggtgacgacgaagtccgctgggtggtatcttgctacggagatgttgtcggggcgcacgcagaactggtggtagaacgccctcttcatcctgtcggcgctcacctcaggtcggtcccgccccagccaggcaacgacggcgtgggtcgagagcctctctagctctgcctccatgtccggtggaagcagcgacggcgaaggtttcactggggcgcgtccctggatcgcctggtcaaggcatggtggcttgaacgagcggagggaagtcgtcgctgtggagtctggggggcggttgcggggcagccgtattctgggaggtcttggccttgggacagagccaagctttatggcctgggcctccgcatccgaaacaacacagagggtccctgcaggaggaagcatgatgtcc

SEQ ID NO: 158314 - DNA, 384 bp, Zea Mays
tggaccgatttaattgagatttagtgtgcgtaattcggaggttagcctatcggcgtgagacctcaccgtggcggcggtagtgccgtgacctggtctgcccgtggagaagatgtgcctccgccgtccgattttcttcgaatggccaggattagaagatagacaccccttcgcccatttgaagcttagtcgttggatcacgggtgtggggtttagatcgagctaggacgtggctgtcccttaaccgttgatatcggatctgatggtcagggcgggttgcaacgtgttactgcgccgtgttctaatctcgtccgatcgggtgtgatcggacggctctggcctaccgatacccctttgcggttgttgctttgcgaatgagcccccgcg

SEQ ID NO: 158315 - DNA, 674 bp, Zea Mays
ctgttttgctgccaaaaatttaaccatagccgaagcttgactttcgcattcaaacgaagctccagtttagtctctgcttcgtcagaagaagagcttcggaaaaagggttattaatttgcaaggaatttttaagaaattcaaaatcaaatggctagggtgcgctctacttctagagttgagcgtgatggagatgaggccgaagctactgaaactgttccgatttctgaagcgatgaagcgttccgggctagttacagaagaggacatacctgctgccgaagcaacacaagctgatgttgaagaagttggttctgaggatgaattcagctgcggggtaccaactaaacctagtcacttggactttggaaagtccactatctctgaagctgaccttccaaaaatggtgaagctgggctacttcagcgaagcaaaaaaggagctggttcgttttggcggagaggaaactactccgaagccggaaaagaatgaggtagtagtgttcaaaagcttctttaaagcaggattaagatttcctttgaatgggatgattgctgatgttttgaagaaatttggggtttaccttcatcagttgacccctaatgccattgtcagattaagtgtttatatttgggcccttcgtagtcaaagagtggaaccgttcggcgaaggtttctg

SEQ ID NO: 158316 - DNA, 438 bp, Zea Mays
caaaggcggctgcatcctgccctcctagctcaatggcgaaggtgtggctctataccatccgattatttaagaacggcatcaggcgcagcttgacttcactcaaatcctagtcgtgagccagcgtccacacaccgcatgcaaagaaatcctccaccaaattgtggtcgctgctcatcttagttgtgcgccgaagggcctcttcactcttgtctcccttcttcagcttaaattgtggaaacgccacatagcaatgcaagcacagaatatatgggggtagctcaggtaccccctcgatgtcctccggcaccatatagaaccagaagtcccaccaattacaccacttatttttcgcacatgcaacaatttcaaccacttcacctgaatcctttccggtcctcgacgtgacagtgcaagacccaaattgtgtaatcaggcccc

SEQ ID NO: 158317 - DNA, 429 bp, Zea Mays
gtgcatgcaaagttaactaaagagtatctgacgaggtccaagaaaaatcggcttggccgcaatcagtcaagttcctagatggacagtgtcgagggaacgggttataaaaacatggtgcggtacataggagagatttttatatggtggtaacaaaaatggtcttatatatttgggttggaacaacgcttcctaatggagggtcgctaccttatacccgtttcttgtgactacgacgacaataatgaaccaaaacatggttttatatatgcaccgaaaaatccatctttacaaattttggcgtgcgtcctatgttgttgggagtgtgtcttggccgaaggtcctcaaaccgatgtgttctagtcatttccaaatttgtttaaagcttaacgacgcaagcttctgttggaatataatataagtgaatagtcc

SEQ ID NO: 158318 - DNA, 360 bp, Zea Mays
ttcccgcatgcttgagcaagctgtagctgtagggagacagaatcgcatcacaggagagctgacgtggagcgccgagatgagaggatacgcgacatctccatttcacctgtgctgatttaattagtatgtgcacggttgtaataataattagttaattcataaattgaggggtggacctgctagatgttacctcgcgctttggccgatggactgcaaaaccaggagtagtagacacaccatccgaggaagcctgcaatagccacacatgctacgactaccatggcggctatgacacctgatgcgagcccgccgggagctggcgcaggcggtggcggtggggacacacccttcttctccagc

SEQ ID NO: 158319 - DNA, 743 bp, Zea Mays
cggtttttaaaaaaggattccccaacccgagcccgagccaaacacttctcctctcctccagttcatatctctctgtctctggctctctagaatttttccttctcgccgccagtgatcaccagagttcttcgacgaactcctccagctcaagcagcctccctcatccttcacctggtgagctcctccactgattttctcccttctctgatcctctgattgtgcagtgaagcccaaccattaccaccttttgaaatcccatccaaattctcttcaaatctatggaatcttgtgcaacctgtatgtgcccttgtgtcccttgaatccccctgcaggttttctactccctttgggaggtttcaaactctccaatagccatttcattcaaaacctaaatccccgcacgccacatgttcgacgaagtacaccaaccactcaaatttgctcaaatcgaccccagatttttccagcaccttcatgccacatctagtaacactttcgccaaatttcacaccaatctgatataccagacaccgattacaccactgtttcacatttatagcgattgtttctgagctaagtgccacaaattcattttctccgccaaatttcaaaccaagcacacacttcactcatatgcactcatatatacctactcgtgaagtgttggctcaattccaactcatttaattccccatctccaatttcaaacctcctatggcataattcttcgttcaaacgtcgtt

SEQ ID NO: 158320 - DNA, 473 bp, Zea Mays
cttcggaagtcgagaaaagaagagattgaacagagtttttgacgctattggcttcgtctaccccgactaccgctacccgctgcgggggcaagggaagaagaggaaagctgctgctctggctgcctcggctgaacctgtgccgaaggctgcgggcaaaaagatgaaggtacttacccaccgaccacgttatattgaaccgaccgtggtgcctaagtttggcggggaggcctcttcagctgatgaatcaagagaaactgctcctccgatgcagagggctgaagaactggctacaatgccgagggcacctttggttgagctagttgaaacgaaggttgacaaagataaggttgaaaggtcaacaactgaagaggtaacaaagatgtcagggactttaagtccttcaacagaagcaacaacgctgagggcacaaaagagttctgccataactcctaggagaaggaggatggtaaatg

SEQ ID NO: 158321 - DNA, 294 bp, Zea Mays
gagcaaccgaaggtccgccacctcggcgctccgttgggcaaggcgctcattggcctcggcaagcgcggcccgctggcatcgcagcgactcccaaacgtcgctttcgcggcggatgaacagcgacttggcggtgctcgcgttcgcgagctcctgaggaaggaaaacaagatgtcacaaagaatgccctggtcacgcaaggtgtacgtctaaatccttacctggaaaaccctgggaacgtccctagaaagggtttccatggtcgaccgaagcgacctcatcgccgcctcgttatac

SEQ ID NO: 158322 - DNA, 413 bp, Zea Mays
tccagatcttatttccagtatccaataacgccatagagtatgaagcgttggtccatggactaagcatcgttgcttcactcggcatcaagagattaatggtgtacggcgactcactggtggtcataagctaagtaaacaaagactgggattgctcgaccgactcaatgagcaaatattgtgcagcggtgcagaaactgtaagacaagttcgaaggactagaattccaccatgtgaaaagggattgcaatgcagcggttgacgcactatcaaagctgggatccagtcgggcccaagttccacctagggttttcgtccaagaaatacagcaaccgagtgtcgccacaaatcagatggaggaatgccatgttctgagtcaggcagaggcagatcccaaagactggagagagccaatc

SEQ ID NO: 158323 - DNA, 838 bp, Zea Mays
gtagccgacggctgtgagaacgtgcacgacatcaacttgtctgatacgggagcatcggcagcagccagccccagcccctaggtcctcctactcctggcttcccgggcgagaaatttatttgtccatttgtccatatctagctggatcttcgtggctccctccactcacgctgcatgcaagcatcgaagccgacttacccaacaactgctatcggccactatgcactaaggaacgctatgcctaatgacgtgtgaacccagccacatcctcggaccatgcgtcataaggccatacaacccgtctcttctccatggtgtgtgagcaaactggcccgcgtcacgcgcgcgttctagaaggacctgcaacgcaccaagcgcttcactaacaaatggacaccgtgatgtcgtgcccccgcataacgcttgcccccgttcccctgctccgtcgtcctcgtctgacgcccccatcccctcgggacgttggttggcaagagggccggtgaggcgactcgctccgctgttcggtttgggagagatctggacctgatcggatcagtcagtgccaccgatccctgatcgagtggcgtaaatattctaccgtcacatctgatctaccgactccttccgacaaattctgaccacccgtcgtcgactctcgtcttgcggtcttcacacttttgtgtctatttgcttgttcggcttgaatacgtgcttcagcttgtgcaacacaagacatgctagaagtttaactatttattgctgacattaatatttatgaaacagggattgtgtggagctcatttgatttaatgatgcgattctaggaatcccttccttca

SEQ ID NO: 158324 - DNA, 550 bp, Zea Mays
tccatattttagatgtatttctgtggttaacgccgagcatgctatctgtgttatggttactaatatcttttcattgtgttaaacacttctttctctgtggcctgcatatgttttttcttttgacattctagaatcattgttagtggatacccaatgaaatttagggaatttctgtcatgttagagagcctttggttcaatccacaactataccatttaggatgtatcatgctataatgttgccaatagcagtggcttgatgacatcactgtgtaaatatgatggattgcttctttggaactatgctatataaaagatcttttttctagcttgacttctagcattagttgaggcatgagcatgggtgactgagcatgtaatactaaatgttctgatactgatatcagaacatgaatttgtttaaccaaatattatatcctgaacttctgtttccacagcgtgatccgatacagaattgatttcgaaggtcttggaaatcagcagcgagcgcagcctcatccacaacttcttcttctcctaccacgtgtaat

SEQ ID NO: 158325 - DNA, 405 bp, Zea Mays
gagcggacctcggaagggaacggccggagtcgccggcacccgcgcttcgcagcccgtcggtcatgccgccgccgcagccactgcgtgccttatcttccttccctttacctcgccgccatcctacccatacccccgccactataaccggttgcgcctctacttccgaccgcctaccattcgcaatgccctccggcccggatgtaaggttcgtagtcggaaaccgtcggaaacccttggaccatttgccaccggcccaatgatatcgacctgccccggccgcggcaagatatcatccattgggagttcgaaactccatgtgacggtaaccagccaacctgtcggcatctccctcttgtcaattcaccgtgtcccgccgccgtgcgagtccggagttcctatctactt

SEQ ID NO: 158326 - DNA, 375 bp, Zea Mays
ctggtctttctagcatagctctcttccgaccagtcaccgaaatgaaactcacgcccacgataagaaactgatcttctatcgatagcccattgcttggttcttgcatcaggaaagataataaaaaactgttctgggaaatgtttgacaagttgatactgaccatggcagagattgaacttctctctcaacatgtctcctgccacaatggtgtcaacctcatggctatttccatcgaaggagcacaccaccgccttgctgatgagatcatccctgcgacgacggattgagccagtcgccgaaactgcacagaaggcgcgcgacggtcttgcccttgggtcacctgggtagagggcctccatgttctggccctcctga

SEQ ID NO: 158327 - DNA, 631 bp, Zea Mays
accgtgacaggcacaagctagtaattggggcggaagacacgcctaattaggctttcctcctatgaatgtccaaaatgtgcgttaggtgttctagtaatgccaccacctcctgccctatatctctcgggctctctattggccaacgaatatttgaccttgtgcatatgatgtggcatggcatgattataatatgctgtcaatagggtagcgtagtgctgttgcgatgggtgcaaaaactgtgcatattgtacaaccccctggttctacgaacgtgtgcccggacggtccaaagttatacctggacgattcagccgtatatggtgctatttgggttgtctgcgcgctggcttgtgtagggttggacggtctgagttatctctcagatggtccgactatgtccagaggcggtcgcgcgtaggcggtggcggctgtggtggcactacgaacgtattcaacggcataccatataatggtagcgtacaggatgacccatttgtagtcgatgtgttaagtgcgggtggcaccgtattaggctcatgcaaggaaaaactaggggcagtagatttttcatacgaacacgcccatcctttaactgattcatctatatattgttttaattgagttccccgtt

SEQ ID NO: 158328 - DNA, 393 bp, Zea Mays
ctcttttgaaaagttgctgccgcgaaggggtatctctcgatcttagccgttggattacaccgacggcctggatcagatcccgcccattatgaactagcgagcgtgcaaaaccgtccgatcaaaatccagcgtcctagatccgcagcggcgaaagggtatgcgcgatctaatcggaaccatccaaactacgatcaacggtcgacagcttcatctaggcaaaggggtagcactttctaatctaaggcgcttatcaccaatcggacggcccgtgttcatctcctacctcccgccccattcactctcctcgcaagccagccccggaagtgaccgaggccaccacggcgtacagtccggccacgacgccgtgcccgcccaagcactagccaatctgcg

SEQ ID NO: 158329 - DNA, 319 bp, Zea Mays
tacttctactactactatctatactaatatttaaaccagtggcattacgccactagccttgccgacgctgtcgtcgccactaccgccgtcgcccttgccattgttgctgctaccaccaccgtcgtccttgccgctgtcgctgccgtcaccgtcgccgctgccactgtcgcccttgccgtcgtcgctgccatcacctttgtcgctgtcgtcgctgctactgtcgccaccatcaccctcgccactgtcattgccgctgttgtcgcctttgtcgtcaccgtcgccgccgctccattcctcggaggagttgaaggagtttgcc

SEQ ID NO: 158330 - DNA, 896 bp, Zea Mays
taaacgatcttgtagagctgcaacaccaaattcttctttggataaaccaagttcagcccttaaattgtttgcagcaatagcttcatcaatgtctaatgcctttcctcccccagcatttggtaaccctaaaataaggtgcaccgtctcctttgtaatttttagctccttccctgggccgactcgaattgtcatatcattatggtcaagcttttccatcagccaagctaaatgagatctactaccaagcgcatcaactctcatatcaagtatactggagaaccccctccgtgcaatagcttgacgttgcctgtcatttaaaatctgaatgcttactataacatcttggggattgcatctcacattaagcctctgctgaaataatgtaaacaatgaataacgtaaacatttacatctgcataatcgcaactcaatgtttaaatcaaatctcaatacaacataatttcacgcaaaaaatgatatattggcattgaccatcaattctaacctgtcaggggatccactgctttcctctgctttgtaactatcttcttcaagacttttggaggactgtcatcaaagttacgcttctttgataatggtataaagtcatcgtcctcgtcaccggcctgcatttgtttgtgtctgacagcattcgccggaacacggggtatgtcgacactaaagcactcttgagtagactaaattataattcgctttggattagatggaggtcggtctacgttcttcatgtatgattttcctgccaaatcaaacaacacatatacatataaaacatataaaaacaatcttatggagcaataaaaattctgctcatatgcaacagccaattaatgtataagctggctctttcgtgcgtactggccctaaatgactta

SEQ ID NO: 158331 - DNA, 416 bp, Zea Mays
gttgcttatatcttgcttaaattaagatctaaacgcatcaaaagaattacgcactccctcagaaatcatacgcgtaatttctgtgacatcagccccatacttgctagctacagaagtatcaatcatatgagctagctcttcgcaagtgatagatgaacttaccttcttgccgaacgtgcttgccccaacggtctgtttgatcacaccattgttggtttttcggaagaaagccaacctctcgttccgtttctcttccatctctcgtgcgatttcatcttcaatctccttcctgtctgcctctgtaagatcttccatcgtgcctttgatcatgttcaagggatgaacttcagatttgtctggtgccgtcttcttcgttgtcttgtcctccatagccacgactatgattggcgatgagg

SEQ ID NO: 158332 - DNA, 645 bp, Zea Mays
ctttaccgagagccacttaatcttgaatatatttttatttaggagaattctttaaatttcatgagaagaataacttattccactagagcgaagatttttttatgcttactcaatttcttagtattactccctataaaagacacaaaaggaatacatgaactcattacttatttttagggtttacaaatcctaccccccttaacagaaatctcgtcctcgagatttgtaagaaagagggatacaaaaggtttggtttgggattttagcctttagttggcctgagaaggaagagtcttttctttcatgaatattagtgggtgattagaagggcatatgtatccggctacttattatgtaggatataagagatggataggtttgggcaagagtagcctagggtaagaaagtttagagtgagaaagaacttttgttgggtagtaatgcccctgatgatcaagtttgacttctctatccttccttgacaaggttgatcttgtcctttccggtcttggtctcattgagtcggggtcagtgtatatcatcgaagttgggggaatatggttaagatagatataggtgagatagactacatgatgttggtcaaaaacttgtttgatgttaggtggggatagatatgctcattag

SEQ ID NO: 158333 - DNA, 1028 bp, Zea Mays
gtgaaggggtacgggtaaaccccagccgcccgatctaatcctgacggctaggattaggtttttgtttaaaacgaattggtatgcactagcagccgtaggatcaaagatatccggcccggatctgaagtcgcgaaggggtatgtactcatttattcctgggcgcacatcgatggatcaatggcccagaactacccatgccatgatctatctccctcgcccgctctggatccgatggtcataatcaattgggcatgaattgttttccttatctctaatcccagacacccatcaggcaatcaatggctgaggggcgtctccctcgtttcagtcgagcagagcggcgcagtggaggttccccagcgcacagtgatctaggattctagtgccccatccgtaatccctgctagtgctacgcaaatccgagtgaataccaaggatagggatgggtaccatactagtggttagaccacacataagcttgcctccaatggcgcggcggcttggccgagagcaccggaaattggacgacagattctcggtccaccgcacgacaccacgcccggctacgccctcggaaatgttctatgggtgatgccgaactctttttaccacttgtcggggtcccgcagcgatgaggcacgactctcaacaatggcggctccctccctgttttctaatggcgagcacaatcggaggcttcagcacaaccggacggaggggtgaggggatgacttcgttttatgccccggacagaaggggactagcacgagccgttggattacgcccaggaattccgcagcgcaatgagcgcctacatcttcgctggatgccacacaacagacggtgaagttgttacggtaggagatagagccgacagatgggccctacctggcagtggcgatactcatacgtgaacgcggatgcaacggactggcgctggagccccaagcgtcagtggacggatgatgcgggttggatgggttgaggggaagtgggtcgcgcgggcgaattggtgctgggccgagctg

SEQ ID NO: 158334 - DNA, 1247 bp, Zea Mays
cggtttctttaggaaataagccacgcgaaggggtatcctcggatctcatccatcggatcacagttgaacggcccagatcaccccagccattaagtgaaccggtatgcgatgaggtccataggatccacgttgaacgtacaagattttaacaaagccgattgactcccacacgttaaatttaaatcgagcggctcacaacgtttcatcgaaacggtacgttaaattggattccagtcgtaagatcaccgatccacggtcgaaagccccttacccttccttctaatcttacccgtacacggcctgatcaatggcccaacgcactcgagatccatttcgtccaccgaccgcccaattatgatcctgcgtcttggaagtcgtcttctatccccagctacaggggcacagtggcattccccactacggcggcataatcgtcggtgaacctaaatctcgcccctggagatctatcaaggtattgaacgagcaagaggaggtgacggcaaacgccagaaggtgtcttaccgaaagtttgaagcggcgatgagagctgaccacgacgcatggtgatcccgctgccgaggacgaacaacgacgagattctagcggcacaacacgaaatccacccaggcaaggctacgaccatatcccgagcggcatgatgaggcccatgggtccaatttcgaagacccgactttgccataggtccgaatcgaccatggccgcaagctcctctccggcgaggaattcccgacgccccggtcgcaagcccagcccgcagaagccccaaacccaattggcttgtccaagcgaagcaccgcagggaccggtgaggacgaatccgaggctctaggtgcggcgcgacgacagctcctccaagcggcgttccaaagctccctttctctccctctggtacccacagggctccacgaaccggaaccgatatggccacggtagatggagaatgcggaggcgaccccgggcgacatttatagggtcagggaagtccaatatacccgaccggagcgagatacagggaggggaatccgcgcgacaaactcggcggtgggaggttgaaggaggtctgacaatgcgaccccacatggcagagaaatgagaggaggcgcgggagaatgacgaggtgggccccctcctgttgctgacgcggggttggcaaacaggctggcgtttgtctgttcgtccgggcccatgcagtagtggcgcgcgcagtgggtggatgacttgatggc

SEQ ID NO: 158335 - DNA, 843 bp, Zea Mays
gaagaaatcagaaaaagaaaaggaaaataaaaacagaaccaactaggctcggtcagctcatttcagcccactttcccttctcccactcgcggcccaaccacctcggcccaacttctcaaccgcacaacccaaacactaggaattgggcgccgacgctttggacccacgggtcagccccttaccccctgttcggtcgtgtttccttcacttccatgcgggcccaggatgtcgggggtttcctttttccccactcgctcgacgctgaaccggtctcagctgaacggcgcaatttccgccgctagtgactgctcagatttcgctggtcgttggggttgcatccgccgccccagtgccttacccagatgcatgtaagtagccgcggtctccttaggttataggctcgaactgacctcgcgttcgcgtcctagaaatcacgggcgcaactccaatcgatcctcgctgtcgcgcgcaacgagctccgcaggattcgggcgccagtttcccccatgtagccgatcccgagtggtttaaggcggacgcgagcctcgttaccctaaccccttagaccctcgctgccatcttcaccaatccctgtgcgccgagctccgcaagcgagagagagtgctgagtgccgccaccaggggactccgactcgccgtccccaagcctcttccgcggccagggtgggccacccgtgccccacgaatgcgttgactgcggtggtgtgatggggggatggcctaggcactggcaatttctcgacggtgactagcttccgccatggattcgctcatcggcgcgggcaggagcttctacggcttcagggtcagtaagtcgtccacc

SEQ ID NO: 158336 - DNA, 585 bp, Zea Mays
cagcagggtcagagctcctttcaggccccgtcagttgcaaccaaccaaccaccatctaatgcctgttggcactgcggagacccccagtcacttcaagaacaactgccctcagttgaaggcattgggacctacttattccaactcgatgaatgaccccaagaatgccccagcgcccgcctccaaggcaccctcctccatcagccagcagagcaatacccagtatcatagcagggcacgagtaaaccacgtcgatgctcaagaggctcagcaagctccgagagtagtgctcaatgagttcctagttgaatttgctcccgctactgtactttttgattcaggagcatctcattctttcatagccactagttttgtggaaaagcatggcattccctctacacacctagaaattcctttggtcacccgaaccccagggtcagaccttctatgccaactcaaatgcccccaagtcagaattcttttaagtggggtagtgttcctggcagacttagccgtcttgccatcccaagggattgatgtgatcttaggaatggattggttaaccaaacacaagggcatcataagttg

SEQ ID NO: 158337 - DNA, 712 bp, Zea Mays
gtgggtgagcatcaccagcatacaaagatgctaaaacgagaacaaagagggcatgatcagacctgtggagggctggccacggcgagggtgcgctttgcggtggcggagaccagtttgggggaaaactaaaattcaagctctctgacgaacgattgctagtgatttttggtggctgggtgtgtgatgaccttgcggggctggtggggggcttcaatttataggtatcaacggcggtggctaggaatttcagtggggacgcgcggcggtcggaggaggaagaagagtactggcgcagtggcttggtgtccagcgccgtggcaattgctccggcgatcaacggggagctagagtgagtcacggtgctgcggtagataggaagagacacgcggcggacaacggcgacggcttaacggcggtgagaatccttatccgagggcggtgagtaaggggagaggtaccgcggctagccggagtggtgtccagctcaccggcggcgaagattctcttacccgcaatgttagccatctaccacgagcacgaatccttacgccggtgacacgaatcgcggcggaggagcgatcgtcggcggtgaggtttactgaacctgatcgagttactgtaccatggcaatcatcattcagacgacttgacagtcattctttgagcttgattttctcccagattcatatggcaacacaaccagtgatctgca

SEQ ID NO: 158338 - DNA, 475 bp, Zea Mays
gctggtatggtccagagcaaaggtggaaggagcgaattaacaactccatttggaagtctagatcgtcggctgagattgagagatagtaccctgctctttttggttgtgctgttgtgcagtcgggataaatccgtgcaggtgcagtgtaaggggaagagttagggattgctttgtaatgtggagactggagagaggtcagagaacctttattttagtcttgtgatacatttgagtttgggggttcgtctacacgtctgctttaaactggtccaatatcatctgtgaactgtggtgtggtgggggcggcgattcctacagcatcctgtagaagcttggtcgaattcttttcatttgaatgtatagcatgtagctaggggacatcctaaacatcatccaaaagcaagcaagctactaccttcagatcttaaggtctttatatttaagtttctagatcaccttcagcttgttgttctag

SEQ ID NO: 158339 - DNA, 695 bp, Zea Mays
ctctttgtgctgactagctagtcttgtttggttgtgttgagctattgcacgtgtctttagggaccaagctttctcacgtccaatgaatttgatttagcttttgtatggcctttgtcatttgagagagttcttccttctctattgatcttcatgtttatgtagtggtgttgacaatgcactcatcaaggggagattgcaaacacaaggttgacatgtgcccttgaaggtttgcgttgtgatgagtgattgtcaacaatagtagcatcttaagttgagtcatgtggactaacagtggcatgagagtgtttgtgtaacatgtctcttggtttgtggtgcacaactgtggatcccgagatggtagtcaacgatgaaggtgaaggtcatgtgggttcgtgttaatggactgagagcattgaaggacgagcgttgagtcttgaagagactagagaagaaggtgactaggtgtggtgactaatacatggggacacccataggcgtaaagagatggtttagcggatcgtgttgtgttgctattgtggattgatgaaacacgtgtctaggatgcgggggatgtatatggagtatgctacctgtgggagtttaggtggttgagcctcaaagaaaacatgcgacagtttgctagtttcgttgggtttggccctcaaaacgtggcgacacggtttcagagggaatcg

SEQ ID NO: 158340 - DNA, 1019 bp, Zea Mays
aaattatataatctgatacatgctctaagtcactaaatgttgtctgatcatctattcttcgttcgtgttcactttcgctcaacatcatgattagtatttctttatattgtttacatcataggatagaatgtttttgcttataatatatatatagtactttgaacctcccaataattgttttgtactcggatcaaccagtacgtgcatgatatgtgtatgcatacgtccgtatccatcgatcctcgttagactaaaccgaagagacaacatagcagcagctgttacacattcgacatttccagtgcagtacaaacgacacctttcatcatccaacagctctgagatcatgtatagtcagactaaaccctgatgctgcaaactgaggaattaatgaaccctggtgtttaagtttaactgtgacgatagttctctctgctgtttctgtatcacagatctcggtcgaaagctaaggtgacgatccgagtgctgatctgaagagcaccacgcctacagaggagtgcgatgatcatgaaccggtgacgacagatagttctttgctgctttggcattagatttgaaggccaatcgtgtgcagcagagttaggctgtccccgctgggccactgtgtctgtatgtgttacgtaaaaccagctgcaacagcgtacttgatccccacgctatatatcatccagtaggatggatggaacgcgaaacacagcgttgtacgacatcaacgccatctgctctcgcgcgcgtcttcgcatgctcgaatgaaagtagagatttagggttcggacagccttagacgtagttcggtgacgactaatatgccaatacagaaacacaacccgaccttattagtaccctacacactatcatcaacaaccattccccgcgtgccgtacgtcaggccggtctgttgcgttctttcgcggctgcttcggcatgtatgcaacagccttcggaaacggggccgagatgaattagaaatactggacgtactagattgaaagggtaac

SEQ ID NO: 158341 - DNA, 2112 bp, Zea Mays
gttgtaaatagattatattgaacaaacctgttcacttattgtaaacagattcattttgtccctgtattacaatatttagcaaattaaataaactaaaatttttacagtttgtttaacctgtaaacagatttaaatatcgtttttgcaccagatttgtttcctcattaattcaaaggtccatatacactaaaattatttttcccttaattcaaagagacttagttctcttgtgtttttttgggaaaacaaagatgtctaaaattttgcactttgttgccaggactgttttgtagtcttagtgctttgttgtaatcagattcatcttgtccttatattatagccgttagcaaagtaattcaaataaaattttgcagtttgtttgcaatctgtaaacagttttaacatcatttttttgctctaaatatgttctctcattagttcaaaggtcaatgtgcactgaatatgttttaccttaattcaaggagattatgttcttctttatttttgggaaaacaaagattatctcagatttgaccttcatccgttttccatgcttctatatacaattgtgctttggaaaaatttgggagcccttaaaaccaaactaacccacttcggccaatgtttttttttcttattttagtttttaggtgaaatgaacaagcttgtatgctttaaccatgctatttcattgatgttggctaaccactccataaagtcagcttaatgtcctttgcgtccaaactgaaaaatgtttgcttgctaattggtgccttggcgctagctagaaaagtgggggatgcctgtgatatacattgctcaatttgatgatcctgtttcaaaattcttaaaccattatgtatatcaacttccatttagcattgatgctaccctctcttggtagtatatgaatactagcaggataaatgaactggaattttgcagacaatgttttcctttttttggtttgttttaagacgaggtgaacacacatgtatgtatgttgtaaccatgcgacaagtttctaacaaaacatatcattaatgtagtctaactgctcatatgttagcttgttgatgtcatttgcgtccaacaaaaaagaaaaaaacttgcttcttcggaaaatatctcatgaatgtaggctaagcactccataatatcaactttgctgacctttcatatgcaaaagaaaaaaacccgcttacttgctaattgatggcttggcgctagctagaaaggtggaatgcctgtgatagacattgttcagttttccgattttatttcagtatacttaatgcattatgtatatcaatatccaattttgaaactatctttttggatggaatctttgtcttcgtgtgtccgcttggaaaaaaatagggaccttttttgatctcttgctttagcatcataggtagttccagagaagcaactgcttgcctcctcggctccatgatgcaatgtaggcctctccttcacatatttccatcccaccaagctcgcttggtcagatgaacatgtcaagtgttttttatgtagtagctaattgtcactaactttttgtaaaaccagcggagctttaaagagttacatattcttatcaaacatgtaactctctacgaattatgtttctttctttacatattcgtttatttttcctaaatcacatctatttccttttttgtttatatagtacatagttgaccaaccttacaaaagagactacttacacagacatcatatttgtacttcattgtctaatgattggtaatattattgaaattttacctttcatttcacaggcttaaacaagaaccagtgcacatcaaagattccacacgccaaaaagatcaccataaatgatatatacaaaaaacatgaaaccaattgagatttggcccttgaatgcagtgtcacatcttttcttattggtcctgccattttacaactaaacataattctctcgtatgttcttaaccctctagccatgttctgaccgctaaaaccatttgatgcactgtaacttatgatagttttagatgatgacccacttagatatggaacgaagattctacatatgttgtcgtttgtaaactagatacaatgcatgca

SEQ ID NO: 158342 - DNA, 541 bp, Zea Mays
gaggtcacgatggtcacgtcggtgtgcggtttgtcatcggggatggccgaagtcggttggacctcgtgcgctggcgggggagctcgtcggcggcgagtgttccggcctaactagggcggtagggtccaatcaaaccggtcagcgagcttcactaggtgtcagagaaggcgtgggcgcgagtaattgaactacggcttaccggttagtcgtggccacgcgcgccggcgggaaaaacaactccggcgagggtggaacggcttctccgatgaggtagcacccaatttcttgctttggggagctctaaggggctctggggaagctagccgaggcacgggatcgagtggagatggatgggagtggtctggttgcggtggccgagtgttcgggtggcttggcgggtggcgtagagctcgccggagctaagtgctgggtctagggagtcaggtgaggcacggagggagtatgaccgaggatgcattgttcttataggcgcgggcgtggtgcacgggcgggtgtggaccagtgcgggcgcacgtgcatg

SEQ ID NO: 158343 - DNA, 785 bp, Zea Mays
cggaagagggagctgagggagcgctggggcctggagtagaggtgctgccagccctgcggtccttcttgtgctttggcttggggccgccaccgccgatccgcagagagccactgttggtcgctgtaggctggcgagaagaaccagtggcgacaagagcagtggagggggcaacagggtggtgtaccatgttgatttcctcgaggaggagttcattgcggacgacggcgaaggaggggaacgggcgcccgcgccggagatggacaccgatgtccttgtagcgctcgttaagcccacgaagcacgttgaggaccaaggtgcggtcagtgacgtgctcgttgaggtcagcgaggtcgtcggccatcttcttgaagcgcttgcaatactcggtgatggagaggtctccttgagcaaaggtgcgaaattgggcgtcgaggtggagggcgcgggtctcctggttgccgaggaaatggtcctcgatggcgagccaggcctcacgggcggatgcacggtggtcgatcacggcgtcggcgaggtcagcggagactgtgctgtatagccatgacttgacgacggcgtccatctgagtccagtcagcaagggctgagatggagtcgctgcggacgtggtctagaagcgagtacttggtgacggcgaggaggaattgctcgcgccaacgggggtagttgccagcggtgtcgaggaccgtcggcaccaggctgcgtgcgttctgcacggagactgcctgggcgtggagattgaggacagcagcggcctcgtggagaagc

SEQ ID NO: 158344 - DNA, 286 bp, Zea Mays
agataatctaggtgctggaaaataaaatctaagtgaggtgtttatgatcaaacaatgtgtatgcatatgatgggaaaaatttaagggagttttggggatagataagaagaaggggggaggttagattagggtttcaaacctgggttagaattttgggatgttacaaacctaccccacttaaaggaatctcgccctcgagattcgggcgtggctcgagaaaaggtaagggtattccctcctcagagagtcctcactttcccaggtagcttcctcttctccatctctg

SEQ ID NO: 158345 - DNA, 440 bp, Zea Mays
gacgactttgtggtcgtgttcctggatgatattctgatttattcaaagaccgaggctgagcatgagcagcatctccatctcgttctaggtgccctaaggaagaaccagttctacggcaagttgaagaagtgtgccttttggctgttcgaagtggctttcctgggcacatgattaatcagcagggcattgcggttgatcccaagaatgttgcggctgtggtggagtggaagagaccctctagtgtctctgaaatccgaagtttcttggggctcgctggatattatcggcgctttgtaccaaatttttctagcattgctaagcctttgactagactcttggagaagggtgttctcttcatctggtccaacgattgcgaggtcagttatcagacactgaagagcaagttggtggacacccctatcctagctttgcctgagagt

SEQ ID NO: 158346 - DNA, 1101 bp, Zea Mays
caaaatattgcatgacccttcatgatggcatattttccttgtagtacaccaaatgcacgttccacgtccttcctatactcagcttgctttctagtgaagaacttatgtttggcactctgggggctgggattccactgggggctaggattccgctgatgagtgtagcccaacgaggataaataccatctgcaagttagtatcccatagcgtactccttgccattgacgttgtatttgatagacggcccaacccctttggctaggttctcaaatacaagggaccgatgaagaacatttatatcgtttaatgagattggcaactcgaagaacgcatgccatatccacatatcatagctagccactgcttctaagattatggttggtttttttaaagtgtcccctatacatgccatgccatgtagtgtagcacttctcccattcctagtgcatgaagtcgatactacctatcataccggggaatcctctttgttctgcattggccaagagctgcacgatgtcgtgttcatttggtgttcgcaagtaccggtgaccatatatgtgcacaatggggcgagtgaatttttggacggtttctagcacggtagacgctcccatttggaaattctcatcgaatgagtctgcagagactccatatgcgagcatgcgtagagcgacagttaccttttggacgggtgtgtgaagccccacgtgccagtgtcattcattttgtgttggaaatacagattcttcgactccaatgtgttcgctatctcaatgaacattcgcttcgtcattcgaaaattggaaaatgtagtcaccatgagataaaattgaagattggattgatgaacaattaagcctagaacaatagaacaaaaaagaaccgtcgacgaaagatgttgtcttcgtaaactggattagggtcaaagtaattggacattagctttcgatgcccagtaaaccggtcgcgttggatgacttgatgaccaaagacagagccccagtgtcggcgttgttggcgttctaattcttcttcaactataggaatagcaactgacctatcttgttctcgggcacactttcttttgcgccaaaaccacag

SEQ ID NO: 158347 - DNA, 737 bp, Zea Mays
tttcaccaaaggattgagaatgaaagaaaaatcagaaattgtctaagtccaaaactaacctttggacaaagatcacacatgttcaccctcatccaaaattcaaaacacttcgacccaattaacaaagtggcgccaaattacccctagaatgccctggaggaagttgacacctaccctaagtcgtttgacacgacttggcatagcttttgtcccggtttggacagctatgacataggcaacttctcacccctctatctccctaccccgaccgtatcttggcttggaactcacagcaaaaaggtaggatatggaacagggaagagacggtacacagtggttttgccaagatacgcacgctaaggtgctcaaatccgctgttgaaccatggcagaagcgagctcccacgtgttcgacactcggggcgcgctcagagcacgcctgtgcgcgaaccccagcgcgcccgcggctgcccgtgaccacgcccgcgccacggctataaagcccgtcccagtgcctggctgccttccccgttgcctcgtccgtaccacgcctaactcccctgagctcgcccatagctccggcgacctccccgcgaccctccagagccgcccgagggcaaccaccgtggccaacccctttcccgccctccttcgctcggtccaagccctcggatagcttccctgagaggccgtgaagcttgcacgagcttgaaccgaggacccgcgccaccggaatag

SEQ ID NO: 158348 - DNA, 381 bp, Zea Mays
atgggtcgttgaagttacaaggagcaggagtcggcttccttttcatcgcccctggaggagatcagctcaaatacgcactacaactcttatttcgtgcctctaacaacattgtagaatatgaagccttgatacacgggcttaatattgttgtatcgctcgggatcaaaagattgatggtttatagagattccctgctcatcatcagccaagtccataaggattgggaatgcttcatggaatcaatgagcaaatactgctccgtaatcaagaaatttgaggacaaatttgaagggctagagttccaccatatagagagacaccacaacatggtagctgatgctttatccaagctaagatcgagccaagcgcaggctccaccgg

SEQ ID NO: 158349 - DNA, 719 bp, Zea Mays
ggacgattggaggtgagggctggttcactgggtgcacaactacttagcgaagctcactggggcggaaatttataggttccatcggcggtggcggctaattttggagaagacgtgcggcggtcggagaaaggggtggtcactggagcggggttaccgtggcacttcaccgtggcaagaccaccggcgatgaccggacatgctagggcgagtcactgcgacgaagtactgcgtttaggcacgtggcacccgagcggcaggcggccaactccggcgaggttatctggaccggccgtgaggcaagtgggtacggcggccagggcggaacagtgtctcaagctcatcctcagcgcccgatttttcaccgaggatcgttatccgcattcgaccgggcgtgaatcgcgacgccggcatgaatccgggcgcgagatcaccggcggtgaggggggctgaaccggtgatcttattcaatcactgtatcatggtgatcaccattagagcgtctgacagagcaagtttcagggcccagatctcaaatttttatgtgctaacttgtttatcctcctatgacaaagttgttgatctataattaaactttgatgttgctacagtaaccacactcaaatattcactggatcattctcaaaagagctcccaaagttcatcccaagtcactgtcagtaaaaattcagactctgagttgactcacagccagactttag

SEQ ID NO: 158350 - DNA, 326 bp, Zea Mays
gctccttccgggatagaggcaccttgtgatctcaattgactagccataccgtcgaccaaagcctgatattaaaaacaaatgagcacaaagacaataatttgccaggagtattgccagaacaggaaaagccaaattacctgaagattggagaagaatgacggaaatcccaagtcacgagaagctaggtggtggctcgatgaaggaatatcaaccggggcaatctgaagaacatcactagggattaattcgacaccaccaacaggcatcagaactccagcatctggtacgccgacctctaaggcgactccctcacttgaagcatgcgc

SEQ ID NO: 158351 - DNA, 576 bp, Zea Mays
caagattcccttaacaagaagttaagaaacacctgtgcctgcaaaagttgctctgatgtcttgaactctgccttcaaaactatagtgtgaaaatcatctccaagatcctcacaaatcgtctcaagtatctaataggttcgctcattcaccttgaccgggctggtttcttgaaggggagctatatccaaaaacttcatctaggcccttgagctaatccaatgttgccacaaacataaaaaaaccccaccctagtcctcaagcttgacttcactaaagccctcaataccgttgattagggtgccttgcttgagattctggaagcccacaagttcagttgtaagtataggaattgggtcagaatgttgctcgactcttctataacctctgtccttgttaatggcaattctggctcctagtttccttgtaaatagggtctgtgccaaggcaaccctatgtccccctacctatttctcttggtggctgacatgctacagttgatcatcaggcatgatagacacatcagacatcctctgtctaacgaccaaccttacacggtcctccaatacaccgacagca

SEQ ID NO: 158352 - DNA, 406 bp, Zea Mays
gcagtaaagacatgtcaaataagataattgacccctattgatagtacggctatctagcctactaacccagtcaattatcatcctctaagcaccttttgaccagtaaaacaaaaacctattgttatacctttgccttgagcattctattccatctccttaaatgataaacaatgggcatccataagtgtatccaaccatgataccttttaccatttgtccatagcatgaagttcctccaccatcatcatcaagccacttgatcaatagcccagatcaacacatggcttgataattctataatgatatgatcccctccatgttatcacatggccttcttggtttatcaatctcaagatagcttgctctttaccgttgctttatgtccattggtgctaagtccttgctc

SEQ ID NO: 158353 - DNA, 303 bp, Zea Mays
acaagccaaagagctcccattttcaacaaggaaaaggggaaggctcctatggctaatattagtcaaaagaatcatgcatttatttatgataggaaattttctagaaatgttcatcatgataggagttgtaatgcttatgattcaaatgtcatgattgcttgaagttcttcctttgtgcatggtagagatatgactaggaaaaatgtcattcatcatatgactaagagaaatgttgttcatgtacctaggaaagcaagtaatgaaccttctacaatttaccatgcttgcaatacttcttttgca

SEQ ID NO: 158354 - DNA, 713 bp, Zea Mays
taattttcatgtttcaccgagtcaccccctccagacgactttcaccttcccaaaataacatggtaggtacctcgaaagtgaggacctccttcctaaagttggatggggtcccgaaacagatgggcagattgatctacccgaggggatgaactcttctgttaggggtgataccgtggaatggctcggctacagcccgaacctaggaccgactgatccctatgagctccaaggtctcaacatagattatgttaaggctgctgcctccatccatgagaatcttggagagcctagtgttgctgatggctgggtcacgacaagcgggtacttccttgggtacgggacgtagtctgtgtggtcatctcggtcgaaggtgatggctttgttggaccagtctagatagaccggcgccgctacttcgacggagaagacctcccgttgttcttgcttccattgtatcaaggagaggttcaccatttgcctatcgaagatcatgcaattatggacatccgggaactcctcgccctagtcgttgcccttgttaccggagcctttcttcttgctatcatatgtagaggggtcgggcttgttgtagtaacaccagagcatgtcacacttcttgagggtatgcttgatgggcccttgtggtaagggcaagactccttcaacatcttgtctaatacgttggggccctgtgggggcttcaggggtttctt

SEQ ID NO: 158355 - DNA, 709 bp, Zea Mays
ccgaagatgggctgtcaggctggttgaattctgaatttcagactgacagtgcaactacagtgactttggacatgaattaatgcatgattgagcaagaatttgcttagtattgctataacaatgttgtagctggatcttaggactataactttgctaaagagtgtcaatcatgttattacacaaaaatgggagtaaatagctctgcaaatcgggctgtcagttcatctgaatgaggaattccatggtacagtagccgatcggatcagaacaccagctcagctcaccgctgacgacctttgctgcgattcgtgctgccgccgtccggattcacgctcgtggctagtggataaccactcggggtaaaagatcttcaccgcccgcgcgctggaggtcactccggtgactcaccgtggcctccctttccgctttgcggctggaacgataggctcgccggtgaccgccgcctcccggtcgtgcgccgcgtggctcaacctttccaccgcgtcaccgtaactccccactgttgtctaatcaacgccggtgaggttgccacggcatgggacaccaattcacgcgcgccagtattcttctccacctccggccgccgcgtgtccttctccaaattcccggccaccgtcgatgccctctataaattgatggtgcgggcagctgcgctacctcatcgtgaaaccagagcccccactcccac

SEQ ID NO: 158356 - DNA, 903 bp, Zea Mays
cacgacggtcggaatggactggaggccgcggtaaatatcttgggtcacgtggcagtaaccctcagtggtggcggactctggttaaacgacgtcgccgtgccatccccggattctgccgcgcggcaagctcacctgcaccgtctgaaatccgcgatcctcatccgtcgccggccagccgtctataaatagagcgcggacacagcttcgtcaccacattccgcacatcagcaattgagcttttgactcgagctcaccggagagcccccgtagccccaaattccctcctctcctgttcttagctccgccgcaaaaatccttccgtgaccagcgcgattcgagatagcttacgacttctacttccccgtttaagtattcccaggtaaccgtgatgctccccaacctatccaattggattataccaccgtgaattgcttggaacatgcggttcctttaagtctctccgctatcaccgagggcagtaagatgtagagctccaattcaaaaattggtttaggggaaacattcagggagggtttaatccggtgtatgtcgctcgggagcgccggtcatagccccgtttggccggacagtgctcgccggagcgcggcggtgcgcgagcgccgtcggggactttaaacgcagaataggtagaaaaggaaggacttttgtgcaaacagtcagtgacccagtgaaacattaaacaaacctgatttgagttagccaaaactgtgagggccttcgtgcaaagtcgccggcgcgggcgcctttcctccctggacctgggacgtctgggccagaaccggcccagttctatttaatccttttctttttctttttccagcagagctttagaaatatgtagaaaaatgtagaaaaatgctaaaattgtgaaactaattttcc

SEQ ID NO: 158357 - DNA, 525 bp, Zea Mays
tagacttagcgtgtatatttgggctcttcgaagccaaggaaaaagtgccaatgtcaaagggttctatcgagtgcacgaacttcattatcagacaaaggttagagccgatggtctgcacaagtacctcgggtgctacaaatttgcataccgaaaggataccaaggcccccgtgattggctattgcactaagtggccgatcgggtggacaaatgagtggttttccgtgaaggctcatgagaagaagacggagaagctcatgagcatggtaatgagtcccttaaggctgaactttggcatgactcgacccttgtgcaatatgcagctggggtctccttgccaattggccgaagtggaatttagggtcgtggctgagcacattagcactagagacttagtgcaagaatatttagcaaacagaatgttcctaacttctagcgggtggggaatgccgaagaagaaggaagagggaaaaagtatgaacttgtacgacttccttatcggtttaagttccaaaaaagattcagc

SEQ ID NO: 158358 - DNA, 406 bp, Zea Mays
gtaccagtcctgaagttccagataatcaggtggtaagatgttgtcggtgtttgtttgattgaacaggctatagctgcacgcctagactgtcacactttcggacgacccatattgtactgctgccagccaaggtgagataaaggcctgtacacattggtacggtgatatatgcgacgattcctaaacagagaaccatttgtcgcgctgtgcccgagccaccgcccacccagacgatgctggcccattaccccatgtgtaaatcccatttgctcgctttatcagaacaaaaaaaaagttggccaactgctgaggctcgatggcataagctccatagtctactgacaaacaataaatgctcccataacccacgcagctgaagtacttcctgcttcataattatataaac

SEQ ID NO: 158359 - DNA, 1251 bp, Zea Mays
gggaagaagagctcacgtggacaccctcgggggctaggtcgtagcttgcgccacccactagagtcggatcattaccgacaatacccttgggggctgggttgcagctcgcgctacccgccagagccggatcactaccggcgacaccctcgggagctgggtaactgccagcaccaccctcgggggttgggttttctgcaacagccacctctaaggctgaaggatcctcagtcacctccatgggagtcgggcgatcctgaccaacttcttgacatcgaagactgccttccaaagtcgacgatgcgcgagacactgctcgggatacctctaatcccacgtcttgaatttcagagcaaatatccatcatatcgccaacagtcggctccgacagcaaatcttcaggaacgacatcctcaagggcccgatcaaaatctgctatggacaactcttgaaggctgacaagagcagacagagctggagaaggaatatcactatccctctactacctcggtaacgccggctattcttacgaattagcggaacttcttcttcctcttcttcgtcctcataaaaaatacggacaatagccggtgcacggacacacccattgggttcagcttctgcacaatcacacccattgggttcaacttctgcacggtcacacccattgggttcagcttctccatggttacacccattagggtcagcttcaacaaggtcatgcccattggggacagctggtgcatggtcaccaccattgggatcaacctcaggaagaacctctgctggtacttcttcacaaatagaaacagaagggccagcatcctggtccaagcatgatagtcgccgaagccgcctcttcttcttctttttctcctcaacaggcgcagttggacagctaacctggcgaggacgttttgggcgagtaccctcagactgttttgttaacctcttgtccaaccgtaacagccatcggttcaacacgggccgagtcaaaagattctccagccaacatattgagtacaacatctatttctgcatcatccggacttgtcggcatctcaaagtgaacttgcctctcatcattgggaagatcacaaagaggagcaaccagagccttaatgtcttcaggagagggtcgtactctaagacctagaccactatcactggcagttgggttggacacgaaattgaaaaatgacctaggaggtggcagattccaagcagaataagcaacaggagcaccaacatttg

SEQ ID NO: 158360 - DNA, 534 bp, Zea Mays
cagcccacaagaggggcaagtctcagcatcagcgccaccatccttaccgtggcaaatcttctgactcgggtacttcgggaggaagtactcagaggtttcgggccattcctaagcccgggctggggctggtgtgtttccgctgtggtgatgcgcatcgccgtgcagagtgccagtggagtgggaggtgttgtatctgcagtcaagaccataaggatgtggtgtgtaggaggaatcctaatgggaagctcagatgggagccggtgacttcgtcctcttctcagggcaccatcaacatgatgtcaagtgctgagcagcagttttcagttcctcttccttcgcagcagctctatgtgcctgggacttctcagttcgtgctgatgcagggttttcctcagtatcaggccgcgcctactcctgcaccgtctactcctatgtcgtctcagtttgaagctccgcgcctgcctcatctagtggctcagtggggttcttctgttaatttcactccgggggcttcctcttctgcgggtatttctg

SEQ ID NO: 158361 - DNA, 1099 bp, Zea Mays
gtgagcatgtcacaccgccttaagtcgtcgccgacttaagtcgattgctccgttagtagggtatagtggtcaccctaggttaagtaagcgtgagcatgtcacaccgccttaagtcatcgccgacttaagttgattgctccgttagtagggtatagtggtcaccctgagttaagtaagcgtgagcatgtcacaccaccttaagtcgttgccgacttaagtcgattgctctgttagtagggtatagtggtcaccctgagtcaagtaagcgtgcaggttgacagtaaacagtttgagtgcctttgagaatggagtctttttattgatgatgcatttcccaattttcagaatacaaggtcgtcccaatagcttttgaaatctagctaagggtaaaacttcctgagatgttctatattccatgagttcccaatttacgtgccatccatttgagtaagacgatatgatctaggccgagtgacttctgctactatgaatggcccttcccatagtggcgacaatttgtgtcgtccctcccccgttagaattcggtggaggacgagatctcccactgcgaaggatcgatgtcgtatggccttatcatgatagcgcctcagagtttgctgataccgggctgactgaatcaccatattcaactgttcctcttctagtatatcaacatcttctagcctagtagcttcggcttcagctatgttttcgaagatcaatcttggtgccccaaacttgagatcagcaggtagcactgcctctgagccatagaccataaagaaaggagtgttcacatgcagagctcggctaggttgagttctcaggctccagacaacatatggcaactctctgatccactttcctgcgaacttttcattcttgtcgaagactttctttctgagcgcctccaatatcatcctgttggctctttctacttgcccgttggctcttgggtgcgccaccgaggcatatttgatctgaatgcttttttgttcacagaaatcgaagaactctgcgtttgtgaaattggatcccaggtcggttatgatgctattcggtatcccgaacctgaatattatgtcctatatgaattcca

SEQ ID NO: 158362 - DNA, 1138 bp, Zea Mays
taactactacaattgttcttgcatggaatcccattttattcctgtgatttcaaaaccgtctccctttctgatgctgtgtgttcccacttgcaggatacaggaaggagtggctctctttcggagtgtggcctctcatctgatcaaatgaaggctgatgctgtacttataaacacgggggcctttcggagaaacagatccagggcaggaaaggcacggagcccggctacgtggaggaagtgaatcgtcagattggaggaatcgaaccgtcgctggcatgataatcttgaccagagagcaagtgaggcaaagcgccatgctcgttcacgtgggagcatcccattcgtcgcgtgacggatgggactcgtacccccaaggaccaaccccaaatccaaatcccagaagaagacggcgcgggcgcgtgccatggaatggaaaggttccccgcagcggaggaatcgtccacccgcccagctactcaaggttggctacgggggtttctttcgaaaatggaatggcccggactgaattattggcacagtagtggccaacaggattggctgggccggcaaagcgaaaatattggatgtacccacctgatcggcggtggatcgtatatggcaccatctctcatcaaatcgacaacgctccagcatttgcaatgaacaaaacagcttaccggagtgcagccctgctggcatgggttacaattttcccgctcgaaccgggtctgtttttctttctcctctccatggaagaaccgttcagtgccatgacatcagcaaaaacttgtgtaatttctttaaagatatgatgctcgttggaaatctcaagacttaaaaaaaacacacacaggcatcagaagaccggatttaatcggatatggaggctcctcctgaccaactaaacaaggaatgcaaaagcactactactaacatcacttacgaattcaatcaaccctggccacacaaagcaatgaagagccgtgcgttccttattaagtaataactgacatcacttaccaaatcaatcgaagggcagtgccatggctacaaaatgcaacgaagagccgtgcattccttaacttttcagtcgcagccgcaaattcaaagcagaagtttaatgttttctacgcagaagc

SEQ ID NO: 158363 - DNA, 549 bp, Zea Mays
cagtgataacttctgcagctcctgccttgttgcctgaaatatcagccttgttacacaagtttgctgtggttttttctgccccagtggctttaccacctgttagatcatgtgatcattcgattccgttggtagcaggagctcagccggtcaacattagaccctatcgctatcctccatctttgaaagacgaaattgagaaacaagtgagtgatatgatgcagcaaggactcatcaggcctagttcatcttcatttagctcaccggtgctgttagtccgaaaaaaggatggaacgtatcgattttgtgtggactaccgctacctcaatgccttaactgtgaagagcaaattccctataccggtgttcgatcaactgatcgatgagttggccggggccagttggttttcaaccttggacttgatatcgggttaccatcaggtgaggttgaggcaaggtgaggaattgaagacggcatttcaaacgcacagtgggcactttgaatttgtagtgatgccttttgggctttctggagctccaggtaccttccaag

SEQ ID NO: 158364 - DNA, 1089 bp, Zea Mays
acaccacaactgaagctctagcagactcaagttccctaagcgtgaattcgtacttggatctaaactctctcctctcatgagcagcctgcctaagcaacttatcctgactagccaaagcagtgtttagctcttctatctcagcggcgagatcatcggcggaaggtagtacctcagaagtactgtcatcatcgatgtctttgtcgtcgtcgatgctaaccgcgtcctcaccaagtgccatggtgcaaaatcctcctgcggtgttggcgatgaagcatagcctgttcaacttgtcctcgaccctcctctcagtctcctcgtcactcgaggaagatacaacatcgtcggagtcgtggtcgaggtcgctaagggaggcaaggaaggcacgctccttgatctttgccttctgaaggtacttcttcttgagcgcctccttgtcaaatcctcccttggacttgtacttgttggaggagtacttgcccttgcgccgaccagagtgatggtcgcgcaggctagactccgattttcccttcttggggcagctggcaacgaagtggtcgggatcgccacagttgtagcatccgtccttggacccaccacgccgtcggctcatacggttgttgtggaaccgcgtgaaccgactggccacaagtgccagctcctcatgcccaaggctctccacctgctcctctgtaatagagaacaaagaagatagagcaaacatagcaggtgaggagttagaagcagaaccacctctagagatcagggacatggtgggtgcactagggttctcaatcttggcccgagtctggtggtcaatctctatggacttgagcttgctgaagagctcgaccacggtgagagtcttgtagttgggcgactcgatgatcgccgagaccttcacctcccaaaccctctgatctagagcatgtattaatttcaacgctctctcatgatcactatagggtagttgtgccttattggcacacatcttgttcacaatggactggaacctagagaacatagaatcaatggtctctccagccaactgtgtgaagttctcgtactctcgcctgtacatctcaaaaagtc

SEQ ID NO: 158365 - DNA, 511 bp, Zea Mays
ccggtcgccagtgggttcaacgacggctcttcgccggtggtttggttctcgaggattggggaggcgtgccagtatgggcggggtcaggcaatcatactggagtggttaattttggccagcggcgagccggagtgggttggccacggcggagtggcggggctcctgcgccggtgaggttgctgtcgaggttccggtggtgatctggcgtgggtgtgtggtgcatttaggtcgtgagggtgtggtgaagctcgagatcttaattgatttggctttggtcagttggggaggggagagggggagctcaccaaagcaagagggggcagccgtgctggcttaattgagctcaaggagggggaggagagtggccggtgaccggtgcaagaggtggaggagctccgggtgctccttttataggcgcctagggagggacgagtggccagctggcctccggtgggtgaagcacagtggcgacgatgcgatgactcagcgggaggagaggggcagtgccgtg

SEQ ID NO: 158366 - DNA, 616 bp, Zea Mays
gtgggttgtcatgacgtttggtctgaaaaatgctggcgctacttatcagagggctatgaatttgatctttcacgagctattgggaaacactgtgtaagtatacattgatgatattgtagtcaaatcggctgagtttagttctcatatagctaatttgcgcaaagcctttgataaaatgcgccaatatggtctaaaaatgaagccacataaatgtgcttttggagtgtcggctggtaagttcttaggatttatcattcatgaacatggtatagagatagaccctgaccgaattaaatctattcagaatgtgggacctctgacatgtaagcttgaaatgcagaagttcttcggcaagataaattatttacgaaggtttatttctaatctagccgagaagatcaatgccctcactcctatccttcggcttaaaaatgatgccaaattcacctgggggtagaacagtaagaagcatttgaccttattagaagatatttgtgttcgtctcccgtattaaaagcaccacaggcaggagtaccattcagattatacattgtagccgaagataaagttattggagatgttctgacacaagaaaccgaaggaaaagagcatgtgg

SEQ ID NO: 158367 - DNA, 755 bp, Zea Mays
ctctgatgtttgcactaaggccctatacttctatttcttcacaacactcggtccacgacggtgcacggcagcgagcgcgccctccggcgaacttgtatcggccaggatacaaaactaccggtgccctaacttggctaacaccgaattcaaactttggtgacctactgggacacactaattcaacccgaacaccactcaagggcacggttcacgcatacccgcggagttggagacattcttaacgcgttcctaatgttctagcgcagtataacttaatcggccaggccaacaagcatcataagcatgcgggagtagtgaaacacggacaacgcggacctggaaatggctggccacagcgcgaggtcacactacaatgcggaaaaccaatttgggggaaattgcgaattgaggagctacggtggacgattggaggcgaggagcgatgcactgggcacgtaacaacctaacggagcacgctgaacgctcaatttatagtgtccatgaacggtggctccgaatttgaggagagaagctggcggccgaggagaggggatgagtcaccgtggcgatctaccgtggcattcactggacaaaggcgtacgactatcactagttaacttccacgactcaagacgatgtggtaaaatagtctaaggtgtggcgcgaccaagtgaacggcggtagccacggcgacgaccgcgcaaccacgtcgccggcaagtgggtacggcgtcagggcggccacagtgccccaac

SEQ ID NO: 158368 - DNA, 494 bp, Zea Mays
ggcaggtgttccttgcgcctgtgtgaagagtcagtggactttcttctccaatccttcatcggtggttcaacggagcttttcagaatttctcctctgtcggaccgggtttttcgattctcgctttcctacaaggatgttggtttcgcagtctatagacgtcactcatttatctgttcatctttcaaagcgtatcttcatctttggaactctggtggccctaattggatcaaagaatgatagctttactctaacaaagaatcaagttcttggactctggtttcccgccgtcgtaattcgtaggcctcatttgctgatgtcgttcgaaagccagctttgtctggcgcaaacttggtccctctaggcggtccggtcagggccgggctttgccctctggtatgcaacacagatcttcggtgttcaatcggatttcttatcatgttcatcaccccatcgatcagttggcctctcgttcaaattcccctgcgaagtttgca

SEQ ID NO: 158369 - DNA, 418 bp, Zea Mays
cgaagatgattgatgcgatagcaaataaggatctcaggggagatgttcctactggcactaccgagtttggacacctcagggtaagttgcaactatattgtgtttaactattgcaaatgatactccacagtagttgcaatttgttattcatttatcattttatcattgtttttttactttcagctgagaagtatcactgacacgtgctacggcgtccccattgctgctctagcaatattacatgctccagtaccagcacctgccccagtagcagaccctaacccaacaacagcacctaacccaggagcagtagcatctgccccagtagcagcagcacccactgctactggcacatctgctgatgtgcttggcacatcccattatcccgccggtcatgcttccttcaatatccaacccct

SEQ ID NO: 158370 - DNA, 730 bp, Zea Mays
gggaaatacaaacttgattggataccaaaattaacacatgaataaacataaatttatacatgttacctgtgattttctaggagtcttctgtttaggagacttttttttgtaatgatattagactttggacttcttttctcgcaaggaacttgaggagaaggtacttttaacttctttgcactggtttgttctgaaggaaaaggtgaggcagatctgaattggcgcttcaacgatggagcctccatgaaatcgtcgtctgacagtgtggatggagcaggaggttttctttttaaacgacaagctaacgcctttctgcgaaaacaatggattggggctggctgtggctcattctgctcctgtttttggggaatatcatcttggtgagctgagctactggatcttgtacgtctggaaatgtcaattgaaaaaaactcctgactggattcaatggttaatctttttggattactgggcgggcgatcaacagacttcatgattaaatactaaatagatctgcagaaaaaaagttgtttttaaatacattgatttatgcatgaatatatgccaaaaaaagaactaatttttactataactatctgaaatgcatactatataatgctaagtggaattacataacttaaactaccttttatatttatgcgatagcatttaatgaacaatagttatatacaagcataaagattgatttaatatttcatataattgtaaa

SEQ ID NO: 158371 - DNA, 420 bp, Zea Mays
caaattaggcaacacattagagtcagggtggccataacatcgatgctagatagacacaacaacaacagacttggcacaggaggcaagagactctaggaggtgtagtgtgtagattgtagagtgggctggagttattggacatgatgatcacatttggggtagtgaggtcctttatagaaacacataaggggtcaaactccatcgaacacaaattgccagtagtgaagcggtggacaaaaagggttctgaatgatatcaggggtgagaaggatgttgttgatgtagactggcctgggaagaactgagccaccagctgaggtgcggggaaggaggggtagagttggatgatggcctcgatgtgctcaaacttcttgtttaggcctcagagaatgttgaagatgagtatctggtagttgatgg

SEQ ID NO: 158372 - DNA, 517 bp, Zea Mays
cgaggctacaggggataaggccagggcgtgcgcgctatgctgccgcggcactgcgccggctggtcgcacgaagaagaaagagagaaggagagggatcctgcgtacctggtaaccgctggcctcacgcctgtgatctggatccagagcgagacgagaagttttgcgacggctagggatgtatttatagaagagagaggatgcggaagatggttgtaaaatttgtcgcatgccgcatcatggccgggcgaaaaaaagacggtcacgcgacgagttgcgcgatacagcgtacgacagaggctgagtcagacgggtggtagaaagagttagataaaattagacaaaaatggtcagagctggctcgcggacccatgatggaggagtggaaggcgaaggggtagatggggataaacaaggattatgtcgacgacgcgagcagcatgccgttcgcgagaagaagcagttcgatgatctcgtgaaaaagagcacgagatcgggaacggatcgacgagaggaagag

SEQ ID NO: 158373 - DNA, 442 bp, Zea Mays
gtttattgttgagaaccatggaaattctctccccccacggtcggagaaaaaagccggatgttcgcactccgagttggactgaatcccccactgatcaggaggtgactgaggcaggggctctgttagctgaagttggattgctgaaggagaggggtctgactgcagaagctatggttgctgattttgttttcaagaacattcagccattgaaggacagggcttactcagcttatctgtaccgaggcctagctgactcaactcgggttaccaacaaaagaattccctctgtagacttggtgaaccgacttgagatgatccttagaggcaaggtatcaaacgttggtgccccagtggcatactcggcctggaacctgcctccttccaaagctttcacttatcttgttttgaatccacctgttgttgatggcagtttgggcctcag

SEQ ID NO: 158374 - DNA, 706 bp, Zea Mays
aggatcttgatagggtattctgtataaatcagatcatcttgaacactaagatcctccataggtaactgcttctcgggtaccttgagacactttttcagttgggacacatcgaagacatcatgtacatccgcaagatggtcgggtaattccagttgataggcaacttcccccacttgctttaggatcaagaagggtccaataaagcgaggggaccacttccctttaactttaaacctcctcataccccggattggtgacaccttcaaatacacgtgatcaccctcaaactctaatagtcgtctcctagtatctgcatagcttttctgtcttgactacgcagttctcaagttctcccttatcaaccggacttgttcttctgcctcttgtataatttttggcccaaagatctgcctttcaccagtttgatcccaatatagaggagtcctgcactttctgccatatagagcctcaaatggggacattttcaaactggcctggtagctattattgtaagagaactccgcatagggcaaactcttatcccaactgccaccatgtttaagagcacatgctcttaacatatcttccagtacttggttggttctctcggtctgcccatcagtttgaggatggtaggccgagctaaaattcaacagtgtgtccaagcactcatgtaatttctgccaaaactgagaagtaaactgtg

SEQ ID NO: 158375 - DNA, 491 bp, Zea Mays
tctaaaatttgaaagtgggtttgcgctaaaaaagcaatattgggcatgtttgttgcacatatctgttggacataggatacaatagtcggggataagatcccagatccttggggcccattggtcagcgagcgtgctaaggaaaagtctttggcgattggggctcgtcggtcaactggaggaaaaatgaaatgtctattctgtaagcatctacctctggattaaccccgcggcaccgagctcgaggtcggacgtggcgaaaccagataaggggtcgggcgagccaaagggaaacatccctcgttcggctcgagttcgacccgccataagtgatcggttgcattaactatgattggcgtcgagccaaggcagaggcgccagttcgcctctcactcatggcctacgagcccctcgggctgtggtgcactcataacttacgaacctcttggactgtggcgcatttatggctcgccctcctgcggcgcactcatgac

SEQ ID NO: 158376 - DNA, 1061 bp, Zea Mays
ttgctcatcttcccttttccacctttagactataaaagatcactcgagcaacaattagtctcaaaagacacaagttatgtgtgctccccctaaactttgtgcatcaagtatttgaatgacttgtactttgcacattctagcatcctcagaactagtggggattacaacatatcttggtctaggcataatctatcaatttcatcacaaagagatacccattggatagatgacataatacaacttatgactagtggaaacaatgcatgcctcaagatatataacattttaaaagcaacctaggcatacttcacacatgatgatcattgcaatacatataccaattgaaagatggcaagatcactcatataaagcacaatgtctaggcacaccatgattaagaggtattttcttaggtacaccaaaggaaacaacattttaaagtataaagcacctaagccaagatactaccaattgaaaggcaagaacataactatgatcacaatcaacggaacttcaagatattcaatgaacttgcatagttccattctccatacctttgccttttacctgaatgccaagacaacagccatgagattcattcttttaggtagtgtggagtgagagcacctgttgaaaccaaattagggatccttttgctcatgcacaaaacttctcatgcttgcacataggttaatcattaaacatcacatagcatgacttacaaaaggatacatgtttatccattaacaaaaaagagttaatcatagtgaatatatcgattgaaaagctaccattgaatgattcaaaagatataacatatagaacacacaatcatgattaagcaagcatcattatgaaccattgataacacaggcaatctcaaaagcataactactccaaggataggtagcacaacaaaccaacttaagagcaatactgatttgcaataatgtacttaagatacccgggtaccgtcctttggagagcaagttgcatattctcatcaaggtcctttgcttgattcaccaataatgattcaagacctctacaacttatttaac

SEQ ID NO: 158377 - DNA, 575 bp, Zea Mays
ggcgtctagaatggttcatcgtggagaatcatgggaattccctccccccacggtcagggagacaatcagatgttcgcactacgagctggaccgaatcccccacagaccaagaggtggttgaggcaggggctctgctagctgaagttggattgttgaaagaaaggggtctgattgcagaagctatggtcgctgactttgatttcaagaacattcagccgctgaaagacagagcatattcggcctatctgtaccgaggcctggctgattcaactcgggtgaccaacagaagaattcctgttgtggacttggtgagccgactcgaaatgatactcagaggcaaggtgtcgaatattggcgctcctgttgcatactcagcctagaatctgcctccttccaaggcctttaccagttttgtgtcgaatcctcctgccggtgatagcggtttgggccttagagtgtgaccctctcccgaagaagttaatgctttggttgcctcattggaagaaattcctgacgacgagaggcaggttcattttgaggtgcctttgaatcccagtgatgcagagataagtgcc

SEQ ID NO: 158378 - DNA, 1173 bp, Zea Mays
aacaaagtcaaggatatcctttataacttggttttagagtatcaagatactatagaagttgttgccacaacagatggtgctcaacctaggacaagtggtgctcctaatgacatgtttgaggaggattggatggacacttttgatgattacatgtccaagcaaccagacgtgacctccacttatgtgcgcacagagatggatttgtacttagaggaaccactgcttcctaggacacatgatttggatatcatcagtggtggcagcatgctgggcttaaatatcctactttgagaaagattgcacgtgatgttcttgcaattccggtttcaacagtggcatctgagtccatgtttagcataggaggaagaataattagtccacaccgtagtaagcttgcaccatcaatggtggaagcactcatgtgtatgcaggcttggtcccgtgctgacatgttaggtacgtggtcagaattttaacaagatttatatgatatttggtttcatgcacattataggaaacaaccaatgatggctgctttgttgcaatgtagggtctccaactatgatgggtgttttgatgacttgtcttgatgaacaagatgaagagatggtattgtttatttgttgctttaatgacttgcattgaagagcctgactcgagttgttgaggattgtttttattattttgcaggatgaacatgaatcaacaattgttgattaaccatttgagatgaacctgcttgttggacctagatgcttgctggctgttgctacaaactgcttgttgtgtgttgggtgctgctagcctgctacaaactgtttgctatagactgtcatgtactcatgttgtgagagacatatatctatgttgtatgaagtatgcaaatgactaaatataatatgtatgctgctacaaactgcttgatgctacaaactatttgctattgactatcatgttggccttgtttacttgctattgactaaatgtaatatgtatgatgtagcctttcatcatttcatgccctcttttttctgatgaagtatgaatgtatgatcttgtttgtcaccgtatcttgtaccgtgctgctgcctgtctgctggaaaccagcacatctgtttcgggtctgcgggtccccgacgggttgcgggcctccacgggttcggggtccgggtg

SEQ ID NO: 158379 - DNA, 609 bp, Zea Mays
cttgtttatctggcttatgaccaccaacgagtcaccatataccatcagcttcttgatgccgagtgatactgcaatgcttagcccgtggaccagtgcttcatactctgtagcattatttgatgctggaaacaacaattggagtgcatacttgagttgttcacctcaaggagcaataaagagaatctctgcacctgctccttgcagctttagtgagccatcaaagtacattctccagacctcaataactttcgggctatccgggacctggtgtttagtccattctgatacgaagtcaaccagcgcctgagtctttactatcgtgcggggccagaactctatgtcgtgagctccgagctcgcatgcccatttggctattcttccagtagcttctttgttgtggagaatgtcccctatcagaaatcccatgactactatgactttgtggtcgtcaaagtagtgtccgtgcttgcgagcggttagaagtaccgcgtacaacagcttctggacatgaggataccttatctttgagggcccgaggacttcgctgatgaagtaaactggatgctgcactggctatgcgtgcccttcctccgcccgctcgactactaa

SEQ ID NO: 158380 - DNA, 3078 bp, Zea Mays
cgtagccattcactcgtatttgattttttttcgtgctccgtacctgcattcaaagtccactggcatagagacagggcccactccgcaggccgcagcaattgtcttgctttcgcacacctcaatctgtgccggacgcgaccaaattcgaaattgcccaacgtctcgcctctcgcgacctccgctccccatttcaaaccgaaaggtccgaaaccccatctcgaccccgttctgccgtatctccgatccgcctccgccgccgtctcccctgcccaggcgccggaagtccacctcgggctccagcatatccgcgatgcatctggacggcgtcgacgacgagctcggaggcggcagctgcgccccctcccccgcgcgctttgagctccaagaggatccttccttctggaaggacaacaatgtgcaggtagagttttatccgcctcaatgcgagttgcctcctccggacctccccttccactcagccatcgtttctctcccctagctggagtgctctagtctaagctcgcgcgggactgcgcccgttagcatttcatcgagcacatctatgtttctagtcgtttaactgctccaatctacaggttgcgatccgtatccggccgctgagcggcagtgaggtgtcgatgcaggggcagaagcggtgcgtcaggcaggatagtagccagagccttacctggattggacaccccgagtccaggttcactttcgatcttgtcgctgacgaacatgtcacgcaggtgcttttgctgctctcgattctcagtttagcattcgtccctctttccatctgctgacttattttcgtgctaactgtgcaaaatgcgtaacttcaggagggcatgttcaatgttgccggggtgcccatggtggagaactgcatagctggctataacagctgcatgtttgcttacgggcaggtaaactgcaggtttcacttgctagtcgctgctgtaaatactcaagttttaagattgcattattctgttattacaaaattatctgcttctgctagactggaagcggaaaaacacatacaatgcttggtgacatagaaaatggaacacggaggaacaatgtgaattgtggtataactcctcgagtgtttgagcatctctttgtaaggatccaaaaggcaagtctcgaagatctgttgctttctagacgcctaattttgggcttttggctgacatgacatgttactgttcttagctaaatgtactccttacggtttgcaggaaaaagaattaaggagagatgaaaagctcatgtttacttgtaaatgctcatttttggagatttataatgagcagattctggatctgctcaacccaaattctgtaaacttgcaggtaattcatgcacggattttgtagttgtacatatatttgcatgccttgttgtagttatacctcgtgttaatttaatggtccctgcttttttctttgttgcatctttttatgtgctgttagcaaatgtctatatttcgagatatacattattcatatcattagctgattagctctagtttgattctttcagataagggaggatgccagaaagggtatacatgttgagaatttgacggaacatgaaatctccaatgctcgagaagcgctgcaacaacttattgaggttgtttgatggaataatttcattttattctgtattttatgctgaggtttgtctctagttgggattgttggaagcttgaatcccttttgcctgttcaaacagaatcgagtttgcacaattgtctggttcctaagtttaagattcagtacatgactgaccttaatatacattcttcatttctttccagggagcagcaaacagaaaggtagcagccaccaatatgaaccgagcaagtagccgctctcatagtgttttcacctgccttatagaaagtaaggtacatgaaagatgaaacacatattctccagagttgttactggtttgtaataagatctcattgtggttctctagtttcaaggtgtcatagtggtattatatattcaaccttattattgttcgttatgacgcacacatattgcccttactttctcttgaaattaattattcagtgggagtcacaaggtatcaagcaccaccgcttttctcgactcaaccttgttgaccttgcgggctcagagaggtaacttgcataagtaacatcacatataatcatctgatatgactataatggaattttagtgcggccacttttcaatgtctttcactctcctgtttagcacgcatgacttctgccttgcaggcaaaagagctcaggtgctgaaggggagcgattgaaggaagctaccaacatcaacaaatcactatcaactttggggttagttgattattttctaataataccacaaactgtggaaaatcttttgaaatttgttataaacttagtatgtgagtcagattaaagtcatagcatgacatattttgtaactattttggtcaatggcatcattgcagacttgtcattacgaacctaattgctgtgtcaaacaaaaagtcacagcatgttccatacagagattcaaaattaacattcctcctccaggtaatatcagcaactgatgcagtaaagttgctcatgttgtaacttggcatctaaggagctattatatgattgcaaaatttttagatgtgagtttacattctctttgctgataaaagatttggtatgcctttcactgctttccaggattcccttggaggaaattcaaaaacgaccataattgcaaacataagcccatccagctggtagactcctaatcatgattgttctattcaactaccctttttattttgaagcttccattccattttgaaagttacacatttgatatttctcgctttctatccagttgtgctgctgagacattaagcacattgaaattcgcgcaacgagctaaatatataaggaataatgtaagtaacctgcacacatttagaataccaccttttttgtgcaagcgtcggccgtcagctgactattactttttgtaggctataattaatgaggatgcttctggtgatgttcttagcatg

SEQ ID NO: 158381 - DNA, 349 bp, Zea Mays
ggagaggggtcgtcttcgcgtggatgggactggtaagcgagaattgttgtcctcgccgattggggtgagtgtgggtgagggggagctgcaaaatctgtttgagggtgaggaactgaggataatgctgttcaactacagggagatgggtatcatcccgaaggttgagccgatgtaatatgtgatgccctcgctgtgtgtatgtaaccataattttgtgtgatgaagctgcgcgctttcgttgatcaggccgctcccgtacgcgacttctatacggcgtcttttgtaaaggacttcgattttgcgtaggcgacttttgcgcggagacttttggaaaagtcttcgattttgc

SEQ ID NO: 158382 - DNA, 435 bp, Zea Mays
ggcctgcgagctgggagctcacgacatcgagtttcgacctcgcactgcaataaagactcaagcactagtggacttcgtctcggaatggaccgaacaacaagtgccagataacccggagatcacagaagtatggcggatgtatttcgatggctcgttgaagctgcagggagcaggcgcagggatcctcttcattgcacctagaggtgaacaactcaaatatgctcttcagttattattctcggcgtctaataatgtggtagaatatgaagctttgattcatggactaaacattgccatatcactaggcattaagagactgatggtatatggagattcactggtggtcataagtcagataaataaagaatgggattgctcgaatgactctatgggcaagtattgcacaaccgtccaaaagctggaagacaaatttga

SEQ ID NO: 158383 - DNA, 712 bp, Zea Mays
acctattggagcgccgagtgcctcggtgttgcgatcatttggtgggcgaggaactgtgtatatgtgtgcgttaagccattaacatctttgctctgaatccttgcactgtccactcatcgtcggtgctctgattgagtgacactgctatccaaattactccaggtgggagatgggaatattctcttgatcgttgcatagctttggtattatggtttagatctaagcatgagggctgcgtacctggtaccatgctatatgtagacttacagtaatgacatatgttgcaatacactgctatccaaattactccaggtgggaaatgggaatattctcttgatcgtgcgcatagcttttgtattatggtatagatctaagcttgaggctctgtgcctggtaccatcctatatgtagactcacaggaatgacatatgttgcaattaaaggacaaatctagttggtattatggtatagatctaagcatgagggctttgtacctggtaccatcctatatgtagacttacatgaatgatatatgttgcaattaaaggacagatctagtgtcggtggctcacatatgagcgaaatccgatgaagtgttggtattatggtatagatctatgcatgagggctctgtaccttgtaccatcctatatgtagacttacatgaatgacatggtccagagaaagggttcgtgtgcacctctaataggcg

SEQ ID NO: 158384 - DNA, 393 bp, Zea Mays
catctctactactctataagaacctaacgtagaccgtggtgcacggttctgcctcctcacgacgcatatgacccacatgttagtgtcttccttctttcccgtgcgcccctctcccctctacccctgcatccgcatggtcctcgccgcaaacccctcaccgatcaatgcctcaaccatgtaaggaaaaaatcatgtcactgtcacagaaggaaacacatcccctcgccgctatccacacctcacaacaatccaacacgcaggaatcccatcgcgacgacgcgcaggaccatcccgcccaatcgttcttcccatgcagcgaggatgccccgcccatatcccccgtgccccaaatgcaatccacgcctcaccaccatggaaggaatcacaacccaa

SEQ ID NO: 158385 - DNA, 575 bp, Zea Mays
ccaagatggtatgggaaggggctgtaaggtacccgctaccttcaaatgactggccttgactctttggcaagtgtcgcattcagatatatagttagcaatttccctcttcatcctggtccaccagtacaaagatctgagatcatgatacatcttgttactgccggggtgcatggagaatttggaaaggtgagcttcatccaatattttctttctgagttcgggattcctaggaacaaccaatcggtcttcaaaccatagaactcccttgctgtcctgacgaaagcatttgtacttatccaccttctgttcgagcatttccttaatgacttgaacacccttgtcacccatctgtgccataactatttgctcgtgtagagtgggctctactgaaatataacccaaggtacctgaggaaacaacttccaggttcagcttacacaactcgtcacgcagagtggtgaccttggagtccatagtgacacagttgcactgggcctttcgacttaaggcatctgccacaacattggccttgcccggatggtaatgcacttctaaatcatagtctttgatcaatt

SEQ ID NO: 158386 - DNA, 442 bp, Zea Mays
agcaaaagtacatgaatcataatgcaggaagatttaacaacctcactgtttgcaagtttctcatatcttaaaaatcatgattgtttactacaagaaacttgaaagaaatactaaaacatactcaacagagaacaaagtaaacgggaaaaagtccaacctgtgttccccagtatgagttcagtgtcctagccacgaatgacaacaaaccagcaataaggggttggttgtagtatgtcaccaggctctctcctagtcgatactccactagaccagcaataatcttcaacacacagttagcaaagtaaattcagacaaactgtgaaaacaaaactactataacatataatttgcaagcaaaatttattcccatgatctggagagtggaaacagatcaaattttcatggtgtgcccttttgacctgttcctagatatatggatagt

SEQ ID NO: 158387 - DNA, 910 bp, Zea Mays
gcgcaggcgagcacggggacggcgccgtgagcgcgggcccacgtgccagcgaggggagggagatgaacgatgctagggggacagtcgttcaccgtggggaaagaaccggccgccggtgggttcgacggcggttccccgctggtggtccggttctcggtgatttggtaggtgggctagcacgagcaggggctggtggtcatagtggtggggtcaatttggctggtggcaacttaggacggtcggtcacggtgaggtggcgggcttccgcggccgcgaggtcaccggcgaggccactaggcgtgatatgggaaaaataatggtgtgctgtgttggtggtgaagtggtgaagtttgtgaaccactttaattttactctaagctactggagtggggagggggagctcaccggagcaaaggggggcggcgacgcttggcttgattgaggtcaggggaggggtggggagtgatcaaggccggtgcgaggagatgaggggctcggggaggcccttttataggcgcccggggaaggggaggaacggggctggcgaacaccggcgaggtgtacaacagtggcgataatggtgcacatcgcaagggacgagacgactcgaggcgggctgctgtgtgagggtgcgacacagtggacagggggcgaagcggtgcctaacttcactgtcgcaggagtaatggcagagagagagggaggatggtggccggcggggatcgcgtcgatgccgagcacaggcgaggaataagggggctgacggccgggacccacatgccagaggaggagcgggtgcgagagagcgagagcggggcgcgactgacgagtggggtcgagcggatagcaagggaggggagagcgcggcacgggcgcgggcgcgcggggagatgggccgatgtggaccgag

SEQ ID NO: 158388 - DNA, 389 bp, Zea Mays
cgctcgccgtggctctgcccgcgcgggtgagctcgccagcgcacttgcagatccttgaatctcatccaccaccggccatcttcctataaattgagcccgagcactgcttcttcaccacatcacacacacaagtgcttgcacaatcgacccaattccaccaaagaactcaaataggccataaatctcttcctcactgttcttagcgtcgccgtgaaggacctctttgtgggcaacccttctcgggtcagtactcgcccgattgtctcttgttctagcgtgtctttagcttcctattgctctcggtgccgtccaattgaattttaccagagccccaccaccggaacaccccgttgttccatagaacgccgccgtatacaccctctctgtcg

SEQ ID NO: 158389 - DNA, 851 bp, Zea Mays
tccttctcatgacacgctccgaggactccaagatacgcaccgggcgacactccagagtcagatcttgctgcactgcaatcggttccaactcgatttgatggtctggatcccacaaaaacttcctcaacatagagacatggaatactggatgtacccctgccatagatttcgacaattgcaagcgataagccaagctgccaacccaggccaagatagagaacggtccaatgtatctcgggctaagcttcctagagacaccgaactgaacgactcctctagtaggtgataccctgagaaggacttgatcacccactgcaaattccaagtcccgcctcctcacatcagcataactcttctaacggctctaagcggccaaaatattctgacgaatctcctgaactttctcggatgtctgctgaacccaatcaggaccgaccaaagatctctctcccaaagtctcccagcacaaaggggagatacaccgcctaccatataaggcctcatacagtgccatcttgatgctatcctgatagctgttgttataagcgaactcagcccaggtgagatgatcctcccagctacccttccatgacagaacacaagcacgcaacatgtcttccaaggtttggatagtttgctccgactaaccatcagtctaagggtgaaaaccaacactaagggaaagcttggtacccaaagcactgtgaagactctcctagaatttggatacaaatttggagtctcgatctgaaacaatggacttaggcacaccgtgaagcctgattacttctttcatatacaagggaaccaactctgaagctgaatttgtggtcttcatgggaataaagtgc

SEQ ID NO: 158390 - DNA, 393 bp, Zea Mays
ccactttaaactcagttctgttgacgtacgtcgtcgtgcgtttcgccgcgcgatgctcaacgtctctttataattaatgcaagtgtctcgttgtgcgctcggtcgcgcgacgagtcgttgatttcttaattcgatttaaagtgttgtgtcgtacatctcgccgtgcgacccctccctttcattcatctttatctatctataatgattaaacaggaaaacatgactttactttataccaaacgtagtatccaaattaatgcccttcggttaagcgagtggtttaatttataattacgtaacgtgatcgtttctcgactgtctttttctctttctttcttaaccgtagttgcgagcccgcgtggaacgtctgtttacttactgcattctattgta

SEQ ID NO: 158391 - DNA, 498 bp, Zea Mays
ccgtgaaccaggtcctcgtactccgtgacattgttggatgctagaaacaggagctgaagcgcatacttgagttggtcacctccaggggcaatgaaaaggatccctgctcctgccccctgcaatcttaacgagccgtcgaagtacattttccagacttcagcagcttctggtttttctagacctggtgctcagtccattctgatatgaaatcaaccagtgcttgagcctctattgtagtacgaggtcagaattctatatcatgagctccaagttcacatgcccatttggctgttcttccaatagcttccttattgtggagtatatctcctattgggaatctagtgactactataactttttggtcgtcaaagtagtgtcggagcttacgagtagttagaagtactgcgtataatagcttctgaacctgaggatatcttatcttcgaaggaccgaggacttcactgataaagtaaactggatgttgtactatatacacat

SEQ ID NO: 158392 - DNA, 1121 bp, Zea Mays
acaactttacccttaaaaaaaggaagaacactaccagcgcaggtcacttgtttgttactgtataactaggtggagaacttctacaattaggaaatcaactctgatctagtagctagtgttattataaaatagtttttttcctacgggcatgtgattttctttttagttaggatagcatgcaaaagataataaatggtaggaaagtatgtatcctcgtagtgatataagactgtccgtagcaaatcctgtaacataggggttctgattgtagattacactgttttactgggcaaaatttgaaatagaggatctgataaaatagctgctcaagacagactaatcatggcctggttttgtttaacttttaaactagtgcattccttgtagacagtagactttatctagatattgtgcatccttggtataggacaaagcttcatctggacaacttcttttgatataataaactgtgaattaggctggttcaagaatcacatttttttagttttgtttcttcatgtatacactactgacctctattactaatgtgtttacatggttcaaaactgttttggtaatcgaatttattaccatataatcgtcatgtaatcaaactaacaaattataaagaaacctgaaaaaaaattatagatgctaagatgcatttcattgttgtctctctctttaatatatcttatcataggataaattagaacttaaaatttaatataacagtagaatagataattaaatgtatctataattttttgaaaaaaaatataacttttgatactttgattatacaacgattgcatcacaagctcgattggataatggttttggatggttaaagtcatgtatgtgtactacaaatatccctttgtcgagcatcgagtttcaccgagagcttgacacttgataaagtcttctttaccgagagttaaagtatgccgagagttttgtgcttggcaaaggatgtctataccgaatgtctttgtttgtcgagaatgtcactcagcaaagcatattttgctgggtgtccgattaattgttctcgaaagagagctgggcacttgacaaagagccggattccgatagtgtaattgtctcgtacataatat

SEQ ID NO: 158393 - DNA, 639 bp, Zea Mays
agaagggaaaagaaaatctagaagaaaacgtaaaagggaagtattggctacttgggccgaagaaagccattttggcccacttatccctctgcgtagcccaacattccactcccgccgttctcgcttgagtcgctgtcatgtcggtctagtgcgcccgcagagattgcttggtgggtccgcctggtcagcccgcacacacgcgcgggacagaaaccatccgcgctctctcactgacaaatcagccatgcaacctattccgtccgcgtctcgcgtctcaaccttcactgtcttgggggcccggcaagtcagagctttcttcctcgaaagaatcgcgcgctccggtaacagcctccgcgaaattccgggctccttggggtagtgcttacctggtcgtggctataagctagctatcgcacccacgattcccttcatcaaagccactacctacgcctcaacccgtttcacgacgcagcccgtgaggaatactgcgccgcagccgccactgcgaaccacctcaccgcgagggcccccattgagattcgtgtgcgttcgtcgatgtgccagcattgcgtgtgtggcttcggtggactaggacgcgacccaaagactcaccgattgctcgctgtcacgccagggtca

SEQ ID NO: 158394 - DNA, 556 bp, Zea Mays
cacacttcacagaaattttcacgaagaatatgtctcctcttcaattcctgtttggatggcaaataattatgaaggactctccatcagaaaattcttatttttggaggtatattcagcttccatagttttctccaccagtcttcttcattcgatgagcttgctgcatttacaacatgagccttcccgacactttgagactgcttcaacattcgataacatgaccgaactgagaacacaccatttttctcatgcgcccaccccatcacatcagcatccatccgagtgccaggcctcagcttcagaatttccttagcatccatagcaacgaaagacttcctcaccaaatcaacattccagcatctagtacctggcagaaaaagttcgtccacagattgcacttggactccttcaagatggacagtgggcttcaactgcctaagacttggaatctagttgtcctcccaaatacttattgaggatccaggacccactcttttaatcaagccctgccataaggcttcacgtccaaacaacaccgccttccagatttctgaac

SEQ ID NO: 158395 - DNA, 478 bp, Zea Mays
ggccgagtgacctccgataccatgaatggcccttcccatagcggtgacaatttgtgtcgtccttctcccgttagaattcagtgaaggaccaagtctcccactacaaaggatcaatgtcgtatagccttatcatgatagcgcctcagggtctgctggtatctagctgactgaattactgtattcaatcgctcttcttccagcacgtcaatatcttctagcctggtagcttatgcttcagctatgctttcaaagaccagccttggcgccccaaacctgaggtcgacaggtagcactgcctccaaaccatagaccatgaagaagggggtgttcccatgcagagctcggctgggttgagttcttaggctccaaaccacataaggtaactctctgatccacttccctgcgaacttttcattcttatcgaagactttcttcttgagtgcttccagtatcattccattagccctttccacctgac

SEQ ID NO: 158396 - DNA, 538 bp, Zea Mays
gactttgccaatcagacctccgtcgtggctatgttcgacgtgtcgtatcacaagatcggcgacatgttgcggggccaaggccttcaggttcgtctgcagcaacgctgggtcatgctctactcttgatgttttgtgcccttcaagtgctcgattcaatgcccaaaacaagtttacttgctattttttccggcgaaaagtctctaaatgtacatatatatgttccattattctataatttttcgcaggtatttttccatgtcgttggcagtggacacaatgatataccttggtttacagtacccccgtgattaactcatatatatacatcaatgcgagcctcgttcttgaagccacatacctgacattttatttggatgtcactaatatgtttgatattctgccttcgactctggtttgtataaattttatgatgtgtacctaacctgcactccctggagaatcatcaccttatggtctccaatccaagttacttcatcgatgctaattgtaaatttattaattagatgtaggtggaaaa

SEQ ID NO: 158397 - DNA, 373 bp, Zea Mays
tgaatcacaggcgccaatccgcggacgtcgcttttgacgctagctctcattaatcccatgcatgcagcgatgtgcatgtgcgaggtgatgtgatgtgaatgtgatgccccgcacacatgagatgccattcaataataggaacccccgggcgtcttccctcctcgccaggaaaccctcctcaccgttgcaatatttgcttggcatacttccaatccttccttatatacgtgaacgcacccacctaatcacctgatacctagctgcctgctcgtggcaccagcaccaccgatcgccaagctagctaggacggccgaccgatcgatcgagctgctgcaagggcggccgccggcgactctcgatcgctaggcgctag

SEQ ID NO: 158398 - DNA, 551 bp, Zea Mays
cttcgatattcatgtcgttatatatagcatgcatgtgtgtgcttactatggtcattaatccaagcattgttcctggtgacagttgttaagcacaatttctgaaggaatcatggtaggggattaaattttctgataataatgtcatctactgcactcagcgaatgcccatatatatgtgtcgtcgcgacgtcgccagattgagggaatttatcacactaattaagaagatgaactgcctaataatgcacattgtgcgacgacgatgcagacatgaatgtctctgagcagtttgaaaccgagagccgagagcaacatttccacacgtactaacaagcgacacttaccagtgttctataaaaaggataacagtgctggcaagtttgcagggcctggagcctcatctggtgctatttgcagcagttcctggctggctggccggactttgtaaagaaccgcctgagaactatggcggccagttccctgcacagttgccatgcattcttctcactcatgctttctgcgtgcttcaaattagggtcacgcactcacgg

SEQ ID NO: 158399 - DNA, 641 bp, Zea Mays
taataaaatcccaatttgtgatgttttctgtgccaaaaaggctttcatgcattaatattgaatttcttcaggttacttcgggtaaaactttatgcacgaggagagaacaaagatttaactaatctgtgtttcattgtatttcgatttaatttcccagatttaatatagttgttatggccacttggcgatatatataaatatatgatgccacacaacacaatcaaataaaatatagagccaataaaattgtttacgaaggttgaaaaataatgtgacttaagaggctcgaataacccatcacaatccacacaagtacaagctctagtgcatgtggcgtcaatgcgtgtgcggccatcagggctacgacaacacaaaaaaccttcgtaacaagcgcaatagacgcaactgtggcttggtagtcagcatacacaataagtccacataacatgcgcaacaggcgcaattgtggctcaataattgtgacacatgggtagtgcctacagggcctgcgaaatatgcgtgactcggcgatggtggtccgactcaacgggagtggtccgattaagcgagagtgcgattaacaatcatatgacgcagccaagttaatatgacacaaatattgtgtcttgttgccagggctc

SEQ ID NO: 158400 - DNA, 606 bp, Zea Mays
taagcaacatattatgacaaaataagctttcgcaatagtaattacatgccttttatattttcccctctacggttgcattggatgtatccattgcagccatacatataattaatataaacacaacttttcttacttgacattttctttgaataagagcaacatctctgcttgaaccaaagtcgcgagcaacaaaattgtggagactatataactgctcgcctctggttatatgtaactagaaaaaaaactcaaattaataaaacggtaagacctaaacccctaggcttgataaaagatgtatattcgaccgttggttgccaatgcagcttacagtatattttgacagtatatgcacgaaaccaacgcatccattcactttaactgaaaggtgcgcattttgactggttgttgccaacagtacaatactgaagaatgtggcagcgtgagctgtattcggcggcgaggttgcaagggctcgagcgtggactgcagtgggggtggagcggtgcgacacgaacggcaaacaacggcgacctcaaagagcgcggccgcgggaaacagcgcggaagcgcgggagggagcagaagcgggggcgtgcgaacggtg

SEQ ID NO: 158401 - DNA, 513 bp, Zea Mays
gcttgatatagttgttatggcctcttggcgaaatatataaatacatgatgccataatacaatcaaataaaatatagagccaaacaaaattgtttacgaaagttgcaaaataatgtgacttaaggggctcgaataacccaccacaatccacgcgagtacaagctctagcgtatctaacgtcaatgcgtgtgcggccatcagggctacgacaacacaacaagccttcgtaacaagcacaatagatgcaattgtggctcagtagtcagcatacacgataagtccacacaacatgtgtaacatgcgcaattgtggctcaataattgcgacacatgggtagtgcctatagggcctgcgaaaatgcgtgattcggcgatagcgatccgactcaacgggagcgatccgattaagcgagagcgcgacatagcaatcacatgacacagccaaattcgaacgacataaatactgcgtcatgttgccagggcgcagccaatgcttagccaatgccataactcag

SEQ ID NO: 158402 - DNA, 381 bp, Zea Mays
actaactcaaggtggaagatctgtcagtgagtacgtgcacaaattcacagaattggctcgctacgcgcctgacgacgtcagcacagaagccaagaagatggcccgctttttgaaaggactaagaccagaactcaagaccatcctcgccagccaagatttcctcagcttctcgcacctctcaaacaaagtcatacaagtggaaagggcaagggaagaagaaaaaggtcacctcaagaggaaattccaagtcctccgagctcagcagcaagaccggcactagagaactcaatcctttgggtttccacctaagggaccaagcttcaataagccagctggacccactctgtcatgtttcagtcagcagagtcagagctcctttta

SEQ ID NO: 158403 - DNA, 1487 bp, Zea Mays
ctctaacatcttgtttgtgacaattttctatgacagtatagcaattgtcataagaataaatcgtcataaccttctcaacataataattgtgatggtattatatgacaatgtgcatatgtcatagacataatatgtatttctatactataaaagatccaattttcctttagccatcactcgttgatccatgtttagcacacaacaccttcctcttccttcttcctagccgtgcatgcttctccacttccttagaggcaaaggagccaaagcttggaccccatgccacttctccctccatgcaaccacagttgtagctgtaggtgtcatttgctcatttgcccaccaatcgtaccaagccccataagaacccccacaggagctccaaaaattttatagtcctgatcccgtcgaggctgtgcatggggagtggaagcccatccagatgctggtcatcctcatgaccgccatccgcacagcgatggacgtcgacgtcgatgcggcggctgccctggccctgaccttgccctaagacgtgccactaccgacacactccctcgtgctcatcctctgttgcctcatccacacccgtccgctccgttgctaccacacatggcctctttaacaatctctacccctccagcgaggatgatacacgcgccccaacctggcctgcccatctggcctctctttatgtgttgaccatgcggcggctcccatttggttgcctgcttatatgatgccaatgttgcacccacggctgtaggtcaagccaaaaacatctctcctggttgcatgcatagatacgcaaggagcgtcccgtttccagcagaacagggtcgcatgagccatgccatgcttacacaccgaaccaatcagacgaattgtgtcccactccaacaagccgtgcaaagatctccaatgtcctcccggtgctcaagtaccacagcgtctgcgctaacgtgtacctctgcagcaccatctctacaacaccctcacgaagatgaacgtcgcggcgctcgagccatcctcagagtaggggcaaagggccagatatcgctgttggtattgcttgggggtaataccttggtctaacccaaccaagcaccagcggtaaaaacaaattaatccccaaccctaagtgttgtctcctatctgttgtcgcctgttgagcatctgagcggtccacgcctccaggctccagctctgcctcaagcctcaccttcactcgttgaggaaaaaatctcgagacctggtcgcccaattcggtgttctccttccgcccaggcctaggtgcccagcaccgcccatcactagtctatcaacggcgccgaagtgcgccaaggtcgaggtctgccccatcccctcccctaccgagctccgtgcctccatccagggcggactcgagaccaagcccctccccgcacctgtttcgccctattgcccaggccgagctccgcctcttcctaggccctgctcttccctaagac

SEQ ID NO: 158404 - DNA, 808 bp, Zea Mays
ctgaagctactagactagaggatgttgatatactagaagaagaacgattgaacacagtgattcagtcagcccgatatcagcaaactctaaggcgtcaccatgatagggccatatggcatcgatccttcgcagtgggagatcttgtcctctgcccgaattctaacgggggaggaacggcacaaattgtcgccactatgggaaggaccattcatagtagcagaagtcactcggcctggatcatatcgtcttactcaaatggacggcacataaatagggaactcatggaatatagagcatctatggaaattttatccctagctagatttcaaaagctattgggacggcattgtattctgtaattggatgatacactatcaataaaaagacttcactctcaagggcactcgaactgtttattgtcaaatctgcacacttacttaattcagggtgaccactataccctactaacggagcaatcggcttaagtcggcgatgacttaagacggtgtgacatgctcacgcttacttaacctagggtgaccactatgccctactaacggagcaatcggcttaagtcggcgatgacttaagacggtgtgacatgctcacgcttacttagcccagggtgaccactatgccctattaacggagcaattggcttaagttggcgatgacttaagacggtgagacatgctcacgcttacttaattcagggtgaccactatgccctaccaacggagcaatcggcttaagtcggcaatgacttaaggcggtgtgacatgctcacgcttgcttaattcagggtgat

SEQ ID NO: 158405 - DNA, 565 bp, Zea Mays
atttttttaactcagaaatatcttcttcggagagttcttggccgcccaggtgccgtaggtccaactctatttcctccgaagaagccctattagtggttacttcagctctgtccttctctggagccacatcagttataattccgtcaatctctgacattatggtcccgatgttttcagcttcaagcacaacttcatcagctttggcatcggtattagcttcagcattagcgggcacaacaattttttccgttgaggttaggggcggggtcttatggatagcctttattatggccatcattcgccatttcttctgacccctagcatttcccctagttaccgaagcagtcttcctcccctccgagctttgtttaatccccttctcctttgactgcaataggctagtcagatctgaccccaggggacttagcataacaaatgggaagggttcagtcattacctttaatatttttgtaacaccggcagatgaagatgatcaagtactggcagtcttttctggtacatcttgtacctttgtctcagcagaagccaacatggcagacttttg

SEQ ID NO: 158406 - DNA, 543 bp, Zea Mays
gctccaatttctattggtggttataagtattatatcagttttattgacgattttaccaaatttacatggatttatcttatgcacgatagaaccgaggctcagcgtatttttctccaattccaaaaacatgttgagcgccttcttgacatcaaaattcgatgtgttcagtccgattggggtggggaataccagaaacttcataatcaattttttacttctcttggcatcgctcatcgtgtttcttgtccccacacccaccaacaaaatgggtctgctgaacgaaaacaccgccacattgttgagacgggtcttgctttattagctcatgccggcatgccactcaaattttgggacgaagcctttttgacagccacatatctcattaatcgtcttcctactcgtgtccttgataacttgtctcccatggaacgattatttcaaagtccgccaaattattctatgctaaaaatttttgggtgtgcttgttggccccatcttcgaccttaccaccgtcataaacttgaatttcgttctaaaccttgt

SEQ ID NO: 158407 - DNA, 292 bp, Zea Mays
gtttgattgggcttctatggttctcggtggtttgtgggaggaggaagggagacatgatgttcctagtgagacgcaggtgtattcgcaacttggacttattgaagaggacggggcagagggaaacaaaagagatgaagccttacgaggtggtacaactaattctgatgaatcggaccacattgattcaggagatcaaaatacagaccaaccatgtgaggactatgtaccggacgagaagagagtgaagtatgatagaattaatccctcaatgctgccaggcagtttgtttcct

SEQ ID NO: 158408 - DNA, 837 bp, Zea Mays
accaccaacttggcactgcgaattatgcaggtatatataaagaaccggactaaacaaatggtttgaacatctaaataaatggttacatactaaaaaccaatcattcttgatgcagggtttgaaaatatcccaattctgctttgtgggaacgaggttcacctaaagaatagacaggtgaaagcaaaacaagtgatgttccacaagaaaaaagcatgcggtactatgactcagcagctacaactttgagaagcctttctttgtaccttgcctggaagcttgctgggtgagtctcgtttagtagccttattttttattttactggaccaggaccaagccaacgtattttgttgtgtcagtgattccaattgtctctttgttgaaacccctgctctcgcttctcttgatgtcacaattgacattgctacccagcagcaataagtgctcggaaaccataatttctcactcatttgttgaccctgaatgaatcttcatactacttggccttttcaggcatgaagccgaactggcaactgcggcagcccaatcattaccagatgacaatgacgacctgatcgagtagatgttgcattatactactttatctacatgtctcgcccaatgagtcttcttataagttctcgtgtcctaaactttgggatgatgaagtttttttagctaaccgtcctgattagttgggttccatcagatgtgatgaactagcttcattgcaatggttatttgcttaattgctttgattgccaaataaaatgcatgttttctttgtgtttttgtatttcacgaaatagtaggcatttattggggatagatggagatggt

SEQ ID NO: 158409 - DNA, 899 bp, Zea Mays
tttcggactcccaaactagcccttaatgtcttgtaaattccatggtggccatttaatatgagggttgagtactgcatattaccctttgtaattgcaatattcacagcgttaatgaatcaacaatgactgcgtttactgttcaaatttattttttaatgtagcttttgcttgtcctgattaacttgaaattgcaattttggactgtgtgcattgtatgtggctggtgcagtggtgagagctgtttcactaagtcatcaggttacgggttcgaaacagtcaatctgcatttgtgggagaaggttcgccccagtttattccttccctagaccttacttatgtggaagcctccgtcattgcatctgccattttttattgtatttggctttatgcattgactgttgcactgttgtaccatgccatcaaatttatctttgagagcattaccttaggaaaaactaaagaagagcaattttgtggaaaataagatgatgcattgatacctggaactccttgatatttcattgttttgtcatttctattttgttgtgggctattttatcttttctgttgggctcattctatctgtggtagagatgctgtcagcagttaagacaaaaaatgtaccaaggattggactgctttgagcaatacaacacagatcctccaaatggaagtagccaaagttgtttgtttatttgccattgctattgatagaacttacagtgcaaaacaaacgacaattgattggagttgtatgaattgattgtgacttttatggcatatttctgcattatcctgacttgttaaagttctaggttggatacttggaatttatgcagccttcgtgcaaaacaatgtatcagtatataggattatgtagttactgatctttggcaagg

SEQ ID NO: 158410 - DNA, 1022 bp, Zea Mays
aaaagtacccgcgaaggggtatggtgagtcctgggccgttggattcaaatatcgtggttaggattagatcccgccgcggcaacacggggtataacctgaaccgatggatcaggattcaacgacgaggatccatgatctaactctattcgtccgatcgaagatcaacggccccgatttaatgtcgtgaaagggtatggcttgcttctaatccgaaccgttaacctccggatcaacggtgcacgtgaccccgacgctactccgcgccagcagtgaccggacttgggcggcgagtcccaatccacggcggcgatcctaccggagttcggccactaggcgctacggggctccattctctatcctgaatagtgttacgcgaagaagatagcctagcggactatatgagtaatgactcaccggagttaggcgcggcaagcaccaggattaccggcaatggcggacccgcgccgcgaatcaggattccgatgagcaattcctgtggagtcgggctgttttaggcggaagcgagtcccccgcggccttcagtgttgggtagcaaacatcccgcacccaatcacagggccgaaacggcggcgagacgcggtgaccagcagaccgacctccgccgggtgctggcaagtgacggcggcacagttttagggtttgggaaggagacgaggtggtcaacgaatgcggcgtacggatgtgcacgaggatagagaagaggctgccgctatttatccagggatacccggtcgccggatccgattatcgcgcacgccaactgcgggacgcgttcggccaggttggggatggtgctgacggggccggtccacccgtcagtgaggagatgaggcgagcgtgcgtcggacgagtgggccccggatgccagcggctagcagattgtcgcggaaagagcgcggttgcgcgtggtttcggttgagaggagaacgctgacaagcgggtcccacacaacaggtgcgcatgtgagttcggcgggcgtggagccgttgggctggcgggag

SEQ ID NO: 158411 - DNA, 466 bp, Zea Mays
cctcagggtttgctggtacctagctgactgaattattgtattcaatcgttcttcttccaatatatcaatatcctccagtctagtagcttctgcctcatatatgctttcgaagaccagccttggtgctccaaacctgagatcggcaggtagcactgcctctgaaccatagaccatgaagaagagagtgtttccatgcaaagctcgactaggttgagttcttaggctccaaaccacatacgacaactctctgatccactttcctgtgaacttttcattcttgtcgaagactttcttcctgagtgcttccaatatcattccattagccctttctacctgactgttggctcttaggtgtgctactgacgcatatttgatctggatgcttctttgtttgcagaaatcaaagaattccgagctagtgaaattggatcccaagtcagttataatgctatgcggtattccgaac

SEQ ID NO: 158412 - DNA, 406 bp, Zea Mays
gtgaatgttgtgcttgataaatgaaattatctcgaaaacccaaaacttaagaagcaagcatttgacctatgaaactattaattataagaattcaaatcccaaaggaaatgaagcttaaccaagaatgcaagactgggaaatggttaaagaatgggaacaaccctgatttttctaagtctaatcttgtacctcttttcaaatgccaacatgttctaaccaaaatagtcttcaaatcacattgccccaattacaaaagttgtggataattacttagggcacgccctgtaaaaagttggcaaactttcgaagtcgtttgacatgttttgacaccgttagacagtcagtttccactgttttgcgcagtgctgacaaaccaaagtttggaggtatatattttaaaatctag

SEQ ID NO: 158413 - DNA, 349 bp, Zea Mays
ccgtaaaggactaatggtgatggtggtatttcacctagcagggcgggccaagtgtaagtgttgttggtgtggtcgaagcgttgagtagggaagttataactagagctaacagagtagtggctatcatcatcaacaaaaagcaaaaccaatcgattcaatcacttctcatctctcgttgtgattgaagtgcttcatggtctaaatcttgtgtggcatggctaaactaactctccccagtgaatccccaacccaccatacaactccccccgacataactccatacaacatcactaccccactaccatatgttccaccacctgtggcattatcatcgcttccatcccattac

SEQ ID NO: 158414 - DNA, 729 bp, Zea Mays
agaagagttgtcggattattttaagcaggaggcaaagaaagagttcaaagacttgatgtctcaaatgctatcaaatcctccactagaattgatgcagtagttggcaagtgcgatgtctgttcaacatatgaccactccacagctgcaaataattctagcagctcaaccgccggcttgcaccgattgtacaaccgtcccaagctctatcgtgtcaatgggaaataaggtccgttatccagttgatgacataacaaggccagtgacgtgcacactggttataagatatggtattaacaataatcgcacaaagaaagtaggaacatgcattgcgatcccaggatgtaagtttcatggaagcgacataccagatgattattgcagggtagaagtgacgatggtcgtccaaggatctcaggacaacatgctagacatccctgggcccgaaggaatcgagatacttggacaagccatcaaaaatttcatcctttggcctcgaagggatgtcgaattggttgatccaccaacgccatcttcatctcatccccaaccatctctgcctcctcaaactttagtacctttacatccatcatcacctccacaatcttcccatgctgctcctcatcctctttctaatccaccgtctctgccacaggcatcaacatttaggacaccaccaccttctccacagccatcaagggattcacgacaatcaaagaaatctaaattccc

SEQ ID NO: 158415 - DNA, 697 bp, Zea Mays
cgaaaaacccgagcccgaacccgtatagcccaatacccgatacccgaaacgtttatgcgggcaataaaccttaaaacccgatattatttcgggcttaatcgggtagtaacacccggtacccgaaatacccaaatacccgactgtataaaaatcaccacatgtgtctatgtgggcatacatacggatacgacccagcccaactagatttagaaagtagcagatcctagtcttagtctccactctccagtctatccagtatccacggcgtcaggaaggagtcgctggctcacagagctcactgccgcggtgtcgcctggccgtctggagtatccggcttccggccatcagcgattcaacagagtaagcgtgcagctgtggtgccgtactagctcttgctcttccgtcccatgtgccagcacgccgtggtgccatactgccaaccatcagtcaaccaaccggcttctggttcatcacccaactgtcttccggattgcaacagctagcagttcatcacccaaccggccaaccatcagtcgtgcttccggttccactttccagagtttgctatttccacaactaatcaaggtcagttgcatggtaaaatatttcctactttgttcattttactttgccaaatatttgatgtcacattgatctgcaacgaaatcgggtagaacgggctacccgtacccgaacc

SEQ ID NO: 158416 - DNA, 500 bp, Zea Mays
gccagcttcttctgctaattcttcactgccattgattcttagacggagtcatcgcttttgccagccaggtacctggctggtactctcctttgggttttgatgttactgttctttctaaggcaacgtcttatcgtgattctattcttcatcaggaatggcagcaagcgatggctgagtaggttgttgctcctgagcataccgacacatggaaacctgttctttgtccatcatgtgtatctcctatcacatgtaagtaggtctataaggttaagactcgccttgatggctcccttgagcgttataaggcttgcctagtcctctgtggcttctagcaggaacatggtcgtggatagatgtattcaactgagaaccatggtgtccgagtttaaagtttaaaccataattccttttctagccctccacatttaagcacgctgtaaaaaaagttgaggtttatggtgattcagcaaagtagtgcatttatgaccatgcatcgacaa

SEQ ID NO: 158417 - DNA, 516 bp, Zea Mays
gtctcgatgccccaccgagcccccaaaacgatcgcgacaacgtgctacacaatgcggacgactgtatgaactaggtggttggccacataccggcagataggcactctacgatgctggccatggcgcagcgcaggaactcggagacgctcagctccggcgaagaattccaaaggcgcagatgatcctcgtgccaattccctattcggtcaccgtggcaagtgtgccccgcctccactggacacaggatggaagggtccagcagtggcgtatgctgaaattgacaacggcggcgctctcccctccgcggatggctacttcaaatcctaggccgaggcggcagtggtttgtgtctttggcgagttgtgaacgaccgtgaactgaggcgagagatgatgaggcccaagcttatagcccacgtgcctaggtagttgactagctcccggcgtaggagcacacggggttgttagatccgcccaacgcggtgctcggagcggaggtgggtgagtggggctgcca

SEQ ID NO: 158418 - DNA, 897 bp, Zea Mays
ctgaagagtgttgagacgtgagttgtgccaagagcaactccaccatgagggcgacgaggagggtctgaagtaccatagaaaaggctgtgaagcctcctcgtcaactaagggaaactaaagagctctctgatttgaggagtgtgaatagtaacatcctcacgctcgaagcgatacctcatccactgatggccaaagtcaatctagattgtagcataaaacactctaacccactcctcaacgtagcgacctccaaacgttagcagagagtataaacctggtagatatgtgatgtggccctcaacctcagaactggctgttgtacgaaaagctatcaaatccaatctacagtgagctctcaaggctatctgagctgtcaactgagcacggtagaggttagaggcaacaagagcgcggtggcggtggtgctggagaaaagagaggctttggctagtctggacaaagaggtgcacgctgggtgaattgggaagaagaagagagcaacgagggatataagcgactgacatgcgggctcgggtgagagaaaggttcgaaagcgacggttatgggcacaccgaacaacctgcacaggcagagcaaacagaggccaaaacggagcaccaaacagtgcacattacagtgtctggtgcacaacattttgccttctttgttgatgatgtaatcgaggctcccgaaatgggtggtcgctctaggggtgcaaacgatacgggggccgccattggcccttgcggtagtgttgagactcttgggcggaaggggttaggatttggggaccatgaccatctccccttcgacgttgaggacgaagttgaggttcctaaaacagattgtcattttgggggtttgattggcatcatgtccggccatccagagcctgag

SEQ ID NO: 158419 - DNA, 535 bp, Zea Mays
cagaagcagcatgatggtgacgagcagcgaaacggaggaggaggccatcggctactctagtatatactaatgggtagggtagtggcgattgtgacccagccgtccctatcgattgaggtggtggtccattttatagcccatgcaaacatccgggcgttgttgcgtctgcgtgggccatccctctctcgtttgatcggggacacagagtagagcagtgcagaggaacgcagagcagagtagagcaatgcagaggagagcagctagctagcgtcactctcatcactagtagtactattgtacaaccagcccagcagcagcagactctcatcattatcgtaccactaccagcccaagagcagcactgcctgctggctacgctggtgctgtattgccgcatgcttgagcaagttgtagctgtagggagggggaatcacatcacaagagagctgacgtggagcgccgagacgagaggatacgcgacatctccatttcacctgtgctgatttaattagtatgcgcgcggttgtaataatga

SEQ ID NO: 158420 - DNA, 634 bp, Zea Mays
gtttttcaaattgaaaatagaaaagggaaaatgtaaaagaaaaagaaaatgggagtggagtccgttgggctggaatgagagtgtttcggcccatcttccctcattccccatcgcgcgcagcccacctttccttcttggctgctcggcccatttctactttgtctccccgcagacgcgtgatactctttcttttcgctggcgcatggaccgcaatgtcagcgcgttctctcccttcatcgtggccgcgcagatgctgcaacgacttcgtggaaatggcgccgctggccatggttcgaggcctcagtgttgaaccgagcgcgccctcatgggtgagaatataaacgtagtcggccttccctggaaccctttaaacaaaatcgcagccacctctacaaccggataatagccattgtgccgccgccgctgtgctagtattgtcgccgtggtcggacctcggtagtagagcgtatcggggcttgctgagtgcctgggcggcctcgttggggcgtggcgggaacctctggtggaagtccggaccttgcggtcaaacggttctcggtgaattgctcgtcggagcagcgcgcgtgcagtccttccgcttctcaccatggcgcggctcctcctcatcgccatt

SEQ ID NO: 158421 - DNA, 707 bp, Zea Mays
gtccaatcaaagtccggttgagcaacagggaacggagcgtgaagaccggttgagcaacaggaagcgtggccgcgcggtacagcgtggagaaggatagacggggactcctccgactcgacgtttgtacctgcacaagaattttccagcgttccgcgcccgtcggcatacagcgacggtgatgggatttaggaaggaaaatcgtacgatgagtgcaggacctaatccggcgatgcgaataacgtgaattgcgtggttattccacattgttgaagacgaagttcgtagtcctagcacacagaagaaaatcggggctactgttaattgataacgaagacgagggaaaaaacaaacgaattggggcgtttatccatgataatggagaatcgttggttggtgagggctgccgactgttcgtgtggaagtcaaagaaaattttgtaaagtatacctgatcttggaccgctgcagtgagataaactaattcaggacgccacgttaacagcacgcgattaatatgtttaaagttgctaatagatgtgtaagtacaatcaaccctaattgagggttttagtgattaatgacaaaacaaactaagattctaacaagtttgctcctagtatatacacagtatttctacagacaggagaagcacagatcttacgagcataaaagtataaagcacaacggatttaaaattccacatcaaat

SEQ ID NO: 158422 - DNA, 382 bp, Zea Mays
gccatacgcgagggcgatttagtacaaagataagagaagtgtttttaccttgattaacgcggtgcagaccacagtccaccgagcgaggcggagaacgaacgccggcgagcgattcccagcaggttcggtcgacgattcacccaggagatgccgggaagctttacggcaagctacgacggagctccggcaacacttttccgacgccgacccacgtcgaagcgctgcccttcgctcccctcctatcggtggctatggcggctgggttcgatcggctgtgatgggactcaggcgcgttagcagcggggtgagggattagtatgggggcgaggaggtcgcgaggcccgtcaaatagactccatgaagtccgcggtcagctttgacg

SEQ ID NO: 158423 - DNA, 439 bp, Zea Mays
cctgatctccccctgcgccgggtataggggataccggtcataacagaaccactcaacttttcaaccacgcttttgaaaagattttaacgttcaaaatcggaaacattgttagtcctcatgcaaatgcaactactagatgctttatgaggcactaagttttacccatataagtgtcattgacccctcttgatagtatggctatctagcctactaatccggtcaatttcttctttaaacacctcgtcaccggcaaaaacaaaacctatgttatacctttgccttcacccgatccacaaccaatgttttaagtctccaagactttcgataaagccctttttatctatggtctaacctgcattcttatttctccaagaattgttagtccacatatatttatcattaattaccaaaacatcactaagaggcctagttgattcac

SEQ ID NO: 158424 - DNA, 883 bp, Zea Mays
ttcggtggtttggacggaagagtcttcggatgatgatttggattattttgcggcattggatgtggctgcggcggaggcttctccgcgtgtggtgggtgctgaagttcccggtccaagtgttgggcgaaggcgtcgaagggcggtggcgaagtgtagagtgagtgaggtggagggtggtcatcttcgtgtggacaggactggcaagcgggaattgttgtcctcgccagctggggcgagtgtaggtgagggggaattgcgaagtctttttgagggtgaggagttgaggataatgctgtttaactacagggagatgggtattatcccgaaggttgaaccaatgtaaggtgtgatgccctcgttgtatgtatgtaactataatttgtatgataggctgtgtgccttcgctgatccggccgtgcccgtaggggaattgtgcacttgttctagcgcgtttattatgtcgatccggctgcacctgtagtcggtctttgcacgggtagtctttttgagagagacttcgattttgcgcgcttgttgtgctagtccggctgcacccttaggcgaattttgcacggatagtctttggaggaagactttggtttcgcacacttgttgtgctagtccggctgcacccttgggcgacttttgcacggatagtctttggaggaagacctcggttttgcacacttgtgctagtccggctgcacccttgggcgacttttgcacggatattcttttgaggaagactgtttttgcgcacttgttttgctggtccggctgcacccttaggcgacttttacgcggattgtcgcacgcgagggtagccaacgctgcccctcgcagtgactttgtattgatcgaatgccgaagaccgtcgatgcgg

SEQ ID NO: 158425 - DNA, 532 bp, Zea Mays
gggagctggaggcggcccggaaggagaagaggccaagaagtaggagcatctggactagagggaggaggtcgtcatggagctccaggccaagttggatgccttcaacaaaatcctggaggagcagcgggcccaacagaccgctgctgtggagagcctgcaaaggctgcagcgggagctggatgacagggccagcagcattgccctgaccgaggaaaacctcaaggaaaaaagacgcctctctggataagcgggcgacggatctcgcctggcaggagaaggacctcgccttcagggaggagatgtttgaaaggcgggagaagctgctggctgatcatgagctcgaggtggagcagaaggagaaggagctagaggagcggatccggaagtttcaggcggcgcaggtggctccgggcccccaagcggtggaggcgctgaagaagacacttgaagatctccaggcggagcagcgcgccggggtccagcgcatcgctgtatggcccggcgaggcaagcacggcactggtgccgctggg

SEQ ID NO: 158426 - DNA, 281 bp, Zea Mays
gagtggtttaccaaaaggcattcatgatctagaaaagtgttctctaagatgattttgaaggaatttgggttgagctcattgcataacttacttaacttattgcggatccctcttaattgaacggtgattcctataactcaagaattataaaatgaatactgtcgttgattccaagcacttggagcacgccatatgatgtagattttaaatccgctgtgctttacatttttatactcataagatctgtgcttctcctgtctgtagaataactgtgtacatgc

SEQ ID NO: 158427 - DNA, 421 bp, Zea Mays
gaagacacgcatgaatctgttgtttacgttccctttctcattcgtgggcttgctcttcccatctccccctttttccgcggcctccttgatttctatgaattgaatctgacgcatttgaaccctaattcaattccgcaagttgccattttcatacatctgtgcgaggcttttcttgggattctcccccactttggactttggaaatatctttatcactatcggcctgggatgaccgggggacagcacctgctagttggcggcacaagtctagagcttcaccggggaaggaaagtggagtatctcgatattccttttaaggacagtatcaaagggtggcgccttgagtggttcatcgtggaaaaccactgcaactgtctcccccctcagtcagggaggcaaccagatgttcgcacacctagtt

SEQ ID NO: 158428 - DNA, 326 bp, Zea Mays
gtcaggcgctctgaataaggaatccgatggtacagtcgtgcgccacgcgtcttggaattctagcacgtcacaatgaattggtgttgcaagcctgcccatcgcgtcttggtgttgcaagctctgaacaatcgtgcgccacgcgtcttggaattctagcacgtcacaatgaattggtgttgcaagcctgcccatcgcctgagaattggctacggtgaaagccacgaattcattgcaccagtaacctttcctctccccagtcgccagcgcttctcctccaaattgagcgccaccaccattgagtgctataaattgaagcctcagggaac

SEQ ID NO: 158429 - DNA, 801 bp, Zea Mays
gtccctgtccggatgggtaaatggtgatgcaagaagacacaagagatttattcaggttcgggcaagagaagaccctacttccagcgatggagggaggtttgtattatcttgcacctaagtgttcatagtaggggttacaagcagtcgagagagggagtctgtcccaagtctcttgagtatgattgaggcagagtgccaatatcggaggtgaggagagttgtgtgttgtgaagtgtgtcgcccccacccccccgttgaaggccctgagttcctctttttatagtcgcaaggaggaggcccaagggtacaagggttgatgcgcggttgttgtggtcagaggagacgcgtccgagccctgtagcgacatgactggcgggatggcccttgtcctcgtgtccgagccctgtagcctgttcttttgacggggtagagagccgaggctgagctcgggagcatggtcatgtgcccgagcccagcctatacatgggcacggatgtcgagttggagtagttgtcacagtgcttggtatggtcctccacaagattcgcggaagaataggtggcatttaatgcacgtctgctggggcagttggccgaggccgagctcgggcgaggcggagatttctcccgaagccgaggcctcgactggacgctacgtgtggccacgcttggagaggttgaaatagtggccagagtggaggaacagtgtccggtattcgcaccatgcgcatcatcgtgggcggtaaaagtagattagactgtactcgtgtcttcctttgttgactttggcacctcagcgaggc

SEQ ID NO: 158430 - DNA, 465 bp, Zea Mays
gtggtttgtgacgttgaagctttgaatcggtaagcactttctgttcactttgttatattttagtgctggagttgtttacaacgcatacatcagctcgtactgcctctactctttttttcagtattaatattagtgtcagtgtgtgtgtactgacaaacagtggaggacaaaccataatgtttgtccattgtgttgaaatgattcagcacaatgatatgataccagaaaacatatccatgcaggatactggacattaaattatagcgtttgatgctttgagaatcttttgctaaaaaatggcccactaatgcccccacacctccgttttactttgtacttgtttatttaagatttagtctttaggtactaccataatgattactggttgaggagtctagcttttagatgattgcagacaatgtaaaatgacaaaataactgcgcgttacttgtgcagatgcagatt

SEQ ID NO: 158431 - DNA, 942 bp, Zea Mays
gttgccgagggagatctagagttggcatcggtgggctgagaacctccggccggtacaccggggatctgaatcccacggtgggggtcccgaccaccagtctggtgaactgctatgccgctctcatcaagggtcggtagcgaatccaagatcgctgtcctcaacccttggtcgtcgcaaagcaaagaaatgccctcgtgaaggatcaaggaatcagcaacgaaggactcaccagtgacccccttcaccaagagctctagctcctcccaggtcaggtcggtgcctggcccgcgtaggacccggccagggtcgtttgagccagaaaaccagcagctcaagcttgccctcgcttgcagaggcgcgatccggcgctgcaagaagtcgccaaccacatgcatcgacgtcagaccaccggtcgccagagactcaatcctacccaacacaggcctgaactccggcaccaacgacggcttggctctccattgcttcttctcgagcctcagcccgtcactcggaagtatgagacggtcgctagcctcggtattggcgatcacccattcggcccgccagctttcccacctcgcaccgatgagggagggtatatatgcatcggccgaatccgcccttgattggaagtaatacgcgccgagatggtccttggccttcccggacttcaccagcacaaaaaagtggcggaagagagaggtgcatggtgccacccccacgaacatctcgcataggtgggcaaagatggccacctgaaggatggagtagggtgtgaggtgctgtagctagagaccgagatcctccaacagcaacatgaagaagggggagatcggcaaccccaacctgcacgaaaggtaggagacaaaaagcacagactccccggtggcgagatcaccgaggggggaagcgtcggcctggattctccaggcgtgtgacggt

SEQ ID NO: 158432 - DNA, 835 bp, Zea Mays
ttcctctgttcctatatctaaaccctgctgtatcgaactcttttgttaccattgttgacatggaaattggaaaggcatcctgatttttttttgggtaaagaagatatagttggaggcacaacaaaatagaagctgaagttttattttaaattagtgtcatgtacggtcaaccatatatccgtaaggggaggcgcgcgcgggacattcgccacgtcgaggaacgcgctgaccgcgcagcaagggatcaggcagaacaggggcacgcagcaagggatcgcgcagatcagggggatcacgcagagcaggaaggggcgccagtgattgacagctagaaggaaattgctagaaaggaaagggcgaagaaggaaactagcagctaggaaagaaagggctaggaaggaaagagctaggaaggaaactaataatcagggagttgtttctccttttgatctggcggctggcttataaattgattgtaaccggaccctttgaagacaagcaataatcagttgtctctctcctttctacctctgtaagcctgcggttgggaggcatactccccaccagagaagacgaccggcggctacgagctgcgtagccacggtcctgcgagtcaagggtactcagtccttgacagcttggtatcccgagtcaggcgctcctcgcccgaccactcccggcccgccgtgccctccaccaccaccaccgctcacccgccagcagccgctccaccatcgcccactttgctacccgctgccaccaccatgtccgagcccaccctcgcgccgacatcgccggactgaaggagaagtccgacgcatcgtcgtccaacggc

SEQ ID NO: 158433 - DNA, 801 bp, Zea Mays
atgagacgatcgagaggtcaaacgacgtgaaaacggcgtttgaacgataaaaagtgccataggaggtttggaattcgaattgaggcacgaaatgacatggaattgagccgatacttcacgaataggtttatataggtgaatatgactgaagtgtgtgtttggtttgaatttaggcgaagaaaatgagatttgggcactcggctcggaaacgatcgctcgaaacggggaatttggtgaaattgaagcctggaatatcggattggcgtgaaatttggcgaatatgttactggagatattgtgaaggtgcctgaaaaatttgggttcaatcggggcatttttggctggtttgggcatttcaccgaacacgtggtgtgcgaggatttagggttttagggaaatggctatttgaggtgtgaaaaccctcccgaaggagctaggaacctgcaggaatgttcaaggcacacagagacacacataccacaacttggtttcacaggaattcacagagatttggaattgggcacaaagggtggaaatggggtgctttactggtggcatgagcagagagaagagagaggagaagacaaggatacacaccagggaagctcgagcacggggatcgccggaggatcgccggagcacggccggagaatagatcgccggagaggaggggtggtcgccggcgagggggagcaattcacagagaacagagagcagagagcacagagggagaaaagagcctctagctcagtctcgggctggaggccattttctttaaaacgcgatatgggcgcaccggac

SEQ ID NO: 158434 - DNA, 1021 bp, Zea Mays
gtcgggttcactagaaccatcaaacagaacaacagtgatgttgccaatgtttcagcatctaagcaaaacaacaataaggtctatgttaattttgagtgatgggaatcggctgccacaccttgccttgcacagatggatttggcacagccacaagagatcaggtctacggttagtattgccatcattgaagcatttggtggtattcaggaactgtgcaagaccatcgtcgcagtaagcatcgcaccaattcggtgagtgaagactcgcttgttcggatggaaaagcttaaggtaggatacaatttggatgaccagtattctaaaggtaacgacgattcctctgttggcttctcagatagttttgtttataattcctttaaaaccattggtcttctagcgagcagcaatcctagttcagttgctttgtctattagtcagttaaaacaattagagattaatagagtaaggaccagcaagaacgtacgcctaagaatgcattagctgtttttatggaaaaggatttagaagaggaggaaaagttcgatcgtttcattttaaataatttgtgtggagatattatgcatgatgtgatggatggtaatgatgagcttattaattcagcctgtacaataccatatagtcatagttccccattttcaaaaaagaaaccaagattgattattaattaattgtttcccaatgaaatgtatcttttggaatagtaatgagtttaaaggccttaaaacatagatttgttttggatctcaccaaagaatacaatcttagttttgttgccatttctaaacagtgcgtaaaaccattatagatcaagtactaaggaatttgtgtgctgggaaaaattacatctggcactgcaatgaacctcatggtcgatctggtggatgcttttaggaattgatcttgatgtttttcatataggtgccattgaggaaggtgatttctttataaagtttaagttacataataaagcagatggttttaaatgggctcttgtttctgta

SEQ ID NO: 158435 - DNA, 455 bp, Zea Mays
gtggaagtggatatgggtccttgggacaggccttattgaggttggtgtagtcgatgcacatccgaagcttcccgttagccttgggaacgatgactggattggccagccatactgggtgatggacctcttcgatgaagccagcgcgcaacagcttccggacctcctcacggatgaaatcctgccgctcaatggactgtctccgaggcttctgactcaccggtttggtgtcagggtggatcttcagatggtgctcgatcacctccctggggatcccaggcatctgcgacagttcccatgcgaatacgtcggcatttgcctagaggaaggcgacgagcgcgatttcctatttttcctgcagattgcctacgatgcgggtggtctgggaggaatccatgccaacctggatggtcttgacggggccgccgtctgctccagatggttgcaccttaggcacc

SEQ ID NO: 158436 - DNA, 543 bp, Zea Mays
aatagattcgtgggtgtcctctgtcggaacattgaccccacactagatccgccaaaaacacagttctttcgacggcaaaaccccagtctcaacaagatgaaaaagatctgatttagagattatggacatgtgattactagcaaacgaagctggctgttgggatcgatgggtggaatgatcggagcaatgacgctctgtctcttcctcttgggagctatcgcaatctcttaggcggaacaagcgggctcaagaattcagaaaagcgaagaagtggcagaggaaaaagtgagagttagggctcggaactcaaaaaggcacatcggcaggagtataaatgggctccttaggtcgggcattacttctaaagtgctagatcatagttcggaaaagtaaagaccgcaatcgtcactcgggcattacctctaaaatgccatcactatcaagcgcacggacaaactttcaagcgcgcagatgaaaagcaaatagctgtgattatatggagcaactgcatctttcattcgtaatatgagaagtaacacaaac

SEQ ID NO: 158437 - DNA, 808 bp, Zea Mays
caccaaattatcttttgtgagaattacacttttttggagttggaattttcaacctccagaccagattaatagccctaacaactctacaaattcgttcatcgtacattgatcgaacataaaattgtttattctggtacaacgaccactcaagcacaaactcatgctcgttcaaatggacatgcatcagtgaaaccaatatgtaccaagttaccaaagtgggctctaccagacctcttctaaaggagacattaagcggtatggagccacaaacagacgcaaccgacacccctttgtgtcaagcaatactatacagattggagtacctatcacctaaagaaaaattccccagccacttatcttcccagaacctaatgttaactccattgttaaggcaaaactttcctaggtttaaaaacatgtctcgaaccttcaatagaccggaccaaaaatgagaatctctcggttttctacctacgcttccaattggtttatccttcaagtattttcgtcttaacatgctttgccacattccattttttgtttataaatttaaaccaccacttaataagcactggttctgcacatccagatcctttaccccaagaccccctatctcctttggttgacaaattactccccatcttgctagcctgtacttcttatgcccatctgactgccaaaaaaatcttgatttgtagtactccaacttatgtaggacacccctcagaatctcaaagaaagacaacataaacatgaccaaactcgatagaatcaactcgataagtaccattctccccctcaactgata

SEQ ID NO: 158438 - DNA, 665 bp, Zea Mays
gctcaacttaaattagttaacacacaagtcacctaaaatagaacattttagggggtctaacatagaggcattaacacatggcataaaacttcataagactacatttactactgaaggactaaagcacttatgtgcatatgttatcggattgttcttcaattttaacaaggaccgacttatgaacgctactcgcttccaataattattgggctgcgataacgctcatataagacctctaatcgatcaacaagacatttatttatccaatgggaatggaatgcaatatttgacaaagcaagcatcacattgccatacaacaaaaattatgacaacaccgacagacactatccactaaccgtttgaaaaactcaacttacttctcgcttgccattacatcactccccaatcacatgaccatcatgagcatccttcacatgattatataatagcgacctaagcgtcatgttacacaatacatacatctttcctcgtcgcgagtataaccatattacggcatatacctgcacacctcaaacaatatcttacgccaccaccactataatacaccccggtccccacacacatacgtgtccccatattacgcacaagacatcaacaacatagtgactccaacaggactaatcatacccttatttgcatcgact

SEQ ID NO: 158439 - DNA, 725 bp, Zea Mays
tcgtgacctggctgatgtcaattaagtccaagtttccattctcaattaattgttacaaggagcctgtggatttgattagcgaggttcatcctacgggtcacaagatgcccaaagacatgtaccagtccaagaaattgcttgaaggtcttggtatggagtatgagaagattcatgtttgtcaggacaactgtatgcttttttggaaggaacatggtagagagcagaaatgcttaaaatgtgggaagtcgagatacgttgaacttgtaaatggagatggggagaaggtggtgacaaaggttgcacataaacagcttcggtacatgcctctcactcctagagtgaaacgtttgtttctctcaaggaagaccactatgcacatgaggtggcataaagattgtacggacagacaagatgggttaatggtgcaccagtcagatggtgatgcatggaaggctcttgacaacttggatctagagtttgccagcgatgcaagaaacgttcgtatcggcttggcaactgatggtttcacgcctttcaatatgaccgccacgtcgtattcatgttggcctataatttccataccgtacaaccttccacctactctttgcatgaaatatgagtttatgttcctatgtcttgttatacctgggcctgagcatcctggcgtacgcctcaatgtgatgcttcaaccactgattgaagagttaaagaagctatggcaagga

SEQ ID NO: 158440 - DNA, 360 bp, Zea Mays
tggccggatatctccacacccttgacaaccactttgatgaccttttctcccactgcacccacctaaactcctgggtggaaagcctagagcagcaaatcaaggaattgaaggaagaaaaggtagctcttcaagacagtctcgagatggcagaaggcgaggaagccaacactcgtgaggcataccgaaccctgaagatggactatgctaggaggctgaagaagctcgcccccgtcaagaagatcatgaagcatttcaaaagccaaggatgcaagactgacccaaaggaagaagccccgccaacactgccttccctagggatagagaacctttctgacgtcgaggaactgtccctagctagcc

SEQ ID NO: 158441 - DNA, 502 bp, Zea Mays
ctcagttgcaggaggaggtaggtgaaccgaggagaaaacgtgactacaggcgatcatattcgggtggtgcagtgatagtgtcaaccccatcggtgggaacacaacctccatcttctaaagaagccaagtcaacttcaaccactacatctgctgattccaagctatcatctctgtatgcttatcgaaaggcacaaggcctttgttataaatgtgggttgacatattccagaggtcatcgatgtgctgacacggttcagcttcgtatggtggaggagttgtggcagatggtgtccttacctgaagtttcaggatctggttccgacactgatgaacctccagagttgaatacaatggtgctatctcaagctgcagttgcaaagatgtctactcctcgcactatgcgctttgtgggccatgttgatgggatagatgttctggccttactggattctggcatctctcatacatttctcggctcaatggttgcaactcagatggccaa

SEQ ID NO: 158442 - DNA, 399 bp, Zea Mays
gcctttctctagcttcttgtcatttgaatgggtttctccctagtttttctctcttctgctgatttttgtgtttctatggtggtgttgacaatgtactcgtcaagggggagattgcaaaaacaaggttgacatgtgcccttgtgtttgggttgtgttgagttgttgttaattgtcggggaaatgatcctcagggccctagggcccattagttagtagaagggcgtgggagaggtctaacccagatggacccgccctggataagcatgaagcaccgaacaaagggttaggtgagagtgtgaggcggagccgcaaggggtcaggcggatcaaggggaagcccctcgagtggagtccacacctgactaggactgaccgattgtgccacattaaccacgcctag

SEQ ID NO: 158443 - DNA, 472 bp, Zea Mays
agccgatctcttccttttgtctcagtacattcattgcgtatactgtgtggatatgacttcttcagaaaatctttttgaaaattcttggcaacacacccaatgggtgtgcccaaggggtgtcttggtacgcagagcgtttagcctactgtcctggagtagtaacttgatgtgaccgtggggtgtaatcatattgcctgagcagttgaccttggtccaaatgatgtcgtgttacgagaagcggcgcctattgcctgactcattttcaggtggcttgaattgcttattaaatacttgcgactgttcggcgagcgtggtaggaagtgtacagtcaccccggcctctataaatagcctgcttgcaccgttgttctcttcactcatccttcgatcatctgttgttttcttcttcctttctcttcttctccaaccaaccatgggtagaggtaggaggggtcgtggttggcctcgccgtg

SEQ ID NO: 158444 - DNA, 572 bp, Zea Mays
cgaaccatcttcatgtggctaggtcaggctcgagtgcctctcgtcctttggcaccaactctcctgactgagtcccctacgacccaccatcatcgccttcctacaacatgcctccatacggcatgccctcgatgacccaggctccgccccagctctcgccttcgaggagccccaccatgactccctgttccccgctcgctggaggctaggacccagcctccctcacaaccacatatagcaccatggtgttggctcaactctcccttgactaggtcatcaactctagtgcctcctacaacaccacccccacaacaggcatgctatctcgctatcacccacctcattcctcccacctcacctcaatcatcgttggaaatggttccactctatcggtcacctcagtagctgcctcggttctccctggaccattctatctcaatgacgttctcatagcccctcatatcacccacaatctcctttctgtccgtcggttcaccatcgacaattcttgttccattgagtttgacccttctggttttttgtgaaggatctaaccaccaggagccctctcgc

SEQ ID NO: 158445 - DNA, 1007 bp, Zea Mays
cttagactataaaaggaggagatcgatcacgagactcgggaccaaggggattcgactctcagaaccggagacacttgacgaaaggcaacgacacacaagacctgaagacctggaggctggagccaaggcttagcgtatgactctagtcatgtagtcttttaggtccacccacatataagagacttgggagctctctttccttctctcgcccgcttgtaacctgcttataacccctactacgagcatcgaataacaaaggtgtcggtagcacgagccatcgaagatcagatgtagggacgttctgctcgaaccagtataaaccttgcgcccgccaagcacacatccgtagcctaggacgcgcacatagaaatttattgtcagagcagaggttcgaaacaccgacggttggcatgccaggtaggggccttgcaagttctcgacgaactctcttggcttcggatggccatcaacgaaattggcatagtttgggcccccggaatgtctcaacttcgtcattgatgataggggaacaatgattagggccctggaagccccattcccccgatgagcgacccactcgacattaccgaatgcttcggtggcctctagcttggttcccatcagggaggtggcgtgaggcgttgcgcactgtgacccacttgcgctgagaccatggggatgctagacctcgaccgggactcattccatgacctcctctagtcggggtcggagggtggacttagttccccatccagtgggtccagtcacaatccggtccaggagtgcctcgtagccaactcgttggagggctgctcttcgctcatgtagagacccgaggggaccaccaccattgtcacgatacatgttgcgacatccgccccgcatcgacttgacctgccttgccaaatacttccaccaggaccatggacgactcgagatgtggacaggggagggaggggaatatattgcatagctcgatcacctgaatcctctataaccgcccaaag

SEQ ID NO: 158446 - DNA, 722 bp, Zea Mays
gaagccgacgctagccgcgcccgccgagcaacgaccccgcgcgccaggacgcgtccgccccttgatgctgagtcgttaacgactgtcgtttccccttctccctccccactaactctcccattaccggcgccattaatggccgattgaaggacccagccacctctctccctctctcggcgacctctcccctctcctccctctctctataaaacggcagtcgagcccttctccctctccattcccaagctcgctctccattccatcccgcctccctgcctcgctctcacacgctccacttcgctgctcgcttgtttgctcgcttgtttgcgtgtgtgtttctgccatcgcgccgctcgccgtgactagaggtccctgctccttccccgtcaccggcgaaggcgaacacaagtcactggcgtccccttcgacgaatcactgtccagaacactgtccgccgcagtgaagccagcctagtctctagcccgttgtctcctttgccatgaaaaccaagaaccggaggtagaagatgatcgattcttgttttgttccctgacttttgtaaatttggtgctcatcgaccgctgtcgacgcagccacgcaacaccccgatcggaccatccaccgccccgccgtgctcggaccgcccgtggaactcatcggagttcatactcgccacccatgcaacaccccggctggacctcgcgatcgttccctgaccgtcg

SEQ ID NO: 158447 - DNA, 642 bp, Zea Mays
caggaactcataggcaacaacgcttaccgcgggtgcaagattccatgaagaatacgaaaggggagcactagcattcgaaaccttgcctctcagcatcgaatcaacttgactcaacacgtcatcctcagatattcgcttgttggtaattcaagtggggtcattaacaccagtgtacaggtaagcaaggtagactctatctttcaaaggctgaatattcttgaaaacaaagtcgacaacaacagcttcagcggtcaagcccctgtccctcaacgcacatatctctgcatgtagcaccctggactcggcaagctctaaatctgtggggatctctatccagctaggcattcgaacgtcaggctgtctccctgatcgagtgggaagtgaattgttatgattttccatagtaaaccactcgaagcgccatcccttaatgctgtctttcaaaggaatgacgagatactcatctttcctgcctcggcgaagttctaagctggcacctccaacaagctgatgcagccctccagccatcccgggccgataatggtaaaggtatttccaaagcccaaagtgtggaagaattcaaaggaaagcttcacaaagatgaacagacacagcaatttgaagcacataattgggattcag

SEQ ID NO: 158448 - DNA, 452 bp, Zea Mays
tgtaattaaagatgtggctgcagaggaggacatggccacaacgccagatgaagaaagggaaattgataccggtccttcgggcaaagaagatttcgatcttcgacacctgggcgttcaggagctttcggaagaagaaaaattgaagttaaaataatttgttgtgtcgtgtggataccaaccggggtctttgcttttcagtggggttgatgaggagatcttaggatgtatccgcgaccgcgctggggcaaagatagtcgacactttatcgaagagtgtcggctttccgaagctagagaatgatatcagctgctaccgtcagcaacatattgtcggtagcttattttattccaactttaaggtgagacctttaactaagttattattattatctttgtggtgaattaaatgttctgactataacttgttgttgcagagtatgctgctaagcaaag

SEQ ID NO: 158449 - DNA, 429 bp, Zea Mays
ctaaacctcaccacgagtcgactcagcgggacctaccaagcaccactacgtctgtatcagaatagctacaggaacccgtatgacgaacaaacaagacacaacgccataccaggggtacgacggcgcacgacctatcaaacgacacagtaggagctacgccgcccgggagcaggaggccgaactccaccccggcaggatacaagttctcattgtaaagtttacattgagctataaaagggcaagacgacccccatcttcaaacatccacaactacacacaagcactcaactgtaacacgctccaagcaatactatgattagcactacactggactagggctccggcctgactagtacaacccctgtcccagatccaccttcgagccctctgtggttcaccattcggagtgagtccgcactagcacccctg

SEQ ID NO: 158450 - DNA, 375 bp, Zea Mays
gattcggtcaacaggggtgtcgcgggttagggacgacgttgtgaccgtccgatttatgtcgtacggtggagattagatagggagataacttttcggtggattggatctggaccatccatccagatcggacgggtgaaaagcaatcgcatgactttaaaatcgggggcgtcgatttgtgatcggacgatctagagcgcttgctggtttgtaatggttaagatttaatctgggccatccgcgcctgatcgggcggccaggatcaaaccgtaccccttcgcgggtcacttttgttaaagagccctcggactttagtgaaatcaacccgccgtcctatatcactgtgcgctgtgtcttgggaatgttgcaccgtagccc

SEQ ID NO: 158451 - DNA, 800 bp, Zea Mays
gcgaaatcgcgcacaccagcgccaccaactccgcagtccgcggttgactcgcccgattcccatgaatctcggccgggatcttcggcatgaacctcccccagctccaggaataaaagtcgtgcgccgttatttccccttcttcccatccgcacagtaaggagagccgccataaccatccatcgtcgtcgttcccgcttagcaatcgaggtgcttcgagttgtactccgctgcgggtactgaacctccccgggaccttctcgggtgtgggcgcgccgtcctcgggcgcggtggtgaccagggatcccggaaattcatcaccgtcgagtccgcgccaccggtcggagctggaaggccatctctagcgctccgcttgccgaacttcttctcgtatgtatgtgactgcgcctcctccttcatatgcgcttagtttcgttcggggtcatgcatcgtacctctggcaattgctcaccggagcagtacttccgccgcgggccgcgccctatcgtcgcttgggatctcggcatcggaatcgatggtgagatattcctaatgtggttcgcactgaccccacctacgtatagcacctatcccatttagatttggcgcactcggtcgaaagttggccctactccggcgatgggccgccgcgatttggtgggcggcgccaccagtaccggccaagtgacgccaagttaggctgggtccgtcgatcgcgtgatctacggtccaatttagtcgctgcgtaccgattcgggttggcgtggcgatggccgtccgatttcgatcgtgcaggcgagagt

SEQ ID NO: 158452 - DNA, 602 bp, Zea Mays
gggaagttttcgccttggtggtgctggacatgcgtggagggcagattcattgagttcggattgatttctttctttgctggtaagaacctattatctttgcttgcacaacttgttctgtaattgtaattggatggattgctccaagaatctgttttcttggtcttggctttcgttgttcttgataaggccaaatctagacctctctttctgagatggactctccaaccggtccattctttctttgttgtggtggattcatgtgcagctaccaaattagtttatgttccaaaaatgtttcacccaacccttctccctagggctataaattgcatcaatttgtatatctatttgatcttagcctttaatacatggttctgatgggatttctcatgcagttccatctggaggaggcgttggagaggaggctgtgtaggtgactgaaattttaccaaaaacattattggtgttggtgcttatgtttcaccagccatggctgctggagctcactgtgttgtacaaccatctgcaaagggaatggagtacacatggtatgttagtaccagtgtcccacaatttcatgtgacaccgtcttattatgaatc

SEQ ID NO: 158453 - DNA, 1141 bp, Zea Mays
ggccatttcaatgcgcttggggcgatgtgtcaaaaccttaactttctttgacctcggcgtgctagaagttgccgaagtagcagcctttcttttcttcccttgctttcgtgaaggataacagtaatctgggtatacaaacccgatgacatcaaatactctattcagcctctttttgcctcgagccccgaaggccgttgccatagcatcatcttcagccttcgagtaggcaccaagcaattcatcactagttgcttcaatggcatctagccagtcatcatttggctcatcaaactggctcatgtacctgaaggtatacttcaggtaaactaaactgccttggctggacccagcagcagcctccttcggcatctcccacccatttgcaagtggccacactctataagcaatgtgctcctggattaagtcccttgtacctatgtaagtacatactgtattgaacgccatctgacatgcttgtatatcattcccaagggcagtggagggcctcctaattccgaagcgagaccatataggacactgaataatccccttaataccctccctttcagcaggtcattcttcacgtagaaccactcctgcatccaggtccccggccatctcttccgaaatgtcggaactaggtagctcacctcagagcgaggcacgaagctgtaacaactgaagtatgatattgctcctttccggtagccttcgtctcataagacagctcatgaatgttacagaaacattttgcacttggttctagtccctgactcctcatggcccatataaacatccccaccttaatgacaacttcgggagtaagttgatgaaggtaaattttgaaggtcttcaggacttcgactaacaatttatccaaagggaaccgaagccctgccttcatgaagcttctataaactactacttcgtcagcttcgggtagaggaacattattttcccctccagccctcataattgagatatcacggaagtaccttcccctcattgcatcaatttgcccttgcttgatagttgatttcccgaagacaacatgacttggtctccagggccgatcttcggcatcatcattcccgctttctacatcaaaactttcactatcactagaacccttagatatccc

SEQ ID NO: 158454 - DNA, 1419 bp, Zea Mays
ggagaactgctcctctgagaagtcagagataccgaagtcctccgacggaggtgttggatgacgctttcgcttcccgccttggtccttcctgtcgtacttgcccttgccacctttgcccccaaccattgtggttttattttagtgaaggagtcaaagcgagaagagaaactagagtgagtgaagaagatgatcacatgcaggccgtttatttaaagaagccaaggggcgacccgtcgtctcccgtacgtacaacaaatagtcacaaagacttcaagagtcgtgtaaatttccaagaaggtgagcaagtcactgaaaacaattggcgtaacataacaccgaggaagagtaataccaaccgctcatgcacattactacaccctgtcgcgtgaggttactattttgagacaagtcaacatacacacccattgggtgtacagaccagattttttgggatttgtggaagcggtctgatccatgagatatccgcataagttacaaaacgacaaactcaacattggtaaaactagagtcagccgaacttctatcggttggaacctagtcagcggtcgcattaaaaaccttggtcaaattccacccagccggacttctatcagctcgaacctagtcggtcaggtctcagtcaaccagatcatagttagcacaggcttagttgggcaaaccccagtcgggcatgattgtcataataaaccagaattttctaaaagcatattatgaagacctttgagatgattgatactcaaatcaattcaaagctcggggctacaccacgacgcacccaatggatacaaggacaaagcagacgctggactcaaaagcggattatgaatacctttgagttgattgatactcaaatcaattcaaagctagggggctatgcccattacgtgcacctatggtacaccctatggatacaaggacaaagaaaacgctgaacacaaaagcggattatgaagacctttgagttgtttgatactcaaatcaattcaaagcttgagggctacacccatacggtgcacccaaatggatacagagatggaacaaaattgtcttcaaaaagataagggaaaaaacaagaggcctcattcctccttagattcttgagccaactactctcgaaagttggcttgagcctcgggggcttgtgggggacagatatcctttgggttctcacgaacattgaaacgtatcatgggtcgcttgatgggcctcccagtggtctgccctatgggatgggccaacaaattataatcgggtcgggcaaacttgatccaagacgacaaagatcgacacccgagttatacggtaccgaagcgttaatacctcggggtgatgcagttgcccacgcctaaggagctaggcattcgacgatgactcgactgagaaggtgatcgaactctg

SEQ ID NO: 158455 - DNA, 670 bp, Zea Mays
gttgcctccaaaaagaacgtgttaatcatgtagtgaacggggacctccttttacagaatccaatgtcttttccatcaacacaggagagctgcactcatttcattaaaaacaaatagtaacaactaacaaaatgtacaaaaacagtaacacgcacatgctacacacttgaaaccagtctaccatctagagcattggatatttggatacaaagataaaggagacaaccataaggcatgtacacaccccagagaaggccccagaggccatgagccccagctgtgtatcatagggctccatcctttctactctctgctgtcaattggaatgaagaaaatccaaggcatactgtgccttcttttctatactgtgctttaagttcaatgcattgtggttccagatgacaaggaaacaaaattattcaaaacttacacttagcattctagaattcagttcatgcatatatcagtgaaagactgaaatacagttttcggccatgctcctgctccttcttgaatcatgcaggagagctgtgtcattgtattaaggtagagaaaaaagagcaaaacaggccaagaacagaggctggatccaagtataaaaacccactcgctgcctcaaaactccaaccagatagccttcacccttctgctagttaagtttcagatgttag

SEQ ID NO: 158456 - DNA, 623 bp, Zea Mays
ggggatgccatgcttttccacaaaactagtggcgatgaaagaatgagatgctccagaataaaaaagcacaacaacaggggtaaattcgactaggaactcaccgagtactactccaggggcttgttgagcttcctaggcatcaccgtggttcactcgagccctgccgtggaactgagtcttgcttaactgactgttggtggagggtgccttggaggcgggtgttgtaacattcttggggccattcaccgagttggagtaggcaggtacggatgtcttcaagtgcggacaattattcttgaagtgactggggtctccacagtgccaacaagcattggctggaggttggctgcttgcaacatactaggtgtggaagaaactttgaccaggctggttgaaacgtgacggagcggatgctgctggcttgctgaggttcgaccccttagaaggaaacccaaaagatcgaacccataggtgtctgtcctgctgttgagcttagaaaacttgaaactttcttttgaggtgaccttttttctcttctcgggctctttccacctagatggccttgtttgagaggtgcgataagctgaggaagtcttggctggcaaggatagtctagagttctg

SEQ ID NO: 158457 - DNA, 511 bp, Zea Mays
aagccagcacaaagggtccatagaatgccaacacatatagagaggggccaaggggggaggatgcaatgaggatgtcacactcaaggctagtgatagtgggtggaggaggcattagcgtctgattcgtgtgaaggttggcatgcttatgtgctaaaaccaggagcatatggggcctgttgaagctaaggatgcaataattatacctcgatgctaacacatggaggaggtcgatgcatggaagaacctgaccatgcaaacaacatggaggtgatgggcatcgatagtgccaggtcctagggtcatggaaagagggtgggcactagcggtgctgaggcttaacggtgtgccaacgtggaagagcaaagacctgagagggaggagtagagctcattgcttaagtggctagcacacatgtggtgaggaacgaagttatggctagaggatagaaaggatgtggatcggtggattgtgttaggccacggtggacaccaagctatcatcaggcctacct

SEQ ID NO: 158458 - DNA, 518 bp, Zea Mays
caaccactctaaactcaacttcggctacctagcatggagagccaagttgcacatggcacaagggcctggtcatcctgaagcttagtttcataggcttcatgaccatagtcatcagcttctcccttctcttctcgcctgctttcacataaaaccattcatttgtccacctggttggtcatttggtgcgatagccaatcactggagcctttgtatcttttctatatgcaaagttgtagcaattgaagttcttatgaagaccatatgccctggccttcgtctgataatgtagttcatgtacccggcacaaagcttcggcattagcattcataccctggctacggagagcccatataaaaacactgagcctaacattagcattgggtgtcaattgatgaaggtatatctcaaagttcttcaaaacttcccctatcatgtcatttaaggggaacagaagtcctactctgaagaagcttttgaaaacgacaacttcgtcctcttttggttctagaataatctcc

SEQ ID NO: 158459 - DNA, 528 bp, Zea Mays
aaggcacgtctgggtgcagtcgagcatacagtacatgtacttcttcatgtaaagtattatagtacacttgcaggctgttgagggccacactaagctctgccacatgagctcgagattttgcttcgcggtcccaagcgatcgaacgcgagttgatggcccaatcaatggccgaatcccattcagaaacctcatgttgcaagcgactgacatcagctgacaattcagctatacgttggctgtcttgctcccgtgcactattccggtgacgtagctctgaccgaagttgttccaccttggcttctaggtatccaattgggtcattgctgccactactacttccttcatgtctgggggctagctgatggcgaggcacgccaaaaggtccagtagatttacatgttgttttccttgtacatgccatatctccataagaggggaagatttattagtataattttaacatgatgcatgcatattctaataattatggaatcaaccttcgttgatcccaacttcctatatattgca

SEQ ID NO: 158460 - DNA, 992 bp, Zea Mays
gaaactctgtaaggttcagtggagcagagatggagaagaggaagccacctgggaaagtgaggactctctgaggaaggaatacccttaccttttctcaagccccgtctgaatctcgagggcgagattcctttaagtggggtaggtttgtaacatcccaaaatcctaacctagggttgaaaccctaatctaccctatccctccttttcatcctttaattccaagaactcccttaggttttctttcatcatttgcatacaccattgtttgatcacaagcacatcacttagattatattttccagcacctagattacccacaaaataatttgttcaaaagaaaaaatgcaaaaaggaaaataggatttagaaaataaaaagaaaaagagaaaaaccctcctcccccctgctgggccgtttcccggcccaaacccgggaccgcatctccccgcgcgcccgcgctccttcttccctcggcccattttcagtctgctcccgcgcgcgcgccagcctgccctgcgctctccctccctctcactgcgaaacgtccccacccgtcagctgctctctctctcgcgcattcactcccactggcagcgtggccccgcttgtcagctgcttcgtcgtcctcccgccgtcccttcatcgcggtcacctccagccattgcctccgtcccctcctccgtcttctcgctacacagggaagtttggcaccgctccgtcctcccccccttgaccagcgtcctcgccggtaccgccccgccgtggtgtcccctcggcggcgctgtgcgacatttatggccggcactgtgtagctcaccggagccgcgaagctccaccgccccgcttccctcgcgcgcctataaaagggccgccccgagctcctccttccccgcaccagccacgaccatccctctcctccctcgtccgagcgcaattcgcagagcgccaccgtcttctccctctccggtgagttccccccctcttctctcttcc

SEQ ID NO: 158461 - DNA, 614 bp, Zea Mays
cttgcgtcgtgatgtggccgcgcggctatcgtggtgatgatcgccgttaacccaagcacatcacgctactgaccttgttactacgctgtagtaggtcacggtagatagcccctctgtcgccggggacttaactcagtgaatgccacattgagcagtctacggtgactcctcccctttcttaccgctagctcttctccgcccaaattcgtcgtactcgcgaccgctctctataaattgatgccccagtgagcttcgctaggttattacgcgcccagtgcaccagttgtcgcctcttatcatccaccgtagcgtcccaatttcgcttttcccccaattccgttttccgcgccgccgtgagcttctcaccgtggccagatgcctataggttagttcaagcttctctgcttgatgttctagcatccattaagcctcctattgctcgtagacccgtttgattaagctagaccgcactgaatcaccaagaacacctcggtttgtctccggtattcaccgccgtcgtgggcagacgaactctaggccagatttgtgcaattgatggagggattagggtcgcctggggtaggatttggtgttagccgagttagggcgctggt

SEQ ID NO: 158462 - DNA, 550 bp, Zea Mays
acatatagtgtccaatgtcccatatgtagtatagggaccatgatctgtttatgatcacaagttagagatattaaatgataccattagtgtgtaggtgagacatgaatatacttgcatagcagaaaaaataagcttcaaacaagataacgatttataccgatttgtagtcaacacagttgtccagctgaggtagtgtcttctccaggtaatcatcaaggacaacttgatcataactctgaagagacttgttgtggcgttcatgctcttcaaagttgagcagagcctaaataagcataattattgtgtcatataaatctataggtaaagtattgtaaaattaggtgcatattaatgaaaggttacatacaccaacattgacgtccagtacaagtctgttgttgttcatggacgggcgatgatttacatcatcattgcgaaaacactgaatgaaacaatgcatgaaaacattatcgagacacatcccatctccaaatgattgttgaatatcgagacagtttccaatacattcgccgaattctatgacctccct

SEQ ID NO: 158463 - DNA, 518 bp, Zea Mays
cgaggcatatttgatttgaatgcttttttgttcacagaaatcgaagaactctaagcttgtgaaattggatcccaggtcggttatgatgctattcggtattccgaacctgaatattatgtcctgtatgaattccactgccttagccaaagttagagaagcgatgggcttgtactctatccacttagtgaatttgtcaatagcaaccagtacatgagtgtatcccccttgagctttctttaagggtccaatcatatccagtccctagcatgcaaatggccatgtcacatgtatggtttgcagttgttgtgctggtagatgctgctgttttgataagtattgacaagcttcacatctctggactaactcggcggcgtcactctttgctgttggccagtagaaaccagacctgaagaccttcccaaccagagtcctggacgctgcgtgtatcccacattgcccagcatggatctcatctagcagttgtttcccagtggccgaaagaatgcacttcatgagaa

SEQ ID NO: 158464 - DNA, 664 bp, Zea Mays
gtttgtatgagacacagctacaatattttagctgctgtagtaccgaaaaaagaacagccgaacaacactcgcgccagatattttctcgtaaatgtattcttgtgttaaaaaaaagaaaaatatcttctcagatttttcagccgtcctcatctcctcgttctctatttctttcccatggagcattagccatcttcatctcttgagcgtacatttcctggaatgctctcgtattcctgatccatgccaccttctgctttctagcatgtgcatgacccctggaaatccacacgtcggctccctggaaggtctccaagactccaaccgctcttgctctgggatatttttcacacgtctcctccatttctctacactggtcgcatcttctccatgtcgagacatcctttgccagcctctacttcccagtgcgtccctctgtactcgaccgtattcctcctcgccatgggtgttgtgcctgtgtgccctctccctctatcacgctcagcctcccgacgcttcttcctctgcaccgtggctgcagcaccctgctccctgttcgcctcagctgccacattgtcggtctggccatggagttgtcgtcgactccctggaaccagcgacccagtccagctcgttcgtgcactctactcaccagagttgcttaagc

SEQ ID NO: 158465 - DNA, 525 bp, Zea Mays
cactgctccacccactggtgacgccgacgctgtcgctgctcttcatacgcaggctctcggtatcctcaatatccgcgccctcgtcccggtcgtcctcgacctcgccacgccttccttctccaagtggcgccgcctcatgctcctcgccctcggcaagtatgcgcttgctgaccacgtcctatgcgacgcctcgtttcctgctgtcccgcactgggtgcgaatggacctccacgtcttgtcgtggctctatggctccgtcaccggcgacctctacgagatcgtcacaacacggactccctctgcccgcggcgcctggatcgctctggagcaacagttcaccggcaaccgtgaaactcgtgtccttctcgtggatactgagtttcgcactcttcagcaaggcgccctctccgtctccgactactgccgtcggatgaagaccttggcggattcgctcaccgagctcggcgagaccgtcaccgaccgcgccctcgccatgaatgttctccgcggcctctccgaccggtt

SEQ ID NO: 158466 - DNA, 1019 bp, Zea Mays
gccggatacctccacactctcgataaccaatatgatgaccttgcctcccactgcactcacctaaactcccgggtggaaagcctggagcaacaagtcaaggaacttacaagggaaaaggcgtccctccaagagagtcttgagatagcggaaggcgaggaaaccaacacccgtgaagcctaccgaaccctgaagatggattacgacaagaagctaaagaagctcgcccccgcgaagaaaatccgaaagaaaaccagaagccaaggatgccagactgagcagaaggaagaagcccctccagccctacctcctaccaggatagagaactcgtgtgacaccgaggaaatgtccctagctagccttgatgacctcctcaaggaatttggggacactttagagaaggagttcgggagtaccttagatagcactcgcgtgtaatgaacttgtggtagttgtatgctgtaatgaacttgtgtaatgattaaaataacttggttgaaaaaaatagcatgtgcatggtagtaactcttttcccctggcagatggctttggataaaaccacgcctaccgcctccgggattggagcagggtttcccctaggagcggaaggagaagctggcggagaagggagtgagacccacctccccgcacctccggagctgccactagatttggcccaagttctagccaatcaaacccgactcattgaagtcctcactaggagtctggagaatcagcgcccaaatggtggaagaccataggacaggatgggagaatttctgaggctcaagcctcccacgttcgctggattcagcaatcccctcgatgccgacgactggctgcgcacaatcaagaggaaattagaagccatcggatgccccaaaaatcagcgtgttcaattggctgctcatcaactttctgggatggccctagcatggtgggatacctttagcactaccgtcagggatgctacttgggcagaatttgaaactgctttccgtgagcaccatgtaccccagggg

SEQ ID NO: 158467 - DNA, 695 bp, Zea Mays
ggcaagggctgtttccacaataacatcaaagactgcccaaaaattcttttggcaaaacattgtttgccgcttcggagtaccctccgagctaacagttgacaacggcaagcagtttgacagccaagacttcaagaatttttgcttctccattggcaccaagcttgccttcgcctcagtctatcacccgtagtccaacagagttgtggaacgcgccaatggaaaaatcttcacagctgtcaaaaagatgctcctcgacgaaaaaatggcaggtgggccgatttgttacccgaggcggtctgggcgctaaatactactgagtgcagggcgaccgggttcactcctttccgccttctatatggatcggaggccatgaccccacaagaaataaagcatgggtccccgcgaacagttccgtcagccgtccccgacgtggacgagcccacttcgaaggatctcatcgatggagaccgagtcttcgccttacaggctctaaataaataccaagcccaaacaaaagcatggtgcgaccacgcagtcatcccgagggaattcagcgaaggggacctcgtactcgtccgaacagctcggacagagtccaggggcaagctagagcccaagtgggagggccccttcattgtcaagacgaaagcttcccccagcgcttacaggctcgcaacgccaaacggcgaagacct

SEQ ID NO: 158468 - DNA, 532 bp, Zea Mays
gggcgcactgtttcgacaatggactggacaggtgagccgtctgcagggtgaccctggcgtcgcctgccagcggagtggacaagacgcaataaatgctgagggggcacatcgcctgtcagcagggtggacaagaggcacgtcctttctgtaataaatgcagagtccgcgcggtctaggggccttacgtcaggctccgcccgctggcttatgtcacgggcaacgagccacgtggctgcatcgggtctgcgcctgagcggggagcgcatgcgcagagtaaagcccggctatgtgtcagcaccggacccttgctcatgctagggtttccctgtcctgggaccttgttgcggctcggaccttactcggagggatctggaccccatccaagggaccccgcacgcttactcgggagtcccgggccacaatcgggggtccgggttgtgcgtacaggggtccggcgctccctcgcggaggtccggctcgactgataaatcctggatgtatcatcgttccttgccatatggtgccctttgat

SEQ ID NO: 158469 - DNA, 381 bp, Zea Mays
cgaggctacttccaaagcccaggctgacgcccagagatgcgaaattgaggatcttcggaaacagctgggtgaggcgaaattaaaatgtgctattgccgaagctgaccgagacggcagtgactactggaaaaattactgggaaaaaacagttgtagagcttcgttcttcaaaagagagatgctatgaaaaatctgtagcatgtgtacaaaagataaaaatcagcttcgccaatattggcgcatactcgaatgaagacaacttcgtactaggcgatcccgaaggtccaatcgaatggatcaacggcgaagccgaagcctttgaggaagtcttgaatggctgtggagatgactgcgccttctcaggtgccaggggaattgcggt

SEQ ID NO: 158470 - DNA, 754 bp, Zea Mays
taactgttcaggtggacgtggagctcgtggacgcgaacacacgcccggacgtcgatagggcagtctcgttcagggagaagccgagaacgtacatggcgcctccgccgacaatgcgaggtagccgcaagagcttggagtcagcgacgtgccatgatgtccttgacctgaagcagctgcttgatctggctgagaaggaaggccgggtggccgtgtatggcaacataaggagctccgacaccagcagcgtgagcagcactagcagcagcagcagcacgattagcgtcagcagtgctagcaccagcggcggcgcgagcccggaaccggcctcgacgtcgaagcgccggttcctgccatggacgaggaggagcagggacttcgacaagaggaccgccgagtcgctctcccaagaactgcccacaaagtgcacggtgagcctcctcctggcacgtgatggaaatgaaatgctacgttcctcgtcatgtgcaccggcgctgatcttgtcacggcgggcgacgaaccctgcgcaggacgacggtccgggtccggccggcggctgggagacgcgcgagttcacgagcagggacgccgagacgaggctgaggacgccggtgttcttcgcgtccatcgaccagcgcgacggcagcgctgggggggagggcgcgtgcgcggcgctcgccgccgtcctcgcggcggcgctccacgccggccacccggcgatgcccacccgcccggagctggacgcgctcatccggga

SEQ ID NO: 158471 - DNA, 537 bp, Zea Mays
ataggggtcgacgaatcgtggtgctagatttcctttcacttggaaccttttgacaccacgcatcggggagaccttgaggtagacgaagtctccttcctcaaatctgagttctctccgcctgttgtccgcaaaacttttctgccgactctgagcttcaagtaatcttttgcggatcagggcaactttctcttcagcctctttaacaaaggcaggtccttccagtgtcttttcccctacgttggaccaaatgagaggggtctggcactttcgtccatacaatgcttcgaacggtgacatcttgatactggcctgatggctgttgttatatgagaactctacataaggcaaactggactcccagtttctgtcgaacgttaacacacaggctcttaataaatcttcgaggaccttgttgaccctttctgtctgaccatctgactgggggtgataggcggtgctgaagtctagcttggtgcccatagcttgctgaaggctcatccaaaatttggaggtgaactgggttcccctatctgacac

SEQ ID NO: 158472 - DNA, 622 bp, Zea Mays
cgaataacgtaatcaacatcttcggccggagcttcgggggcaggagatttagctttttctatcatatcttgccccgctgctatgccggtatctggagtttgttgttcagctttatccttaggtgcggcagccttcgtctcaatgggcactgaaggcccagcttcggcttcgggctggactttgacagcttcggcaactttcttagtaggagcaggggtcaaggcttttgtggtctccatgacagcatctagcacgctggccatcctccttctcttgggagttacggcaggagcctttggcactttcggcaattctgcctctgctggtgggctcagaatttccggcattttcactgttctttccaattttggctcttcaaccgcatcatctttgccttcggttggcccggctgtaggcaccttcgacactacaacagacccttcagtgctccgagcagcgggagcggcttgttctgcttcggcagtggaggaggtcccctcaccaaattcaggcactatggttgtttcaatatatcgaggacggtgcgtcaaaaccttcattttcttgcccttcggcacagcggtggtggctgaagcggcagttttcctcttttttcctttcc

SEQ ID NO: 158473 - DNA, 1118 bp, Zea Mays
catgagatgttagctaggatatctgagggttctagtgatagtgaaagttttgatgtagaaagcgagaatgaagatgcaaaatatcggccctggagaccaagccatgttgtcttcaggaaatcaactatcaagcaaggacaaattgaggcaatgaggggaaggtacttccatgatatctctattgtgagggctggaggggaaaataatgtccctctgcctaaagccgacgacgtggtagtttataggagcttcatgaaggcagggcttcggttccctctagataaattgatggtcgaagtactgaaaacttttgagatataccttcatcaacttgaccccgaagctcttattaaagtgggagttttcatacgggccatgaggagccaagggttagaaccggacgcatggtgcttctataatattcatgtgttatcttatcagacgaaggcgactgggaaagagcaatatcacaacaacttcgggtgctacaacttcgtgccccgctctgaggttagttacactgtgcctacattttggaagaagtggccaggatcttggatgcaagagtggttttatgtgaagaacgatctggaccagagggaagatataaggggcattattcaacaccctatttggtcgtgcttcggcattagaagaccttcggtcgcgcttgggaatgacgtacaagcgtgtcagatggcttttaacaccatatgcacttacattggcactagggtatggcctcttgccagcggatgggaaatgccgaaggaggccgccgctggctccagccaacatggtctggtgtatcttaagtatacatttcgattcagggatcagtttgacgagccaaatgatgactggttgggtgccatagaggcaacaagcgatgagctacttgggtcctattcgaggactgaagacgaagccatgatagccagcttcggcgctcgagggaaaatgagactaaatagggtttttgatgtcattggattcatgtatccagactactattatcctacgcggaagcaagggaagaagacgaagactgttacttcggtgacttctagcgtgctgaagtcaaataagattaaagttctgacacatcgacctaggcg

SEQ ID NO: 158474 - DNA, 562 bp, Zea Mays
gtctatcactacgacacctttcgtaaagttcttgatgtctaggcggaatggatggtcaggagggagaaattgtcgatgtttatcgaacgacgaatatgtgccaccctttttcaaccaaatgaacctaagagcttccttgcaaactgggcatgggaacttaccatgaacacaccaggcgcagaatagcccatacgccagtaagtcatgcatggcgtactggtaccaaacatgcattttgaagtttgtcttcgtagctcagtcatacgtccataccccttcctcccaagcacgtaccaattcatcaatcaaaagctccatgtacacgcccattttattccttgggtgtccgagaattatcaatgacacgaatatgttctgccttcgaaagcacacactggggggagattgattaggataacaaacatgggccaacatgtgtatggggcaacgttcattctatagggattgaacccatatgtggccagcacaacacgtacattacgagcctcttcggctttctcacggtgaatggcatcaaagtgtttccatgcttcaccatcgg

SEQ ID NO: 158475 - DNA, 485 bp, Zea Mays
ctcatgggttgtccatgtacgaaaaagaatacatggcaattatagtggcagtccagtagtggaggtcttatctccaacacaaggaatttatgattgttacagaccataagagtctcacagttgaatgagcagcgtcttcatactccctagcaacacaaggtgttcaccaaactactgggccttcagtatcacattcactatcgtaaaggcaatgagaatcgtgttgctaatgcattgtcccgtcgtggtcattgtgaacttggggttgtcttagctatggttcctcagtggctggacgatattcagagcggttatatgaatgatcctaaatcacgtgacctcttgtccaagttatacattgacccctcggctttgaatcactttgccctgcaggatgggttgatccgttacaagggacgcatgtggctgggtcctgatgttcaccttaagagacgtgttttgtcagctctccactgcttgccgat

SEQ ID NO: 158476 - DNA, 662 bp, Zea Mays
gaacaagcaaacagaggccactaactagtcaactggcctacaataagcaaatcaaagaatttgggtagcctaggagttgttgacatcgaccaatttagttgggccctccaccttgggtggctttaatttggcaggagaccatcgaagagaagccctgggttaggctgcaagtgccttgtaacattatagacaaccttctgtttcaggcttccatcttagtgacacttgtttgcttcttttcttttcttttccgcatcctagttgaagtccagctgcatgcatgcatgcctccggacctgtgttctatctgctcttcaaagcaaagcgaccgagccgtatacctttttcatcatccgcaggaaaaccactttgcattgcattaattgattcgatctgtgtagaaccaacagtacagattggcccatcactcgacctactaacctaatcaacgccgatgatgacagcactcatcggccgggtatgggcccaagaaatgacaattcaacaacagacatattcttatgaaacaatgcgaaattaatcatgcatgcatggctcaggtttagctgacgagtgacatcccattcttcttcccagccaggccacatggactgaactggactggagtcactggaccacatgcgtgcatggccgtggccgca

SEQ ID NO: 158477 - DNA, 317 bp, Zea Mays
agcctcaaagagaagctagtctattgctgacgaaaaaatgatattataagtttatggtgaggtatagagggataatatagggaaaatcgttgcgtgagatggtaatatagggtccaatctaagtgatgtggccagttagtgagatatagggaagaaatttagggtgaacacttatgatagtctccacaaacaactagtcgcagtaggttgtcatcatcaccttcccggccgtgtgccctccaccgccaccgccacgttcaacagcctcatggcctggctcctcaacgcgtgcaataggcaactcgagagcaggaggt

SEQ ID NO: 158478 - DNA, 484 bp, Zea Mays
gtctgagagtttccatgcaaatatgtttattccgcgtggaggaagtcgacaaccgagcttatttaggggcagaaaggcactaatgtgcatccccttgccgctagagtcactagggtctagggatacttccttttgtgtccttaatgtgttgtgatggacccttctgtgaagttgcatcattctacttcacactcataggcgtgttgaatggtcgtccctatggtgatggtccctgctgggctcgacatcatgagcttgaggtatatgtagttgggcatgaccatgattttcgtgtaacacgaccttcccaatatggcgtggtaggacccacataatcctactaattcaaatgtgagggtttccatcctaaaatcgaatggggtgccaaaggtgatgagcatgtcgatctgccccaaaggcgtggccttgtagtggcatgatgccatagaaaggaactccagatggctgaagatgatcactgttg

SEQ ID NO: 158479 - DNA, 1067 bp, Zea Mays
caatatgaagaacatcactagggatcaactcagcaccaccagcaggcatcagaactctagcatccggtgcgccgacctctaaggcgacttcctcatttgaagcatgcgctgttaccatgccattagaatgtggaggagaagacccaacgtggacatccatggaggtatgagaagggagcccgcttggacaccctcgggggctgggttgcagcccgcaccacccatcggagccggatcaccaccggcaacacccttgggggctgggttgtagctcgcgctacccacccgagccggatcattaccggcaacaccctcgggggctgggcaaccgctggcaccatccttgaggactaggttctccgcaacagccatctctaaggctgaaggactttcagtcacctccatgggaattgaacaaccctgaccaacctcttggctccggagatcgccttccaaggtcgacgaggcacgaaacactactcgggataactctaatcccacatctggaatgtcagaacaaatgtccatcatatcaccatcagttggctcggacaacatatcttcaggaacgacatcctcgagagcctgatcaaagttggctatggataattcttgcagaccaacaagagtagacaaagctggagaaggaatatcgctactccccccactgactctgtaacgccgactgttcttccgagtccctcttcttcttcctcatcctcgtcaacaatacggacaataaatggctcagggtcacacccattgggatcagctctggcagggtcacacccactgggatcagctctggcagggtcacacccattgggatcaacatcagcaaggccacacccattgggatcagctctggcagggtcacacccattgggatcagctccagtaaagagttccaccggtacttcttcagcagcaggagcagaaaggccagcatcttggtccaaacatgacactcaccaaagccgtctctttttctttttcttcccctcggcaggtgcagttggatgactggcctggcggaggcgtttcgggtgagtaccatcaagcttttt

SEQ ID NO: 158480 - DNA, 396 bp, Zea Mays
ggcggccgcccgatccgagatctacggatcggatttaaaatacccgaggtggcttcgaatgcgcccgatccccatccaacggttcggatcttcacacgcgaaggggtacgccggatcgattctccaccacacatccccggatgaacggttcagaatgaatcggtcacgatctaatcacaggcgtccattacggatcaacggccctgcgcccttcttcaaccctaggtcagggacggcggcgcacagagtttccccaaggcagaagtcaccggagttcgacgggacggtgaccccccttgctcccccacccatctacaacgagattcgcaacaagaagaaacactgggacacgccggaggtacttaccgacgttgaagggttacgaagggagctagc

SEQ ID NO: 158481 - DNA, 961 bp, Zea Mays
gacatattgaaaatgtcaaggcaacaaagataagtctcgtgtgttatttcatatgtctctttacattacatcccacttattgccgggtatgataattaggggtaccaatctacacccccaaaacacgcttaaaactctagggacaccatcaaagtacgacccccgaggacaaggaatcaagaactccacctcacccgaggtccccctcatgggtcttcccaaaacatcaccatgccctagcctgatttcggatggggcgtaagtgcgggcagatctccgtcccgaccgaggctcccccacccctcataagccatgtccgcctcgcccgagcccatctcgcgcgagagggacaagacttgtagcaaacctccaaaggtcactaggggatagtcgcattcaatgcatgcacctaccccgcatagagctataggtgtatagtggcaacaagaccgcgatcttgtcaaagattcactaacatgattacgtatgctccactgtacacgcacgtcatctgccagcccctgacgggacatgtaatatgataggggagcgaactagcccttgggcacaaactccgtcccgctcaacccagagctcagccttaggacaaactctgcctcgcccgagcccagcctcggctacctgctcccccatgaatcctgcgaagggccactccttcaaactatggcgcacatcattgaatctcaggacaggctcggtcgcgacctcggacggacctccggcttgcccgagcccagttcgacccttgatatctgcgacgagggcacccccaacgtcatcagatatagagaagatgatacatcccttaagaaagttttcccatactaagcaccgtgtcaaccactacggtatgggcaacccctccctagggggctcgggtatgcaaccgatccctcgacctcggactcagctctcagcaagaaacaagcaggctcaagtc

SEQ ID NO: 158482 - DNA, 605 bp, Zea Mays
gttccgctgagattgaaagaggggatgttgcattgcatcatgactgtttggactgtgatttacaccaatgttcgttgattaccatgagatttgtagtgatggtggatttttgtgttaatgctgctactgttggtgggcttgaactgtacctatgaagtttgcactgttgtttcagagcaaatttgtgcaaacgaatgtatggatgtgaagcaatgctgataggttgtgaaactatgagggcttacttgattgatccattgatgcgccttgagctgacccgacatttttcaagtacacagcttgaacactcctgtagcttgtttgcttaggagttctatattttgaattttgaaggtgtgaaccctgactgattccttgataggtagcaaagtgggactcctcttgttcgaattgtaaagtgatacagtaatgctatccatattgtgttcagacatcagagcctgctcatcaacttagggatcactcatcaaattagggacactcgaagttcaatccaaaatcacttgtactagagctatggacatggcataataattgactatttggtgatgccatgctgccgatttgttgatttaatagtgtac

SEQ ID NO: 158483 - DNA, 704 bp, Zea Mays
attttttgaaactcggtgccacacttcacaacacttaatcttggctctcatacttggagctaagttatggccatataatcttgccaagctgctaagttatggccatataatcttgccaagccatccaagctttgatccttgacattatgctctataacattgatccaacttaagattagagcatttaacgccataatctcttcacgactatgcttctcctcaacataagctttgcgatgatgccacatgttgccaccatttccaccagaacaacaactaggtgttgaggcccaaacccaagaaaacatccaatggtggtttcgaggaccaaatcacaaagctctcatgagtaacatatcggatacgctctatatctctagcaccttcggttcacttggtcggctcccatattggcttggtaaatagtctactccttgatgtactcttacacttgtttatatccccataagttggtagtccacatttagtcttctagactcttttgtctcttggtccaagcctcacgacgttcgtccttcgtcgtgctaagttcatcgccatgaacacacctcaccttctccatcgtcgtcgatcgtcactatgaatgacacctgtgtgccacaagtacagagatatgttgtacaccatcgccaactcaacgctatggttagcctcaaactcaaccaacgtcgatcatctttgac

SEQ ID NO: 158484 - DNA, 605 bp, Zea Mays
ctcgacggaaaaaagatctcgtcgcggatgagctcgggacattgtggacgctctgtcactcgtccacttgcaccaacgacgtggccaagcaaccatcgtcgaggtatgcgtcacccgccgtgatcgtgacacgttatgaccctttaaccacgtagcagtgcattgcctgagcatgtctattcgtcgccggtggtcttgccacggtaaagtccacgaatcacttgcgccagtagcttcttccctctccgaccgccagcgcaatatcttcaaattgaacgccaccaccctcgaatcctataaattgagcgtgtcattggatccgctatgtagtcaagcacccaacgcacccacccgtgcctccgattatccaccagatagccccaatttaagacttcccccaaatcggtccagaacaacgtattgagtgagctcgccgtggccaactccctacagatctgttcacgccctctctttcctctttttagtacccttatgtgcccttgatgcttctcgacctggccgattaagctagaacccataagatcacccggaacgcttcaaattgtccgttgatcgcactatcaccgtgagcaaagagattgggg

SEQ ID NO: 158485 - DNA, 350 bp, Zea Mays
cctccaacagttctctatatattacttcctaaatatgttaaaacttgtcatatcaccaatttgagtgggattagccatttttccttttgttttcatctcacatctgcaactcgatctcaaaattgtgacctcgtcagcaaactgattcaacatggtgagttgtgttgtccttttgatttgttgccacaattgtttattctcgacctgtgcatgtgcagctgttatattattaattgtttaatctctagcttactaggtgctgcaattgtgcatcaccgacagccggcacatgggctcagaatgtggaaaagacgtccaaataaaagaagtgtgccagattttatggtttg

SEQ ID NO: 158486 - DNA, 1072 bp, Zea Mays
tctaagttggcatggaatgtaattagcatcaaatatactggtatatgaatagaaaatggaaaatcttcctaatcattattcgtttatgcaccctagtccacagcaggttaatttataagcttttaaagccacgtatctgaagataaccaagacaacataaaagttaaggttcaatgctcatgcagattttgtgcatgatatcataaaactcaaaaggggacgcacgagacacagtagctatcgaaatgatttcatgttagttgataaacaaaaggacagctttgccaggtatagacatgaatgacatagctgctgtgttgtcactgatcatctagtctttgttccaaaacttagaaatagattagacatagcaaccatgcatcaattactgtcgaccatagtatgacaggttctgaacttctgattgtactttattgaacatcatagtacattttgcccccaccagtcttatcgcacagctttggagccccttcactcaaactcaaagaacacatcatcattaagaacatgaccctggacagcccatgcacgtcaatgatcccatcattatcattataaccatatcaaacagaagatggatcaacagaacagatagtaggcaattccactcaaatacaaatataacagaaccagatcgacatttttggcatgcactactaataccaagtgatttttttcatggcttgaattttcatgaaaagtattccaaaaatgcaataattatgtgcttcataaaagcatatactaaaaagctaattgtccaagtgataccttgtataaaacacatgctgatgttcaaagcaacttatatagtatagctatatttgcaatttgagatagcagcagttaaacgttaccagcatgcttccaataaatgtacgttcagggttacagaagaggtgacaaaacacatttgtggtataaaaaatggacagatatgagatttcagctaatgttactccaaaccaaagaaccatggacattgtctatctgaaaccaaacatacgagataataaaaagctgaatatttgccaatatcgtcagatgccaa

SEQ ID NO: 158487 - DNA, 274 bp, Zea Mays
ggcgctataagtaagggattgcactgtgtttacccccaatcgataccagtcattgttctgcgctatctaaaatcggtatttactcgggagggtttcattacctccaacccctcggggtcctatcgactggccatggatcacggtaaacatcctgctctggattgctcacaccaaggtcgatccaagcgccgcccagcgcaggaaaggtgggtggtgtctagttatttgcttaactttcgccccttcactgtcccagtgactgtctttccttgta

SEQ ID NO: 158488 - DNA, 627 bp, Zea Mays
ccttcgtctgataatgaagttcatgtactcggcagaatgcattggcgagcggctctaccccttgacttcagagagcccagatgtacacgctgagcctaacaatggcgttgggggtcagttgatgaaaagaaatcctgaatttttccaagacttctacaatcattccatgcagcggaaatctcaaccctgctttgaagaagctcttaaaaactacaacttcatcatttttcggcttcgggatagtctcttccccaccaaagcgaaccaaccccttatcggcttccttgaagtagcctagcttcgtcatcatagtcatatcagcttcagacacagttgattttccaaaatccagatggctgggcttcgatggcataataacatcataatcaatctctccttcattagcatcaccctcttcaatatctgcctgctcggtttcagcagcgggtgattctttgtcagcagtgccttcagtcacaatcaatcccgaccgcctcataactttggagatcggagcagttttagcagcttcggcttcgtctccgtcacgagtaactctagctgtcgagcgtaccctggccatttgatgttgaattttttgcgttttgacgaagttgaaaattttta

SEQ ID NO: 158489 - DNA, 354 bp, Zea Mays
tttggcacaccatcagatcgcttccttctgacaaggccccggggtcagatgggtacataggtagattttataaaaaggtttggcctatcatcaaaatggattttatgtcagccttggagaaagtttggcaggtggatgcatctaggttatatctgctcaactcagcctatgtaaccttgttgccaaagaagagtgaggccattgaggtgaaagatttcaggccaataagcctaattcacagttttgcaaaaattgttaccaagattttggctaatagccttgcacctaagctctctgacttggtctctgtgaatcaaagtgcttttgtgaaagggagaagtatacatgattatt

SEQ ID NO: 158490 - DNA, 971 bp, Zea Mays
tccaatttgactaatccagaccaggatgtgcttgaccacggtgatggcggacaccgagcaccgatcaagatgttccggttgcatacgtaaggtcaagctccctaggttgcgtggataacaatcacgagcacgtgagggcgctaaaacacgagcaacaagagcgagggcagacctgggagcagctagccacgaggaggcggttcacggcggcgtagtcgaccgaattgggggaagaaagaaattctttggctatagtgactaattgaaggtgggactgggtgctttggcttcatgataacatggcgcaacagacccgaccatcaatttataggattgctaagcggtggctagtgaatttggattgagcgaggtggtggtcagagaagaaatgagccacgggcatggtgattcgtggccttcagtgattgcgacgtggtaattgctgaggcacgtggctttcggtcgacaggcagccaactccggtgacttatctggaccggccgcaaagcagaaaggagcacggcggctagccggattagtgcccatagcccaacagcggtgacgatctttttaccccgcggcgttatccgggcttaagtgggcacgaatcacctcatcggcgcgaatctacgcgcgaggtcgccggcggcgagggggatctgcttctattgatattttggtactgtaccattggaagcttttttagttagcctgacagccgaggtttagggcaggttttctccaaattttccatggcaacatcatcatccttctgcaccaaagttgtagacctatagatcatcttcatctttgttatagcagtcctagtcgaattcccactggatttagctcaaatccgatctcaagttcgaccaataatactgacgaccacttctgctatcagattcagattcagttgttcaataccagtctaacagagcaactttgggcaacaatttctttaatttttg

SEQ ID NO: 158491 - DNA, 485 bp, Zea Mays
gagaatattaaactatgtgtgctcaaccattctaaatgggtactcatgaactatgatcattttggtaattagtttttttactcgctcatgattataatctttaggtgatgagatagtagggagaccagatccagattcacctatcgttgaaggagcaaagttcaatagagactgatcaagcttttgttcgatatgcttttgatacttgtcacagttcttcatatgcctcgataatgtcgttgttgttgacccttgtgcataactataaagctttttacaatatttgcactttgcctttagtaatggattctccttatcaaccgggtttggcaaattcaccttatcaaaaacctcccaaaccttggatttgcctttgctgcccccctcaaccttaactggtttattcacccctttacgccttttcttgactctattcacatctcccccaccatcagattcatcaactctaacaacatcgacatctt

SEQ ID NO: 158492 - DNA, 603 bp, Zea Mays
gtggacggcgggttgatttcactaaagtctgagggctctttagactaatgtgcccgcgaaggggtacggtttgatcccggccgttggatcagacttgggcgcgccagattagatctggattacatcgaaccggtatgcagtgaggaccgcaggatgaaccatcaacggcccagatttaatgaaccagctacgagtgtccaccattcgattccgatcggacggtgcataacctaaagcgcgaatgggtacctcagatctaatcggggccgttcctagtggatctgacggtgcacggtcctccccccaacggaacacccacgcacggcggcgccgccccgcacgctcggcagagcacgccggcgaggctgcaatcggccgttcccgagcgccatatacaaattgaaccgagctacacgtagaggaggacaacgcagagagtagggaggtgaatttaccgaggattgggtacacagtcgggctgaccacgacacgaggtggcttgacggcgttccgcccactccggtgatgaattgaggttgacgtggacccgaaccttgcacgccgagtgagtttacagctccgccaccccgagatgattatccc

SEQ ID NO: 158493 - DNA, 1035 bp, Zea Mays
gaaacctgggatcgggtcgggatcttgcaccgagctagagtgaagcgatcagtggtgtttgtgggcagaatcgacggccgtgcgacccttaattgctcgccggagccataaatccgccgtgggtcctcttccccgctgtcgtccgaaacctgggatcgggtcggggtcctgcgccgagctagagcgaagccatccttggtgtttgcgggcagaatcgacggtcgtgcggcccttaattgctcgccatgccacaaatctgccgcggatcctcttccccactgtcgccgaaacctaggatcgggtcagggtcctgtgccgagctagagcgaagccatctgtcgtgtttgcgggcagaatcgacggccgtgcgacccttaattgctcgtcggagccataaatccgttgtggatcctcttcctcgttgtcgtccgaaacctgggatcgggtcggggtcctgcgccgagctagagtgaagccatccgtggtgtttgcgggcagaatcgacggtcgtgcgacacttaattgctcgccggtgccacaaatccgtcgcggatcctcttccccgctgtcgtccgaaacctgggatcgagtcggggtcctgcgccaagctagagcgaagccatccgtggtgtttgcgggcataatcgacggccgtgcaacccttaattgctcgccggagccacaaatttgccgcggatcctcttccccgctgtcatccgaaacctgggatcgggtcggggtcctgcgccgagctagagcgaagccatccatggtgtttgcgggtagaatcgacggccgtgtgacccttaattgctcgccggtgccacaaatccgtcgcggatcctcttccccgccgtcgtccgaaacctgggatcgggtcagggtcctgcgccgagctagagcgaagccatccgtggtgtttgcgggcagaatcgacggccgtgtgatccttaatttctcgttggagccacaaatccgccgcgaatccacctggcaccgcggccaacctcaccagaacacagtcctcggtaagaa

SEQ ID NO: 158494 - DNA, 473 bp, Zea Mays
gtccttttagaggtgatggccgagtggtaacgggccgcgtcggtgttttagaaataacgaccaagcggttactggcaacgttggcgttttagaggtaacagccgaacgattactggcgacgttggtgttttagaggtaacagccgagtgataacagaccgcgtcgaccgctttgaaagtaatggccgagtgaagttagataatgtcagcgtttttagaaacaacagctgagtcaatttgagccgcgtcggccgttttggaaataacagccgagtgatgacatggcacgccagcgttttagaaataacagctgggtgatgacatggcaggccagcgttttagaaataaccattgggtgatgactgggcactttttagaaacggcatctggcacgggaaaaccccatatgtactgcactgtcgcacgcctccacgctccgtgccctagtttttgcttttttgcatccaggctttc

SEQ ID NO: 158495 - DNA, 636 bp, Zea Mays
cgtgggcggagttcaaagaggcatttaggggacattatgttccggaaggggtgctacagatgaaagctggaggagttcatacgtctgaagcaagggggagactccgtaatgcagtatctcaacaagtttaatcacctctcccaatatgatatcgagcaagtggacacaaatttaaaaaagaaaaattgcttcatgagagggttgaatgaccgactccagcgcaagatggccacatgtttggatcttacatatagcagggccgtaagtacaacactgtcagtggaagctaagaattcaggccaaggaaaagtcaagagatatgcgggtgaaggatcatctcatggttctgaaaagcggacaaggttggtaattcgtcccttcaaccaaaatcgttcttctcctcgtccacccacatatccctttaggaaacccgtgttcatccgtcccactcctgcccccgcccagaataatcagccgagtgcccctggtgctcgtttccccaccctacctagttcctcaagtggctactttaattgtgggaagtctggacattttatcaaagactgtccttatccgaagcagaataaatcaaacttccaagaaacttctgggaacgccactcaacgaaagggaaac

SEQ ID NO: 158496 - DNA, 300 bp, Zea Mays
gagagatagagcgccaccgagaccgcgatgatcttcttctgtgctgacggctcggactctgctggggcagaaatctagccagtcgacctcccaatcctggctctgctccagtataaagacgaactccccaatcgctcccatcgcggggcggatctcggcgacctcctgtaccgcgcggaggaaggtttggcctggcatcaccgcgcgccgtcatcgaactactcatcccctcaacgacgccatcggccacatacactccatcgacggtgagacttctctctgcgcaccgttgtattttcg

SEQ ID NO: 158497 - DNA, 622 bp, Zea Mays
agggaggcagtgttggtggggcttcctattttcgttcagtttggcatccttggcttttggtccgcttccagatcttcttagtggggccgagcttctttaacttcttatcgtagtccatcttcagggttcggtaagcttcacgagtgttggcatcttcaccttctgctattttgagactttcttggagggacgccttctcctcttttaatttcttgatttgttgctctaggctctccacccaggagtttaggcgggtgcagtgggagaaaaggtcgtcatagtggttgtcaagagtgtggaggtatccggccatgtatactatggtggcgtcatcctcattaggatctcttcttgacagggcctgaagtcttttcctccaggtaggggtatttttgttgctgggtggaaagtaacgaaggggtgtctcgaagacttccctgctgtagttttggcatagctggcggagggctttttgggcaacattttggcaagtgtctgggaagcggtgtccagtgaaggtgacttggaaaggagggtgatttgggtaatttcggctttctcccaggtagactgccatagagcatttcttaattccattctcgcggtattctatccagatgta

SEQ ID NO: 158498 - DNA, 675 bp, Zea Mays
agtctacccgagcaaaagccctcactcaattggatgggttcgaccttaatcgttgcttgttcacggtcacggcgtcgcaagggctccggtgagtgtgttctgagcaaccaaacgcaggagcgcctaaattgaagctaggttgagtttcactgattcaccacaggtcgggtacacgcacgaatttggacaaaacaggggtggaagagtgggtcaacgtgagtgtgcgctcggaggtgttcagcggcggcgagatgatgttctcgatgccctatcgcggtggcgttcaatcggttgggccgacgagctatgataacgtttaaggatgctaaaacatgacacagaaggggatgaacagacctagaaagggctgaacatggcaggatgcctcacgacagcgcaagtgacccaatttgggggaaatccggtgacattgggctatggtgcacgacagaggctaactgcatgtggtatgagtgcgtaatagagaggcggagcgagggtagtgctcaatttaaaggaaccagcaatgtgcttctccaatttgggccaaagacgatcacggcggcgatgggatattccacaggacgagctcgtcgtggcgtccgctggtacaaaggctcaaggacggtaattccaggcttgccatggttatagctacgttgaaagggtcatgac

SEQ ID NO: 158499 - DNA, 474 bp, Zea Mays
accgagctgcccacaatgggaagcggaatcacgacggtgctggatcctcggcgtgaaatcgatgccaacaaacggccacccacttcactacttttgcgtttacgcactgcaccccccggagaaccaccccaattgttcgttcaacaagagccgacgacaatggcgagaggacgtgacggcggcgtgctttcttcctttatcccgacggcggggcttggcggcctggctcctggcgtggattgcgatgggattgtgacgtgcgtcggggctcggtattataccagggccgaccaaccacccgaccgagatcactggagctccccagccgagatccggcagcatctgttggcgcgacccgagctctatggtgaggacgacgcccctgaccagtgggcccttcgtgcagtcaccaccgaacacggccgagctgttgctgcagaggaggggctgacgagtgagccccaccagtcatcg

SEQ ID NO: 158500 - DNA, 416 bp, Zea Mays
attattttaccatttccattcgtctagttctatgcatgaggcgaatctattagttttggtgtatgtctgtacggtcaatttgttttcacttggcatgttacaccagttgctttgcttgcagctctgtcaccagcataaagcaattttttactgctcatattatgctgattcacgcatctggggaacaaacttctagacttcaaaattcagttagtaagcacaccaaatataccatgctcatcgaaggacatcagcatttaatatcaatcaacccagggttctggccatgcactcgaagggcaaaagtttggtccttaaaacccaaaaataagactcttagattgtttttaaagaaaaagcatggatttttgtcacctagcccagggcatggctcattccccttgaatcacaagcta

SEQ ID NO: 158501 - DNA, 553 bp, Zea Mays
cagcggtcgagtccatgacctgttcaatacatgggagaggaaagggatcattggggcacaccttattgagcccattgtagttgacgcacatcctctagctctcgttcttcttcttgacgagcatgggatttgtgatccacactgggtgctttgtttcccttatgaaccccgccacctagagtctcgctacctcttttcctatggccttgcgtttttcttaatcaaagcgatgaggccgttgggtcaccgtcctggccataggcaggatattcagggagtgctctgcaaattcccttgagattcctagcatgtccatgggcaccttcttgtttgtcggagagtgtcgcctgattcaaacatgcttggaaggatcgacattgtttatttggacatccttcatgtcctcggcggatttgaatgtgacggatctagccttgggtgcgtctggcctgtccctggagtcaatgcctcttcacaactctgctaactcttttgtggcaacttgcgctgacgcgagctcgtagctagctttttcacacgcttggcatgtgtc

SEQ ID NO: 158502 - DNA, 532 bp, Zea Mays
gcaacatgacgaactgcgtcgagccccaagctacgaaggccaagggttgacatagcctgaatgatcacgctcaggccccacactgcccatgtcatccacaataaaaatatgagatagccagatgaccgcggacacgcatggctttaccccatggtaggcacacccaattttaccctcactcggtggctccttctttgacctataaaaggaagaggttggccccggatgaggggatcctagagcggacaaacggatggaccccagacgagaaggaagtaggaacccagaaggaccgatgaacaggaggaggactaggaggtcagagctccgccaccaagccaagatttatctaggactccatcttgtaaccaccacgactgtgaataagagacttgggagcctctcctccctctctcgcccgtttataacctctactacaagctttgatcatcaatggttccggtagcgcaggtcacgcgatgactggaagtagggatgttatgcccgaatcagtataaatcttgtgcccacc

SEQ ID NO: 158503 - DNA, 528 bp, Zea Mays
gcatttgagaacaagtcaccaatagaaggcatatctaaggttgtgttttgtggttgggagggggccaacaatgtctatcccctaggccaaaagaaacattgacgaatggctcttgaggcgagagcgaggggtttgatgtggcagccgcatattcctttgtaaagtttgactaggaggtttttgccttcgggttttaggatacacttgatgaggtggtgagcgacccctcttctataaagggagtcttcgatgatgacgtacacccgacttctatagttgagtctggttcttcatttgtgtcaatgcagtggtagtgtcgtcgtaaatatgaaatgatgggggcacgccagtcctcttgcattatcatgtggatggattcggtcccacttatggttgtctaataaatgatactttgatgactcgataaaatatgtctaggggtaagggctctcctctggttgtagacttcgcaagtgcatctgcctctttgttcttttctcattcaacatactggaccgtgaatccggg

SEQ ID NO: 158504 - DNA, 820 bp, Zea Mays
tgcaagcgtgccaagctgctttcaacacagtgtgcacctatattggcacaagagacttagttcaagagcatatcgcttacaaagtatggcctcttgcaaatgagtgggaaatgctgaaggaaaccgccactggctccagccaaggtggcctggtttatttgaagtatacttttcggttcagaaaccaatttgatgaaccaaatgatgattggttggacgctattgaggcaacaagtgatgaactttttggagcatactcgagggaagaggacgaagctatgacggcttccttcggcgctcgcggcaaaaaagaggttgaatagagtatttgatgttattgggttcatttacccagactactgctatcctgccaaaaagcaagggaggaaaaaaggaaagtcgctgcctcaacatctactggtgtgtcgaagtcaaagaaaataaaggttttgacacgcagactcaggtgcatcgagacagccgatgtgtcgaagttaattgaaagggtggaaacaacccccctagccagagagactgttcctgctatgcctattgaagccattgtagtcccagccaaagagccggagccagaaaaggtagcagaaaaagtaccggagcagcctaagatgatggtgatagcactgccaaagctgccagctaccacaggaagtccaaggaagaggaggatggctagtgtcttggaagatgttctagaatctgtgaaaacgccgcctccttctgctggtgaagcttctagcaacaaaactaaagatgtcatagaggtaatcactgacagtacctctgctcatgccgaggcggg

SEQ ID NO: 158505 - DNA, 685 bp, Zea Mays
gaagtgctggggctaaactatagttgtccccaagactcaggctactagcgcatggactgcgggttaatactatcaatacaaaggggtttctatgcaattctgactcggaaaaggggtatcgccatgtactggccgtccgatctaacatcagtggcgcttattaaatatgttttaagttgaatcggtatgagatatcacccgtcagatcggagatcagcggacacgatcaaaacactcgtgatcaaatcgtggccctccatctaagacctacggtccatattgcccgcgcgaagggaaaagacttaccagtcgcgcttaggcccaatcctgagattccggcccaccagggtttgatgccgtgcaacccaacagccaaccggtgccgacatgtgggtccacgacgccagcgtccccaatcacgcgcgcgttttccctgggaatcatggcccgcgtgtcagtcaatgccgcacgaagctgatggcaaccctgcgccgacagcctcgtcccacgtcacaatgcaacagccttccgctatcaggcgggctcgggttgccagaaccagactccgacctcgcttccgtaacagctacaccaaaatcggcggcatccgcatcgtccgcacggcatgggggttgaccgagggtccttcaaaccgccctacaagtgccaccgccttgccctctgg

SEQ ID NO: 158506 - DNA, 903 bp, Zea Mays
ttcatatttcattttatttgaatttaaagatcaaattcaaatttaaatctagaaaatggaaaaaataaaacagtgaaccacgtgacctagaggtcattcatctcaatagcaagcgtgcggccgcactctcccctaccctctcgctaacacccggaccccgcttgtcaatgcttccctctcgtactctgggcctgtgacgctgaccactaggacccatttgtcttcccttacctcttgtgctaattgttgttgttcacagcagcgcgcaccgccgctaaaatcgcccctgcaaggctcgatcggactttctgtcactatcaagcaatggtggggttctcacccaacatatacatcccttatccccaccctattcctcctggatcgacaccccttaatgccaagaagatcacggcggctcccatcactcccccagtcacgctactctcgttgttgctccctccttccaattaatggcacagagctatataagctgccctagcatgctctactcacctcagatcaagctcctagccactcgatcaccctgtccattcacccagtcccattaccattgctcataagctccccagaagtgttttgcttccatctgaggcccttcgtctccaacactgtcaccttcttcttatgtttgtttgggacacccgtgatgcaccccggaggaatctctaccgacatatatgccctagacccatgataacctaacctcatagtgccctcactaaagtcgatcgctacacttcatcacatgttgcccttctcttcactactagtagcttcacataacggtaatgaacatcccgaactctttctcaggaccgattatgcctagaccctaaggcaattggtcgatgtagttacttcgagctgtcacgagcaccatcc

SEQ ID NO: 158507 - DNA, 486 bp, Zea Mays
tttgtgtgggcgatgagtaagactttcggggacctgatcagggacaaagtagaggtctacgtcgacgacatcgtagtcaagactaagaagaggtcgaccctagaggaagacttaaccctggtcttcgacaagctgtgagcaacccgcacgaagctgaacccggacaaatgtgtttttggcatttccgccgggaagctgcttggattcctggtttcataccgaggcatagaagcaaacccagagaagatcagggtgatcgaagcgatgaggccccccacccgagtcaaggacatccagaagctcacagggtcactagccgcccttagccacttcatttcaaggttggccgagagagcgctgcctttctttaagctgctatggaaggccgggcctttctcttggaccaaagaggcggagcaagccttccaagagttgaagcagcacctggtgtccctaccaatattggtagctccggaaccagaggag

SEQ ID NO: 158508 - DNA, 1128 bp, Zea Mays
tatcgtattttatccatcatttcccgacacacatttatctctttgctgtccggtagacagtaaaggaagtcatcttcgtcatttcctccatatactaaggaccctcgggggtattttaggtcattggcaaagtgttgcacttcgacaatcttctcttctaatagccgctttcccgaagcatgtcgaacaatatagtccaaatcactctgggcaggtgcctcggaaataggtgatgtgggcttttttgaaggctttccttcaccagctttgctggcgtagctcctaaaggtcctgcttcaatatgaatagaagaagcacttgcagcagccacttcctttacatcttcaattttcttgttagaagcttcggcagaagtaaaagttggtgtcttcgtggatttcaaaacaacatccaaaacactggccatcctccttttcttaggagttattgttgtggttgcagcagatgttagcttcgacaactcagttacgggtgggggattcaacagctttggatgctcttctgccagaccgatactagcttgaactgtcgccgtaggaattgccttggagctaaggggatagcttcggcatgttaagccttctccatcttttctatatcaagcactttagctatcttctctaaaagaagtggcctcgacctgtgagttaaaaccttaatcttcttcggctaaggcgcggaggaagaggaggctgccattttccttttcaacccttgcttttgggcaggtaaacagtaatcaggataaaaaaatccaataacatcaaaaactctattcaaccttctttttctgtgagcaccaaaggcaatgatcatagcttcatcctctgccttcgtgtaggctcccagtagctcatcactggtagcctccacaacctcaagccaatcatcattcggttcatcaaactcacttctgaaacgataggtgtatcttaattaaagcaggccaccttcgctggagccagcagcagtttcctttggcatttcccagtcattcaccagtggccacactttgtaagcaatatgctcttgtactaaatcccttatatcaatgtaagtgcacacagtgttaaaagccatcaaacacgcttgcacttcgttcccaat

SEQ ID NO: 158509 - DNA, 450 bp, Zea Mays
gcgcgcacgcagacacagacacggggccccttctttgctgccgcgttcttgctctcgcatgatttcgtcttcgccggaggaatctgcttgcaacgggagggctcgatctagctaggacgacctagctcctccccactctttatcgcttttatgcatgtgtggctggaggcagtcttcggcctcaaaacacactagcagcttttgtgcgatcaggttttgagcgagcatagtgtggtgtgttctgtgtgtgatagatgcacatttacttgcttttttcgcagtgcatgcttatagttcttttgctccccttcttcccctccctctctgtagccgccggccggcccctttttcagaaaggtttttgtgtctctctactttcatcctcgcctgtcgcgctcccctgccctcgatctcctttctgctcctccagattgattggctgctgcgcca

SEQ ID NO: 158510 - DNA, 491 bp, Zea Mays
gcgagagcagtagacatatatatctctcaaccagaggacgcgagatggaaaagaatccctgcccaacagcagctatgatgagtgttcacttttttgtttgctgccggccggtcctccatattcataagacctaacagataacaatccctctcctctcacattcctatcaccaccacttccctctctcacctagcattgttctggctggccaactgcgctctagctatacccaaccatatcttgctgctacatctcggtcgagcactggatcgttggatgggcgggctggcctgcaccgctccgaccatcgacattgcagcggccgccgcctatgccacctactgccgacctacctatcaacactgcatgctatgatcactactctggctctcctcaggcacgcgcgcaccaaagagagggaggcatacactatatttacgtgcacggtaaaaaaactatgcacatgaaaaagtcaaagacgatatacaatt

SEQ ID NO: 158511 - DNA, 361 bp, Zea Mays
gccggtgagtcagaaccgtcaacttttttccttcggcacaggctcaactggggtggtcaaagtagcagctttcctctttttcccctgtccccgcagtggatagcggtaatcggggtaaacaaagccaatggcgtcaaaaactctgttcagtcttttctttccccgacctccgaaggatgtgaacagtgcattatcttctgccttggaatatgctccaagcatttcatcacttgtagcttcgatacacttcagctagtcgtcgtttggttcatcaaacttatccccaaacctgaatgtatacttcagccgaaccaaatcaccttcgctagagttagtgacggtctccttcggtatttcccag

SEQ ID NO: 158512 - DNA, 740 bp, Zea Mays
tatgaagacgcggtgcccatatgacgttccctagccgaacggtgaacaatacccgaccccaccacgtgggcggctcaaggggcaccgtgtggcaagaaaatatggtacatcccaggatgtatcagttggaccggacctccgcgagggagcaccggacccctgtacgcacaacccggacccccaattacggccaagtaagcatgtcaggtccctcggatggggttccagatcccttcaagtaaggtccgggccacaacaaggtcccgggacaggggagaccctggcataagcaagggtccggtactgacacgtgtccaggccttatcctgtgcgcttgcgctccccgctcagtcggagacccgatgctgccacgtggcttgttgcccgtgacataagccaacgggcggagcctgacgtaaggcctataggacgcgcggtctctgcatttattgcggagaggacgcgccgcctgtccaccctgctgacaggtgatgtgccccttccgcatttaatgcgtcctgtccactccgctgacagacggtgtcagggccatcctgcagacggtgcacctgtccaatccattatcaatcagtgcgcccgtgccgcgtggcgtattgtgtccatcatcccttatacgagaagcttcccctgcacgtcgatgctatgcagatcttggatgtcagggttcaagaagattgctctagcagcaaacattagtagctccagtactatatccattg

SEQ ID NO: 158513 - DNA, 861 bp, Zea Mays
gtattcatcgtggtgtaggatagagtggatcgaagatataaattatgtgacatgtgattagtgtttttaagatgagatgtgcgaatgatcggttagtgttgcacttgtctagtcgataaatgttgtcataaataattgtgctaaaattggtcatgagaatgcagtgggcacgtggtgtgtttgtatgtgacaagtagattggaagtgtggggtctgtcgaagcgctgtgatgtcgaacgtgtatatcgaagtgcattgtagtggtaattgcgttaagttaatcggtagtgtctcgagtgcacgccacaacatggttgtatgcgagacaaggtaatataaggtgtgctcgacacgaatgttcggtcgatataagtaggaattgttttggcttaaatagagaggtggtgacatgctgaagtagtcatcgcttcctctatgtttatgagtcgagtcaaaatgtggggtactagtggtacgctaggcaggcggtgtccaaataaattaaccggttgatgtggtagttgccgtgcgtgatttattgttagtgagtagtgggattacgagttatgtgaggattatgttagaaactagtatgcggcgtgtaactgtgttcgtgtggtgaataataggtcggtaggtattgttggtgtcagtagcaaatgtagtcttatggagttttacgccatgtgtaaacgtctccatgatagacccccaaaaatgtgatatttaagtgacttgtgtgttgtccagtttaagttgagaaaaggttaagaaacattaattaacttgctcccacccatgttttgagttgcaatgtctaaatggttcgctaagtcttctactgtgattagccaactcatg

SEQ ID NO: 158514 - DNA, 599 bp, Zea Mays
aaagaccaaaacccccgtttgggctggctagacctaattcggcccatttcctctgtttgccccgtgcggccgagctcctaatacacccgcgcgcggacaacttacaggcggggcccaactgtcaacctcccgcgtgtccctttgctcactgcggattggggcccgctgtctggtccatattcaacaccggaagcttcggaacgagctcgggcgtgtggactccgtccatccgccccgtcaaccacatcccgagcatggcgggctacgccccaggatctcctccacgcgctcgtccctccatcacaactccctgtctcgattacagctgggccccgtgtcagaaccatctccgcggatgtcgcgctcggggcaacgcacccccgctattaccgccgcacgccgtgcctagcggaattccgagccgcagataaaacccctcagcaccttcccgactgcgaaacttgaaacttcacaccctcgtcgtgccagccgttcccctccttcactgcgaaaaccgcggaattcatccgccattgccgacgccgtgggtggttggagctcatgggggggctcgcttcgcgtctggggggcttcggcgg

SEQ ID NO: 158515 - DNA, 846 bp, Zea Mays
gtttgtgtcgacattctgaggaacaattttgtctacgtccccctcgtcgagttccttcgcaagaggtgatatgattgtttcaacagtttttgtggaggtcggtgctatattttcctgcaccatggggtatggaatgatcgaactatctttctgttgcattggtattgaattcggcgttggtgacttatgacgcgatagacggcttaagatcggctcatcacccaacttgatgtcgcatcgatgccaaaggaccaactcgttcattgcctcctgcaaagttatgatcccctcaactggaaagtctatctcccaatcttcacaaccactgtctgtgatctctagaacttggaccacaacatagtgtggcgggacaggattatccttgtagttaacaagtcctggttttaccaaaccagtagcagcttgttttgtttttgtcctagatcgattgattggaatatgaagaaagcaaggcctgtcctcaacaatatcgtctacagggtacttggtgcccgatacgaagtcttgcatagatcctacgctgctagggactagaggtggactcatgtggcctggcttgagttcacatgatatgcattctattttcttcattttcttcatcccgtcattaatagccttttgtaccctttcatcaatagtctcttcaagggtcctttttgacttctcgtgtatcctatatgacgccacatactctggaaatgcctctctctaggaaatcatagaagggattcctcgagcccgtccagtgtgttcaggattgcctagtgctgtagttagtatgtcattctctctccgaggcttaaattcgcccttctttctcttttc

SEQ ID NO: 158516 - DNA, 883 bp, Zea Mays
tggatctgacatgcgcttggggtgtgcgcgctctggcgcctgggcacggcgtcgagcacgaggcagcgcagagagaggtcaagttcaagcttggattggctccaaatcttcgcgattatggccatgatcccgttgagagatctcttcccctaacattcctttgtcgtttgtgtgtggaggcttatgggttttgctgactggatcacaagatatggagggatgaagttgggtttgtctcgctgctgaactccaagaggaaatccagggtttgacgtgtctagggcacgaatctcaatgccatcttcacaaacgttgcagaggggttagtttagaacaattttgtcaatggggacttaaggatttgagctagggatcaaggtgaatgtgctcaagttcaaggtgaaggctgaatttcagaaatctgaacatcagattttcccttgggagcttccacttggatggcctttttgtggattttaatcaactattttggccaatcttttataacaattgttgtagcttaattagtgtatttcaacttttataattggcctaagccatgattccatgtttttcatggtcttattaccaatttcttcctctctacttaaatggcctaattagggttgttctagggttttaacatttttcccattttaaatacatgatatgatttaggcatgagtcttaggacaaaagaattagttgaacttttatcctcaagtttttggtgtcttttgctcaatttgattcacatgaaataatgattcttgagttagcactaagaagaactctgggaattactggggtgttacagccttccccccttaaaggaatatcgtcccaagattcaggtcagagtcctccagggtgaagcgaaggt

SEQ ID NO: 158517 - DNA, 476 bp, Zea Mays
ccgaatagcaactcctactcaagagccttcacattcgtaacatcaacctacagaagcaaagaagcactctagcagctaacaggcaccacagcgaggtccaaaccaagacaaacaacttaagccaacaggagaaggagcacctccaggctatagaacaagaaatctctcggctgcaagcccaataggaacaaggccacccaccgcacagcagagcaggacctcacaacatcaggaacattagagagactgcacataacaacatgttccaagccttcaatttcatcgataaaagaagcccactatcatccaggttacaagcaacaccttggtcgtgcaactacagagcagggggctggccaaatacaatggaaacatcgaccctttgcaattcattatgagttatcaagtcactatggcatcatcgggaggggacgacaaggcaatgcgaagtcactcttaatcaccctcaaaggccc

SEQ ID NO: 158518 - DNA, 902 bp, Zea Mays
ggccaaattacggtggcagtggtcaatcaaactgcacagggagcttcactgagtggtgggggtgtgtgtgcgtaaggaattgaagaatggctcgctggtttacctggaccacgtgctcccgcgggcggatgaagtctagcgatggtcatatggctcctccgacgaggtagcgtttgggctgggggcttgggaagtttcactggcctccaggaagctaatgatggagcttgattgagtggagaggggctcgggttgttggactatggtggtcgaggcttgggtgaccttgcggatggcgctatgtctagttctcaaccgatcgctggtgtctgagctcaggcgagagcgagtggcatgcaggagagcaaggtcaagggcttgggctgtcttataggcgtagggtcgggctcaccagcactcggggcgcgtgcgggtgtaactagtgcgtgctcaaggccgactgacgatgtcgaacacatggtgatttgtttctaccggtgtccaagcgtccatttggtcatcctaacgtgcagatctcagcaaaaatcccttgtaaggtctgttcactctatcaaatcctatcttttatttgttagtcccgagtgtagataggcttggaacttggagaaatggctgggtcaaatcgggtctatctcactgcccgaatccaagagaaaatctatgccaactcgtgtcaacctgttttggatcgccttcaaattttactagggtcttcttagggtattttggtgccacattgtccattgatccatgtggttttgggttttggaactaggtgaacacgtgtggtcttggtaagggcctgaaaaatgaacatagagaaattctggtttccttttgtgctccctacttgagtaaccatttgggggcttttttgaaac

SEQ ID NO: 158519 - DNA, 642 bp, Zea Mays
gtttcagaaccaagatttcagtctatcatttgacagctaggaacaagattatatgtactatttttgtgaacagatagctacttaatccatctacaatcaaggacataaacctacacctgccactgaacaacatatacccaactatccaacaagcgggaagcagatctaaaagtacttagtcatgaaagggactgtatcttcatagcaaataacattggatttattatcctagcacataggatacaactacgaaaattacgtgtagacaacaacaccttctactgaatagctacatgtgctatcttaaaagttgcattaatcacctatttcgacagtgcagagtggcttttacacagcaaatgcatatgtttaaccaaaaattagcaatggtatgtgttttccactactacaaccctgaatttgcatggacaaaaacctatcagacttaaacagctacacacaatgcaagccatggggaggagagcgtatgatcgacagatggcaagtctcaagggctaggcaaatatggctagcgatggggaggagatgacgagccggatacaaaggcgagtttgaaggcgagactgttgcaagctaatatctggaggttttccatttctttactgagcacaggctgtttag

SEQ ID NO: 158520 - DNA, 922 bp, Zea Mays
ggcttttgtcacgctgcacatgtgcaaaagactgctccacgtgtttccaatgtggattgtcgcttgtcagctcgtgcataggacttgcatagtgcgtcgtgccgctgcctaacactgtaccaagcggttgtggctaggcgccatcatgagcagttgttggctcgagcaacacacacactcccattgcattaactcccacacacgtcagcatgcccagcccctacatacgtcagcattctagactccactttgcctcgcaccagcaagcgggataaaggtgtgtctcgtcggaagatctagatgacggccgagtgataagatctccatctatcatagcatttaaggctaaatattgtacattatttaatactagatcgctgggcccacctgttggggctcaacacccttgtgcgtaccccccttggactataaaagggagggcacatgtgacacaagggggcaagttgtctcagactcaacttcacttaagctcatcttcttcacttaagctcatcttcacccttgctcacgctcagcaatacaactcacatgggatgtagggtattacgctctagcggcccaaaccactctaaatccttgtgttcttgtgttcttgcatctcctcaggaaaaccctaggctgcccctcattcttaggattagacgggtgcattccgccacacggctagagtttacctccgacatttggtgtgccaggtagggggtttgcttagttttttgccttttattttgctcaacatcacggttcatattgtcaagtacctcgactcctccttcggtggcctcccggtggggggtgtggtgtcatccacgtagcgggttcctcgccaccctacacctggggctgctacgcatggtgcgcagcaacacacactggtgcatgcatccaccgcctcctcgcg

SEQ ID NO: 158521 - DNA, 438 bp, Zea Mays
aggtgctcccgatgccaaagctaaacagactgttgctgaagaagaaaatgttgatgaaagtgaagattacagtattttgatcccaacaaagcccagtcatttagattttgagaaatctagtgtgtccgaagatgacatgcccatgatgatgaaactaggttattttggggaagctgaaagcaaacttgtccgatttgtcggagaagagactaccccagcaccgaagaatgatgaagtagtggtttttaaaagcttcttcagagcaggactgtgatttcctctgaacgagatgataggggaagtcctaaagaatttcgaaatatatcttcatcagctgacccctaatgccattgttaggcttagcgtcttcatctgggccctccaaagccaagggatgagcccatatgccgaagcgttctgccgagtgcacgagttgca

SEQ ID NO: 158522 - DNA, 864 bp, Zea Mays
tagatgtttgagtaaaaaaagggtcataagcacacacgctcccaacctttatcaaggcgcgtggaaccaaagtcacgactcgaccgtgctcaacctttgggcaggaaacacattcccgactcgcccgagaccagtctcaggtgacgctccgccttgtcaaccactctaatcccagaacgtgtgtccgtatgtttgcttaccaagctgaaggtgccaaagtaaacaaaagccaacacgactacggtctaatctacctttaccgcccacgacgatagtcatgccacgaatggctctgtcccccactccgaccactgtttcaaccacccagagcatggctacatgtaacgtctaatcccagcctcggcctcaggagaaatatttacctcgcccgagcccgacctccgccaactgccccagcaagggagaacgcacattaaatggtacatgatctcccacaaacctcgcagaagaccatgccaggtatgtttcgaaccactccgactcggcacttccgcaccattgtacatgctagggctcgaacacatgccacatgctcccaagcccagcatcggcactctacccagttaagagaacatgctatatggatcagacatcattctcctgaccaaaagcgacaacaaggacgagggccatcccactgaccataccactatagggcacagacacatctcatatgaccacaacaacaacataacaacccttgttctcctgagcctcctccttgcaataaaacgagaagcccggggccttctatggggggacttcacggttcacgacccacctcacttatgatattggcactcgcctcaattatacttagagacttgggactcgctccatctc

SEQ ID NO: 158523 - DNA, 781 bp, Zea Mays
gattgaaggtcttagagaacggacatagtgtaatcaccaaggtaatatcgagagataagaaaggtaaaggtaatacccaaccggagcacaacaaaggatggagttaaaaactcgcaagcgaccaagaaggggatacgaccaagggaaaagtaggtaaaataccactataaaattgagatgaaagagagaaggttttaaaggacaggtataacataagcatcaaggtaagatatagaggcgacaagggtaaagatgataattgtgaaagcgtaaccaaggatagagttaaggcaagactcctgaagtggcgaagtggagaaaataatcaagggcaagataggtatggttccaacagaagggttgaagtaaaaattcattatcgagagaagttataaagggacaacgaggtcaccaaggatgtgtaaaatagaatgattgctcatggatcgtcgagaaacaagggtggccaagggcatgtaaactgaaatgtcttttaaacagacattgaggtatgaagataagcatacaggaaaatgtaagagtatgcaagactccaaggatacgagcatactaagaccaagggaatagaaattgccgatagataatgacttaacaatggaaaacgaagggatctcaaaagacaggaaagtcatgaaaatataactagaatgtttaaataggcaaaagagttttcagagttaaatatttgaattaagggacaatggtatggaagaatccaaaagatgcaacatgtcaataccaatgggaatagagatgatcg

SEQ ID NO: 158524 - DNA, 999 bp, Zea Mays
ttcttcctctctcaaccgcccgtaaccactactacgagtttgatcattaacggtgctgatagcgtaagccaccgatgactgcaagtagggacgttctgcctaaacaaatcgaggaaaaatatttaagtgtaataattgtagaaaaacacagtagaaattaattctacgtaaagagataaatacacgtctaaaaggatgttaaatttcacggttcagaggaagccttgatcgacattctacacacgcagggctgtaaacaagccaaactgaggaaccacttaacgagctaaagaaggctcggcttagcttaaagatggctagtaaattataccatgatcaataatagggctatttcaaatcatacccttaattttgacacttttcttatttttaccctttttgtgatttttgctcacctgtgtccttttgctttatagcaacagaaaggacctgcctcgatggaaccccgcgacatcgagtccagggtcgggcgtggtgaaacctgacaggggaggtcgaacgtgtcaaaagagaaccactcgagtggatccccgcgctcagccccagactgactcgccataaatagccgaccacatttaaccatgtctgacacctagccatagcgtggcgccagtccgcttcccactcatgacctgcgagcacctcgggctgcatagcactcatgacctacgagcccctcggaccgtgacgcattcatggctcacgcaccccttgcgcacttatggtctatcacactaggcctgagtgcgccgacctcccgcagggcactacatgtcgggccgcgccgagccctaggctacgggggccaggggtcgacgtagccaaaatgatgacgccagggaccatcatcaccccacgtcgtccgccacgataaatacgagacaaccatgtagccctggccccacgagtacgtgtggatccacccatgtaaaacgttgtttttacccttgacttacaactcattcccaaggaagccat

SEQ ID NO: 158525 - DNA, 633 bp, Zea Mays
ctttgagttgtttatctccaaaacacttgtactcgagtatatcattaatgactccataataattagtcaccttcccttcattattgacagctctagttacaactccagaatttgtcgtggctgctagaggatgatcatcttcgaaccttgtagaacggaatctaaaaccattgacatcataccgaccataacgtctagcagttactgctcctagggataattgtcgaaggtccgggtgtatattgtcatttttatctacataatctcgaaaccaacacaagaaattaggtcccccaacttttccctctcgacgaatctagtcacgttcatagccagagatgcaattttgagaatcaaattcactgttagtacaaggaaacaaaccatttagtataacaacaaaaattgtagaggcaatgactaaaattaagtttacacttacaggagaaactgactcatctcttccatgttgttatacatgtagagtaaagcagtcttccattcgtcattggtgaaacagtatgttgtgtcgggtcctacagttttgcccctccattgaaaaatttcaatatcactgatagggggctcgtcgacatgataccgcaacgcaggggcattgacattgtgttcctc

SEQ ID NO: 158526 - DNA, 862 bp, Zea Mays
agcatgttgcaccgtcttaagtcatcgccgacttaagtcgattgctccgttagtagggtatagtggtcaccccgatttgagcaagaacgcaaaatgaagaattctcgaagcctttttattgatgatgtgtttcctggtttacagaatacattgtcgccccaatagcttttgaaatatagctaaggataaaacttcctgagatgttctatgttccatgagttcccgacttctgtgccatccatctgtgtgagtcgatatgatccaggccgagtgacttcagctactatgaatggtccttcccatagaggtgacaatttgtgccgcccctcccccgttagaattcggcggaggacgagatctcccactgcgaaggatcgatgtcgtatggccttatcgtgatagcgcttcagagtttgctgataccgtgctgattgaatcaccgtgtttagtcgttcttcttcgagtacatcgacatcctccagcctagtagcctcagcttctgctatgttttcaaagatcaaccttggtgccccaaacttgagatcagcaggtagcactgcctctgaaccatagaccataaagaaaggagtgtttccatgcagggctctactaggttgagttctcaggctccaaacaacgtacgacaattccctgatccactttcctgcgatttttcatttttgtcgaaaactttctttctgagcgcctctaatatcatcctgttggctctttctacctgcctgttggctcttgggtgtgccacagaggcatatttgatctgaatgcccttttgctcgcagaagtcgaagaactctgaacttgtgaagttggatcccaggtcggtgatgatgttgtttggtat

SEQ ID NO: 158527 - DNA, 685 bp, Zea Mays
acaaaatgaacaccgtcaaaccactccaactatattctttaaaactgtgcagaagtccccgctgccgaaggaccctcagcgctgccatccttgagcgacgactgctcttccgctcccatctccaccttggcgtccttttgggccaccgagctttctaggccagcgaggtcctccacttcttcatccatcatcgcctgcaaagacatcacaacaacgcttcagacagtgaacacacacacatcaccctcgctaaagacacaaacgtacttgtgcaagtgctcggttcgccctctcccgaatgacaccgcgaccgtgaggaccccacatcctgtcataaagcgctccagtagagcgctttagcatgtcgtcttcgacctattatacagtagcatcgaagtcctcgttgctccgatcgaaggcctcgaaatgcctacatccctcgtgggacaaggcattcgcagcccctcacatgacatgagtgacacataggacataaggcccgtcacgatggacgggagcgacactaactcctcttgtagccatcgaaggaagcaggtccccacctcctcccccgacttgtcgaagggagcagtctgcacaccaaggtcacggtatgcatccacaaaaagtatgtgcgcccgatccaccccagcatgggtggccgactccgttttctcgtggtagc

SEQ ID NO: 158528 - DNA, 295 bp, Zea Mays
gcgaatgccaccaccaccaatagtccaacaatagaccgattcatccttagttggttgttaagtttaaagttcacctttgtaacttattgctgctctgctcgatttcgcacatgttctcgtcttggattgtacactgacattgtgctctgctcacaagaaaatcgatgaaagttgaaaccctattccagatttccaactatacatttagtacgacttggggccacacactgtaatttggccaacaagttattagccaattacaaattgcattgcacattcgtcatgtatttcttat

SEQ ID NO: 158529 - DNA, 504 bp, Zea Mays
actccgacctagaggtcgaggtcatggtgcctttaacctctgctttccttcaccgccatcgacctcgagatctaatgtattcacaggttcccactagcatgacttgtgcgaaagggtagtcgacatcgatgcgggcgtggtgatcttatgtacggctttcgtcctcgaggtgactagcctgtggcgagcaatcttcgctctatcggtgttgcgtatgaggggggtgcgaggctcccctgcgtcgtggcccgcaccagccatgtgggggacccaagatctttgattatgtttgggttcgcgcccacaaataggatttgtttggttccagacgaagtcacccgatggttggtttgaggtctggttcggtcttcgtctcaacaccagcgaatagtgacgtgtaaattcttccaaagaaaacatgaccacacgcctatccatgcaagtatacaaacgaacagagtttcagaggcctcctgtttcaacaacacgtgcacgagatcagaa

SEQ ID NO: 158530 - DNA, 482 bp, Zea Mays
gcttactcctgaagccatcattaagatgggaatctatatttaggccatgaggagccaaggagtagaacccaatgcaaaatgcttctgcaatatgcatgaattcgtaacccgttctgaagtaagcaactttggttgctatggcttcgtaacccgttctgaagtaagcaatccagtgccaacgtttcgtaagagatggccaggggcctagatgcaggaatggttttatgtgaagaatgatctggttaaaagggaagacatcaagggattatccaacgtcccatatggtctcacttcggcattagaagaccatcccttgcccttggaaacgatttgcaagcatgtcaagctgcttttaacacgatatgcacctacataggcaccagggacttagtccaggaccatattgcttacaaagtgtggccactcggaagtgggtgggagatgccgaaggaggctgctgctgggtctagcaaagatggcct

SEQ ID NO: 158531 - DNA, 495 bp, Zea Mays
gcgcgggaaggtgcactccggtgaatcctcttgcggctatatatggcgacggtgctccctctttttcccctcctctcgttgctcgttcttcttccaccccctcccccctcgtgagagaccggcggcgagcggctgtgcgtcgcggctgtgtccagcttcgcctggtgccgggactccgtggtgttgggcatctgctttgtcgcttcgtctctggtcgatctgcttcctatacttctagtctgctccgtctccattactacgaccttgaccccaaggtgaaatcaacccccaatcgttgtattttctggttcatgcttcatgagttagggtttggtacagtgtgttgttcatgttatacctgctgcgattttgattttcatgtggtttgctttggatttatattaaaatggttgatgatgttgtcctttacgttcacttggaggtatcatatagatgatgcagccatgttctttttccttactgattcattttgca

SEQ ID NO: 158532 - DNA, 1013 bp, Zea Mays
gttgtattatgtaatggcttgatgtaatgaataaaataactagttaaaaaaaatggcatgtgcatgatagtgactctcttcccatggcagatggcttcggataaaaccacgcctaccgcctccgggattggagcaggttttcccctaggagcagcaggagaagctggcggagaaggggatgggacccacctccctgcacctccggaactaccactagatctggcccaagttctagccaatcaaacccgactcattgaagtcctcactagaagtctagaaaaccagcgcccaggtggtggaaggccacaggacaggatgggagaatttttgagactaaagcctcccacgttcgcggggtccagcaatcccctcgatgcagatgactggcttcgcacgatcaagaggaagctggaagccatcggatgccctgaaaatcagcgtgtccaactggcagctcatcagctttcaggaatggctttagcatggtgggacaccttcagtgaggccgtcagagatgctacctgggcagaattcgaaacagccttccgtgagcaccatgtaccccaggggatagttcaactcaaggaggatgaattccgggagctaactcaaggcgggagaacagtcaatgagtatgtgcacaagttcacagagttggcccgttacgcgcctgacgatgtcagcaccgagtccaggaagatggcacgtttcctgaaaggactaaaacccgagcttaagaccatcctcgctagccaagacttcctcaacttttcccacctctccaacaaagctatccaagtggaaagggcaaaagaggaagaaaaagggcacctcaagaggaaattccaagttctccgagctcaacagcaagagcgtcaccagagagctcgaccctttgggcttccaccaaggggatcaagcttcaataaatcatctggacccactccatcacgctatagtcagcagagtcagagctcccttcaagcacccttcgttgcaagcaaccaaccgct

SEQ ID NO: 158533 - DNA, 448 bp, Zea Mays
tccaagggcattgaacgtcgcctgaggagggagcgggtattcaatctatttttgagcaataaccagaaaaacactttgtgtttaggttgacatttagatttccataaccaagagaagagagggtgcgactgctgggtgccaatcaagtgagcatataccttctgagataaaaacagattggaagagccactgcaacgccaaatatcattgtgatcatgcaattggagattagcaagaatgtcctgaaatgaaagtagctgcccaaacgcttcagcagataggggaatgtgaaacaattcattcggggaagccaaccgagcttgataaatgttaatctccctgacatatgcaaaagaccaaagctccgggaatctttcagatgtgcgctgcccattccatcgatcatgccagaggagagtagttttcccatttccaacctccactcggg

SEQ ID NO: 158534 - DNA, 1015 bp, Zea Mays
ggagattttgcagaaacgtcctcggggttttggctaactgggaacgggttcttttactatttcattgagtcactgatggtttgcacataaaccctccatattctatttcttcgcagagggaggcccacgacgatgatgagcgcggtggagctccggcgagctagcagaccggcctaacggggcaacgactggtgttcccgagcggcggacaccaaatcagacctactccgagcatttcccctaagttaatcgcacggttggtgacctactccgccctgcccacgagaacagcgaaggctaaggacttttgcttgtgttcccgacaatgggtggcggcctaattcaattggacgggttggagagcatcaccagcatacagagacacgagaacaatgcacgaattggatggtgccttaccagaacggactggccacggtggagttgtgttttgcggtggcggagaccaatttgggggaaaaggggaattctccggctatggtgggcaattgaggggaagaacgggtgtgtcggctacatgatgacctagcgcagcagtcccggccttcaatttatagggagcttcgacggtagcgtgcaatttggccgagcaacacaggcggccagagataaggaagaataccagcgcagtgaatacgtgttcaacgccgtggcagctattccggtgagcaacggggagctaaagtgaatcgtggcggtgcggtggcgagggtcggacacgcggcgtaaggccgagaggcggtgatcaccggcgtgtacggtacggtggccggatttgtttatggtcggagtttatccccggcgacgtacactgggtgttatccactcaccccgagcacaaagtggaccggcggtcgcacgaatcgcggcggcaatcgatccccgacggtaaagtggctgcgctggcgtcctgatccgcacgagtattgtaccatggcgaattcagtcagatgaacctgacagagcatcttggacctcgatttactcctgattttgt

SEQ ID NO: 158535 - DNA, 379 bp, Zea Mays
attttataattgaaatcaagtcgcatgaatttatacggtattaaccacatacactagagggagcatacaaaatttagttagtcttataccttacgacaggcgacgagcagagcgaggatggagcagggaacgggcgattgcggggtcgttgggtgagctcgagcgcagcgatgatgaactgtgacgacgtcatggcttcgcgaataatgctccggtgtgggaaattcacgaatagcagggcaccatggtgaggagtctccgacgagtagcgcgtgagcaaggagcaacaacgccgattagagacacgctgcggcgaacccggaacagggcgagctggccgcaggggcggatctcctggcgacgacgacggacgacaatg

SEQ ID NO: 158536 - DNA, 420 bp, Zea Mays
gggagctgctcggctcacttaatttcttgccggaccaacggagaaggagagggaggaggaggaaaggactcaccggagaggaggacgacgccggcgcttcgcgaattgtgctcgggggaggggaggagatggatggtcgaggctggtgcgaggaagaaggagctcggggcgagccttttataggcgcgcgagggaaggggggcggtggagcttcttggctccggcgagctacatagtggcgccattaatgctgcacagcgccgccgaggggacaccacggcggggcggtaccggcgaggacgctggtcaaggggaggggaggacagagcggtgccaaacttccctgtgcggcgagaagacggaggggaggacggaggcgacgaccggaggtgactgcggtgaagggacggcggaaggacg

SEQ ID NO: 158537 - DNA, 292 bp, Zea Mays
ctcttataaacgactgtatgcgtttggatccgttggatccatgttctgtggcacggattaaaacagacgaagagctttatttgatataatccacgcctatcgattgggatctgacgaccgggattttaaaatcgccataccaaatcccaaccacccatttcgatcatgacagtctggttctaatggcgaagtggtatgaattctaagccacaagatcaccagtctatggttcggattgaatcaagcgaaggatataagggatctaatctcgcccttctgtgattcatccgac

SEQ ID NO: 158538 - DNA, 480 bp, Zea Mays
agcggaggtgtccttgtgcgtcgggcgcttggaattgacccaattccacgccggtgagctaccagacttgcggatccaccgcttgccgtcgccgtgatagtctacgaggaattgaggagtaagtacccatccatccagttcgtctagcatagagcattgtgtagcaccgatcgaattgaagtttggtgcgtcatgccagagatctgcgcggtccggctatggcaccaccgcgtcgaacttccgcgccgcccggttgggtcggtcgtgggagggaagggagttttccaccatccgatctcgaacgggtggcctacattagatagctcaccgcttcacctatttatgaccagggccattcgatcacattggatggctggtgttgggccgtggcgtggatgcatgttaacccttggatctggatccaaggatcgacatagtgtaacggttcgggctagcgagatttaatcctgactgtccctg

SEQ ID NO: 158539 - DNA, 367 bp, Zea Mays
gaagaaaagcgatttaccggcacttacgcacagacagatctgtcaggtgagctgagcgacagttcaatcgttcatgagaattgtcctcatcaatccatcccaacaacgccttgttattttcctttatttttttctaggcttgtttagatccaagaacttgcggcaacgaaaaaatcgcaaggtttacccactcgttctgttttttctgtcagaaatcgatttgctccccctgtcgttgttgctaccgccaccttgagatcctgacccaccacccatctgctccacttcctcctcgtaggtagagagcaacacatacatgtgcgtaagtacaacaatggctcagccttcagacgtttatgcagctccg

SEQ ID NO: 158540 - DNA, 844 bp, Zea Mays
gaacatatagcattcagagtatggccgcttgtagagaactgggaaatgtcgaaggagactgtcaccgagtctagcgaaggtgacctcgttcgactgaaatatacattcagatatggagataaatttgatgagccaaatgacgactggctgaaatgcatcgaagctacaagtgatgaactgcttgggccatattccaaagtagaagataatgcattatccacatccttcgggggctggggaaaaaggagattgaacagagtttttgaagccattggttttgtttaccccgactactgttacccgctgcgaggacggggaaagaagaggaaaactgctgtttcggccaaaactgctgcttcggctactccagatgaggctgcaccgagaagcaaaaagttgaaagtccttacccaccggccacactatattgagccggccgtggtacctgagtttggcggggagacttcttcagctgctgaaccaaaagagcccattcctcctacggagaaggctgaagagccagctacaatgccgaaggaagctttggttgaactagctaagtcgaagactgaggaagataaagctgaaaagccaaatattgaagaaacaaaaacattagaaattttaagcccttcatcggaagtaacagtgctgaaggcacaaaaaagttctgccgcaactcctaagaggagaaggatgacaaatgtactagatgtgctagaaacagtaaagactttgaactcgactacttcaaagaaaattgccgaagcctcgaaggcgcaaactgaagttgaaacagagcaggccgaaattgaaactgcagtaattcaagctggtgccaaag

SEQ ID NO: 158541 - DNA, 474 bp, Zea Mays
ttcaacccaggttaccaacagaaggattcctgttgtggatctggtaagccggcttgagatgattcttagaggcaaggtgtcaaatatcggtgctcctattgcatacttagcctggaatctgcctccttccaaggctttcatcaattttgtgtcaaatcctcctgctggtgacagtggtttgggccttagagtgcgaccttctcccgaagcggttgaggctttggttgcttctcttggtgaaatcctcgatgacgagaggcaggttcattttgagatacctttgaatccaagtgacgcggaaataagttccatgctggacatgttggctgaggattcctctgattcggtccctgctgaaacactagtcgtagcacccatcctcgagtctggaaaaactttggacattcaacgatctgatagtattcgcccgaagtgtcctcgccgaaccaatcatccaacttctcctgctgaggg

SEQ ID NO: 158542 - DNA, 1061 bp, Zea Mays
ggcatcctgaactgatgtctgcaaatgagagagagtgactaagcacagagcgaaaatgtccgatagattagcaaaggatgagatgactacctggaatgctcacacgagaggtgacgatccaggcaggacgggagacggcacacgggcaatcaaggtcattgaaatgacagaagaggtgagcacatattagtcacatagtcataagtatatgaaatgtgaataaatacatacacagagagagatatggcacagaaaacacgagacgagacgatcgaaaggtcaaacggcgtgaaaaacgacgtttgaacgataaatagtgccataggaggtttggaattcgaattgaggcacaaaacgacatggaattgagccgatacttcacgaataggtttatataggtgaatatgagtgaagtgtgtgcttggtttgaatttaggcgaagaaaaagagattagggcactcggctcggaaacgatcgctcgaaacggggaatttggtgaaatttaagcctggaatctcggattggcgtgaaatttggcaagagtgttactggaagtgttgtgaaggtgcctgaaaaatttgggttcaattggagcatttttggctggtttgggcatttcaccgagcacatgacgtgcggagatctagggtttcggtgaaacggttatttgaggtgggaaaaccctcccgaaggagctagaaacctgcagggatgctcaatacacacagagacacacatactacaacatggatgcacaaaatttcacaggatttggagtttgggcaaaatgggtggaaatgggagcctctgctcaccagaacagagagggaggagaactgagggagagatggatgggctgctcaccgagagggatgaagagaagcacaaggtcgccgtgggatcgccgccggtgaagagatggacgccggcgaggggaggaatcgccagggacagagagaaatcactggcagggagaagaagtgagcctctggctcggtctcgggctggaggcctttttttaaaacgcgatatgggcgcaccggacagtctacagtgcctg

SEQ ID NO: 158543 - DNA, 702 bp, Zea Mays
aacgtcgagagtcggggcagccagcccaatccgcatcggaatacgcggtgagggactggacagggccgactccaaggtggaggccggaggagagagtgcccttcaaatagcgcaggatccgcttgagcagcgccaggtggggctcgcgcgagtcgtgcatgaagagacacccctgctgaacggcgtaggccaagtctgggcgggtcagggtgatgtactggagagcgtcggcgatgctcctgtacatggatggatcagcaatgggggcaccatcagtggcggagagcttggcgtgagtgtcgacaagggtcgatgtagagtgacactcagccatgccagcgcgctggagaagctcgacggtgtactgtcgctgagacaggaagatctcgtcggaggagcacgtgacggagatgttgaggaagtgatggaggtccccaaggtctgtcatggcgaattccgagtgaagaaggatgatgaagcgctgaagaagatccgtcgaagaggcggtgaggatgatgtcgtcgacgtagaggagtaggtaggcgagactctcaccctctttgtagacaaagagggagacgtcggaggaggcggtgaacccgagctggcggatgtacgtggcgaaccgctggtaccatgccctgggagcctgctttaagccataaagagagcgctgcagaagacaaacatggtcaggagcag

SEQ ID NO: 158544 - DNA, 521 bp, Zea Mays
gcgtacgcagccaacgagcgtctctgcggagcctggctcgcctgtcttttctgcataccgggcgcctgtatcagttcattcaataaccaaacaaaatgtgctttaaagttccgcggatgcagctgcaccatctcaacagtgaaccaaacatgcggataatgcacacctatatacgtacacacacatgacacatgccattcgtctgtgaactgtgtgagatcccagctgccgatggacggcgcggcgtacagcgcacgagtaggagtagtaataataggtcgacacacgtggccgcagggcactagttcatgttggatggcaatggcaaccagagatggttgggattcgagagcacgaggcttgtacatacagcatccatgcatcacctgcatgcatacccgcggccgtctgctggcacgagctagctgcgttttgcatgatgatgcatggtgcgagaactgcagctagctgggagcaacgtacccagaggtaaaagtactccttgcctttgcatactttgg

SEQ ID NO: 158545 - DNA, 349 bp, Zea Mays
ccctaaccgcgtggagaacagccccaaggatatctcgtgagcagttgaggtggtgttctcggagacaacgtcatcaggcccagacctcctcaagaaggcgtaggacccctgtgcgcacaacccggacccccgaagtaaagcagcccggagccattggatggagttcggaccccaccaagtaagctccagaccacccataacaaggtcccgggggaggaagtgtcgtggcctaggcatgggtccggtgttgacgcgtgtccggactctatctggtgcgcctccgctccccgctcggccgagggcccaatgctgccacatggcttattgcctgtgacataggccagcgggc

SEQ ID NO: 158546 - DNA, 466 bp, Zea Mays
tgagttcttcagaaaattaagtcataaccattgttagattaatgtgccactgtatgctgatttaataatacttcgccatctgctgacctttcagcaaacgttttgtgtggtactcattactaatgatggccctctgcaaacttgccacatacgcctttcaaaaataagaaggataggtggccatctttttcatttacaaaggtcaccagacagcatttacaattccaatagtttcggatcataacagtaagacaatttgaggtacggtcaaccacagttgagatggaactaagggaccaaaaaaagttcagtcaatagaccaactttcagaggttagcatatagaacaggacttgaaagtgaaaagaacttttatcatagtatgtgttcaccaccacctctaatacacatttggttgtcttgattgtgaaaagaacttttatcatagtgtgtgctcagttgctcac

SEQ ID NO: 158547 - DNA, 325 bp, Zea Mays
tcccaactgaagaaatgtgttcgattgccgatcgagatcatagcagaaccagaagtggagatagagccagatctatcgtaccaagagtacccttccaaggttctagattgcaaagaaagatcaactcgggctaaatccattaaaatgtataagatccaatggagtaatcactcagaggaagaggctacttgggagactgaggaatttctacgttcgaacttccccgattgtctacctaagggaattggtacgtaaccatgcccaaccccttcccttgtcctttgaatctaaatataagaaaaaatgatcttaacataaaaggagt

SEQ ID NO: 158548 - DNA, 572 bp, Zea Mays
gccagttctagagaatgggctctcgctccctgggtggtccagagctatgtaggcccttagcttggttccgtaccctaatcctgcacgccccaccactctgggatgagcaccctagtatttagaactatattcctgtgggtccgacaacctagagtccggttctagagaatggacacatgtctcctagggtggtctggatctatgtagtcgcttagcatggtcctataccctaagcctgcacgctccaccactctgcgacgggtgtcctagtatttggaactgtgattcaaggggtccgggcatacggcttggcctcccagactaaatcctgcaggtcctgttgcatgaatcaaaggatggcatataccagacgatgggtcctatgggtatgctactaacacttcctagccgaagctgtgtacaggtccaggtccaggtcccagtcgagactacctcctcggggctgggtcaccaactctttcttaggtatactggtatccagcctcgacatgtcgagcctacatcccagggggaccaagtaccagggagaagttggtaacgccacacacagc

SEQ ID NO: 158549 - DNA, 1255 bp, Zea Mays
actaagtctaatttcagtatgttgggctcaactttggagccctgtatcttttgaaatatagggtttttgcccaaagtaaccacaacaagtttgtagcccaattataggagaacaactttgtttaaggattcaagccatgttcttatgaaaaatgtggagaaaatctcaacccaagttggactgtcaggctggttctgtctgaacatcagactaacagattcatgccctggacttcaagcccaatttcaaaccagatgcagtggctttttggggcaacatcatatggcaatattgtagatggcatattgctctacaactttgctgcagagcttggtatgagttatcatcagaaatcaagagaaaacttggcttcaaatttggctgtcaggttcatttaactgaactcctgatggtacagtgcccaccggatcagaccgccagcgcggctgtcttcaccgccgacgaccgatcttcgccgtgattcacgccaccgctgtaggattcgcgtcgccgatgacccgataagaccgccaggtaaaagccaccccctggggataactccggtgactcaccgtgactgcctttctgctttgcggctgtagccgataagctcaccgccgaccgccgcctctcggtcgtgtgccacgtggctcaactcttccaccgtgtcgccgtgacccgctactgctgtcaaatcggcgccggtgagcttgccacggcgttagccacgaattcaccgcgccgccttcttcctcagctccggccgccaacacggctcggccgaattgatcaccaccgcccgtcctccctataaattgagctcgtgactaactccgtgaggtcgtcagctaactagccaccactaatcagccacaatcatctaccagcgagcttgaatttccaatttcccccaacttcgttctccgccaccgtgaaacgagcctcaccgcggccaacccaatttaggtcagttcatgtttctctgttgcttgttctaacattctcatgtgcccttgatgctctccaaaccatccaattgaactagaccgccatgaatcgacgggaacacattcatctgcccgcaaggtccacggtcactgcggccagagcaaacctaataaccatccttgcaattgatttgggggaaatgctcggggtagtactgatttcatgtccgccgctcggagaacccagccatagccccaatcggccggtccagaacctcgccggagcgtccctgcgcccaccgccgtcg

SEQ ID NO: 158550 - DNA, 466 bp, Zea Mays
caccaccgtcgacccgaggcgtacctgcatctccgccgttgctccgggactacagtgtttcctctcgaggtgagcaacctccccgcgcccctatttctctgtttattgccctagtcttcgcgcgattgctcgccgaagtagattcgcgccgccgtgggaccatcccgccgcattctgcgccctctggtgcctccgcgctggcgttgtgcccaaggtcgtggtcgctagattgccttgaatgcgaccgagtccttccccaagtacctagagccctgccgtggccgttcccctcgtctctggtgagatcccgccgtgaggtcgagcggcgctgccgcaccaaggacccgccatcccgaccacgctggccgatggatctcggacgttcacccgagatctcgtggttaggatttaattagcaccaatctaatatcgaccgtctgatgcaaatccagtcgttcagatccgc

SEQ ID NO: 158551 - DNA, 507 bp, Zea Mays
cggcgagggtgcttttgcggcggcggaaaactgatttggggagaatttgaaattcgcgggcgctggtgaatgatcgagggtgggagcgggtgctatggattcgggatgatctagcgtagttgcccaggccttcaatttatagggctcgcaagcggtggccggtgaatcgggcgggacgcgcggcggccagaggaagaagaaagcactggcgcaaacgctaggtggcttctaccgtggcggtatctccgacgatcaccggacgctcctagcgtaactatccgcgacgtggtaaagcgcccggacacacggcgcaagacccagcgacggcggctcaccggcgttcttatcggtcccagctgcaagccagaggggaagtacagcgggtcatcagagtggcgtccagcgcacggggaaagacgatctttttaccccacggcgctatccaaccagccaggcacgaatcccgacgccggtgacacgaatcgcagcggagggagccgtcggcgg

SEQ ID NO: 158552 - DNA, 387 bp, Zea Mays
taaagtggagcagaatgatggtctgtgggtaagtgtaaaagcgtcgagacaaggaacatcaagtaattcccctcccagactacctcatatgatcaaattaaaagagaaagcaagaagtttatactttattccttatgtacacatccaatgtattttttagtaggctgcccattttttccaaacaaaagtatgtacacatccaatgtttctagtagaaaacaagttatttagcgagaggctataatatactacaataaaaaacatgggtcaatcatttggtcctaacagatggggcaatcatttggtcctaacgcacgggcaaaaatcagtgtaatttcacaacagattgttgttagggagtccacacaccttatgggaggagagtag

SEQ ID NO: 158553 - DNA, 530 bp, Zea Mays
tccaccacttggagagagattgcaacttggccacagatgcgctatccaagctaggttcaagctgggctcaagcaccaccatatgtctttgtccaggaggtatagcaacccagcatctcactaggcctcatagaagaatgcaaggcaatagaacaaatggcaccacctgcagaacaagacctgggcaactgaaggacaccaagcatcaaatacatcagaaatgaagaacccacctgatgacaaagtagtactgagcatgtcgctacatagtcagcccattacacagtcataggtgagaccttgtacaagagaggagaggagccacgggtattttcatgaagtgcatcgacacaaacgctggcaagcacttattggaagaaatccatgctgggcaatgcgaagttcatgcagtgtcaagaacattagtggaaaagcgttcagggcaggtttctattggccaacagctaagaaggatgcatccaacctagtctagaaatatgaagtatgtcagttcttagccaagcaatagca

SEQ ID NO: 158554 - DNA, 697 bp, Zea Mays
gggcagtccttgatgaaatgtccagactttccacagttgaagcacccactggaagtactgggaagggcagggtaacgaataccaggggcactcgactgattggtaggagcaggggcagtagtgggacgaataaagacaggctgcttgaatggatatgacggtgggcgaggcaaggaatgattttgatttataggtcagatcaccaacctggttctcttttcaggcccttgatttgacctctcacccgcataaccctttgattttccatgtcccatatttttagcttcaactgccagtgtcgtactaacagctctgctataggtaaggtccagacatgttgccatttttcgctggagcctgtcgttcaatcccctcaaaaagtaattctttttcatcaagtcagtatccacctggtcaatagcatattgagagaggtggttgaattttttaagatactgcatcatcgtttctcctccttgcctcaaccggataaactcttctagcttcatctagtgcacttcctctagaacataatgttcccggaatgccaacttaaattcttcccaggtaacctaatgcccaacaggctgaattgctaaaaaatttgcccaccaggtattggcaggccctcttagctactgagttgcgaataggggcttttgcgtcttcatgcatcgaattaacccaaacttctgtt

SEQ ID NO: 158555 - DNA, 385 bp, Zea Mays
ggcgcgcgcacgtacggttggagaagctagctagcagggcgcgcggttggagaagctagctagcagggcgcgcgcggttggaggatggctggtggccgacagcagggcgcgcgggcgatggctggtggccgaccggagcaaactcacgcgcggctgcggggacagctggaatatttgggcggcggcggctggtattacgggaaaggagagatagggttttggatggcggcagctggtatttgggccaccaattttgcgcgccagtacaggacacaccgatgccgcaaattgcacagtgctttttatggcgactgacagtgccatgctataggtatgaattatcgactgacaaagcgatactatttacatatgaatataacgacta

SEQ ID NO: 158556 - DNA, 644 bp, Zea Mays
cccctcgatcaattgcatgatctgaactcttaatcacactgtccacggtgacagcgcgaactacggatgaacagaggtgttcccgatgatctagcgctgtctagcttaattgaacgggtcgaggagcattaggagaacataagggtactgaaacgggagagcagagggcatgaacggacctgtagcatgctgggcacggcgagctcacgcagtgcggtgctctagaccaaattggggagagtttcaaaatgaggctctctggtgagtaattggaggcacgagtgagtgtgttgggtgcataattacatagcggagccgagggtgtgctcaatttataggacttggggacggtggctcgtgatttggagttggcacggtggcggtcggagagggaagaggttactggcgcaagcaattcatggcgttcaccgtggcaagctcattggcgatgaatgtgtgggctaaggtgactcactgcgacgtggttaaagcaccaaagcacgtggcgcaaggttgagaggtggctaactctggtgagtctattcgaagcggccgtgactcaggcgagtacggtagccggagcagaacagtggcctgagttcacccacgacgcgatatttcttacccttaagagttatctgcac

SEQ ID NO: 158557 - DNA, 663 bp, Zea Mays
gctgtgtccgcctcattgggatatctcaggtattcatcttcaaaaatatcaacaactgcagcaacaaacctacgtaggctctcaagtgcagtactttcggcaatgcgaacgtactcatctgttaaatcagctggaaccccataagtgagcatacgaaatgcagcagtgactttctggaagcaactcaatccaagtacattggctgcattccttttttgcacaaagtaatcatcgtgtgcttcaacagcattcattatgcgtaggaaaaggtctctcttcatcctatatctaaaccaaaaaaataataaccttcaacacatataatacatatagtaaggagctaatcaaaggttaataaacaccaaccttcgacgaaataaatgtggaccgtatgtcggattagccgccaaataatcttgaaacatcctttgatgcccgtcttgtcgatctcgataaataacaacatgtccaggaacagaaccaccaggttttcttttgtgaccagaaaaggtttgcacaattccagcagctgcgatgatgaaataatcatcgtcattgcaagatgaattgtcgtccagttccatttgcaaaagtgatttgaaaccaatcatgatgtcgattcctaggaatgaaaattgtgcaagatcagacaatttatcccgg

SEQ ID NO: 158558 - DNA, 548 bp, Zea Mays
agggtatagtggtcaccctaagttaagtaagcgtgagcatgttgcaccatcttaagtcactgcctacttaagtcgattgctccgttagtagggtatagtggtcaccctaagttaagtaagcatgagcatgttgcaccatcttaagtcatagccgacttaagccgattgctccgttagtagggtatagtggtcaccctaagttagtaagcgtgagcatgttgcaccgtcttaagtcactgccgacttaagccgattgctccgttagtagggtatagtggtcaccctaagttaagtaagcatgagcatgttgcaccgtcttaagtcactgccgacttaagctgattgctccgttagtagggtatagtggtcaccctaagtcgagtaagtatgcagattgataataaatagttcgagtgcctttgagaatgaagtctttttattgatgatgtattttccgattacagaatacaatgttgccccgatatcctttgaaatctggctaggggtaaaacttcctgagatgctctatattccatgaattccctatt

SEQ ID NO: 158559 - DNA, 463 bp, Zea Mays
cggtgagacttatttctttgtgctcgtgatcatcaaggctccgtgtagcaacgttcgaattgaagattcgtctgggttatggattttggggggggggggatcggccatggccgccgccgtggtctgtgggcagaatgccgccgctacctgggatccgcccgctcgatgtgtggcgccgccgggtgtgcgtctcggctggagaagagagccagtgtgccgtcgatttagaaacgaggggccaggattgaatatgagatctattcgggcgtgatgtaacctggacggttggattgagatcgtaaggctcatgttagatcgtagctatctgaatccgtgccgtagatacctaatccagcgctcgatatcgcgtaccggttcaatggaatgtggatctaatctaggtcgtaggaatcagatcggacggctagccttgcgcgataacgattcgccgtggcgactttgc

SEQ ID NO: 158560 - DNA, 486 bp, Zea Mays
ggtaaaggccttggaaggaggcagattccaagccgagtatgcaacaggagcgccgacgttcgacaccttgcctctgagtatcatctcgagccggcccaccatgtccacgacaggaattcttctgttggttacccgagtcgaatcagcaaagcctcgatacagataggctggatatgctctgtctttcaatggttggatgttcttgaaaacaaagtcagcgaccacagcttctgcagtcagacccctttctttcagcaatccaacttcagctagcaaagcccctgcttcagttacttcctggtctgtgggggattcggtccagctcggagtgcgaacatccggctgtcttcctgaccgtggggggagagaattcccatgattcaccacgatgaaccattccagacgccatcccttgatgctatccttgagcgggatgtcgaggtaatcagccttcctcccacggcgcatctccaagctcgtgccccc

SEQ ID NO: 158561 - DNA, 1111 bp, Zea Mays
ccgaggtccacgacggcgctccgcacggcagagctccggcgagcatctgcactggccgattaaggcgacgaccggcgctcccgagcggcggacatcacatcggacctaccccgagtgtttcccctaacctaattgcacaaatggcgagctatcaagctctgtccgcgtgaaccgaatgggtggcggacagttgagtgcgttcccggtgattggtgagcccgcagtccaaattggtggttcggcaagcatcgtagacatgtgagaaagcttaaacgagggagagggagggttggactgaccgggaagggagctggccgcgttgaggtcggtttcgggtggcggaaactcgaattgggggaaatgagcgattctccggctatgggggctaattggaagcgggagtggtggctatggcttcggtatgacctaacgcagctggccgggggctcaatttataggcagagcaagcggtggccgcgaattttggatgagacacacggcggtcggcagtgaggaagaacggtggtgcagtgaacacgtgttcaccgccgtggcagtaactccggtggtcgacggggagtttagagggggtcacggcgatgcgatggcgcggttaggacacgcggtggccaacggcgatggcacgacgacggtgagcactttacccgcgggcggtgagccaggggagatgaactacggctagccggagtggctcccaggtcactggcggcgatgatcttttgaccccgcgacattatcaacttaccccgagcgtgaatcatgacgccgacgacgcgaatcacggtgggggggtcaccggcggtgagcaagccgcactggcgttctgatcctatcaggctactgtaccatggtgaacaccccatcagagcacctgacagccagagttgagggtcgattttctccaaaattcctgtggtaacacaagttaatctttgcagcaaacttgtagagcattataccaactacaaacttgctatggcaaccataggtagatttccactggatcatgcttagaatttagcttgaagtcgatgctagtccactgctagtctgaaaattcagaccataacagcctgacagtccaacttta

SEQ ID NO: 158562 - DNA, 412 bp, Zea Mays
gaggagctgatgaattagaaaatggaggtcgggatggccggaattgtcgcgcgccggtggagagccgccccgggcaggtcgtgcgccgtcgtcgtctatctcgtttgggggagatgcacttcggccgttgattgttctctggacggctgagattagaaacaacgcataccgcttcgatggattgatctgggctgttggaatgggatcaggcgatcctgggttgccgcgggttattaaaaatttggatcgcaggatcgcgatccaagcgcgggcgtagcgtaccggttcatttaatggccagtctaatctgcgccctcgactttggatctgacgatcagaaaacccccataccctttcgcatagctcatcttgcaaaagagtccttgtagtattgatgaataaaccctccgtc

SEQ ID NO: 158563 - DNA, 561 bp, Zea Mays
tccatgaattcttctatcactgacatgctttctgttgctagattaaacaccattggatcattggcgggtggctgagcctgacaagagactgattttccttggtggtccgtgagaaggactgtcttgtttgcgcaacttatgatgcctttgtgcttggttagccaatccattcctaagatcacatccattccttgggatggcaagacggttaagtctgctaagaacactaccccacttaaaagaattctgacctaggagcatttgagctggcatagaaggtctgaccctggggttcgggtgaccaagggaatttctaggtgggtagagggaatgccatgcttttccacaaaactagtggctataaaagaatgggatgctcctgaatcaaaaagtatagtagcgggagtaaattcaacgaggaaatcaccgagcactactcccggagcttgctgagcctcctaagcatcgacgtggtttactcgtgcccttccttgatgctgggtcctgttctgctggttgatggaggagggcgccttgggggcgggtgctgaggtattcttg

SEQ ID NO: 158564 - DNA, 1491 bp, Zea Mays
ggccgggctggcggccgcgcggcgggaggccggcgtcgaggacacgtactgggtgccgccgcccgggtggaagcccggagaccccgtgtcgccggaggcccgcacgctcgaggtgcagaagcaggtggaggtgctcgccggggagcttgccgtcgtaaagaggtctcctttcccgtcttctacgtcccttgttgtagccttatggattgcaactcctccttgcaattgtcatgagtttcgatgatactctgattagattcttgaatgcatcaagtgccaatacttgtttctttgctgaagttgacttgtgatttctacgaacttaaggcaaatggagcagctcgactccaatctggtgcaaatgagcaaggaagcctacatctcatggaaggtgatcatacatcataccttgttgatatgaatctcattcctgtctttcgctgttcatattttcattaaacttctagcgcagaactgaaaaatagggtatccatgtgtgacactctcacacatagctgtgactatgctctgcacctgtaaattgtaatgttgtgcacatatctagttctcgctggatattggtgtttgatttcatttggttagctacatttgtactgtgcataaaaaatggtagaacagcaccatattttgcttagctttgatccacttgttactgtcgcttctctgaagttgtgaaaccatcatttatgtgctttacttgtcacattgcttcatcatgcttaaagtagaccttttaatctgcaattctgtgcacacactggaactacacttatgcccatataatgttatgctgcaagtctgtttccatcagtacttaaagaacttgatgaagaatgaaaagttcatagtttttgttcattgtagcattttaatttaaataggtagctactctctttggtgtcaggggtatgactgtatggtcaaggccaatggcaagctggaaaaagaggtgctgtccttggaggtatgcttcacccttactgctaccaaagctattaatctaatttgatgcaagatttatctttctgactccgttacttacccactgtaccccaacttgtttgggagtaagaggtttgtggttattgaatccattagttatttgctagtttagttcagtgatggccatggcttattgtgggctctcattttcaggagaagtatgagactgcggcacaggtgaatggggagctgaaagagctgctgctgctactgaaggtacgtcgctacattcaaccaatcttcataatttgcacctcagcaaagtgacgtatctttctggtaacatgtggtacctttgtatgatgaagtgttggatctgagactctggatctgtttttcaggataagtatgatactgtgcttgagaagaatgagaaactggagggccagatggttgctctgtccacttctttccagtccatgaaggtaaactcactatttaatggcaattctgctgcacagatattta

SEQ ID NO: 158565 - DNA, 1056 bp, Zea Mays
agaaaataaaaagaaaaaggaatgaaacccttacctgggccgcagactcccatttcggcccacttggtcaatccagcgcgcgcgcagcccatctccacccgctgtgcgccactggaaacctgggcccacgggcagggtcagctccatctcgccgtgaccgcagcatgctgaccgattccgtcgtgcgggggaatccacaaggggcgctgccatccaggcccagaaaccagccacaccgcgccatggctcggagatttctcctgtgcagcgcgactccggatggtcgtgagttcgccgtgattctaggagttagttgcggaccggtgatctccgtataaggcctacgtgcagcatcgttctcggctctgaccaatttcgcgttcatccgagggttgttgagtgcgagtggggaaagcttgagctcgaggcggccgggggagaagagaagttcgtcgccgtcatcgccgtcgggtaccgagaagttgggaacgtccacaagtgtgccctgaccgtgcgttgggggcccgtcgcgtgcagggttctccgaagtgcgtgaatcctccttggcgacaccttgccagcgccgccgcggtcgctcgatgccacagccaatcaatccactgccttccttccggtgagaaaccccccctctgctagtttcggtaatccctcgtgtcggtataatttcaatccgcgcccaaaatagagctctggggccatcggaatttctcaccggaggtcggtgaaaaccgtgcgatgtggttggccccgcttcggattccgccaccgtttagccaccttccattgagttcgcccttcagtactcaacgtgtagtgcttgtcgttttggattatagctcgtttgggcggcgaattgcattctccggcgatcttgtggccgagcgggtgggcggcgccgccgtgtccagggttgggttgggggagatgatcgcccgaccgttggatctccttttgatggccggatttggtgactgcgtagcgtttcggataggagtaacgagaaccgtctgatcgggatcggatgatggtcatcac

SEQ ID NO: 158566 - DNA, 324 bp, Zea Mays
ttcaccctggcgaaaccaaaatgtaccgagatttgaagcaaaacttctggtggaagcggatgaaggttgacgtttctaagtatgtggctgcctgtgaagtatgtcagcgcgtgaaggccgagcataagtggcctgcaggtttgctgaagccattggaaattccggagtggaaatgggagcatatcaccatggattttgtggtgggcttacctcgttctcctcggggcagggatgctatatgggtggtagtggatcgcttgactaagtctacgcattttattcccatgaagaccacaaattcagcttcagaattggttcccttgt

SEQ ID NO: 158567 - DNA, 362 bp, Zea Mays
taaaatgatgtgcgatggttttgaaacttgtttgcgggatttagaagtcatcgctgcggacttaagtcgattgcttccgttaatagggtgtagtggtcactttgtattgcgtaggtgcgagcatgttgcaccggcttaagtcgctgctgattttagccaattgctctgttggcagggcatagtggtcaccccgagttaagtaagcgcgagcatgttgcaccgccttaaatcgttgccgacttaagccaattgctccgttagcagggcatagtggtcaccccgagttaagtaagcgcgagcatgttgcactgccttaagtcgttgccgacttaagccgattgctccgttagcagggcatagtg

SEQ ID NO: 158568 - DNA, 957 bp, Zea Mays
gccccaccttgcctcgctcgggtacactgccaaatgggcccgtacgtcagtcttcgtagggcgtgcgcacgtcactgcaggttgggacccacttgtcaccccggccatcggcgcgagtgggcacgctccacgactccacgcaaccagacaataaaaacggaccctcctcccacgatccccctcgtgctcactgctcgctgccgcctacatagtgctaacagtgatctgggagggggagtgtgatcgagatgggagaaatcgccgtcgtgaccccgcatcgacccgcaccgccttgccaaacccagggagccatcgggaggacaacaggacgagattgtgcgacatctccgtggttcatactacctggcgtgcgcccgaaatcgctcgccggtgtgttttcgccacggcgttgctcatttggtggttccacgctaccactcaacaccataggtaatcacctcacccaaaccgtcgtctacatttgcgctataggtagaaccgacacgggtagcagatttcgtccttagaagcgagattggggtcgccgttgcggcggcgccaccctagaattctagcgcgtcatggacaactgcactggatcaaatattgcgcaattgtgcccgccttgttgattcgaggtggcaagggcatcgtgttgcacctaatagctcggggtctgaggctcccgctcgccagatgggaggtctccggtgagtttttggcgagggagcaatgcggcgccaccggttgggtggccggagatgtgggttgggcagcgaccgtagatttaataggggacggtcgtgattagaaaccaacgtaccccttcggatgtctgataagcaccgtccgattcggatccaaagcctagaaatccacctagtcctttttaaatctagagcgttgatttcgaatcctaaggtttgacgggggaagcaccggcgcggctaatcttga

SEQ ID NO: 158569 - DNA, 310 bp, Zea Mays
aagtcagacaaccatagtgcaactcatcagttatgtcgagcactagagaagttaccgtgctccgtgatcattccttcatacaaccaagaccctggctaaaaaatatacagcctaaacaaccaaatgctaccttcagtatggtatttagcatcatgaactccagggtcgtatggtacgccgtgacagtacgtcagtacctgaccaaccagaaaatttgatatgggagggctttaccatcagggaacctgttcacgcatggtgaattcaatgttacaaaggtttttttgttgattcgtaattcgttggtccc

SEQ ID NO: 158570 - DNA, 608 bp, Zea Mays
agtcaaaatgatggcatgagagttggtatgtcaaaacacgagcgtcacctattaggtgtggagagtagcacccgcttaaccacttcgtagctaggaagttagcaaagggcatcaagtaaaccaaagtgtaatgacaggcactggggcagcattggtgtggctacagtatctacccggagtgtaacgaaaggcaccaaggtggcattggcgtggctagagtatcctgatggaggaaggggacgtcatctagggcgtcccatagccggtgggaaccttaaaggacaccatgctacgagacaccacttacctttgctcgctttccccgaccctgtgactcatgtaactagatctctctcacgttcgcctataaaaggattggaaggaccactattcaaggagggagcaatcatcactcgcatcaacatagagcacttgtaactgcagcactcactcatcggacactttggaacttggtccgtcttacgcatgtttataacccttctactacaaactagtgtagggtaataggaattgtcaattaaacgtagggacattctactcgaactagtataacttccgtgttcactttgcccatcatttgccccaag

SEQ ID NO: 158571 - DNA, 676 bp, Zea Mays
catttatgattcaatcaattatggcttcacgttttcctaattgttgcaagcagggtagattcggaggttgccatggggagcaatactgatgctccattgttgttgtttgaggcttctttacctatcccacaataacttaaaaatagtagagactcatgatgaggaaggaagagttgaaccattgagtgaggatcagctatatgtgatattgggcttgagggatgaggatgagaggagaaaggtagctgaaccgaatggtcgtacaatgcgtgcgtgagcagggagatgaaaatactgaagatgttgccattcctattagtgatgccataccagatgaggtagtgataacatatgataaggatcacccaaaattggatcttggcacattgtacccatcaatggatgaatttaggttggctgtcaggcaatttgctattaatgaggagtttgagctaggcatagagaagtaggtttagaggattctgcaagtctagtaaagaatgcccttggaggattgttggtagaaggcaagctgatggaaaaacgataaaggtgaaataatattgagtatcattctaacttgcacagattttttatgtgtatgacactcaccattttgtattcatttccctacaggtgacacttttagttgataaacatgactgtatttcaagca

SEQ ID NO: 158572 - DNA, 563 bp, Zea Mays
gtcgtcgtcatccataacccacttctatctcggcaccgtacctcgatggcactggtggcactagcacgaccacgtagtcggccgacgacctaccaaagtccacaagcaagcagcgaagagattagggtttgagaatgccgactggggagtggggactggtgaggaagagtgacatacctgccaagccagagcccggagccggagatgagggtcaagtgcgcgacgacggacgacgtgagagggagagccagagaagaggagattagggttagggctagggattgggttggccgactggagagggagagccagagagggacttatctgccaagccgcagcccggagccgaagatgatgacgcgggacagcgggagggagagccggagtctggagaagaggggattagggttaggtatttctgattagggttagggatttcaccgatggagagccggagtctggagaggggcgccgcacggaaggggggcggtgacgaagatccggcagagactactgcgacggtcgatggtgaggcggtgagcagcaggcagagcgcgacgcag

SEQ ID NO: 158573 - DNA, 319 bp, Zea Mays
tccgagctggaccgaatcccccacagaccaggatgtggctgaggcaggagttctgctagatgaagttggattgttgaaggagaggggtctgactgcagaggttgtggttgctgactttgtcttcaagaatattcagccattgaaggacagggcatatccggcctatctgtaccaaggcctagctgactccacccaggtcaccaatagaagaattcctactgtggacttggtgagccggctcgaaatgatactcagaggcaaggtatcaaatgttggtgcccctgttgcctactcggcttggaacttgcctccttccaag

SEQ ID NO: 158574 - DNA, 616 bp, Zea Mays
ttctattccaacgttgaggatgttcgattcgattctaagttaaacgaagctgctctaacttagaaatattctttgtagctgttgaatttggcggctccctaaaatcgataaccgtggcgactcacgagcgacacgctcttgttccatttacgtacaacgcttctcctcttctccctcccctgcctccgccatggccacacaattgtctagttgcttcctcccattttgaatctgatctgcctcgctattcccatcgcctcctcactctcctgcctccactccctagtcgtcgcgcctctttcgagtagccatgaacgaagccttcacacgtgcagcggacgatgacctaaagctcatcaagcgtctggtctttcccggagagggcaggatgcccccgtcgcgcttgcacctggcaatggagcgggacaaccctatcacggcgctgtagccgcttatgtcgatggcgcccatggcatacgtggtcatcgttgacccgactgtcgtaggcaactctgacgtgcccaactatcaatcccaagtcataaggttttaggactctgctcttgcattggagcctccaaaatgagaagttcaatagtcatcgacagtggtgaag

SEQ ID NO: 158575 - DNA, 721 bp, Zea Mays
tactgaataatttagagtcgaactgcttagcttttcactaaagtaggcaattggtctttgttcttgcatgagcacgcctccgatcctaattccactggcatcacattcaatttcaaatgtcttaccgaagtctgggagtgcaagaactggggctgttgttaacttcgttttcaattctccaaatgccttttgttgtgcttctccccatttgaatggtacttcttttttggtcaattcgttgatgggagtagcaacagtactaaagtcttttacaaaccaccgatagaacctagcaagtccaaggaagcttctcacttggctcacattttgtggaggcatccagtcgcgtacagctttgatcttttcttcatctacctccacaccttgtcctgatacaacaaatccaagaaacactaccttgtcggtgcaaaaggtgcacttctcaaggttagcatacaatttttgttctcgaaggacagcaagtacgtatcggatatgttcaacatgatcatcaagggttttactataaattagtatgtcatcaaaatagacaacaacaaatttgccaatgaaatttctaagaacatgattcattaatctcataaatgtactgggtgcatttgttaacccgaagggcatcaccaaccattcatacaacccaaattttgttttaaaggttgttttccattcatctccctctttcatacgaatctgatgaaag

SEQ ID NO: 158576 - DNA, 571 bp, Zea Mays
gcaggatgagcatagtgcgatgggtcctgctctcaagtctctagagctcgccatgccgtcaatcgttggcgcatctggggtgagctcagtttcggttgatcaagtcctcaccgagaggtcgagcgatggccgaggcgatgtggaccccgagctagaacgcaatggcctccatttcacgaatgcgttcggagattagcgccattcaaggagtctagacggacatctccccttactacgaaaccccgagatgacagcatacgaggtcaatggccatagacagactaaagtgctcaacgttaagagcccgaagatgctcctccacacgcgaaagctcctccatcaccatcgtgggctgagaatagaaaatcccatgagacaactgctggggctaggagggccaaaagtctaggatgaaggagcacgagcctcaccttctgtcgagaacccagacaaaggtccttcaacatcgcgccccgatggccgcacttcggtaagatccggttcggccctcgaagagccctccctcgcttcgaccgcaggatgcttaggccccgccatcctaccgagctca

SEQ ID NO: 158577 - DNA, 575 bp, Zea Mays
gaacagccagtacaaactcaaggagaagtggatgaggaagaagaatctgagtcaggtggaggggctgctagtgatgctgctttttcaattggatgaggctctactgctttaggtgaatagtaagtctgtagttctgtacttgcctacttggcatttatatactagtaagtctgcaactctacatcatatgttatgtagtgagtagtgagtgatgtttagttcatgttctgaaatctgaattcataattctgaaatgtgatctgagtgcctgacaattctagtattcataatttctatgatgttctgaaatctgaattgtccaccctccactgtccagttctagtattcatatttgttttgtttagtaatttggttactttgatattgcctcctatatggtatattgctatatgctatgcatatatatatatatgtatgaatatgacattattacacatatatataattatatgtataggtcctatacctgtaaataggcaggaggaccagtagggacgaccaggtcgactaagactcatcgactaatcgtgattagtcgcctggtcacccaggtg

SEQ ID NO: 158578 - DNA, 392 bp, Zea Mays
cgagaaggggcgacgcggcggcggatctggcggcgcaaggccgattcggagccggaggaggtcggcgccgacgacgaccacgtcctgttgctgacgagtgaagtccgttcgcctcggaagcggaagcggccacaaatcccagtccgttttggcggtacgtctccccatcggtggatttcctctccgaccatcgacggctcgcttagatccagagttcatcggttcgaatcttgttgttgcgggccggatcttcagctctgcaggtacgaacatggtcttccccctcttagcagtaacttctttcttacttcatattcgaaaattttaggttcgagttccgtagtagaccgaactcatgtgaatcaacggattccagtactatctagccgcca

SEQ ID NO: 158579 - DNA, 974 bp, Zea Mays
agtaggtgtgaaaaggggagatgctctgatgaatcgttcaacggggacaagtttctagcacaaaattcaggttgcgtggggggaaaagatcatgtctttgtggttgtactggtagcttccggtacagttgtttgtttgtgcattgccctgtttgcgctgtacttttgattccgtgacgaatttgtggtacctgtgatatacgcatgtgatgtactggtctgccaagtcttttcatttcgaccgagcagtagtactcggtacgccaaagttcacgtggtactgctgcgtccttcgtttactaaggatcaaagtcaaacgtcgagaaatatagattttcctggatgttgctgataatccaccatttagtcggtaagcatgtatggcaaagttcagttggtgttcacttgttcctcaatggaggccaagaacaagaaaaaagggtcaaaggtcatggtatttcttctcttgttgattgggcaatccggacaagtctttagtgatccatgttctttatagcactctatctagaatatcatctggtagcccgtggtgcccttcctttagaccttaatggggtagctttgttcctttacctgctactgctagcgatgttgcaaacaagaagtggattatggagtggcgcacaagaatgtccacctcttggctctacatggctctgctaactagctcaactgtgacgaacaaccgggatttctgatgtcctatcatatcgccacggctgtttgttcctttgccaagtttatatgatgctattacctttttggctggaagacaaggtcacacgtcgttcttggatttttctattattgccctctctagaaatggttacatgcagcctttcctgtccagtaatgatttgccttctgtcacttaactttaccaaattggacgtctgattctacgtccctatcaaccagctgtaattactacttaacttctgcgctttctctgtg

SEQ ID NO: 158580 - DNA, 272 bp, Zea Mays
gctttaaaaaagcacacgtcatgggcctaccctttggcgcatctacccattcagccacacatacatctgtctcttcatcactgtcattattgggctctaacatgttaaccccctgcttctctttctccctgccattcgtatctctaaatcggctatactgtttattgtccctagcacgactttcatgggtgatagcacgctgcatgacttggtttatgtcagtaaaatcttgcccctctagtttctccctaagataggatgataaccctgcg

SEQ ID NO: 158581 - DNA, 632 bp, Zea Mays
cggaggtgctggtggctggaggaaaaaacgggtagaggtcgctagagctattgcacctggcgatcatgttcctggtttccaaatccttcacagaaagaccaaacagatcaaattcgatggagcaattattgtcggtggtaaaacgatgaatggaaatcaagttcttaattatgtgatgtgaaactaagacattgttaagaactagattgtgatgcagaaaagaaaaggtatgtgatctgatggcagcgacaggaagtaaagcaccattgcccacaatgatagacgaaggtgtggagaatgtgggcgaggatagggtggaaattttaccagcatccgcagtcatatgcgagccggcaccagagtcggcgtaccactccgatggtgccgggggggtgagcgtcatggtgttgaagttctgcaccagggagtccgggttccatgcacctccatgtgtgggattcttgggggcaaccggcagctggtatgaccccccctgaaacatcggcgtcgagggtgtacctcctccaccgtagacatacgggtggtcgaggccgttgctgtagaggttgccgccgggggcaccaccgaagggtgccccgtactggggaacagcggcgaaggccggcggtgcc

SEQ ID NO: 158582 - DNA, 542 bp, Zea Mays
gttggctcggatcaatgcaaagtcgtacttggttcgaggccgtctgctttgttgttgcgctggattctgatcatgcatctagctagaggttttggttttgaaatggtcaaacagtaatggccacacctgaattttattataaatcctagctacattttgaatattgagagctgtaaaaaagatagaatctttttataggtgggtgtatccaataatagactctctaaatttagataacggccggcaaatctcgtacgaagtgcgtgaaatggcgagtcgtaggggctggctaaagatgcctagcgaaggaaagaggatggctagcgagatgcacaagcgagcctgttggaaggtgttttgatcggaatttcccccttttttttaccgagcacattccatttgcctaggatgttggagatggtcttactagtgcaattgtttcttttaacaaaatggaaggaacatcgccatgcgtatcatttaaggagaagcaaagatacccgattttccaaaccaattctattgcactcattaacgaaaac

SEQ ID NO: 158583 - DNA, 332 bp, Zea Mays
gattcgggacgcttcaggccggccgtttacctcgtcgacagaccaggctgcctaccctatcggagatcccagagcccagtcctaccgcgatctgcgtcacgacgttccctagccacacctttcataaagttctttctgcaactttctagagcatgaacactgagcagtaagcaagaaaaatgatgcacgcctctttagtccagtgcaatcttgagaagaaaagtttaagcaccagactctggcaccataagtatatgctatttattgagctcaaatgtgacagggatgataattttttaaaccactttcaaatttcaattagccctgtaaga

SEQ ID NO: 158584 - DNA, 1308 bp, Zea Mays
acggggattgctgtgagaatacatgtggtgccactattaacctagcttgctcataggtagtgtgatagcctataaggtataaatacacttacctactattcatcctgcttggtcatttggtaagtgccccgacccaccatgtacaatctttagcctttggaatggttttccaagtacaagaggtagctaagagactgtatgatacaactctaagccactaggttataaatgcagtcaagacataatatgtacaaagagtcgtgtatctcatctctttgtttttttcacttacccctaaataatagggttgtacatgctcttagggtgtcgtcccagatagtcaccacccaacccatgccaccaccatccgtcgtttggtgctagcggcccccttctccatcttcttcctttcttcttccaactcatctccaataatttgtgcctccattgttgtctcctaccatggatttgcaatagatggatgcatcacccctccatgatgacaccattgtacatcgttgtcacgacgacagtagcctcctccttatcatcatcaccttccttcatatgtcgtggttgccctcaccaaacttgcatgcctcagcctagcgcacatggacactaacacctagagactgggcggctcgaccgcccggacactaacgttgcaagtggagcccatgccaactcaatcaatggttagaggggcgttgccccctcggcccctagcctctttggatgcccttgcatcctcccatatcaaggtggcttggtagaactagatctagggccacatagcccactataaggacgacgatgcaccctagtgtaccgcgactgctggccccaacatcctccaactgcttcggtggctccgacccctccactccaactccactaagtctagctcctccacgactgatgttgggttgtcggggctcatttacccacttgctcatgttgatcaacctacaatggggacaaggttgcaaggtctctagcaacacagggagcctagtggatggtggcttcgtggcccctagtgttggaaaaggcaaccccttctcagaggtcagcttggcattgtaggccacattgggtgccctgctacaagcatgtcatcgttgctctctccctttgtccctcattcctggagaggggaggagctcagaggaatgattcaaggattgcccttgggcaaagcatggattttcacgcctcctagacatagtggtcgctggccaccctccctaactccctatctcaaagcggtttatctagatcaggaaccaccgaggacattgccac

SEQ ID NO: 158585 - DNA, 584 bp, Zea Mays
cgagtttcgggtggcggagaacgaaattgggggaaatgagcaattctccggctatgggggctaatcggaggcgggagtgggggctatagcttcggtatgacctagcgcagctggccgagggctcaatttataggcggagcgagcggtggtcgcgaattttggacgagacacacggtggtcggaagtgaggaagaacggtggtgcagtgaacacgtgttcaccgccgtggcagtaactccgatggtcgacggggagtttagagggtgtcacggcgatgcgatggcgcggttaggacacgcggtggccaatggcgatggcacgacgacggtgagcactttacccgcaggcggtgagccaggggagatgaactacggctagccggagtggcttccaggtcactagcggcgacgatcttttgaccccgcgacgttatcaacttacccgagcgtgaatcatgacgccgatgacgcgaatcacggcaaggggggtcaccggcggtgggaaccattgcgctggcgatctgatcccctttgctactgtaccatggtgaactcccaacagagcacctgacagctagagttgag

SEQ ID NO: 158586 - DNA, 547 bp, Zea Mays
cggtggcgggcgttgggagcagagccaatcgatggaggagccgccgaccggcggggaattactcgttgtagccgtgcgaatccgcaatgccgccatcgaccgtggccaggatacccttcgcagcgagcgggcggattgacgacctcaccatcgccggtggtgctcgacgccaaattggggcctcgcgtgcggacagaagacttcgcccgcgcccctggtccgttccggtggcgattacggggccggaggatgaccggagcgcgcccagttcgtcaccgccaccgcgcgtttgcgactcgccgtggaccgaccgaagcagctccgtacttagggtaaggacccgatctcctggctcgcgttcatcttaatttcattccgcgccctgcgtattagagtttggcgcgctggagcttgggattgacctcctccggcgaggcctccgccgtgcactgggcgccgtctccgccgtgtgtgcgtcgggttgggggagaaagtcgcgcgccccgcatcggccgttggatagggaacggatgggcatgattatatg

SEQ ID NO: 158587 - DNA, 548 bp, Zea Mays
ccagaacccctcatcactcctttggttgcctaggcacgacgacgtagctttggccgatggtggtgccatggccggagcaagcatccatcaatctcgtgcacaaaactccatcccgagggccgctacatgatgctatgaacatgccagttggaccaaggatttaccagcgatagcgtcgtggcgaggtcggaccacggtgggcagtgactctactgctccgatgagcaatttggtgcacatgggatggccccgggctcgggtgtcccgtgcgcaggcttctacggacctcaggagtgaccccgtacactttaccgaggggtgggtatgttgacgaagagctaagaatggcgtgtggtggcccgattcttctcccatgctagagaagatagatagggacgaggaagcaacggcttggcgaaatccgtgtaggatccatggtatccgttgttctgagtccgatgcagggcgtggagggagaaccatctcgcaatttgggcccacacgccagtcgtggacctgagagttcgcatgagttctctggctaggca

SEQ ID NO: 158588 - DNA, 611 bp, Zea Mays
tgagaaccaagtccccaacgaccagtttgactaggatgattttatctcctagcctcttaacatctactaccccatctttaaggctcttgtcgatcaagacgcctactccattcttgtttgctggagtccccgtgtaccacaacttgaagcctataccttccacttccttcgccttctgtcctttccacttggtctcttgaacgcataaaatatttacccgtctcctcactgtaacgtcgactatttctcgtaacttacctattaaggaacctacgttccaactacctacacggaccctagttggctcgactagcttccttacccttcgcacccgccgaggaagatgcaaagacccttgctcattttccactacactcggacgccgatgtagcgcgccactaaggatgtgacgacccgatccttgctcacttatcaccggctccagatcaagagacgacgcgtcacttaaggggtgacggcccgacccttgctcatttaacaccatacccgggttccgatatggcgcgtcgctaagagggttacgccccaacgattttctttgtggtttcatctccataagatttggctggtttttacgttggtttgccgga

SEQ ID NO: 158589 - DNA, 544 bp, Zea Mays
tcaaaattcaaattcaaatgaattaggaataaagaagaaagcagaaaaaaaaaggaaaaggaaaaattccctgcgcttgggccagcatttgaccacttcggcccatttccgattctcaccccgcgcggcctgctgctcaactttccccatggcgctgatgactgggcccctttgggcagtctcaggtggcacactctggttgatttccctcgcttccatgtgggtccagggagtcggattcatctgcttccctccaacaaactcagtcgaccgcatatagatacgggattcaacgcttacgaccgattcttctgtgtcccaacaaacctggctgaaatattcgctaatcgagtgttagctaccacgatttctctcttagccgactactggaggggctaggtaagcagtactgttagcccaatctcaactaccgtggctgagatggtcacccgataatggcgccctagggcgcggacatggtgcggcttgtttataaactccgagcgccgcgaagcccgcccctccctcgtcgatctgctcggtc

SEQ ID NO: 158590 - DNA, 640 bp, Zea Mays
ctcacctcagatagctccaaaacatagctaacgtcttcagccaacctcaagaataccttctcatacacaattgcagccttcaacattagatatgttgaattccatcttgttgggacatcaagcctcaaaaaggccttgctgtcaaccttctcttcctctgcaatttccttgaactttaccaaccttgaagttccatttttatgtaacgaacaacatccctaacacgctgcactgagaggtccacatctttcaagccatctcgcacaatgaggttcactatatgtgcagcacacctcatgtggagatacttgccatctgctattatttttttctgtaattgtcttctcaaataaccaatagcactatcattggcacttgcattatcaactgttacaatcataattctatccaaaccgcagtccaccaaacttttgatcaagcttttcccaatatcacccccttatgcccctttaccttgaaaaggctgatgattttcttctgtaaaatccatttctcatcaataaaacttgttgtcacagtaatatagccatcttgttgttgggaggtccaacaatctatctagactaactctttgacaagagtgtttgaagaacttctttagcttggccctctcttggaa

SEQ ID NO: 158591 - DNA, 421 bp, Zea Mays
ggacaatcccgtgaaagggtgctgcaccggcttggatcgtggacaaatcgatccccaagagccttaaggtctcggcgtagatgaaagttccctatgcccgagaacaggatctggatgtcgcctagagggggggggtgaataggcgaatgaaaattatcactttaaaacttaaattcttactctactcgaagacagaattgcagtggaatgaagaatccttcgagtaggttgcagtggaatagaagttcctgtcttaaactgtcctgcacttcaaataaagcttataccacagataagtgttgaagtgcagatataaaagcgagtaagacagagaatgaatacatagcacagagcagagcacacagacacagggatttatcccgaggttcagccaagtctgaaatgcttgcctagtccccgt

SEQ ID NO: 158592 - DNA, 734 bp, Zea Mays
tgaacacggaagatttcctgagactctaaataccagcgccaggacgacaggttgattaaatggaaggccaggggctctttagcataaacgccaaggcgaaggggtatggagcgccagggaccgtctgattagaccccggctgccaggattagatttaggttttcatgaaccggtacgctcctacgatcgtttgattactgatcgacgatcaaaattttatgaacgaagggttacgcgacgatctaatcgtacccacagatccaagaatcagcagcccgtaatccataccggtttgatgagatcgcaatctgatctggtccacccgctagccaatccacggcgcataagccccgaagctaacaggttttctatgcttgatctgtgccgttcatccattgatcaatggctctgcgcacttcttcaaccttagacccaggccacggcaggacagactgcccgcggcggcgcagaccgccggcgcccgcagatccacaccctcgcgctctcctagacgaatctgagggactctactcacggcctagatgagagtgaaacaactagaggggttattaccgtgattcgggacggagaagtggctatccacacagcgtgacgtacccgtggcagagcttgcacgatgacaagaaattcttcactaatccgtcaatctttactctgggcgccgcaacgaacttgcccctcgacgcccggcgaagctcacaactctgactttg

SEQ ID NO: 158593 - DNA, 431 bp, Zea Mays
ctggtatctgttcagctagttcttcagctgtccaatccacaaaccagtgaccccaaaaaaacgcataaatagtaactgtacaacagtaaagcatgtcaggaatgaatgattctctcgaaatctagcagattgtgtttaccagcagcaaggaccaaggatctccatagtacagttttttactacctcctctttcttcacaatggtccaggcagctagggaagaaacagacttcactcgccacttcaccaatcatcctctagactaacagctaagggccactattgttcaacatcacaattttactcaataccatcatgggtgaagcatataacaccactaacaagggcttcaagatgtgaagcaatcgacattctagatcatgtgtaaaccatgatccatttgtcatttgttgtcaaaagttgatactgaaa

SEQ ID NO: 158594 - DNA, 337 bp, Zea Mays
aggtgtcgtcgtctaatattcttcgcccgtctcttcattcctcggtaacgcacaaagaacaatagaagtcataatgaaaggcgcccaaatgttgccctgggtcaatgcccctagcctcgataacgtgcgggtaatagtaaaagtcgcatgttacaatcctagtgtgctgcacacatttaatgtggcggatacgctacacactgctagcgtgagtaagtatgtgtcccatatgtactcgatgctagcgggccctatgtcagaggcttttgccaggcatagtccgatggcttactctaggggcgtctagccacgtgttagcgtcgaacccctgcttggg

SEQ ID NO: 158595 - DNA, 448 bp, Zea Mays
gtagttggtaaatggtaattactacgagggcgatgtgcactgcatgcaatctcaagaagggcggagcgaggatcacatcctatatatgcatgcagacttggacgatgcacaagagtcagagacagagtatactacttctgaaccagtgcttatgtctttgtcacagtcggattggggtggatcggacagtggctgcaccttgaagtctcagggcatttttcagaaccaactaatgctaattttgatggacagtggaagttcccatactttcatcggtgatcaattcggtggcagacgacttcaaacaacccaagtgggtgcctatatttgttagtgtccgagtggctaatggcgacgttctgcactgtcaagagaaatggttgcaagtaccatgccaaagaataacacctggcagacgacttcaaacaacccagttcggccatattgc

SEQ ID NO: 158596 - DNA, 519 bp, Zea Mays
gccaaattgaaaatgggcagcagagctcaatgagtttgtcatcgactttgttcatagatcatccatccaatcccaagcattagtggatttcattgccaattggattcttggcccacgggatgaagctacctcgttatacgatgttatcgggacagttttctgtgatggatcatggagatccttcggagccggtgttgcagcaattattgtttcaccatctaaagtgagaatctcatatgctgccaagctacaatttcaatgcacaaataatatagcagaatacgaaactctattcctggggctaaggaagccaaaagcaatgggcgtaagaagggcagtactgaaatcagactctcaagtcatcataggccaggtagacaagtcaagcaaagtaaaaaaacccaggcctagagaagtaccttaacatggtccaaaggatggaatcttccttcgagggatttcagtaaaaaacatcccaagactggacaatgagcatgctaatatgttggccaaatctac

SEQ ID NO: 158597 - DNA, 567 bp, Zea Mays
ccggttgtgagtggaatggaaccacataacgcgacgcatgtgccggcgccgaagtggatggccgatcaagtgtgttcatgtgttcgttagtagctgttcaaagacataatgaatgtttggttggctatgcgaaagggaaagagacagattggctttaattaaggccatattcaacccaaagaacgcataatatcagaatagactttgtgaaattgcaaaaagttgggtaatggggtctcgacgtcaacacgccatggtctctcatgtactcccatccattagcagcaacatagacaacaacagtgatgccaaactaacagggtcgtacggaagggaagataccactgccacatctccgcgaaaaaaggaggcagcaagcacagcaataggaccaatgagaaagcagcaagtacgcaacaccatatatggctaaccggtcactgcgcactgcgctacgcgaaccacatagaaacaaaacaacagtactgctagctagatgtgcaaaactcatcagtaaggaaggctaacactttacaatgatcttccttaatgggttttgggtattta

SEQ ID NO: 158598 - DNA, 495 bp, Zea Mays
catcctccaggtggccatctttgtccatttctgtgagatgttcgtgggagtggcggcttgcacttccctttttcgccagttttttgtgctggtgaggtctgggaagggcaaagatcacctcggggcctactaccagtcaaggacagatccgacagtgacctacatcgcttcccttggtggtgcgaggtgggagaactagcgaaatgactgggtgatcgccagtgctgaggtcagcgatcgccttgccctcccgagtggcgggcccagactcgagcggaagcaatggagggtaaaaccatgccttgtgccagagttcaagcccttcctggacaggattagggaactggcagttggtggcctgacctcgatgcacgtactcggggatttcctgaagcgtcgagtcatgccgctgcaggggaggccacgcctgtgttgctggtttaccggcgtcagcgacattggtaggatccagcgcgggcctgggactgatctgac

SEQ ID NO: 158599 - DNA, 379 bp, Zea Mays
ggtgtgggttcggttgatgcagaggcaggagcgggggtggtacgacttgtacctcctggtggtgctgatatgcgtggttgggtagatgctgggcgtggtcgttgttgtatggttgtgggtggtggtgttgatatgtgtgtgcgacaactctttggttgtcggctggttgtgtccgagacatcctgtccctggtggcctttgtttccgagcaatcccttattgggtgcgcgcagtcttcgccatgaaacaggaagtaatttctgcgcggttgctgcgcccgtccccggccccggccacgcgtgccattgccacgaccctggggggatagtcttgacggcgagcggcttcgccgatggggtgctggttgactatgttgtgc

SEQ ID NO: 158600 - DNA, 806 bp, Zea Mays
gtcgttcaatacccgatcaacgaccgcaattcaaccacgataccagttacttcctgccatcagattgtagatcggtggctatcgttgaaacggtatgaatccttttaatccgggccacacatttggatccaacggttcccatccacgcgacccaaagcgcggcacgacttccccaatcctcactgcaccaccgaagcgcggcggcgcccacgcccatagcacggtggcgcaatggccaggatgcccaaatgcccaatttgcgagcgtctacgtgacgttcaagtgaacgcgatgcaattggagaggctctcaccttgaataatgtcgcgacatgctcggttgacgacggatggcggctcggcggtagtgtatccatcacggcgaggaattgccgtgccctccgatcacaatcccacacgaggatacaatgcgtggcctgcctgagtgcagccgaacccccaaccccacaattgcgttggtcgccctacaacgatagaacactctgcatgactccggtggatgccctcccccctaaacggcgttggtgttggcactcggtcgacgccacccatggacgaagagaggaggttgtgaccacgcccttatatagcccgaggaatgcataggacccgaggatatcgtgacttggttggagatcagggtccgcgccggcccccgacggcgatcccgttgccctgttacgaaggtggaagatgaatctagtgtcctgtgcccacctggtggagaaataggcaagcgggcccgccagttagtgcctagagaggagccatgcgtggcctaggcgg

SEQ ID NO: 158601 - DNA, 1012 bp, Zea Mays
cgagaacatagaggctatacattcggtgttaaatgacgatggagtgtatcatgagttggtgatttttgttacgttatgtgcagcctttttctttttcaagcatgcaatgttttttatgttgtcctcctaactcctaaggcaaattgtgcagcggtcagttttaataaaaacttaaattgttagaagaagatagacaattcacttatatacttcaacatcttgcatctgaaaaattcaacgataatcgtgggtgaagaatgtaggtcaattcaaattcttgcatacataccacaaggcaactgctacaatcaaccgtttcatgatgtcaaccaagaaccaaacgccaaccgatatgaccgtcaggcattttttgatatagaaagttttattaatcttagacaattacatcaagaagatacaatagtactaagattactctcggtctctacacactaaaatgtacacaaccaaacagagatgaaaaaacaataggagaaacaaactcttcccaaaacaaactatcactcacaacagtctttcacgctaaccactaactagacaatactaggatcaaggttgagacactccataagaaacgtctttaggaagaatacaacatataagacgctgtcgttgcgatgacccaccaataaaggcccgatgacccaccaataaaggccagatcaaaggttttcacctaagagaaaagaccctcggtacttcagataatgcattcatcatggtcaaggccagatataaccaattaagatcagacctagagatttctccccgaagtcgatgagaccgactcctataagttccatcaaaatcaaagatcaccagctttgcctccaccttctttccatacttataccgacataccaccaaatcttggctaatatcaaatggacatgaactctgaaacagagccctatcgaatcttggtgcagatatttatgcgacaataatcgttgggcggacagagcaacttatctgataactaagcatgagc

SEQ ID NO: 158602 - DNA, 545 bp, Zea Mays
caaagaactactagcattactctaggggattcggatgtcatcgagttctgctatggagacagaccccatttttctagtatacaggaatgaggccatacttccatctgaaataaagcgccactccttccaagttctaaacttcacagaagatcgatcccaagaaggtcgaattactaatattgataagcttgaagaagtaggaggctcgattgttgtatagtcagccaaataccaacaacacatggaaaatatcattctaggaatgttcaggatcaaagctttgttgtaggggatttggtgttgtgaaagattcaaagcatgatggacaaacacaagtcatcgcccctctaggaaagcccttatatcatctcagaagtactccggttatgcacttatcgactccatcgggaagatggtactatcattattaacccctagaatatcgagcaattaagttgtttttatgtgtaaccttcctttttgcaacaagttaattctttataaatctcagtgttcgtatcatgaccaaagatgcttctttttct

SEQ ID NO: 158603 - DNA, 970 bp, Zea Mays
attacaagcattcagttaccacaagtcgcactacacacgagcgctttctaaggtacttacgaactccatttctaaagtgtccctgaattccttgagaaggtcgtcaaggctagctagggacatgtcctcgacatcggacaagttctctatcctggagggaggtagtgctggaggggcttccttcttccgctcagtctggcacccttggctcttggtcttctttcggattttctttgtgggggtgagcttctttagcttcttatcgtaatccatcttcagggttcggtaggcttcacgagtgttggcctcttcaccttctgctatttcgagactctcttggagggacgccttctcctttttaagttccttgacctgttgctctatgctttccacccgggagtttaggtgggtgcagtgggaggaaaggtcatcatagtggttatcgagagtgtggagatatccggccatatagacgatggtggggtcctcctcagtaggatctcttcctgacagggcctgaagtcttttcctccaggtagggctattttttgttgctaggtgggaagtaacgaaggggggtttcaaaacctctctgctgtagttttggcatagctgtcagagggcttttcgggcaacattttggcatgtgtctgggaagcagtgtccggtgaaggtgacttggaaagggggtggtttgggtagcttcgactttctcccaggtagactgccatagagcacttctcagttccgttctcacggtattctttctagacgtactccggctttttgcggatttccatgcgaagcgcgcaactccgcaagagatgagggaatccttccacctctgagcagtaggatgtcttaatgaccaaagagccttccatctcgtagaagaaaagaagggtctgttaatattaggggaaaggagagaagattttcttagaggtaagaggcattttctttttaaggc

SEQ ID NO: 158604 - DNA, 995 bp, Zea Mays
cgggtgatcctctggcaaaaaacatctatggcaatcaaagtaacatatctttccaccaaactttagtcgaaagcataaagtgtctttaacgcatatcgaacatgtcaaaatcccatgacaactccatctagcaaagacaccataagccataaaatcatgaatagaccacaaaaacgtggctctcaggttgaacttctgtgtcttgtaacaatcgtacgcctcgactccttcccacaaaattttcaattcttcaatcaggggtctcatcatcacatcgatctttgttccaggatgatctggaccaggtattacaagacacaagaaaataaattcatatttcatgcaaagagctggtggaaggttgtatggaacagcaaagatgggccaacatgagtaggacgttgcagttagattgaaaggcgagaaaccatatattgccaaaccgaagcggacattccgcacttcatcagcaaagctggaatcaaaagcatctagtgccttccatgcatttgtatcaactgggtgcgccatgacatttggattctcacgtaccccttctttgtgccacctcatgtgtctggttgtattcttgggaatgaacaaacgtttcaaccgaggtataagaggcatgtaacgaagctgcttacgtgcaatctttgtcgtcacggtcaaaccatcatcgttttcaacctcaacaaatctacgctcaccacatatagtacacttcttctcactcgcagtctctttccagaaaagcatacagttattgtcacagacatcgattttttcgtagtccataccgagcctagagagcaactttttggactgatacatgtcctttggcatcttgtgattctctagaagtacatcgctgatcaagttcaaaagctccttgtagcagttgtttgagaatgcaaacttagacttaatagccataagtcgagtcacaaatacaaggacggtcactttcgtgtgctcatgcaacggctcttcgg

SEQ ID NO: 158605 - DNA, 893 bp, Zea Mays
gaagttattatgcgccccatttggtcccgcttcggccttcgaaggccaaaggttgagattgacgaagctgccaaagcatgccaaaaggctttcggtactgtttgcttttttattggtacaagagatttaatccaggagcatatagctttcagagtgtggccgcttgtagagaactgggaaatgccaaaggagactatcaccaagtctagcgaaggcgagctggttcgattgaaatacaccttcagatacggagataaatttgatgaaccgaatgatgactggctgaaatgtattgaagctacaagtgatgaacttcttgggccatattccaaagcggaagataataccttatccacatccttcgagggccagggaaaaaagagattaaacagagtttttgatgctattggttttgtttaccccgactactgctacccgctgcgaggacagggaaagaagaggaaagctgctgcttcagccaaaattgctgcttcggccgcccccgatgagcctgcgccgaagagcaaaaaactgaaagtccttacccaccggccgcgttatattgagccggccgtggtacctgagcttggcggggagacttcttcagctgctgaaccaaaggagcccattcctcctacgcagagggctgaagaaccggctaccatgccgaaagcaccctcagccgagcaagttgagtcaaagactggtaaagataaggccgaagagccaaaaactaaaggaacaaaaatgttagaaattttaagcccttcggcggaagtaacagtgccgaagatacaaaaaggtcttgcagcaactcccaaaagaagaaggatggcaaatgtactagatgtgctagaatcagtaaaggcttcaagctctactccttcagggaa

SEQ ID NO: 158606 - DNA, 578 bp, Zea Mays
gttttctgggaggccgacatgtgggtccaattggtcagcctcacctacgcctcgcgccgtgtgacactaacgactgggggcgcaagcgcgtctgctccgccgactgtttctctggcacgtatgccgggctagcagtgatcccatccccctcaaatccgcatcgtacacaaccacctccgcggacctcgggtgccgttgagggccgtccgcacctgggggaagggctataagctgggcgccatttgctcctcctcctatcccacctctctagagcttcagtaaccgggcagggagtcatacacgcggtcgggagctcggctgggaccaccgtcgcgagttcatcggtgctgctccgtggccgacgtgctgtgggacggcatcaccgcaacgccgttattggtaagaagccctaggaccatcgctgatcacccgtgtagtgtaatatgttaatggccagcataggggccggaatctctcgtcagaattggagtctccatcgcggtgtcgctgcgcgccgtgggcagggggatgagggtcgattccccgggtggatggcggtatgcatgggcttgatgtct

SEQ ID NO: 158607 - DNA, 890 bp, Zea Mays
tgacgatccaggcaggacgggaaacggcacacggtcacacaaggtcactgaaatgacagaagaggtgagcacgtattagtcacatagtcataagcatatgaaatgtgaataaatacatacacagagagatatggcacgagacgggacgttcaagaggtcaaatgacgtgaaaacgacgtttgacgggcaaatagtgtcataggatgtttggaattcgaattgaggcacgaaatgatatggaattgagccgatacttcacgaataggttcatataggtgaatatgagtgaagtgtgtgcttggtttgaatttaggcgaagaaaaaggaatttgggcactcggctcggaaacgatcgctcaaaacgggaaatttggtgaaatttaagcctgggatctcggattggcgtgaaatttggcaaggaggttactggaagtgttgtgaaggtgcctgaaaaatttgggttcaattggagcaagtttggctggtttgggcatttcaccgagcacgtggtgtgcggggatttagggtttcggtgaaacggttatttgaggtgggaaaaccctcccgaaggagctaggaacctgcagggaggcttaaggcacacaggggaacacatttcacaaggggaaatcaccagaattcacaggatttagagttgttgcacaaagggaagaggtgggaggctctgctcaccagaacagagaagaactgagggagtgagagagcaagagttgctcaccgaggagaggagaggaggggagccctaggtcaccggagcaccgccggagagggtggccgccagaggagatcgccggcgggggggaaatcgccacagacagagagcagcaggcgcggctgggaaataaaaggagcctctggctcggttcagc

SEQ ID NO: 158608 - DNA, 341 bp, Zea Mays
acaacgagggcatcacatattacattggctcaaccttcgggatgatacccatatccctgtagttgaacaacattatcctcagttcctcaccctcaaacagatttcgcagctccccctcacccacactcaccacaatcggcgaggacaacaattctcgcttaccagtcccatccacgcgaagacaacccctctccacctcgcttcgacaacgcctaccacttcgcgacaattcactcactctccgcttcgccacagccctccgccgcctatacccagtactcgcgcccgggagttcctcggaaccctccgcgcgcggcgaaggctccactgcagccacatcc

SEQ ID NO: 158609 - DNA, 793 bp, Zea Mays
cgctcgccgtcgatccccgacgcggcatgtataggccatggccggtgacagctacctcgtctagctaccgggaggacataaccgaccaagggtgacctaggaacactcgccaatttggcatgaacacactgagaacggtctgcccgcgtgcacggcggaaaacgtgaccacgagctcacattcccgttcaaccctggccgaattgaccaaacggtggccacgatgagcatccagtgcataccaagttgcgaaaacggcacttgagaggcgtagaaccttaccagagtgggctgtccacggacgagctatccacggcggcttagagacccgagttgggggaaaatggtgtcgcggcggctctgggcgaattgggggtggagattggggctacacggccgttaggaactgtagtttcaccgtgtatactcaatttgagaggaggggcggaggatgtgcgaatttgggcttggatcatcacacttggtggaggtgtgcataccccgccgtggatcatggtgctatttatagccacggcgacccgaccagctatctacggccacgaataacttcattagcgcatgcataccacatagggaagaggcacagtgagggagatcgaggcatgggtgacaccgcggcaaaagttactgagtcacgttggccgccggtgactaactccagccacgctcgactgggttcgcgggattgcgccacgttcgaagttatccatccccggatcgattcactggatcgcgcgagcccatcctattcaacaatggccctgatcttatcc

SEQ ID NO: 158610 - DNA, 498 bp, Zea Mays
gtgtgtgatgtattgagcttgagagctcgtatgaacttgtgagccttagctgggtctaagtctaagttcggtctcccttcataacgttgcatgcctccccttttatagctcaaggggggcgcgtacaagggtgctgagccctaacatgtgggcccaggaatataatggatgtaatacttgaagttgctggagcaatcttcttgtaccctgatatccgcgatctgcgtggtattggcgtgcaggggaagctttcttggcaatgcataagtggtgatggacacagtgcaccttgcagcacgggcgtactgtttggcaatggactggacaggcacgccgcctgcaggatggcctggacgccgcctgccagctgagtggacaggtcacaataaatgctgaggcggcacatcgcctgtcagcagagtgggcaggcagggcgtcctctccgcaataaatgcagagatcgcgcggcccagaggccttacatcaggctccgcccgc

SEQ ID NO: 158611 - DNA, 539 bp, Zea Mays
gctccggcgagcctgtaccggccggagaacgcaatgaccggtgctccggtgcggctgacacctaattctgcccctaacaaccataatccctccatcaattgtggagttctaactctaaatcgctctgtccacggtgatggcgcaaactgaggataactcgaggcgttctcggtgatctaacgcggtctaattcaattggctgagccgataagcatcaagagcatttaagaaagctaaaacaagagcgaggatggtaggatcggacttatggagagctggccacggcgagctcacacacggcggagttttgaatgatttgggggaacttcaaaattggagcgctctggtggacaatctgaggcacgggctggtgcggtgggtgtgtgattacctagcagagttgatggcacacttaatttatagggcccgagggctgtggctcttgaatttggaatggcgcgctggcggtcggagagaaagaaggtcactggcgcaagggatgtgtggctttcaccgtagcaaggtcacccgcgatgaac

SEQ ID NO: 158612 - DNA, 510 bp, Zea Mays
ggtgcctataatttttgcaccaacacgattgcggatgcatcctataacttctttgtccaccccaccaaagagcatggaccccgactagtagccgcagttgatagcaaaatccttcaactctgccatatcctcttcggaaagctgctggccacccaggtgccgtaggtcgaagtctgcctctttcgaagagatttctttagcctccttccccttgtctgaaacttctgcggccacctccttctccacagccacgtctgatataattttgtcaatatcggacatggtagctgtgagatcccgccttcagttacagtggtagcttcagcatcagtaggtttgacagtcttgtctgccaaagctaggggcggggtttgctcaatcgcttgcattatgttcatcatacgtcgttttttctgtccctcgtatcttccatcggtagccgaagggatttcctttttctgaaaaaggtttgtcagttccaatccaaaggacttagtagcttgaatggtg

SEQ ID NO: 158613 - DNA, 567 bp, Zea Mays
cctacaccttctggtttgttccaggacctggcacaagtcttttatatgtcccggtggatgtagacttaactacgacatcgtcgatgtaaatctccacgagattccctatcaggtcatggaaaatgtagttcatggcacgctggtatgtagttctggcattcttcaacccaaaagtcatgaccacatactcgaataatcctaccgagcctggtacccggaatgtggttttgtgcacgtcttcccgggccatgaaaatttggttgtaccaagtatttccatcaatgaagctcaatatcttgtggccgacaactgcgttgatcaacacttctgcgaccggcatggggtatttgtccattggtgtggccctgttgagtctctgaaatccacgcataccctccaccagccatccttcttttgaatgagtaccacactagaaatccattcagtataccgacacgccctcatgaaccctgtctccaacatttgctctacctcttgacttcatgcagtacttcatccttcatcaaccgtgctcgttgctgaaaaggctaaaaccccatcttcagc

SEQ ID NO: 158614 - DNA, 359 bp, Zea Mays
aaactattatcgttggatatcaactgtcgcaagaatccatattgatcaagatacatatttacaaaaaagtgtaatttaggatttaccaagcagtccaaaattccaaacctaatcgtaggattgaaccaagataataacacgtgcagagtaaaccatttggtaagtggataggtaacgattgtattgtttgctgaaagttgaactaaaaatattccttggatgcttacctgctagaccaattcacgactccaagtagcgaaagaaacatctgatttagtgctaataacaaagctgagatttacagaataacatgaggagtccatcgaagaaagcaagggcaccctcacctgcgagagaag

SEQ ID NO: 158615 - DNA, 349 bp, Zea Mays
cgtaaatgcttgcaagtaccagagaaccacatcgaggcagagacaattcagattcaaaaagatctccagtactgggaaaagccagtaaagattctcgactcagcagtccgaaggacccgcaactcagaagtgagactttgtaaggttcagtggagcagagaaggagaagaggaagccacctgggaaattgaggactctctaaggagagaatacccttaccttttctcaaaccccgtctgaatctcgagggcgagattcctttaagtggggtaggtttgtaacatcccaatttctaacccaggtttgaaaccctaatctaaccccccttattatctatcccacaactccc

SEQ ID NO: 158616 - DNA, 678 bp, Zea Mays
gattaggaacgcgttcgagcgaagcgttagcgacaatatttcttcctctttttttgttctctacagccatacctcatttttaccttgcgttcgccactgatccttagtgtggtaatgtgacgaggaaggtgaccatattctgttcatccttcattcatccctcatcatgaaaccaaataagagacggtacaactttaatccacttcaaccctataatcaaacaagaaattatgtttaactcgtcacttaaaccaaacaaggaacgggtccgacccaacatagaaaatagatcggttttgacccaacccactttgttcaaaccaaacgcactactagagagtgggaggaggcggcgacgacaggcgacgcccgcgcgagcatcacaacagcgtgcgagaggaaggaggggctcgtggcagcgtgtggctggcggtttgcgtagtttgttgtgtgagaaggtagtgacggtctcgctgggccgttaaaacgcaatcctacagcgggatattaaagagctacgtggataccaccaagattaggaacgcgttcaagcaaagcattagcgaaggccaacgtatgccacacgtagggttatgatacgactcggtggctctaacgtgatcggcacatcgaaccaacccactggccaaatcgaccatgattgaaatcgctgatggt

SEQ ID NO: 158617 - DNA, 521 bp, Zea Mays
ataccctacaaacatagaaagagtgtgaccccaaaaaggattcagaagaaccccaaaagggtcaccaaagagaaaggcataaaagaaaattcaggtttttctcaagttcaaaaccgaccctctttcaaagatcaaacatgttcactttgatcccaaccttaaaaccttatggcccatatgacataatggcgcccaaagacccctagaacaccttggaaaagtttgaacccaaccctaagccatttgacacgacttggcatggattttgtctcggtgtggacagctctgacagagccgacttctcacccccatatctctctactccgaccgtatccttgcttggaactcacatcaaaaaggtaggatttggtgcagggaagagaccatacacgggggttttgccaagatgtgcacgctaaggcgatcaaatcggccgttgaaccctggcagaagtaaacccccacgtgttcgacgtgggctgacactcgggggcgcgctcagagcacgcccgcacgcgaacc

SEQ ID NO: 158618 - DNA, 646 bp, Zea Mays
tctcttccttcttgagcttgggtgtcacccttcgggtttgggacaagaggtcaagatagatctgtaggcattagatgggtagagggtttagtgggtaactatatgctagatgggattagttatgtaacctgcttttgtaggtcaagttattgggtagggtcaggttgatctaagatctcaaacttgtttataggagcagggtctaatgtatttcctcagcattagctattcatgtttgagtgacttcacattaggtttgatcataatagatttgataggattgggtatgactagagtagactagtttaggttagatagatctactaggatagaataaatattatcagggtatgttatcatcttttgagataggatggattatatgggtaggtaggtcagaatctctattaggttaacacagaggggttatgcaactatctgatggttaaggtagtcgcatatggttaggtagttgtatgtggtccagttaatctagggcaccaatttatgttaaaacattcttatagaagtagggtccaatctattttaccagtattttgtccattagattagatctgatctgattagatgggatcaggattaaattggtataaccaaattagactagataagatctacttaattt

SEQ ID NO: 158619 - DNA, 667 bp, Zea Mays
ctctcacgtcaagatatgaggtatgggatcagtggtaatgaatgatcacagagctggtcacaaggttttaattggtatctattacattcctgagttgaaaagtaatattgttagtttgggtcaattggaagaaaaaggttttaagtatcaaggggaaaatggaaatctatgtgtttattatcaggatcacaaactgttaatttctactctgagaactgggaatagattatatactgtcaagtttggtttatcctcaccaatatgtctgttagccaaatctgatgaaaaggcttggcagtggcatgctagatttggtcatcttaattttagaaccttgtatgatctaagtagcggaagtatggtcaggggtatgcaaattgagaagaagtcagagcaggtgtgtgatggttgtgttcttggaaagcagcacaggaaaccttttcctcagatgtcaaattttagagcaggaaaacttttagagcttgttcatgcagacttatgtgggcaaatcagacctgcaagcatagggggtgcctcctattttctacctatggtagatgatcacagtagggatatgtgggttgagatgttaaaatcaaaagatcaggccttggattgtttcaaggagatcaaaatcagggctgaaactaaatctggtgaacaattg

SEQ ID NO: 158620 - DNA, 778 bp, Zea Mays
ggaggtgatgatggatgtacaataggaacaacaatttgagaaggcggagacggttgggcctgcgacgacggctatcgtggtggatcaaccaattcgacatcccttcgagccaaaggataaaattcttgatagcttgtccaagtgtctcgataccttcgggcccagggatgtctagcatgtcgtcctcgtatccttggacgactgtagtcacttctaccctgcaatattcttctggaatgtcgtttccatggaacttgcgtcctatgatcgcaaggactgtggctactttctttgtacgctgattgttaataccatatcttataactagtgtgcatgccacaggccttgtgatgtcatcaactggatagcagaccttatttcccgttgacgcgacagagcttgggatggtcgtaccctcggtggaagccggcgtttgagctgctggaattatttgcatctgtggagtggtcatctgttgaacagacatcacactcgcaatcgccaattgctgcatcaattctggaggaggattcgataacatttcagacatcaggcctttgaactctttcttggcctcctccttaaaataattcgccatctcttccatgtatcgatcacgtttcttgtacagaccttcccattgtggtccgaatccttccttccatccttccttagatgagaatcctcgtacacaaccaggatgctcagggttaccgagaccagccgttagaatgtctctctccctttgcggcttaaatgttccttggctctgcttagc

SEQ ID NO: 158621 - DNA, 557 bp, Zea Mays
gtctaagtgttttgagtctgatgattctaggagttcgattgtgtggacagaggagtcttcggatgaggatttggattactttgcggcattggatgtggctgcggcggaggcttcaccgcgtgtaatgggtgatgaggatcttctgggtgcgagtgttgggcataggcggcgaagggcggtggcgaagcggagggtgagtgagttgccgcgaagtgataggcgtcatcatggtgaggtggaaggtggtcgccttcgtatggatgggactggcaagcgggaattgttgtcctcgccgtctggggcgagtgtgggtgagggggagctgcaaagtctgtttgcgggtgaggaattgaggataatgttgttcaactatagggagatgggtatcatcccgaaggttgagccaatgtaatgtttgatgccctcgatgtatgtatgcaaccatactcttgtgcgatgaagttgcgcgctttcgttgatcaggccgctcccgtaggcttctgtacggagttctttagaaaagacttcgattttttcgtactagtattccggttgca

SEQ ID NO: 158622 - DNA, 527 bp, Zea Mays
attaagctctgataaaataagcttcattagaaaagcaatcttcatatcaaaacaatgaaaaattaagaattttaccttaaagttagcataaaatagactaccggcgatatgctgccgtcggtacctgctgaggtctgcttcaaccttcgggaggccaacactctttgatatattgccgataaccttcgccccagtgtggtcccgaaggcatcctaagctttcttcgttgactcccccaaagagtaacgcacctggtctatacccacaagatatagcatattctttcagttcttctttttcagccttcgacaattcttgcccaagtatatcttgaaaattgaagtcctcttcttccgaaatatcctcggctttctcctttccttttccagccaatgtgcccgggatctcttcagtggctgcagcagcttcttccatggccgcattcagaagcatggtatcaatttcagcgactgtggcatctagatccacatcttcagcggtttcagcttcagcactttcggcttcgg

SEQ ID NO: 158623 - DNA, 692 bp, Zea Mays
gtagaagctaacctaagggtcggacgaggcgagaagtggctggtttggcgggtctacagtggtcgtggcttgcgctgccgctggcacttcgctctctgggcaaactccggcgaacttgtgctcgggctgggtcagggacgcgcgggggtgtacggtcgaggccggagtggcttttatagacgcgggcgcggggttggcacggtgcggggctgcacccatgggcggagcgccgagggcgtgctctggcgcgccagggcacgtcgaacacatggccgtgttcatctgccctagttcttgcacctgcagagctccaaagcgtgtgaatctcgccaaatgtcttgtgcaagatctcttcctggcacctagggctagctagtttgtgtaagttccaatgaaagatctgccctagcttgtgagatatgtgggcgccaagtcttgtctgtgtgcactgttcaccagcgacaaaactgatgtcaaaccatgtcaaacgacctcgatttggattcaaatttttcagggatgtgccttgggtaatttggccactttttgctatttggtccaagtggttttggcgccagcaaaaaggtgaacacccttgatctttgggctaggggtggttttggggacttagagaattttgaatggctctagtgtgctcctcacttggtgaattgttttggggtttttgttgg

SEQ ID NO: 158624 - DNA, 595 bp, Zea Mays
gcgaggacaacgaatgtaagtctgagtgacaggtggtttggaagagtaagactgaggtggtgtggaagtggaaggtggtgtgatgggaataagaacatctgggggtagaaacagtagatgatggtggtacagatgaagtttcaaaaatgggaagaaggctcatgaaggaggtagactctgtggaataaaaataagaatgagtggaagagttgtaaaaaaagggtcggttttcattaaagctcacatctcgagatatacacatgcgacgagaagatggaccataacaccgataacctttatgttcagggctgtatccaagaaaaacacactcaacagattgagcagtcaatttagttctttcacggggagataacagtacataacacatacatccaaaaactcgaaggtggtcatatcgtggaggagttccaaaaagaacttcaccaggtgttttgccagagagtttggatgacggttgtctattgatgagataaaccacagtagaaactggttcaccccaaaaatgtgaagggacaaaagaagatatcaacaaagtgcgagcagtttctataatgtgacggtgtttgcgttcagc

SEQ ID NO: 158625 - DNA, 427 bp, Zea Mays
cgggccgacttcccccctgcccacatccacttatctgcatccgctcggcccactccaccattaagcctcgcgtggcccagtggctggaatgtgccaacatcccggccccaccatccagcatctgtgtgggcacgtctctatgccaacgcatggggcccgcatctcagtctccctctcctagcccccacgatcggacacttgcacgtgggacccccctgtcatcctggtcgacgatctcgctcaacaacctcatgcacgccgtcgggcgggtccgttgctcaggcgcagaatccggggattgaccctaacaaccttcgcgtgcccgccctctgctcgttcctacgccaggcgataaaaccagcccctgacgtgcccctctcatcaaccagccgaccgccacatatccccgtcatggacaccgcgccgc

SEQ ID NO: 158626 - DNA, 439 bp, Zea Mays
caggaacaaaagcagtttgcgatggtctaattatcttattagctaataaagcgatcctattggtaagaaccttcgttaagattttaaagcttacattcaacaagcagattggcctataattctgaatttttattgcatctgtttttggtaccaaagtgattatgccaaagttgagactatgcaattgtaaatttcctttatggaagtcctcaaacaacgctagaaggtccgattttatggtttcccaaaaatattgataaaactctgctgggaagccatccggtcctggcgctttgtttgactccatttggaaaactacatttttaacctcttcctctgagaaatgacaagttaaaacttcattttccatagcagatacttgcggtatatcatcccgtatatcttcttctatggaaaaatgattagtctcaggttcccc

SEQ ID NO: 158627 - DNA, 684 bp, Zea Mays
tgaagaagtgataaactttgtattatgctgattttcattatgtcaattttgatcatggagttgtagtggcactaagctttcaattgttaatgatgttatgttacaactaaaaggaatatggtaacaaaaaagggttattaatttctttgacatttcatttgatattgatcaactataatatcggaaatgtaggattaggcacaatgaatagtagattgattatacgagatatggtggaggtggcttctcctgacaggtgcaggaggagcacgtggtgcgctggcagccaccaccatggaagtgggggtgtggatgaccattgcatatggttcagttccttcagcagcatgtttgttctgggcttccaggaacatgggggaagggacgaccagatttaatgtgaaggccgatggagacgaacatgtcgttgaggctgcgaattaggatgaggacgagggtacggttaggaacatattcaccaaggtcctcagggcgtcggccacgcccttgatgtgccgatagtagtcggtgactgagatgtccccctgggccaaggtccaaaactcggaatcgaggtggagggtgcatgtttcctatgaactatgactccatgaccagccacatcacacgggctgtggagcgggaacgtggcaccatgtcggatagctgagtggagatggtgcc

SEQ ID NO: 158628 - DNA, 592 bp, Zea Mays
cgtgagcgagcggaggcgactggagttcacggcaggggaggccgccgcggtagagcaacttggtcgggcaacacggggttcgcggctggtttatgcagcccgtaggggagagaatttcggcaaggtagcgccacaacgaccttgcggaggatccggcggcgagtccgtttcatccggttgaagaaggtggcgagaggggcggcgatttagtcggagtggaggagataagtccgagcactgaggggtccacctgtcacacacacggtttagcgttcccagctaggtgacaggcgcgtgcggcaggagcaacgagcggtgggtgaagggaatgacagatggggcccacatgtaagcgccaggaataaagaaaaggggaagggaagggatgggctgcgtgggagggaaaccgagttgggccagccagattcggctgagtcgagttcccaagcttttctctttttttgttttgttttctcccttttcagatttagatttcaagtttgaatctatttttgtgggaagttcaaactcaggttaattttctatatttacatgacaacataaactgaatttttgttcatttatattttta

SEQ ID NO: 158629 - DNA, 998 bp, Zea Mays
taatatttaactccttcaataaggcttgaacccgtatgatctctgttgttgcatttgccaaagccttatactcggctttagtacttgatcttggcacaatattatgttttcttgcactctaagagataagattgggacctaaaaatacaacaaagcctcctatagatcttctaccattgcatctgaatatgcacttactgtcaaagaggacttgagtagcttcaacccaacttttgaacttgatttgagatacgtagaatcctcttgagtgcagaacactgaatagtagtaagagcaggtaaaaaatgatatatcttgttgtccgggaagactatcggagcttgtcaacgtgaggtattgcaaggttcccactgcactgccgtaacttgttgtatcattcggccctaacaactgccattcataaacaataaacctttcacttgtcaatagtggggtgccgattggtttgcaatcaagcatcctaacccttgaagatcaggcacacatttttattgtttaagcataatgcctttggaaatccttttcaccttagtacaaaggaaatagtgtagctcttctacatccttctacgcaaaatccctctataagtcatgtaggagagcgtacacaactgtgtttggaactcaccacaatgatatcatcgacataaattagcatgaacacgctaaagtctccacttttgtagaagaacaccaatgtatcaacttttgagctttcgaaaccgagagaacagagtttcttacttaagcgtgagtatcaagctcttagcgcatggttgagaccatagagtgccttctccagcttgcatataatcagtgatttttgagtccttaacctggtggctgcttcatacctcctcttcaagtatgccatgtagaaaaacattttgcacgtttagttatcgcaatatccaatccgtggagacaacaattgacaatacaactcggatagtggctggtttaattaccagactaaag

SEQ ID NO: 158630 - DNA, 746 bp, Zea Mays
cttagccacatagcgtgcaatttcaattttcatcttcgtccaccagtagtgctgctttagatcatgatacatcttagtgcttcccggatgaatagaatagcgactaagatgtgcttcatctaaaatttgctggcggagctcttcattctttggcaccactatgtggttgttgaaccatatcacaccttgatcgtcttctttgaaacatttggctgttccagcccttaccttctcacgtatgtgcttcataccctcatcatctttttgtgcgtcaattattctttgtaagatgactgactccagcttcaaatgatttggagtcccatgttgaatcattcccaggtttaatttctccatctcctggcataatgtaatgtcagaagtcctcactgttaaacaatggcaggaagccttgcgactgagcgcatctgccactacatttgctttgcctgggtgataatggatttctaattcataatccttgatcagctcgagccatcgcctttgtctcatattcaattctgactgggtgaagatatatttcaagcttttatggtctgtataaatatgacagacattacctagcagataatgacgccagatctttagggcatgaaccaccgcagctaactccagatcatgagtaggataatgttcctcatgccgacgcaactgccttgaagcatatgcaattactcggccttcttgcattagcacacagccgaggccactgcctgatgcgtcac

SEQ ID NO: 158631 - DNA, 360 bp, Zea Mays
aactcaactgatctggcatcatccacgcctcggattaatcgtggcattcttcatccattctgtcattcttcagctcacccgtttagctacagtaccttccactgtttacaagtcgtccgattaatcgttcaagtcggtttaaaccaatcacaattagtcgtccaagtcggtcagccgccagaatggtagcttctcaatatccactcccgttctatattccaaattgcaattgaaaggaaaacaacacaaaccatgctgagattaaaacagcgtccaccatccattaacctattctctcagagcgaaactacaaaatgacagttttcccccaacagcaaatggagtttacagacatcttcc

SEQ ID NO: 158632 - DNA, 845 bp, Zea Mays
gtttggtttgacgttttcgaagccgagcagactttttaaagctgagggggtgtttggttcccctaactagggtttagtccataccacgtcagatgtttgaatgtcaattaaaattagtaaatatagttgtcgtggatttgagaatgggacacaatagaatttgtgttccaacagagggtttatattggttcaatcttgcgccatagtccagtatagtactaattgtagtattcgcttaggaacgtgttacaacaggtgcaagtgtgggaataaggagtggagaactctagccgaatgctcctgcactttggctatttgaccctccccttttatagttcaagtgggtttttacataaagacttattgtccgaagaagagtatgccctattgtctacggcggtcttgctgatgcagctcccctgacatcgccttctggttagtgcgcggttgtatgcccggtatggtgggttgcttcatctgcccggcatacgggtcactgtagcggtttcggtactgagttttcctttagtggcgcccggtgggacccatgggtcagagtcggacggtgccgagggttgtacgcggtgatgcctcatctctccgatgtgttgtggcatcatccaagacgatatatgcgtgacgacgtgctctatcgtggctggagtgggaaaacaatggataccttgtctccccgtcaatcggggtacatgtgtgctcctggcgcgtgcatgttaggagggcacgtttcgagggcccacaagcgtactggcttccgacacgggccttgtgcttctccgccttgcaaagttgctcgacagggcttggttggccaattctcctcgcag

SEQ ID NO: 158633 - DNA, 777 bp, Zea Mays
tgacaaggtgcaagaggtcagactcggagacgatggacatgtggttaccagcaaacggaagttggctatttggatcgattggcaggataattggaacaacaacactctgtctcttcctcttgggagccatcacaatctctgaagcaaggcgggtgggctcaagaactcaggaatcagagaagcggcggaagaaaaaaagcaagaattagggttcggaactcaaggggctacgtcagcataaatatgagttggctcgataagtcgggcacaaaggtgccaggtcataactcagaaaagcgaaaatcacaagcgtcacttgggcattacctaaaatgccagcgagctgtcaaatgcgcaaacaaaagcatgcatcattgggccagcaaaagaactgcactttattcaccgggggcgatcgtcacaaacttgagattgactcattatgagtcagcctccttcaccccttggtcattacattacactgctctactacttacactacgctatactaatactactctaatctaatactgcttactactacttactactactactgctatctatactgatatataaactagcagcattatgccactgaccttgtcgtcgccgccatcgcccttgccgtcgtcgcccttgccgtcatcaccttcgtcacccttgccgtcaccgtcgcccttgtcgtcactgttgcccttgccgtcgccctcgctgtagctctcgccatcgccctcgttgtcgccaccttcaccgtcgctgctgccaccgcccttg

SEQ ID NO: 158634 - DNA, 656 bp, Zea Mays
ggcgggtgcactccgccacccggccagggattcgctctccgacatttggcacgccaggtaggggcctaggcattaggtttttgcttgtttccttgcccaagtatgatggtgcaaatcattgagcaccgcgccgagacttcggtagatttcacggtggagggagaagctgcttcctccacaccgcaggttcccaaccgcccagtgctgggcactgctacagtgcatgccgcacggcagcacacggctgtgcaaacgtcccgaactccatcgagggcttctccgggggcattatcggcagccagggagttattgcgacaccctccaagttccacggcctcaccaggggccatgaagcagtggcgggacgatgtcgaccgactactcggtatggcacattctacctcgaccaggtcgaggacgcggtcatctcgatgccaacacgaggcgtcggcatttgtgcgctcaccctcagtaaggggtgcacagaccaacgacctccgggcagaactcaaccgcaggcacgcgggagaggatgcccgagtctctttggaaaggacacgcgagcgccgccaaaacatcgatggtcgcaacctcgatcaagacttcgctgcggttgcaccgcagacaccaatgggcacccggtcccaaacgggtgt

SEQ ID NO: 158635 - DNA, 909 bp, Zea Mays
acgggggaaacgcgcccgcgctggcggctttgcacaacggtccctatcgatttgaacaatccaaaaagaggtcgcggcactattcctgtgtttcactgacatttgcgtaaaaccccttctacttctatttcttcacagcgtcaagtccacgacgtgaacaacggtgggcgcgccctccggcgagcttgaaccggccgggatgcacaacgactgacgccctaatttggttgacaccagctcctacccctagcgaccataagccttccgttaattgcacaaatccggcctggagcttgtctgcccacgacgacggcgaacgctatgaacaaactgaggtgttctcggtgattgggtgcggtctagctcaattgatcgggtcgacaagcatgccaagtgtgcctgagtgctaaaacaagggtgaggagggcgagaatggacctggagacggcggtccaaggcgtggtggctcacgacagcgcggagaaccgaattgggggaagaaaggaattagggcgctacggtggctaatcagaggcgaggtctggtgctctggctttgtaacaacctagcggagctaacggtgcactcaatttatagcctccgagagtggtggctccgaatttgggaagaagaaggctggcgaccagatagaggggtgagtcactagtgcagactatcgtggctttcactggggcaacgtctcaagcgatggacaaactacctaaggcggtttactgcgacgtggtaacgcttcttagcacgtggcggccgggcggcaagcagccaacgccggtgaggatcatctcggccggccgcagagcaagtgggacggtggccagtccagtgaccgggtccgagcttatcctggcgcctagatcttttactccccgtggttatccactttgcgca

SEQ ID NO: 158636 - DNA, 706 bp, Zea Mays
atttactcaaaggtgaaattcatacaaggtctcaaattcaaatattggaattcaaaattaaagaaggaaggagaaaataaaaagaaaaataaaagaaagaaatagagaaactgcgcatttgggcccaaactcctttcggcccaaaccccctcagccgcgcggctgcgcactccacgcgtgctacagccgtcctgccgcgcgggccctcttgtcggccatccaaaccgtgtgccatctcgccccgcgcgtgcgtcactggatggcggggcccacgtgacagcctcctcccctcttcctcctccgttcaccgcagctggtgctgttgggattgaacgagatctccgcctaccagattctacgaaatttctggcctcctctctccgcgcgcactaagttggtggctggctggtggatccgcctcgtctgacgccgtctcttcctccccgggatcttctcatgcaacgaacccacgatttgggcgcgaccgagtcacaacaggaagatccgagttcgccgtagaactcgcgtcgcccaacctccttgtcgcgggactcgctcctctgacgcatatatatataggacgctgcccttgggtcatccggtatgtacgcctacgcgcacgtcgaggtagcctagcatacaacaagaatttggagaagaggaacagtggactgcggccgccacggggatattcacctatggcggc

SEQ ID NO: 158637 - DNA, 458 bp, Zea Mays
cttcatcatattgagttcttgcgacttcatctatgcgttgcctctaccaaattctatgcctcttcttttcctttgtctggtctagttcactagcaaataatttttttaatttcaagtggagaggatgaacaattcttgacatccttccctcgatgtgctaaatgttcgttgaaacgagtagcaccgccaccactctttcctgcataacaatacctgcacctgaaaggctgaaaccttgaccaatcttctctccatgctcccacactaggtctgacattttacatacaacaatgcaaatgttaaactatcaactttcttgtggatgcctcactaacataacaaatcttcactaaatcttgctgtcataatgcatttcgtataatgacacgccatataataaggaaaatatgaaataagtccacttgttgtctgttatgctacccaaaataccacctaaa

SEQ ID NO: 158638 - DNA, 484 bp, Zea Mays
acctgtgagagatggtgtgattgagaagcctgtgagagaccctccttaaaaacaaatgtggattctaaaacctaaccatcacaggaacatacttgacaccctttctgatatctctagtgattcccttcctagagcccctcaactgtccaaaaggagagcccccacccacaacaaattccacctaagagggatgtgaggttccattgtgagtattgtgagagggatgggcatttggctgcgtttttctttaggagaaagagagatgaccggctagtttctgagtcgagtagaaagaacatggaccacccttctcatggtgttcatgatcctcctgttcagatacgtcctgcgaggcctagaggtgctttgccacttgctgctaggcctcaggtggtgaggccacgtggtggtcatgcccggcggggtgctggtcatgtgccatatggccaaggaccccttggcagtggctttggttcttacttcc

SEQ ID NO: 158639 - DNA, 338 bp, Zea Mays
aagggatgcttcaatggtatgaaatgggcgtatttagtatctctgtccaccacaaccaaaatggagttgtacccgtcagatgatggcaaaccctctacaaaatccatcgtccaatcctgtcaggcccctgccggaatgggtaatggttgcaatagcccagctgtatgggtatgctcgtgtttagctttttggcagatgtcacactgtttaacaaactgttccacatcactctttagccctttccagtagaaaaactgactgacccgataataggtcgcctttaccccggaatgaccaccaatagcagtagaatggaaggctataatcagcttggtttg

SEQ ID NO: 158640 - DNA, 325 bp, Zea Mays
ttgtgttgtgttgtgtctcattcaggcactctgtgccatgcagttgcttgatctgtgtgtgtatgcctgttctcgctagtcatgtcttcttgtcccaggtgaggcctggcctgaggaagaaggggggtagtattcaaccggttgaaacacaagtcagcccagcgccactgaagtactgaactgaggctaacttatttctgtgataataacatgcaagcaaaactttagtaggaaaaaattgcaaccgagttcacgtccggacacatctacctctcgcgcgcgtgtgctgagtgagtccaatgggactagtggctgactggcacgc

SEQ ID NO: 158641 - DNA, 409 bp, Zea Mays
cctcttgggagttgtggcgggagcttttgcatccttcggcaattctgcttctaccggtgggctcagaatttctggcagcgctattgttttttcaaactctagttttttggctgccccatcttcggcttcgactggctcaactataggcatcttcgacactatagtcgattcctcaccgctccgagcggcgggggcagcttgttctgctttggcagcggaagaagtctcttcaccaaattttgacactatggccgtttcaatatatcttggccggtgggtcaaaaccttgattttcttgcccttcggcacaacagagatggccgaagtggcagttttcctcttttttccctgctttcgcgagggatagtaataatcaggatatataaaaccaattgcatcgaaaaccctg

SEQ ID NO: 158642 - DNA, 425 bp, Zea Mays
aataaaatgctcatgtttcctctcatcttcagcaacttcatcaggtgcatatctagatagctggataaacttgtcgcagtactcactgactgacatgattccctgcttcagcgacaaaaattctttcttcttaatcttcatcaatccagctggtatatgatggttcctgaactgcgtcgtgaactctgcccatgtgatagtgttagcagcatcgtgtgcagctgtgtatgaatcccaccaatcagcagcaagacatgtttagacgtccagaagcatataaaaccttctcccggtcagtgcactgagcaatgttcaacatcttctctatggacttcagccaatcatctgcgtccagtggatcaggagaactagcaaatgttggtggcttatggctcatgaactcccggtgcttatctcggggtgga

SEQ ID NO: 158643 - DNA, 798 bp, Zea Mays
gccgagacaccgtctttccggtcttgtccacttgccgcgcgagaatggacctctcttcctccgccttccgagcagcagccgttgtagtttccgcctgttgttgaagacggaactgcccaacctccatagtctctggctgtcgatgaaggcactgctgtccgatctccatggcctccaccttatcgcccaagcggtccagggtccgcgtcatccgatcccaattctcatcactcttctgctctgtggcttccatcgtctccagtagcagccatgtctgcaccgacggcttggcggttggtgccgtcgtggaagctccgaggatccaaagctttgataccacctgtgacgccccgtggccgccgatgagtcactgccgggacgtgagatcgtcggaggcacgacaatcgcaacgcaactcgagataagttgttacgaagtggttttactttctgttattccatattcctgcccactggcattggttcgacatatatggttagccttggccagcccaatacagattcgatacaactccaactggcccacggcccaagtgccagcctaacgattgaatcatcaactactctcacgctttcccaccaacatcactagcagacgccttcccatccttaccaggcatgacatacccagccctacaagttgaagtgggcgacatacctttccccatgccacaaggcagtgcccacctttcgcctctttacggcctctccaaagaaaaccttttcttattctatcaatggcatctaaaccccgttgggggatgtcaactgccattgc

SEQ ID NO: 158644 - DNA, 443 bp, Zea Mays
tcgtttggctctgtgtctaagtgttttgagtctgatgattctgggagttcgattgcgtggacggaggagtcttcagatgaggacttggattattttgcagtgttagatgtggctgcagcggagccttcgccgcgcgtggagggttctgaggggctcccgggtgcgagtactgggtataggcggcggagggcggtggcgaaacggagagtgagtgaattgtcgcgaagtggtaggtgtcatcgtagtgagatggagagtggtcgtcttcgcgtggacgggactggtaaacgagaattgttgtcctcgccgattggagcgagtgtaggtgaaggggagctgcgaaatctttttgagggtgaggaattgaggataatgctgttcaactacagtgagatgggtatcatcccgaaggttgagccaatgtaatatatgatgccctcgtt

SEQ ID NO: 158645 - DNA, 584 bp, Zea Mays
tgactagagttttggctactattataggtcactaaatgagattctcttccttaagagagtgttggatatcaataggtcaaaagctaccacaaactacaagactttttctccctcctgattcctattaccatatccaaaacctttatgaaccacctcaaaacttgcacttgttctgcctacatgttcaattaaggcctcctatgaaaagcttcttggtagtaggtatagctctaaccttaccatttaagtttttctagaaaagtttcttagcactctcattctacttggtggacatacacactaattatgttgaagaacatatcacccactgcaagcttgactaaaataaccctatcttcttgccttctcgcatccaccatattcttgatgctcttatcagtcaaaacttctactccatttctatatacattttttcctatgtaccaaagcttgaaaccgatatgtccatcttccgacccttctatttagtatcttggacgcaatagatattttcacacattatgttgttgccttagctaacccacttaacttgtaaatgattctatattccaactacctaaacg

SEQ ID NO: 158646 - DNA, 466 bp, Zea Mays
gtacaagtggctctagtatctagggcctatcgatgccaccagctcgttgaggtcctcttccttgtcaggttcagcttccgcctcatcgagatcctagtagtgctcttggatgtcattgctggacgtgtcggtccctcctaaggagtcatcctcctcattagagatctggtactctatgtcatccaagttttgcatcatgactctggggtccactagttctgttggtaccttcggctgagcctcttactccatctaagccacctaatcgaacctgtgtgggtcctcaggctcatagtcctccataggttcatccttagtcttagagaaccattcatcgaactccatgtctttggggatgtcctcgacggtgatgtgcaagggtctctcttccaccatagtcttagtggggcgggaactgtctagtgtcgatacagatccttccactggtgctcttgcgggcagtcag

SEQ ID NO: 158647 - DNA, 707 bp, Zea Mays
cgcggtggcgccatccttagctccatccgcccctctcgagcggtcatacgagtggcccgccatgcccacacgatccccagacaccagtggttctccgtgatcacccatcgaagcccaagcggcagaggtcgaggcgaattgcacggcagaggcaaggtcgtggctgctctctctcctgttcctcacggtaatggcgctcccaaactcggctggttagttggcctctattctagggattagggatgcgaggcggcgcggtcgctttatagctagtgagtccgcgacgagggggatccgagcagggggcacgcccggcgaattcggcggattcagttgcaacaaccccgatctgagctcggtcacggtagaagatggagctgacgaagatggcccgcgtgcaagtggctggcgcgaggtaatcagcggctggccaaaggggcccgtatgtcagcgctaaggtgacccaaattagcccagtgtaccgttttaagggaaagatgggccagcgcgggagagatggggaagtgggccgactggcaggccagttctgcggaagatgggccagcacgaggggaaaatggcccaaggcgccaaatggggtcttctccttttttatttatttctgtttgcattttctccactaaatttcaaactctagtatttgaattcaaacttgtttgtgagttcatacacaggttgaattccca

SEQ ID NO: 158648 - DNA, 408 bp, Zea Mays
cggcatcagcgaacaaggacattaaggtaagaggccagcttgatgtgtcctacaccaagagatagaaaagcaaattttcagataaacctgggtaattgtcttctctataccttttaccacacataattctgaaataataatgaacacataattcaaagttgttctttatagagaaatatcttttatcggtggccacttaatcttcactgaacactataaacatctgattgtatccacttcaatcaaatcactctatgtaaatggagcatcaagggccattcatggtgggtagtgacctattggtccctaaacaccaccttttacctctacagactaatagacacatcgaatcttaccaaattcatttgccataagcagaagtgcacacaaaggtaataaatgcttaag

SEQ ID NO: 158649 - DNA, 589 bp, Zea Mays
taaaaacattaaaatgcatagttcgaaacataaattgttcatcagacatagaacatagttcaaccacaaatgcacaatcataagacagaaataaaacatgcatatgcaacaaagtctggatgtccacacatgagctccccctgacaaatgcacaatcatgttctcccactcccctgaatctctccccctttggcatcaattaccagaaaagaggtcttcactgaccacatggaggacgaggatacatgttataatagtgagagctgaaggtgtcgaagacagaggagaactggctgaagtctgactgcaactgctgttgcctctgacgaatgtcatggatgctttcatttgtggacaaggtctcaaactgagaggacagagcacccatgttatcctagaagctttgctgcatactgttcatcctgttcattatgggatcatggacagtattatggatatgagtgcgaagttcagagaactcagagaacactccatcaaattgatcatcaatgttgcagagtctcgaggtgattgcagagtattgaccatccacatgagtctgcagagcagtcatcctagtgtccatggc

SEQ ID NO: 158650 - DNA, 529 bp, Zea Mays
ctttacccaccaccatttctaggttctcgtgtgctctcccctttttctttccccccatatcgtctccttcctggatgataggttaaccccgcgtggggttgggaaagctttggtaggttgtgtgcgcatcatgattttgttttgttcctcgctcgatcatcataacactaaaatcgtttggtttcatgagaagaaagggagtcacaccgtgccgtgtcggcttgctgtgggagtgcacactgcccccgacgcagctcgtcctcaccgtccaccacggctggactgtggcgtgtcagctctagatgggacacctagcgcttctccctaacctgtttcctgctaactgctaggtattcactgttgagtggcttcagtctactgactgggcgtagcggatgtggattggccttctcctcggtgccgtatcaatgtgtaaaacatcacttatttgtggctaaatggagtatatcatcattgtacctttgtccttttacatttatataaaacctcaatcggatggagtctattc

SEQ ID NO: 158651 - DNA, 619 bp, Zea Mays
tcgtgcctcagataagtggattacgctcggccatgaaaagatctttatcacagatgagctcgggacactgtggccgctatatcgtgcatccacttgcgctggcgacgtgaccaagcgaccgtcgtcgaggtatacgtcgcctgccgtgatcgcgacatgccctgaccctttaaccatgtagcagtgagtcgccttagcccacccgttcatcgccagtggtcttgccacagtaaagtccacgaattgcttgcgccagtagcttcttccctctccgatcgccagcgcaatctcttcaaattgaacgctaccgccctcggatcctataaattgagcgtgccattggctccgctatgtagtcaagcacccaacacaccaacccgagcctctgattatccactagagagccccaatttgagacttcccccaaatcggtccagaacatcgtactgagagagctcgtcgtggccagcgcgctacaggtccgttcacaccctctgttccctcgttttagtactctgatgcacccatgatgctcctcgacccatccaattgagtttgagcctgtaggttcaccgggaacatctcggtttgtctgttgatcctgctgtcaccgtgggtg

SEQ ID NO: 158652 - DNA, 458 bp, Zea Mays
gtttgttggctggtaaagccgggtcacgtactgaagaaagaaagatagctagactctgtctctctgaaccgaatgcatggaatgctgaagatctctgagatctgaaccagccactgccggtgtggaagcggagctgggagctggagactggagtggaaccttcttttttcactgttgtttgttgttacagcacctttttttattattgttacagactgacacttaggtacagcgctgtggtaactgttactgtaacgtcatcccagctcagcctcggcttctgctacagcaaataacggcgttggcgcgttgccaagtgctaagctagcagctatgtactgccagtttcattcaggtccatgcctccgcggctccgcctgcctgtcttcgtactccttcctgctactccagtccggctccggcgcggtgctgcacatggaggcaggtccatcaggtcc

SEQ ID NO: 158653 - DNA, 579 bp, Zea Mays
cttgccatccataacatgatcaagctgaaatggttgaacatcaacgctttgctgttattttagctattcaacatcaccatttctgttcatgatggggttattacctgaatagtgtatgtgtgcctggctgcatatatattgctctagtataccttctttagacagttttttatataatatctaggtccacccctgcatctggtggttgttgatccggtgacctgcccacggcgactccaccagaagactaagatggctccagggaagaggtccgcatggacctcacgggaaacccgaaggtaatttactctttatggcaataccttcttaatttattttgtttcagtattgtattcctttattttactttgtgttacattaacagaacctatgccaactgattacgagaaaataagggctatgaatatgatgaagaacaatcaattgtttcaacggctaggccttggacagctgaaatcactggtgactgctacatctgcaaacaacaaagacgactgtcctcagcaatcagagagtttatatgatggtgaaaacactgacaattctaatgaagaggtc

SEQ ID NO: 158654 - DNA, 504 bp, Zea Mays
cgcgtgggtttctgatgcggtataggccttgcaggctgcgcacgcctcctgcatttaatgcggggtgcacgtcacctattacttggtgtgaatggacacgcactctgcccacacttaacgcaggtggcgcccattatgccagaggcttacgtcaggttccaccggagggcttacgtcatgcgccacgggacatgtggcatcaacaggtcatcaccttagcggggagcaacaactagaagtgcatgtacacatggcggctccgaaccaccttagcaggggtctggaaggtgctcaggggagtccgggtccctatgacactgtctcagacatgtagcagcaccagacctctttaggtcggaggttcggatgacacatgcggttgtccgagtccgtcccacagggtccgcccccggatgtcaaagagtccctattctcagggcacgtggcggctacagagccccattgccagggatccggagagctcacgtggaagctggcccccac

SEQ ID NO: 158655 - DNA, 792 bp, Zea Mays
gccagacatgctcagggacataggctcgaaccatcgtaggaagaatccgttcaatccatatgtggacgtcatgactcttcatccctaagactcgcagagtagataagttcaccccctactcaggttagctgcatacccatcagggaacatcaacatcttgatccactgaaatacttccttcctctgggccctacttaggatgaaatcggccttaggctttctccatgtctttccaccactaggtggcttcatctcttggtttggtctatcacataacgctgctagatccactcttgcctttacgttatcctttgacttatcaagaatgtctataattgttgcccaaagtgcctcggcaacattcttttcagtgtgcatcacgtaaatgttgtgtggaaggagcaggtcgtcataataggggagtcgagtcaagcccgacttatgtgtccacatatgttgctcaccatatcccacaaaacgaccttctagattggccacgagcccatatatctgttaatgaatttcggcaccagtcattgttgcaggtgggcagtctgtcactacgacacctttcgtaaagttcttgatgtctaggcggaatggatggtcagagggagaaattgtcgatgtttatcgaacgacgaatattcgccaccctttttcaaccaaatgaacctaagagcttccttgcaaactgggcatgggaacttaccgtgaacacaccaagcgcagaatagcccatacgccggtaagtcatgcatggagtactggtaccaaacatgcattttgaag

SEQ ID NO: 158656 - DNA, 613 bp, Zea Mays
gccgttaaacactaaatctcccttcggatatttcatttttcgcgcatagtgtctggcttccagaacttcttcttcggacaactttttccctgaagtatgacgataaatataatcagcatcctcgatagcggctttggggcaggagattttgccctttctcccgcgtttggtccttctgccatgccagcgtctgaagcctgtggatcaactttatcttcaggcacgatggacttcgtctcaataggtgctgaaggcccaacttcgacttcgacctgaactttcgtagcttaggcaaatttcttaggggcagggctcagggccttcgtagtctctataacagtgtctaatacgctggtcatcctcctcctcttgggagttgcggcaggagttttttgcatttttagcaaatctgcctctgtgggtgggctcaggatttctggcgtttttatcaccttttccaccggtggctcttcagccttatcatctctagcttcgactggcccgactgtaagcaccttcggcactacaactggctcttcagtactctgcacaattggagcagccctcttagctaggcagctgaagaggttcccgcgccaactttaggcaccac

SEQ ID NO: 158657 - DNA, 859 bp, Zea Mays
gcgtatggtagagcacgacctcaccctagtgagggaactccgcctcgcccgaagttgccctcagcctcgaagaaaactccacctcgcccgagctcagcatcggccaactgccctagcaacaactccccatgaatcacgcaggatgccactccttcaattgttccctacacgactgcatgccctagagcaggctcagccgtagccttgggagggcttccgtctcgcccgagcgtggcttcggccttgatagcattgacaaaaggacgctcgacgtcaccagaagctacatagtcggcattaagatactttacggattaccaaacgctttttgccatacttatcactgtttcaaccactacgactaggacaacacgttcaccaaacaagctcgcttatgcgtccgagccctagatcctggcctcggctctctactcggtaaaagatgaaaatatagggatcggacatcctcctcccggctcaactcaacagcaggtacaaaggccataccgatgaccataccagctacaggggcttggacacgtctcctctccaatacgcgacaaaccatggcgctcttggtatccctccttgaggctataaatagaggagctcaaggcttcgtttggggagaacacttcatgtttttttacctccatgactgatattggcacttgcctcaatcacaagggacttgggaaattctccctctcccgacgagcttgtatcctctactacaagcacttaggtgcaagtaatataagtctcatctccctctgctggaagaagggtcttctcttgtccagaccgagcaaaaggcttgtgtccccttgcatcaccctgaaaggatcattataccaag

SEQ ID NO: 158658 - DNA, 517 bp, Zea Mays
atgggatatcgccgttctcattctatctggcctaggggtttgtttttgctgttctaaacatatcacgtcatcgtcggacgccatgccaccgtcgactataaatacactgtggcccatgtgggtattccagcgtaaccgataccaacagctgacatctagttaatactgacagcgacggtggagcagctagtcgatgacactactatgtacctaccgacaacacttaaaggccttatgcttagaggtgactatacttagaggtgacgatctgtactatattaaaacactagtttcaacggtcgtactatgtcaatgttttttttaaaatccatatatttctttagaatcaacccgcattcctatcatctcttctctactactggttttcatgcgttgttcccctctagtgaccgccgtacgtcgtcgtgcttccccgcatctctgaaacgaactcccgcacgcctcacgcagaaaccgcctccacacatcatgtgccttcctccgcctgctgtcacca

SEQ ID NO: 158659 - DNA, 701 bp, Zea Mays
gctcattcttcatatagcatacgcttatttacattggtactttatatgttattttctatagttactttctcagcaccaccatctacgaactaaacctgctcagtttggttctgcttcctgatcttcttccacacatagctgtctgcttgacaaatgggatcttgtgacatatataagccaagctaaccctacgtgcttccacagttccatatgttgtgacctttgatccaccccaagttgttagtgtgtcctgttttcgccacccttttgtagccacttattgcctgctatgtgaattgtgaaatgaccttttttctcattgtgaagcgctgtcttgtatccaacacccatgttgcttgaagtcattatattcttgtcttcttgttggcatttactttgttgttagtatttactccgtatatccttattttttagcttctgttttgatctgggctgctccttgctaccccttttcacccagatttacaattaaaagtcacgggactgaatttctttcttattaaatcacagtccaaaatccatacaggacatatagataccatataggtattggatacagtttgtatggttctgatgaaatctgccaaggtgtacccgagattacattaaaaaggggcagacccggtgccaggagactcccacatgaggccttgttcggttattccaattctatgtggatt

SEQ ID NO: 158660 - DNA, 1497 bp, Zea Mays
gccggtcgaagcccaagagggagatggcccacgttactcaagaagaagaggaggccaccctgttgctcgtgaagtcttccccagagaaaattacggtgccagaaaaattccccattgctcaatccgaaagagcgtggaaatccagcgcccaaatcgtgatcaaagaggaacgggtgctcgcccacctcgatgataggaaggagcgtgatgcggagacatgggtgctggacacaggggctacaaatcacgtgtcgggcgccagagctgccttcatcaagctcgaagagatggagctgggatctgtgcgtttcggggatgactcgatggcacggattgaaggccgcgggaccgtcgcattcctgtgcaagactggagaaatcagatcgctgggcggagtctactttattccccgactgacgacaaacattgttagcatcggtcaactcgacgaggctgggtacaaggtcgatgttagcgcgggagtaatgaagatccaggagcctggcggtcgactgctggcgaaggtacggcgcgaaacaaatcggttgtatctgctccaagtcaaaatcgccccggcaacttgcttagcagtgcgtgggcgaaatgatgaagaggccaggctctggcatgagcgttttggccatgtcaacatggcggcgctccggaagctagctcgggaggagatggtgcgtggactaccattgatcgggcaggtggacagggtgtgcgaggcttgccaagccggcaagcagagaaggacctcattcccgatagaagcagagtaccgcgctcatcagcgcctcgagctagtgcacgcggacctgtgtggtccaatcacaccggcgacgccacgaggtaacaaatattttctgctcatggtggatgatttcacccgatatatgtgggtagccgcaatcccttcaaaggattgtgctgcggctgccatcaaggagatacaagcacaagcagaaggtagatctggggcgaaattgagagcacttcgtacagatcgaggaggagaattcactgcaactgaattcgcgaagtactgcgcagctgaaggtatacatcggcagcacactgcaccttacagcccgcaacaaaatggagtcgttgagcgcagaaatggctcagtcgtagccactgcaaggagcatgctcaaggccaaaggtttgcccggctggttctggggtgaagctgtaagtaccgctgtttatgtgttgaacagatgcccgacgaagagcgtggacggcatgacgccattcgaagcatggcatgggaagaagccagcagtgaagcacctcaagaccttcggatgtcttgtgtatgttcgaaacacaacaccgcatctgaagaagctcgaggatcgcgggaggaaaatggtgttcatcggctacgaacacggctccaaggcgtacagggcatacgaccccgtcacgaagcgtgtccatgtgacgcgcgacgtggtattcgacgagcgcgcccagtgggactggg

SEQ ID NO: 158661 - DNA, 332 bp, Zea Mays
atagtggtcaccctgagttaagtaagcatgcaggttgacagtaaacaatttgagcgcctttgagaatgaagtctttttattgatgatatatttcccagtttacagagtacaaggccgtcccaatagcttttgaaatatagctaggggtaaaacttcctgagatgttctatattccatgagttcccaattttcctgtcgtccatttgagtaagacgatatgatctaggccgagtgacttctgctactatgaatggcccttcccatagtggcgacagtttgtgccgtccctcccccgttagaactcggcggaggacgaggtctcccactgtgaa

SEQ ID NO: 158662 - DNA, 566 bp, Zea Mays
gtaaatcttcaatgaatttttccgagttttccgttttgattaccacatcatctacataggcttccacacgcttgccccagtgatcggctaagcatgtttgaatggctctttgataagtcgctccagcgtttttgaggccaaacggcatggaggtatagcagaaagcaccgaatggagtgatgaacgctgttttttcctcgtcttcttttgctaagctaatctgatgatacccgaagtagcaatccaagaaagacagcacagaacatctagcagtggaatctaccacctgatctatcctaggaagcccgaagggatccttcggacagtgtttgttgagatccgtgtagtcgacgcacatgtgccaatccactttattcttttttagtacaagaacagggttggctaactactcggggtgtaacacctcactaataaatccaaccgcgaccaagcgggccagctcagcgcgaatggcctctctcttgtcgggcgtgaaacgacgtaatttttgccgaatcggcctcgcctgaggataaactttcaatttgtgctcggccagttctctc

SEQ ID NO: 158663 - DNA, 692 bp, Zea Mays
tttggcaatttgtactttcttggtcttggtatgctcgtaccattggaatcttgcatactcttatttttttatatgtgcttacctttatatcccaatatatgtttaagacatttcagttaacgtgcccttgaccacccttgtttcttaatgatccatgagcggtcattctactttgcatatccttggtgatcccgttgtctccttgtaactccactcggtaatgaatctttacttcaacccttctattggaaccttaccgatcttacccttgattgttttctccactttgtcgtttcgcgagtcttgtcttaactatatcctttcttatgctttttaattattatcatatgcacccttgacacctctatatcctacattgatgtttgtctcatacatgccctttaaaatcgcccctctttcgtctcataccttctttctcttggtcgtatcctcttctttggctcgcgagtttgtaacctcatcctttgttgtgcttttgtttcttattgcctttacccttctcattctctcaatcttaccttggtgattacgctatgttcgttatctaaaacctccaatctcccaccttattttaagtgtggtctcttacttatctcacccatggttatatcctatactttacctcttgcaagacttatcttatctctattcttgattgtatctagattcct

SEQ ID NO: 158664 - DNA, 373 bp, Zea Mays
gagggtgaggggactttgtttaaaggctgggccatgctggcccacctatcagctcctttggatgtcgagccgagtggtgtaaaaaaactagggggatattataatgtaattaccctgttgaacgatatatttcatgtatgtagtaggtaacagtggcatgattgtactttgagatccgcgaccccgcctaatttcagctcccagcctcctattttgtcaaaccacctacttctcttgttttcgagtgcttaggcccacccttaaagcgccaacaaacatatattttcgtttgttttccaaatacgatgaaaaaagggacaattattcatcaacttgcaaaacatatgaaataaaatgatattatttcgtcggc

SEQ ID NO: 158665 - DNA, 887 bp, Zea Mays
ctaatatcttgggaggtttcgtgacactagcgacattaaccagtccagatcccgctatacccctactactctacattgcagcatcacccagcgtagtcagcgcaaccctggtacaagaaaggtgcaaagaaggcaagacccagcaatgcccaatatactttgtctccgaatactcatccgttctaagtgcaacatgactgaattagaaaacatagcctacacggtcatcatggcttcgcgcaagctaaggcaatacatccaggcgcactaagtcagggtcaccacagatcgaggtctgggagacctattcagaaatcgcgaggcatctgcctgaatatccaaatgggcagccgaactctccggatacaacgtcaccttcaagccaaggacaacaatcaaatcccaggtcttggcagactttatagcagattggacagggccttcggagccacaccagcttcacgcagagactatttggaccatccactgtgacggtgcatggtatcatgtgggcgccagcgctgtagcaattatcacatcgcccacatgcctcaaataaagatatgatgcacgccttcaattcgcacttgaatcagacaaatgcacgaacaatatagtagaatacgaagtcgtcatcctcagactccgcaagctccaagcccatgcatagtcaaaattgattctaagatagtcgccggctaaatcgaaaaggactgctccgctaaagagccagttctcatgcaatatctctcggtcgtccgaagtctgaaaaagcaattcaaaggatttacattgcaacaagaatgaagaggccgacatgttggcgaaagcagcagagaaaggcgatccgctgctatttgacgtgttttttcacacaattggcacac

SEQ ID NO: 158666 - DNA, 657 bp, Zea Mays
cgattaaagccaaccaatcatgaacaccagacaaacacaagggatgaccattgcagctctatttagcgcaaaaaatgaatgtctacgacgccaaaaaaaatagttgcgccaaataaaaaggagaagccgtgttgcttgtcaggccttggcctagcatgtgtgcgagaaaatatcccaagcccctggagcccatgagacagcagaaggacgatggaaaagttgccctcaaggacctgcactcggacagacactgagtccaaaattgggtgaggtggaaccaaaagagggtcgggcgatccgagcggaagccactcgtgtgaaattccacgtctggtccgggactgaccaccataagtgactgatcgtattaaacgttgagccacatcaagagagtcagttctctttccgctcatgacctacgggcccctaggtctgcagtccactcatgacctatcaatcataggtctaagtgcactggtcatccacgtgacccgcaatacaacgagccacgtcgagccccagtctacgaaagctagggtcatcgtggcgcagaggcagtaatgatgacgccagagctccccgccgtccacacgtagtcggtcttaaagagcacgattagagaagctcaaacgaccgaggcatatgccgacaagcacg

SEQ ID NO: 158667 - DNA, 548 bp, Zea Mays
acatggcgaagacgccaagaaggcccttggccagacgaatgaaaagtcctcggcctccaccccgtccctggcccggaccacttcctctcccgctgcggtccatcggacgtgaggcagcggcgacgtgagaggaggatgggtgatgtggaggctgaggaggtggctcatcaaaagaggcagggcctccaaaccctgagggagcccactttgtacgagcagctgggttggtggaatcaacccagtagggtacgtagcgggagtgtttgacaggtttttcgaagtgagtctgggtgaccacttcgatcatcttcataataaagggtgcatgaagacacccattgagaggagaccaggaagcacgaaggatctcttcccagatcatgtcaaacacattgatgcgggcgagactgttgggagcaaggaggagaaggaagacccgactctccccaaggacgttcatttgattcccgccctttgggagaacggtcatcttggacaaagagttaaggtacctgtagtacctatgcatgttggcggtggtccagaac

SEQ ID NO: 158668 - DNA, 530 bp, Zea Mays
ggattatgaaacatttttttatctctactactctataagaatgtaatgtaggtgttcacatcccgtgcaccatatccctgcctccgacatctttgcccctgttgtgcctagatctcagtcgatggaagcgcaatttcaggatgctccgcggccgccacagccatcctcggcctcactggcttcacgaccaccctgccatcctcgccccaagcctcgccatccccttcccttacatctgtgtccctgctcttccttcaatggaaggcagcgactgcctcctccatcctcgccccgctacccggcatccccttccatcggcgccccctccatcgcagccccgcaccacagctgccatgccctgcccttccatcggcgtccacatggccataccccgtgcatagctgccgtaaccgccacatagtacgcccccctacattgcgacactgcctagccctcccttccttggaccctctgcgacctgcggctgcgacagggagacgagagcacccgcaccaaggtgagacgtctcg

SEQ ID NO: 158669 - DNA, 638 bp, Zea Mays
tgagcagactgtgactgagggcgaagatgttgagagtgaggaagactagtattctgatcccaacaaagcctagtcatctagattttgaaaattttactttgtctgaagatgacatgcctatgatgatgaaattgggctattttggagaggctgaaagcaaacttattcgatttgctggagaagagactaccccagagccgaagaaggatgaagttgttgttttcaagagcttcttcagagcggggctgcgatttcccctgaatgagatgataggggtagttctaaagaacttcgaaatatatcttcatcagctgactcctaacgctattgttaggctcagcgtctttatctgggccctccgaagccaagggatgagcccagatgccgaagctttctgccgagtgcatgagctgcactatcaaacgaaggtcagggcagatggtctccacaaaaattttggttgttataattttgcgtatcgaaaggatacgaaggcaccagtcctcagctaccgcacaaagtggccaaccggctggaaaaatgaatggttttatatgaaggctgacgagaaaaatagggaaaaactgatgaccatggccatgagtccactgagtttgagcttcggaatgaccaggcct

SEQ ID NO: 158670 - DNA, 736 bp, Zea Mays
atgtgtgtagattgtagagccattaacaacatcactatcaggtaccgtcatcctattcctcgattagatgatattcttgatgagttaagtggttctaaaatattttctaagattgatttgcgcagtgggtaccaccaaattagaatgaaattaggcgatgaatggaaaactgcttttaaaaccaagttcggcttgtatgagtggttagtgatgccttttggattaactaatgcccctagtacttttatgcgtttgatgaacgaggttttgcacccatttattggaaaatttgtggtggtttattttgatgatatcttgatctacaacacttgtttatctgaacatcttgaccatctacgtgctgttttttatgctttgcgcgccgcacgcttatttgctaaccttgaggaatgcaccttttgcaccgaacgcgtattgtttcttggctatgttgtcactccaaaaggtattgaggttgatgaggccaaggtgcatgctattcagagttggccaacgccatcgacggtgacacaagtgcagagttttcttggacttgcagggttttattgtcgttttgtgaaggatttcagcaccatcgctgccccattacatgagttgaccaagaagggtgtttcatttaattgggggcagtcacaagaggattcttttgctcttttaaaagagaagcttactcacgcgccactactccaacttcctgactttggtaagacttttg

SEQ ID NO: 158671 - DNA, 949 bp, Zea Mays
gctatgccattcggaatggcacatttgcatatgcttttgtgtgcaatgctctgattgatacctatgcaaagtgtgggtcaatgaacgatgtggtaaaggttttcaatgtaatggaattcaaggatgtcatttcttggaacgcaatggttactggatacacccaaagtgggaactttggggcaaccttcgagcttttcgagaatatgcgcaaggaaaatatcccactagatgtcataacatggagtgctgtaattgtagggtatgcttagagggggtgtatccaagaggcccttgatgcattccagcaaatgattcttgatggttcagtgccaaattctgtcactatcatctctctattgtctgcttgcgcttccttgggagcattgtctcagggcatggaaattcattcatactctctgaagaagtgtcttttatccttggataatgattttggtggtgacggtgaatatgttatttgcattgaaaatatattttcttcaagtttgcgattgtgctacatttttctgcttttacttcgactatatgtcaatgtgccaccaaaaaaatcgtgtttcatcaacttatgatgagtccgctcaattgtttcttgaatataattttttgtagaaccaaattgaattttacaaggtggaatattgattagaaaaaggtgggatgctgaccgggaaagcgctactcccttgtatgaactagctggtcgatgattttgtttcccatccttttttatttcttgacatccgtttgttcattggggagcacatatgtagaatgatgattaatgtttctgcatattaatggattttatcataatatgttgccgccgtaacaacgtacgggcatacaactagtgatttgttacgaccaaatcttcaccgtaattcacggaaaccaaccgaacgccacctgggcaggctccttagcagttagc

SEQ ID NO: 158672 - DNA, 829 bp, Zea Mays
tccctttcaccaagccaccttggctggagccagcgacagcttccttcggcatttcccactcatttgctagaggccacactctgaaagccatgtgttcttgaactaaatctcttgtgccaacgtaggtgcatatggtgttgaaagccatttggcaggcttgcacttcattcccaagtgcgattgatggccttctaatggtgaagcgtgaccatataggacgttgaatcacacctctcacatcctccctctgattcagatcatttttcacgtaaaaccattgcttcatacaagaactcggccatttctttcggaatgttggcacaggatacctcacatcagaacgaggcacgaagttgtaacaaccgaagttattatgatactgctccttcccaatcgctttcgtctggtacgataactcatgaatattgcagaagcacttggcatttggctccagcccttggctcctcatggtctaaatgaaaaccctcactttaattaaagcttcgggagtaagctgatgaaggaatatctcaaatgtctttaatacttcaactagcatcttatgcaaggggaaacatatcccagtcttcataaaacttttaaatactaccacctcatctgcttcaggaagaggaacagtgttttctcctccagctctcactatagatatatcatggaaatatctgccctttatcgcttcaatttgcccttgttagacagttgatttcccgaaaacaatatggcttgacctccacggtcgatctttaccatcttcgttctcactttcaacatcgaagctctcactgacgcttgaatccctagatagccc

SEQ ID NO: 158673 - DNA, 1021 bp, Zea Mays
ttacaattaataatgttcggtacccaagaaccgggtgcccaaagtaggcccaaaacctgttaacggcccactcgccgaccggcccaccaccgagcaaactagcgaggcggagtggccgaccaaccctttagtgagcaaccccgcgaggcagagcggacgaccaggttccctgccgagcaaccctgcgaggcggagcggacgactagattctctatccgagcaatcctatgagcggaatgagcgaccaaccctctgagcggtcccgcgaggcgaagcatatgactgagtcctcgccgagcaactcaacaagaaaaagggtcgatctaatacagttgacagacatcaacgcgacaagatgcgtcaccaccaaaccacgtctggaccacgagtacggtgccgagaagtccctgtcaaacatgacggtacgcccgcgtgtactgtcttaggaatatccccgctgacttgtagggctagtcaaccctagtcgtggggacctcaacgccgaagactctatagtgatccacataccgagaaggacgagagaatacaccattcctggtgtatacctacgcacgctagaaagtgacgcgatgctcatgacaagagacgaagttgcaccaagcatgaccctgaaccccaccgtaagtccaacctgcaagacctaccaggcaccactacatcagcgtcgaactcactatagggacccgtatgccagacaaatgaagcgatgcgccataccaagggtacgacaacccacgaccctatagatgatgtcaggaggactacaccacccaagagctacaggccgaactccctctagtagaatataagtccccactgtaaagtccgacacttgagctataaaagggcagtgcccccctctttttcacacacaagcacacttgatgtaacacgactgtagaatccttggagttatgagaactaaaacactaacatgtcatcatgtgcactgacattacatttcttgtgatacacctagaatgcattcactaggctaaaa

SEQ ID NO: 158674 - DNA, 521 bp, Zea Mays
caagctgttcttgtgtagcccttgtttctttcctttagcgggctgttcttgtacccttgtttctttcttgcgccgtgggaaacaaacgaatttgggggagcgaacagggggcgtgcgcctctggttttatttcttggaacgcgggaaagatggaaagatcacgaacggcacgaccaagggcccaacggggacgggccagaaggatctcgaagttttgtcaggaattgtgtgttacgtttgggcctagtttcttcgttgcggtagctcgtgggctcaaggcaggtccatcggccatcgccaccttacgtttgggtctaatttcattattatccaatccatagacccatctctaattgaagtgaaaatgtggattcaattcccttctctactatataaagcatcgtcgtagctaaaattatgcagaaataaaaattcgaactattgttattggctctaaactcacatttgcattcacctagctaactaaaaacaaatgtgtttttttctgtgtcaacataaat

SEQ ID NO: 158675 - DNA, 559 bp, Zea Mays
cttggcttccgacgaggtggacgaggcgtgaggctgacggtggcgctggtagtccgcaaggaaccggatttggacgcgctctccctcgtcgctaggtaagagacccaggtaaggaacatataagtggttgttctgattttggatattagccaatttccccctccaatctgttactgatttatatgcccttctagggatcagcagatcccacacctattacatgatttgtccttctagaatagaatccgctttctatcttctgaaccggcactgccttcttcaatatcggccaccggtcggtccacctcttcaataatcgtccttcacttcagttgtgagttgtgacatactatttatattcggatctgatctattacaagtatacatgcatattatagggtgtgcgtctgtatacccatgttctttacaaggttcgtccctaggtgatatgagtagtaagtctaaacttgcttcttaccaagagttaggttgtatgtgtgtatgtattttttagtacaatagtattcaagctgatatccaagtagggatgtttcatcac

SEQ ID NO: 158676 - DNA, 749 bp, Zea Mays
attttcttaatccccgaggactctttaacaaaattctcggccgaaggggtatagtgagttctgggccgttggattagaatcgaagggtgacgattagatctatccaacaatcacacggccatcgacgagagccctcagatcatgatctaaaggtttcgattcaatgaacgcccaaacgccatccgaccgcccgatttcacattgacggcgatgatccagcgaccgaaacggtgtctgattctccaatccgagccgctcgttggagatcggacggtgctcgggtatcgtcttcccctgtggtttctaacagcggcaccgcgctcgcacgtcggcgcaaacgccgatgaacaccgcgctcgaccccacggtggtaatccctatgttctaacagtgttgacccaatgcgcagattaaggcgaattcacgggtggtagtattaccggcaattgcagcgcggacgacgctggccacggcgcttggcggacgcgccccggtttcacaactccggcgagcgattagaagcgcgccgatggatttcttcgcccaaagatgccacggttagattcggtagctgcctgcgatcactcctggtcacaggccaacgacccgacgtcgcttaatcggtagaacggcggcggcggaccgtgtttcccacgacaagctcggtgtgctggcggctgaggcgagagaggagtcgcgaggtcgacggagaagtggagaggggcgcagagggcaccaatttatccccc

SEQ ID NO: 158677 - DNA, 696 bp, Zea Mays
cttgaactccagtccctcgagcttatgctattttgtactcggatcgaaagacgcggatttgagatttcagagcactctccagacttcaggccacagaccactagcttccctacttcagtcattcagccggacagccgccaagggagtagagtagagtagagtaggtcagcaagctcacccacccactcgcccccaactctctcaggtccccacaccaatgcgttttggttttgcgcccgcgcgggagatagggagcgaggaggcgcgaggaatccacttcctccacagctctgctgcgttgatctggttctcaccgtgaccgaggtaatgggatttgccggttcgtttctggggccggtaccgagttcattcagtttcgaacttctgccatttttgctacttcgctacgctaatgctgaagatcaatgggtggggattcgggcgctggagataggccaaagttgggtttgaggatggcggggacagattttcttagtgaaaaacaaacccatttcttcaacaaatgcgcggacgtctatcgatgagatacttggatttcatgcaggggtgtgagtttcaggaggaggggttgactatttggtagcccgatttattcaaatgtgcaaatgtttggggttttatgggattaactgtgcggttttggtgaactctgaatctcgtttaaggacacgaaac

SEQ ID NO: 158678 - DNA, 398 bp, Zea Mays
ctgggatgatccctagccgactccactggctgcccgggttaagcctacatcgatgacatcagattatggagccaacatgtcaacttccactacttggggtctgctcgagccaaagtatgctgagcctagaggagttcaggctgctgttgaggaggaggacacttcttcgagggaggcttcgaggcatgttctgcgagatcaccctcctcagatgattggtgagcttcatgaacaagtcactcgctccagttatcatgagatgtcccattttgctcactcaacttttgttgcttcatttgagccctgagatgttggaaacgctttgtctgatcctaactaggtcaatgctacacatgaggagcttgtaaattttgagagaaatcaggtttgggttttgg

SEQ ID NO: 158679 - DNA, 546 bp, Zea Mays
aactactaaccccatcttgacagctaaagcaactgtacaaggtcaaagaatggtacaatattattgttgaatgctcagtcatgtttcagtcctaacacactgattcctacataatgcttttgtaacgataactggtactgttcacgatttgaaaatgctgaaaaactgaagcctggaaatcgcaacctgaaagaaatctgagatctgaaaatgaagtaacttaaggtatacatatcaaaggctaggtactatgagcacaaactgaacattgtattgcaaattagttagtaaacattatgagcgagcttcagttgcaaaggcgcaagtttcagttttaaaggcaccataataagtgatttgacatactttcagaccaacaagttatatggaaaaatcagtaaatctgattcgaactatttggatctaggacatgtacgatggataacaataagaactatcgaaactatttaattaactgtatttttatctattattttttttgcaatgatgttatctaaaaaacaatccttaatttactttctttgt

SEQ ID NO: 158680 - DNA, 503 bp, Zea Mays
acggtatgcatcgccatccataggatcacgatcctacgactcaagtcttaaatacgtgcgatctaatacgtttcgcacgatctagaaccaacgaccaggatctaatctagcacaaaggggtacgcctcttctaatctcagtcgtccgaagaaaatcggatgacggcggctcatcttctcccacgggcaacccaaacacggcgctgacgccgccacagcgaggtctcgctctggcgaagctattctccgaattacgcgcacgacaccacaattaaatcggtacaccgcaaagggtatgaaggcgggtctaggcgaggtgttcttaccggtgattgtctgcgctagcgagccgaccatgggaaggtggtaatcacgccctgacgcgtactccggtgtggaatccccccccccgattcggggtcgccgagctcgtctcgagggcacagaaggattccctggatgttggcgcaaccacacgaccgcgtgcaggcaagggaacaccga

SEQ ID NO: 158681 - DNA, 502 bp, Zea Mays
gaataataaagcaaaaggggcattaaacagtacctataatcaatgcacgttcggtagattcctcagcttcctttgcttctacccaggcatcatgggattcttttttctttattgcttcgtcggctatgtcgcggccgcccttcatccaaacatcggaataaaatttcccacccattagagtagcttcggctgaaggttcctttgtatcgtctatggagaagacttcttcctgggaagcagctttaacgtgttcacagccagttttctccagaatcgctacaacccctcgagcaccggcgaaggcacaaaaatctcctcggtcgctaagtatttcttcaaaagcttcaacttcttcgctgatccattcaacgactcttttgagatcgcctcgaataaatttttgctctgatgagtatgcacccaccttcgcaaaactgtctttcagtttctttgcacaatccaaggatctctcatagtatctctccttggattcacgaagctc

SEQ ID NO: 158682 - DNA, 389 bp, Zea Mays
ttattccaagactagattttgaatttgtataattaacccaaagctgaaactcatattcaagttcaaaatttggattcaaataatcatgaaataaatcagaacctaaaagaaaaagaataaaacctacctgggctggaatccccacatttcggcccacctacggatccttcactgcgcagcccaacagcaccttccgcctgcctacgctgacaacccgaccccacttcgccagtccccagatcaaaacgccacggacaagctctcaccgacacgctgggcccctttgccagtcgcacccacctcgcatgagacctctgccgcgtgggccccgcaagtcatccccgacctccggtaaaatcgcgctgcgccacagcggaactccgattttg

SEQ ID NO: 158683 - DNA, 1485 bp, Zea Mays
ccctaaccataatcagggttgggagtgcatatatgccaagcccattacacagaggggtatgcaagtaattacacggagactgaccaaaaccctaacatgggattctaacattgaggatagacacatttggcgcttctcaccctctggtcagtattctgcgacgtcggcttatgagcgtttcttccagggagggatcctctttgactcttgggaacatatttggaaatcctgggcacctggtaattgtcacttcttcatgtgaccaggggttttagtccattgatcattttcttgcagcctgtgttttctcccgacaattctggttccagcttcttcagaaggtcggtctccagaagctgtgccacgaacctggaattgcttcctttggtgattggtggtggcatgctagtgaggcagtatctaggctctcaaggcatggtctgaattctatgattattttgggagcttggtccctctggaaacatcacaatagatgtgtgttcgatggaatttcgacctaacctttcaggccttgtgatccaagtctcagaggagctgcatctttggagtttagctggggcaaagggtgattctcacctagctgcccgaactctggagttgggtgcttgatgtattggtcgttccttttggttagatttttgtctcagacacgtatgtccttgttctagggagggggtgtgtgttgggggttttcgggctttctttgtacccgcttttttcttaatataaatgatatgcagctctcctgcgtcttcgataaaacaaggctaccaaataaactctaacatatatatcttgtggagcactctatagagctaaccccactcttcatctttggccagtgacaaattaggaatagagaattacaatatttggatgtttaattagagaagttcgaggcattttttcacctaaatctctattcctatcaatatgggtggatataacgtggctcttggagttcctctaatcaacaattgggacgtgttttctcatagtttctgatctctcatcatcaaacatcaccttccattccagaatgatacattttatataggaaaatgtcaaaaattataaactgtgatgaacaattattcaaataatttttaaagtttaggacaaaacttgtgaccaacagtctatcccaacttgcttgagactgaaagactttgttgttgttgttctggacaaaacttgtatcaatacatttgtatttcaagtgcctgtaagacgacattgatatttgatacttctgcaaatgacaacatattgtaagaagttaagggttaaaatataatttgtatgatttctggtcttctgctgctcaaaatatgttaccattcttggggcgagggagtagctataataacagttctatgaagggtgtccgagtcttatatcacctaccctaattatgatacctaaccttgatagagactagcttgggtctctgccgtaattatt

SEQ ID NO: 158684 - DNA, 709 bp, Zea Mays
gccacgtcgcctgcccatgcaccctagctcccttttgagctccgcccgcacccgcactcactcccctgcctcatttcgcgcaagctcaccctctgtcgcgctctccactcgccgctcggcctcgccggagttctgtgcccgccatccaacccgccagaagcctcgccaagcgaccccgagcttcgtcccaaggtgagacatatgttcccatgctcggtttctctcaattttgctttgccttggccaattcggcttcgccggagtttggccgcgccggttcgccgcgcccgtgtggtgactggccgaattagcccggctctgtgccctagctttggtccgtgatgttcccctcaccctatcatagctagtcccggccttagcacgccccagatcccctctccttggatgtgattcctcactggagttgcctcgactcgcccggagcttttcctccgccattctcccctctctgaacttggtctcgtggctgaagccccctcagcgtgttcgctgagccctcctcgtcatttctggccaaccacggtggcctcggaaccgccgtagcctacacccgcctcggctccggcgacctcacagctgtgagcaaaagcggcgccgcctgcagccttgaacccctccggcgctcgatctcgaccgtccgatctttatcgtgtggaccggatcaccggataccgcttcgcgcacgcgc

SEQ ID NO: 158685 - DNA, 452 bp, Zea Mays
acctttttataatttgtttccatgtatttatcatctaagtgtcaaaattacccctacctctccttgggtatcttcgtgagatctctctcctggaaactctgcgttcctgttgccttcctcgccactcgtctactcgaaaaaattagcatccatcgtatcatcgacgcagtgttagttttggtgtgttctgaattactaccggctcagtgactgatagactgaagccattactcagctagtaaaaagtgggaaaaaagattgttatgagtgagtgcctaattccagataagcattctgcaaaaggtggttaataaccgccaaaacgccagctgcagcctgcatctgtccatttacgcgcttctgaaaactccaaacaagacttgacagttcctgacttgtggatcagcctgatagccccaaccactaccgtcgtcaggaggacggaggctgat

SEQ ID NO: 158686 - DNA, 566 bp, Zea Mays
aaactgtttggtgaattacaagggcgtgttagccctgaggattcaaacaaaaaatttacggagattatcaatattccaggaatgctctaagtcttcgccggatggcattgttagcctgtacgcgctgggggacgccttcgtcttgacgatgaagggaccctcccactttggctccagcttgccccgtgactctgtccgagttgtccggacgagtacgaggtccccttcgttgaattctctcgggacgactgtgtggtcgcgccatgcttttgtttgagcttggtatttgttgagggcctgcagggagaagacacggtctccgtcgatgaggtccttggaagttggttcatctacgtcggggatggctgaagtgcttgtctgtggtgacccatgttttatttcctgcggggtcgtggcctccgatccatatagcaggcggaaaggagtgaacccagtcgcccgacactctatcgtgttcagcgcccagactgcttcaggtagtaggtcggcccatttacccttcttgtcgtcgagaagcattttcttgatggccgtgaaaattttgc

SEQ ID NO: 158687 - DNA, 453 bp, Zea Mays
tccacttgtcagttactctctccacgtgtgtgcctctttgtttgatgtcactacagcgtgggacccatgcctcggccctcatatcacacaccggtgtgattactcgtatcgtcgctatgtgggccaggaagtcaaactcttcttctacatgtacgttgccgccgggattcatcgcaaacctaggcaatgttttgatcccgtggctctcgtaacaacctccaagtccaggctagcatccgtcatggagtcctggtattcatcctataaaacgtgggcaccacgaccaccccttaaaacacaaagaatgtctcaccaccaggaatcaccgtggagagagagagagagggagcacactcccgtagcctattcccatggacatccgtgctctgcattccatgggtagtctaggatgggtgccaaggtacactgtgcatgcacggaggaatattcggg

SEQ ID NO: 158688 - DNA, 657 bp, Zea Mays
cacggataggtcgaaaggatggtgggctcataccttctacaggagcacttggtcgaaggagcactagagcagcgattgaggttggacgagaggccgataacgctagagacggatcttggcgtatgtgatcttctgatctccttggccttgaagacggcgccatcgccgggcttcttgatgggaggtggggggttgtctcggcgagcacggatctggggggtggcgttgggcaagggcatggccttgactggtgtggtcatgcggatgtcctccttccactcgtaatggggtgaggacgatggcgggacacagcgtgtgggtgataccatcgatggaaggggattgcaggctcgggggcgacgatggcggggcgcgaccttcgaagctcaacgaggcgggcacgccttccatcattcgagcgcggccgtgggggtgaggattgcggtgcgcagccgcgaggttggcgagggtgacgggatgcggggaggagtatgaaggggcgggctaggatggaagggaggcgggagagaaggatggcagtcactggcgaggatcacagttggagggcgagggaagggggtcacgaaggcaggggcgagcgtgaagggcagaaccgtgcaccgtgtggacggctacactactgtcttaaagaagtag

SEQ ID NO: 158689 - DNA, 626 bp, Zea Mays
ggtgggtctaaatcgtttgaccaggtgtattgttggctcgtgatttctatttcccttaactcaaagctctctatgaccgcgttgaacaaattgggccatcggtaattaaagttgctattatttttgtcttcgggccttctcatgatattgaagtcgcctccgataatgaaagggtgaggctctgtaccacatgcgctcgccatttctgctaggaaggcgcttttaaggtcgtcctgtgctgggccatagacagcaaaaagggtccaaatgaagccatcaactttattcctaaggcgaaatttacagtaaaaatctccctcatctatggcaccaatgtcaaacacgctaggatttactcctaagagcatacctcccgatctcccccttggtggcatggagtgccaaataaaatcaactccaccacacaggtgtctcagtgtcgaatccgagaaatcacttctacctgtttccataatagcaatgaagttcaggtgttgttctttagatacattagacaaaaagttgtgtttagccaagtctcctagacctctgctgttccaaaaaatccctttcattataaaataattttagaaggggtgactggttttttggggaggcgagtaccc

SEQ ID NO: 158690 - DNA, 604 bp, Zea Mays
caatgaggcccaatatgtgatgggctaggtaacatatcatgagttgagaatgttctattccccttatttgttagacatgtgtgcaattaaaccacttttcttatcctccatttgccatcactggacttcttgcaagcacataccctctaaagacaaccttgcttgtatatcacatagtacctcttgttttgattagagtgtgttgcagtgtatggcctatggtgatgcaccacatagtgttgaagagagatattcaacgtagataatgtattgaataccatccctgtgctaataatcccatcctaggggtcgtatgatgattttctacactgatgcaacccaatgtcacaaacgatcttatcgatcttgctaatgtatgtgtagtttgaaatgtcacaaatatcaacattgaccaacctcaattttgtcatcttagtagtggtgtaagtctcacagggaatgtattgtcgtgattcactcaacatgtcccatgaaccatactcattgaccacctcttcatgagtatagacatacatatctatgacctctcttactccattggtcatgggtaacgcttatgtccctcttctaaggtaccttcttc

SEQ ID NO: 158691 - DNA, 911 bp, Zea Mays
cgacgcgtcacacctaaggcgtaccgggaagtctctatcgacatgacgggtcatcatcgtgtacagtcttaggcattccctacctctgccttgtaggaccattcaaccccgatcttggaggacctaagcatcgaagcccctacaggatggagctatacaccatactgggtgtacgtttacaagatgacacaagatctctagcgaagaggcaaagccatgccgcacacgactccaagacataccctggctctaccatatgggacaaaccaagcatcgctacagggactccagcatcggactcgctatagggacccgtataccgggcggatgagacggtacccatgcctagcgtacaactacgcacgaccttgaagacgacgtcaagaagactacgtcagtaggaccaccgaagaccatagatcgtgctcttaccaatagggaacaagtcccccgtaagatcctacccttgaactataaaagggcagccccctctctcattttagacacacacgcacctgctataacataactcagagcaatactatgatcagcactacaccggactagggaaaatacatgaaccaatataaaccccctgtccgaatcactcgtgattcaccattcagagtgagtctccgctagcctccctcgccaaacataaattctactgtgtcccgtggtttccaaaaccacaatagttggtagtccaggtaggggacccttagcgtgccaagcgagacgactgaagaccaggtaggggacccttggcaggccaggtagacgacccttggcaggccatgtaggggactcttcacctccgatctctacaaaccctccgtgaaggtcaagcaaccagaacaagatccaagtgagacgactgacgatcgaaccgaccctgcagcctaggctcg

SEQ ID NO: 158692 - DNA, 617 bp, Zea Mays
ggcacacggtggagtctgggacgtcaaggatttactcgggccgcgtgctttagatgcagtgcttggggtattttgaggatagtgtggggtgcccttcgggagccgaggaggtcccagagtcaaagggggaactggttgttgtttttgaggagttcttcattgttggccttcgctttcctatgcattgatttgtcatcaaagtgttgtagcgtttcaaagttcaaattcaccagatcacgccgaactccatggtggcgctggcaaagtttgtgggcagcgactacgtatggtggagagccctcagttgaagtcttcgctaagaattattgcctccattggtagaagaaggttgctggcagaaagattatgcaatttggctcgtgcatgttcaccccaaggattgggaagactttgaatgaagttgtggaacttgttcaatgcacaaagaacaaaaatgggggaattggtgggatttccggatttatgtgaccttgaaagatgctgaaggcgtaccagggttaccaccgtccatacagtgacaccctaggtgtttattacgtgttatgccgtgaggttggtcctaatatcatgtcgtcagtggaaatcttgaattctcg

SEQ ID NO: 158693 - DNA, 880 bp, Zea Mays
gggaacaagaataggaccaagagaagaaaaaacaaacaaccggctatcgagaatttagccacgaagacatcctaagcctccgaactctattagatgtaagcatttgtaacttcaacatgtcattgaagctgcccttccaagagagaaaaaaatggacaatgttcctgaagatgaagtcattcctatgcttccaaatgcagcaaactaccattgccaaaaaatccatgaagttgtacccaaacgcaccccttgcagcctcgatcatagagaaaaaaaaatccaagtcatggcaccaataaattacaacgtaattctagcattctgaactgaaggggcaatcaaaaaggtggtaagttgttttttcatagccttgaccgcaaagaacacaactgagatcgctaccctcattcagaaagccttttcttcttaagatgtttttgagttgattctatcctagaaaaccatccatacgaaaactttaactttcttacataccttggatcgctagatccagttgaaaagagctgggggtggatggatttgaaagttagctcgtaaaacttggaggagctaaaacaatcatttcctatggataaatctatatgtccttgctagctctagtagtttgcatttgatcaataatcccgcagttgagtagcctgaggggagaggggagtgtaaaaattgtcttccaaagacattcccaagaaaatgctgaatagagcagctttgtctcctgacaaaagagaagaggttggggaatgacaatttgagggtgaaattgttccaaacatcatgccacaggaggatggtcctaccatcaccaacctaggtcatagagtgacctctataataatcaaccaatcttataacgtctttc

SEQ ID NO: 158694 - DNA, 275 bp, Zea Mays
tgagatggtctcaaacccggtgtcccatcctaatccggtttctttcgataatcttttccaattcgtgtactcaatcctcatcttgtcccatttgttcttgaactgcattttggtgtaggacaacccagtcttttctttgaatttgtccaccacatttttgtaccccattttattcaagtgggtgccggaacggttgtgagccttcacttgttcggcgaacaattcacacactagagcggtgttcgcttcattccgatcaacacttatcacccata

SEQ ID NO: 158695 - DNA, 460 bp, Zea Mays
gtgccgcctgctttcgcgacatgcttgcttagttagaggccacaggcctgtatggttagcgtgacagtgcagcgcggcaggggtcgatcgtcggtcgtctaaagctaaagcccatgcaacggcatgatgagcctttctttactagctcgctactagaggcgtaaacaaagcacactcgcggcatgcatgcattcatctcaataagcgtccgagctagctagcaagccatcatggcccctttttcctcctcttccttccacgcctccattcgatccaccatgcatggccctcgctaatggtggctgtcatcatgagtgcctctgcccgctgccgattatcaaattcctgcacgcatgcatgcatgtagcttaattaactgccactaattcattctcataacctccccggacataacaaaaaaaaacactcggcccgtgtatgtgtacgtgtcccaatgtac

SEQ ID NO: 158696 - DNA, 600 bp, Zea Mays
cctccgcaggtactacgcggtggaggactcccttctagtcagcaatgcaggagagggacccaaaaaggaaaacctctcccatggcaaaacggtggacgatgttgaagacgacaggcatggagttgtcagaaatcgacgttgcaccccctatctggcgcaccagatgtcagtgttaagtaccagcaacacgctacgggggtggccatgtagcgtttttgaggaaggcaacgacgatcgcaactcaatggtacatgtagagcacatcggagacacaagcgattgctcaggtccgggccgcttggtggcataatactctacgtcatgtggtttctgtctatgtatggttgagttctctctggagcacaggagatgtctagaggaagaagatgagttatataggtgtctatctctttttgtagggtccccccttcagccttattctcgaatgaattggggttacagagaaactaccatgagtccacggtctccacgttctgcttgttctgcctctcgtcgcattgggctacagtcaaacaagtcgtccgctgatttccgcgccctgcatgtatagtacatgactggtttctcacgtacacgcac

SEQ ID NO: 158697 - DNA, 1204 bp, Zea Mays
caacattaagagacttaattttggaatagtcacccttatcccaaaagtccctgatgcgacagatataaagcttttcgtcctatttgcttgcttaatgtttgttacaaaattatcaccaaagttctaactaatagattggcccgctgcattacctctgtgattagtgaccttcaatatggatttatcaaaggaagatatatcatggatggtgtcctttctttgcatgagattattcatgaagtaaaacagaggaaacaaaatggggtaattttcaaagttgattttgaaaaagcttacgacaaggttaattggaattttcttcataatatgatgattaagaaaggctttggtgataagtggagtgattgggttttgaagactgtgaaaggaggtaaagttgctatccgaactaatgatgtggttggaccttactttaaaactcataagggtgtgcgccaaggtgatcctttttccccctctcctttttaatgtggctgctgatggtcttgcttgtctgattcaaaaagctaaagatgaaggtattatcaaaggtcttattcctcatattatttctggtggctgctgctgtctacaatatgcagatgacactatttttctatttcaagatgatttggaaaatgctagaaacctgaagtttattctctgtatctttgaacagatatctggccttaagattaattttcataaaagtgaaattatttgtttgggaaatgcttgtaacagagaacatctgtatgctgacatctttacatgtcctcccagtggtctccctatgaaatatttaggggtcccaattgacaacaaaaaattgtgcaaatctttgtgggatcccataattggaaaaattgagaacaagctgggttcctggcaaggtcggtttcttagcttgggaggtcgattagtcttgatcaacagcagcctcaccaatgttcccttgtatatgctctccctgtacaaatgccccaaggttgtgctgaaaaaaatggatatctttagaaaaagattattatggcaggggcatgatcagaaaaaataccatttggctgcttggaatttagtctgctctcccaaaaatatgggtggtcttggtgttttggatttgcaaaaaatgaatgaagctttgttggcaaaatggatttggagactagaaaattctagtggtttgtggcaatccattgttaag

SEQ ID NO: 158698 - DNA, 783 bp, Zea Mays
attatgtcctaacttcaaaataaataaacacatgtcattcttacttatatgtacaggaagctcgcaccaattctaggccgacgaatgtggaggtgtatgtggtagggaataggggttctaatccccaaaatgttgatgtgttatgcactcaaacaacctcgaccatcttgtgagctttgtatactctagtgtatgttttaacatcacatttatgttgtcttgttatttactatgcttttgttcaggcgttatgggcgggactatgactggaggagccaaccaattgaccccgaggtgacatatgctagcgtaggaggacaagcccatggacagtgagaatatttcatttggattttgatgttatgctcatatgattgtgattgtaccgagtttatgattcattcatataggttgggtacatttgattcatcgattgactctagggagaccgagcatccataccattgtcctcttaaatgtctcgttctcgcacctccgcgcaggacatggagattgctaggctacaagaagcgttaaggcaatagtcagagtattagaggcaacaagctgagcaccaaatgcagcaaaactagcattatgtgaatctattcgctcagtaggaggctttcctctcagtaagttgaactaatatgttattcatagcaactagaaagttgtgtcattcataaatagtgacttgcatctaatttgtagcaagtggcacaacaaacgtgcatctagatgtcagccattgggatgccgcctctagattttgcaccaccg

SEQ ID NO: 158699 - DNA, 590 bp, Zea Mays
cctggcacacaagcgaagacggcagggaggcgacaacacgtgcgcctatgcagcagagcgacgatgtgatgcctcgaatccatgacgaggtcatggcagcacttggagtcggggttggtgcgaggagcgtgaccagctggagccgagcgtgatggagagaccggagcaggagggcgagcgccacggccaggtcgctggtgaactggccgagctcggcctaggatgcaatggcccgaggccaaggcgagactgaccggtgctggggaatccaatcaggaagaaaacacgtgccagaatgcgtcgtcgacgtgtgcctgggagccggtgcagagcgcgagcgcgtgggggatcgatgttggggaatgaggcgagcagagaggagacatggggaggattctagagacaacgagtgtgttgagacttgagagggccctgggcgtccgcgtgagggagcctggctgggtagaataaggagcccgacgtgtgagagcattccatagaaacatatgtgcttatcacaatggaatggactcgatggtgccagctcaaagtgaatacggatacgtggccacaacggaatgacgcacaga

SEQ ID NO: 158700 - DNA, 589 bp, Zea Mays
cacaggtagaatatcacacggtagaatatcacaatataggctcaccgcattagcacatcgagtatgggcaacgatatgtctgacacaaggttgacctaaagtaacgtcccacattccaacactaaaagcatagtaaattagttaagcatttttcataacttaaatgcagattgattgatgacagaatgtgtacgtcattgggctaattactcacctgccatcaccacttacagtaacaagtacaggttcgttatgcagccactgtgtggcatttaccccctgatcaccctcgtcaacatgactggaacagacaacagagaagatactcgaagtttatacagagttggataacaaaagaaaagaatgctgtgttggaagacaatgaacagagtactattcagattttatacccacaatccacaaaccatatgataggaaacaatgaacacaggacatgtctgtaatattagccagggttatcaagtggccgaacaacaacacatttagtatcaaccagggtgttagcagggtttacctaatggccaaacaacaaaagagacttgttcccttcaaaaaaaacagagacttg

SEQ ID NO: 158701 - DNA, 882 bp, Zea Mays
ctatttgtgtaatttcagtaagtcacttccaaattttatagcgcaacacatttccattgacttgccatcaagcgaccacaacatccaaaacgggtgcgagaacactagtttctagttctaaccctataattattccattaatcattttaactacttactcagcatcgaccgacttaacctttatctcaacggttcgagcaccacaattcacgaaagtctacctagacatctagcatcacatagagagcctactacttcacattgcaattcatacagaactgcggcatgacaataataatacacaggtaatcgacctttctccacgaccttcagctaggtcaccaacagacgacatgatgactacgaaggcgtgtcaccacttcatcacacccattcattgcctatatgcgcactaattcatttcttgcgacacatgcactcaaaataaatccacactacacaaagtacacttatctcttatttatgcgcagacttaacacctttcgggataaagcgtcactataaacacctcacacataattgcattaggaacctattagttcactcgaaaacatccattcaaagtcataaacacaatcatagactatatgtgaagcacaatttaaggaacacataacgcatatagactcgacttataaacatataggaagcaacgactactttggcatgccatcacctctctacttaagccaaaacaatttctacctactctgaccgaactttcgtgtcgagcacatcttatattgccctgtctcgcatacaaccatgtgcgacatgcactcgagacactttgatccacgtagcgcaacaataaatacgatgcaccccggcacacacacacgttcactaatccatcgctcg

SEQ ID NO: 158702 - DNA, 334 bp, Zea Mays
gtttcattctgttaagtttggttggttgcgtgtacgcgtccttcagctgagttggtcttgccgaggagcgtgcagaactgtagattgattggttcggtgcgtaaattggggaattttgggagcacgtggcgcgaaaataggatgctcgaattgatgattaggcccaagcgatgagcgaaaagtttcaagggctcgtatggcttgtgctgtgaaatatccaaaattgccttgctaggttttgttttaagcatgtggctagagcattgttcataggagtggactagttatgggctgttttcttatggatggagttcaactgttccaaacagggcac

SEQ ID NO: 158703 - DNA, 332 bp, Zea Mays
ggttgtcgtcgtttgtctgcataactcttttgtcgagcttgtgcttccttcaaattatgtataattcgtttaactttttcttccatttctttaaccatatcatgcctgaaaaaccatctttctcctggttcagactaattcaatggagtacgacaccgtcgtccatataaagcttaaaagggtgccatcttgatgctctcttgatagttgttgttgtatgaaaactccgccaatggtaaacattcatcccatttctgtgggaattccagaacacatgcccgcaacatgtcttcaagtatttggtttactctctcagtctgcccactggtttg

SEQ ID NO: 158704 - DNA, 1025 bp, Zea Mays
aattccatgtgcttatgggcgacgacatagtcactcgtgatacagcaatgcgtgctacagtttggctttcacatttagtggattattgaatcaaaggtgcagataaattatcttgcaatatcttccttgtattttaatacttttggtctaatggtccattgcggatctccgtttgatctactgagtgctcaatttacactacatgaggtccacacatatgcactaattgcctaattctaattttatcatcagatcacaaaggtgatgcctcgtcactttatacagcttcatgctgctttgaactttaaatatgtcagttctaccctactctgaagcattaatttcatatgtataaggtggagtcaaattccatcttgcaaaatccttcaatgccttgcattatggtgttaaatatttcagattgttgaatttgattataacagtactaatgatgctgatgaatcatggtttgaaaatgttgttgtctaaataattagacaattattcttttttctcactctttctacttcgtcggaaattgaaagtttggaaatgttgttatctaaactccatgccctgcaggtagggaacgcagaacaaatgttgagttggagcctattttttcaactcgtcaaagaaaggagcaggccacaatgatcgtcagtggcgtcagtggcgtgcaccagaagagtgtggaaggcgacgattccatgtgcgccagaagagttgtgattccaaattggagaaacagacaaacaagcttctgaaaactttctaggcatcgacagtggacgattaggtttgggtggtggcctgtagcttgttgattattgttgttgtagcatgcatgcctatagatcgatatatgcctatcaaacccagaagcggcagaatgtgcgaaaggctgacaattgagattgtaggtgtttattttgaagcaagctcattatcatgttttaagtgagcatggatctatgtgatcatttgtaacaatccttagttcaggccacagactgttgccaaac

SEQ ID NO: 158705 - DNA, 452 bp, Zea Mays
gtcgtgcgtcacgcaacaaagaaaatgttgtacaccatgagtattcaaaagtgttagatccaaaggaacgtaagagaatccgagaaagagctcgatgtgcaactcaaactaaggaacaaaggacgttgcgtaatatgaaaccatgtcaaaagagtgcaagggaaaactatagaataagacaacaagataagttaagtcaggactcaatcgccattgagaaccctaattttaccccggagcttgtgtggagttcaacagatgctcaagcacctactgggtctctatttagctctgagcacatggttattcctgaattgatcccaacaccatttgttcctactccatcggtgactgaggatgttgagacaaagaaaccgacaaagtctcctagacgacaaagacatctgtgtacagtccctgccacaaatagtgacaaaatgactaaaggagta

SEQ ID NO: 158706 - DNA, 740 bp, Zea Mays
aacgccaccgcgttcgccgcgtcgctcgtggtcagcgtcctcctcctggtcctggacggcaagaacacgggctggtgggaggctctgctgcgggtggtcatggttctcgacctgctcggcctcatgggtgcctacgccgccgggagctgccgggacaagttcacgaccatctactcggcgctgctggtctgcgctgtcttcgcctacgtcgtagccgctttctgctggtacctcggcgtgctggcgctgccgcgcaagaagcatagggatgatcataacactgcaaaaaataatgacactagtgccgccaatgtgcatggctatgaacgcgaagaactggatgaggtcctgatgctgctcgccaccttcgcagtcaccatcacgtacgttgcagggctgaatccgcctggcggcttttggggcgacaccaaggatgggcaccagatgagcgaccctgtcctgcaggagaactactccagacgctactgggcgttctacgtctgcaacaccaccgcgttcgtcgcgtccctgctcatcatcatcctcgtcgtcgacaagaagctcaccgccaagctctccgtacgcttcgtggctcacggcgctcctgggcctcatgggggcttacgccgctgggagctgcagggaggtccacgaaagcacctacgtcatctgcctgaacgccggagttcttgcctacatcttcctccaggtggccgtcgccgtcacagtgaagaatcgct

SEQ ID NO: 158707 - DNA, 450 bp, Zea Mays
gctgatagtatttagctatctgatttggtcctgctactgagatggttgtttggttccaaaagagataattattaagcaagacaaggaccaacaacatttaggtggggcacgcttcatagaagactaacttgacagattgagccatttgtgcgagatatgttgttggcttcctcgagcgtcttgtgatttgagcatctctttctcttccgagctgtgcgccttgtgaaacagcagcctctccaagttattcttcaccttttctagacacaaatcttcctttcctgttgggcacagcaggctccaccctagcattattgctacctgcctcagtagcaatctcatatcctttaaacagtttcctggaagcatatatttgtttcttaaccggacagaatttggaaaatgtatttttggcgaagattacatcaggagcacctccccagcatggca

SEQ ID NO: 158708 - DNA, 880 bp, Zea Mays
gtgggccaaaaaccataaattagcccaactagcaagtatcacggagcagcccactctgtgcccacgagctgacgtgtgggccctatctgtcggctacatgtccgcgcccacgttgtgaaccggctggctgcgcaatggggccacgttgtgaatcgtgcccacgtctctgctcactgccgtgtgggccctctgcgccatccttgtacacgcccactaccacgcgggacctacgtgtcatctcccacctccgctaaggttggatccacgccgccataccggcctccccacatgcgccgggaatccgttcccaacctcaacccttgagtccgtgctcagccgtcatattaatctgcaccgatccccagttttgtccgctccatcctcgccctagtagacacgacccgtgagctcgcctttagatttgggagcaccgccagaagccgccatagccatctaccgccgccgtccccgcttagcacccgtggtgcgctcccggacaactcgacggtggtgtggaccgtgtctaggggaaattgggcgcgtggaacctctgtgtggagggaattgctcgctggcccttactatccgccgtcaagccgccccgcttcgtgggcagtctcgtcatcaagccaattgtgagtacaaacctcctacctggatctaccgtcgtcctagctttatttggcacctagcgtctcgggtaatggcgcaccgtatgtcatcggagggtctcctagccatggcgcgccgacgcggcctcactgttggtcaccgacgttcaaccgggaggaggaagacgcgatttgggccgtcgatcgcgcgatatggggctaggattacattaaatgtaacgattcggtcggatgtgccatgtgccgtc

SEQ ID NO: 158709 - DNA, 600 bp, Zea Mays
tggcgggttaatttcctaaaaccagggggtttcttaagcaaaacagccacgtgaaggggtatcgggtgaatctaaccgctatatcagaaaccgacggccgagattagatctgtggcccgagggcgcgcgtgcgcaggcgggagagcactgacaagtgggacagggagtgtcagcaacagagggggagagcgcactgaccgagcgggccagtgcatcaggcgtgcgtgcgcgaagcggtatcccacggtccgagccgttcgatctggatcaaacggaggggatcagactggggaaacagacggctgcgggtggcgccgctcctctccgtggtggtgaggtcgctggagttgaggcaggcatgagctatggtggctttgggatcgccgaagttgggtagaggggaagagggtgccacggcgaactcgatggcggggaagaggccatgaatccgcgggcagagaggggagaacgacagtgagagagtctcgggcgggccggagcaactccggtgagcgattccggccacggggaggggacttaaggcgtgctaaggccttggctaactttagcagaggcaggggtgacacagggaactactcc

SEQ ID NO: 158710 - DNA, 1352 bp, Zea Mays
ccgaaagaacacttcgagcgcttgatgaacagctgatggcgttgcagctcatcgaggatggcccgtagatggcagaggtgatcggcccacttgctgctgtaaattaggatgtcatcaaagaataccaggacgaaccgtcggaggaatggtcggagcacgtcattcatcagtgcctggaacgtggcgggggcgttgcagagcccgaacgccatcacgaggaactcgtacaagccgttgtgtgtgcggaacgcggtcttgtgcacatcctctagccgcatccggacctggtgatagcccgaccgtagatccagtttggtgaagaatttggcgccgtggagctcgtcgagaagctcctccatgaccgggatgggaaacgcgtctttgatggtgagggcgttcagggccctgtagtcgacgcacaagcgccacgagccatcgggcttctttaccaggagcacgggcgacgagaatggggagtcgctgcatcgcacgattccctggtcaatcatggcggtgcactgtcgttccagctcgtccttgtgtgcagccgggtagcggtacggcctgacagccaccggcgacgcatcgggcttgaggaggatgcgatgatcgtgggcgcgcttggggggcaaacccatcggagctgcgaagagccccccgaacgaggcgaggagggcctccagtagggcgtctgtcccgttggtggcgcgcagcgctggctccttggggctgggcgtgcccgaccaggagatggagcgcccctggcgctggaacgtcatgcggcgattggcgaggttccacacgattggccccaacgccccaagccatcgtgtgccgaggacgacgtcgtacccggccaatggcatgacgaagaggtcagccgggtagagttcgccctcgaggtggagcgacgcattgcgaagaacgcccgcgcaggtgatccgttcgccgttggccaccatggtcgtgaggcggggtcggcgctggatgaggatgcccgactggtgcgctgccgccgcggatataaaattgtgggtgcatcccgagtcgagcagtgccaccagggagaccggaccgagggtgacggcgatctgcatggtgtcccctggcgcaaccccggccacggcctggagggagaaacagggagcgtcggtctccgcgactcccgtttccgcctcggtctcctcaatttcgatgccatccaagaagaaaatgcgcctgcaaaaacggttgtggccacgggaatatttctcgttacaattaaaacacaggccttggcggcgccgatccgccatctcctctggagataagcgcctggagccgtcgccacggcccgttgctgcgcccagtgg

SEQ ID NO: 158711 - DNA, 653 bp, Zea Mays
tacaaaaataaaacttataaatagataaatttattccacaatgatttatccaaatcatatactcagaaaatttgagtacaagttcatcacaaatttgaaattcaaacttagattcaaaaataagagaaaagagaaaggaaaatgaaaatataaaagaaaaaaaaggtgctgtgctcgcttgggcctaaaccaacctatttggcctacctcactctcacccccgcgcggcccaactgtcatacccgcgcgcgcgcgcctggactctcttacacgtggggcccagctgccagccgtcgcccgcttgacctgtccgcgctgctttcttcgcctcggtcgcttgcgcgtggggtccgcatgtcgggagcttcttcctccctcggatccatcgcgtcgggccgtggccaggaaaggggggatcccaccgccgaagttctcgggcgggtcgacccaattgccgctaatcccgccgcgtcagaggactttttccccgcgtgaatcgaattccgctgaccaaatcggttgtggtcgagatctccgcgcgcgcccgatttccgctgaccgagctcaacaaccccgcagttcccggacgccgttgcgggtcgtgtgcgccttattgaggctataagccaaatgtcgtgcatccttcctttccc

SEQ ID NO: 158712 - DNA, 935 bp, Zea Mays
tgttcggctattatgtttgagactgcgcttgacttggtttaaattggataaatttcacccgttaaccgaacctcggatctctctgccacatggataacgtgctagacagagcaaacctcagatgtcaacctcgcacatgatttacttggataataacgtgcgaggtctagctttataatcaagcacttttccaaattttgtattcactgaaccgagcaatccaatcggtataggatccaccgccttgaatgacaattgaaatccaacctttgaggaatcctttgagtacttttaaatacccgaggatggatgtgatgtgtacgtcttgatcctcacttaatatacttgcgcaagtccaaatccgttgtttagcttaaggcaaacacctagggtgttacaggcggctacattgcagtcccttttcacatggtgaaactctaggccttcgaatttgccttatatttgttaggcggttgcatagtacttgcccatagactcgatggaacaatcacagtccttgttgatctggcttatcaccacaagagagtctccaaacactatcaatcgctagacgctgagtgaaacgacgatgtgtagcccgtgtaccaatgcctcatactcagctgctttgttcgacactgggaagagaagttgcaccacatacttgagttggtctcccttaagggtgggaagaggatcctagctctgactccctatagcttcacggacccatcgaaatacatcttccagacctccatcggctcatgattcttggggacctgattctcggtccattctaaaacgaaatctaccagctcctaggtcttgacgggtgtgcagggtcagaactcaatgtcgtgagctcccagctcgcacacccacttggctgtccttcccactgcctcccggttgtgcagtatgtccccaatcgggaa

SEQ ID NO: 158713 - DNA, 785 bp, Zea Mays
gccgcgattctctttctcctcaaaggtaatgtatctcctccagtccccacccctgtgattctctcgttttttcttgttcggtatcgctgcagtgccaaatggtgggccgcatggttcaaacttcaaagcaaacttcggtttgcatctctccggttgagtttcatatgcgcgttgcctacggctgggtgtgtgaggcccttagaaggtaacctggaactctggaaggatgggccggccaatctgctagttgtcagatggcgcgctatctgagcacgcaggatggccacgtccatgtgatatggttccctttctgtttggacttcggagaacccaccaaacagaagcagatatatacctcattaaggttttgtgatacttgaacttaaacaccaatgagttgctgtaaatgaacacttcttctcatatgaacatcgtgatctttattgtggtgggtaccataggaagatgacctccaaatgctagtttgtttcatataatatgagtcaattactctagagcttaactgtcaactaacgtttcatatcttttcaactgttttatgtggattgattactgaattgtgaatggtactgccttgatgtagatgtttctctgtatctgttcttcagcttgatcccaagaacctgttaaacaaaccatacaatattgttaagaaatggtaaatgtctaacgaaactgttctcctagaataacatgtctggtttcttgtgtcactataacaaaaacacaaacaagggggagggggcttgttgtgataagtgatt

SEQ ID NO: 158714 - DNA, 751 bp, Zea Mays
gtccatcacagatgtcacaaagcaccaatattccgcctgtaaggaaaaacttaaaaacattgagccagataagacctaaaattatcctcaccgggagccgaaagaatagggtcttttctgtgccactcacccccggttactttaaacatgcaagaagatgcctcccagaggtcaggtgaggtcttgacctcccctggctcagtgcacgtcaccgccaactacttaacaaatctgtctgaggccccgccaccccagatgtcttcactaaacccttgtttttagcctcaacacttcccctttttctcaccgccatagccacgaccttacctttagagcacccctcatccacaccaccatgtgtcgccacaccctttctcttgcaaacatcaatatacctagcatcaatagagctctccttaggatacgggtcgtaccgaagaccgtttagctcgaaggcatgattcaacctgacattcgaaccttgtatgccccaactcctcgacatctccgtcttcgtcgaatatttccccacaagttttaccgcttctgcctccacctccttgacaaagccacagtgtctcgaccccgcagctcaacgatgaaagtaggatcaacaccattcgatccttcaaaaaaaaggtaccgggcgcagcttcacctcacccacctcccagtcgtgtgcaagcagccacactccacaggcaataaattgttccactaagtcaagcccactgctcgctttggaggcacg

SEQ ID NO: 158715 - DNA, 650 bp, Zea Mays
gggcagaccccaccgggttgtcgtacacgtatgcgttatctagttataaaaaagggaaacagactcgaccccttagccttgctctatggatagaacttacagagatgtttggctccggggtaaggtactcctccagtcgtagctagatggttgcccctgggtcggtgcactcccgttactttgaagggcctttcccagctaggggagagttgcggagccctccttggtatggaacttgccgtggggctaggtcccgacccagggttcccgtctgcatttgacacggggagccctcatctctagttgtggtcacttctgcatgtacctatctgcagcccggacccgtgggaggtccggaagggcctccggaggaaggcgtgcttcagcttcgtagaccgggaacacggagtccccctgagctccgtctagttgtattcactggagtaggagcctccgacgaagatatccttcaggtccccctcgggcgactgatacccgaggtcccgctcagccgcgaccacctcgcagtcgtccaccttttccttgccgggccgacggcgaggcggggagccatctttggaagactgctcatgccgttcgctgacgcgttttgcgaggtcaatgatctcgcgacactccgcggtgctgtg

SEQ ID NO: 158716 - DNA, 294 bp, Zea Mays
ggcgactctatccctcgtctatctatccagagcaagaacagctgatgccaccattggggctagcggagagagagagctggtcgtgcccacgtcgttgttgggtctcagctggaaggctatccgagcgaaggggagcgattgaaagtggtcaccggcgcggatccacgggtactcggcgctggagtttctgtagcagtactgggggcgtctggtgttgctcgtggccactccatgcgagcgcgttgccggggtcgtgctgattcctcctcacccagctcagatccgaagcctaaa

SEQ ID NO: 158717 - DNA, 368 bp, Zea Mays
gcctcccgtcgatcaccggaatgaccgccacggtaggggccacgaatccactgcaccagtgaagcttcctttcctccggccgctgtgtgtcttgtccaaattcgtgaccaccgcttgcgatgcgtataaattgaccccgccgcgagctccgtaaggcagtaaagtatccagccaccgctaattagccacgatcgttcgccagagctcgagaatttcttgtttcccccaaattggtctccgccaccgcgaagaacagctcaaccgcggccagcccaactcaggttagttttagtgtctctgttgcttgttctagtgtccctagaccctcctcaagctctacgaccccttcgattgaattggaccaccac

SEQ ID NO: 158718 - DNA, 680 bp, Zea Mays
aagaaagtaggaataggcattgcgatcccaagatgcaagtttcatggaagcgacataccagatgattattgcaaggtagaagtgacgacggtcgtccaaggatccgaggacgacatgctagacatccctaggcccgaaggaatcaagacacttggacaagccatcaaaaaattcatcatttggcctcgaagggatgtcgaattggttgatctgccaacgtcgtcgtcgtatcatctccaaccatctccgcctcgtcaaactttagtacctgtacatccatcatcacctctacaatcttctcatgctgctcctcatcctctttctaatccaccgtctccgccacaagcatcaacatttaggacaccaccaccttctccacaactatcaagggattcacgacaatcaaagaaatctaaattccctgtaccaaaattggtgtccacatttgagaaaaagaagagtaaagctactactactggcacagctcgatttttgaaagggaatgcacgagacctcacgtcacatactgttgatttggccaagcatgaggagtttgcaaaaaaggctaaggtgatggccgcaaagataaagatctcaactaaggcagattataaaaatgtgcctaaacaatatgtgccgggcagacctctactaactcttgagaaactgaggaatgtccc

SEQ ID NO: 158719 - DNA, 661 bp, Zea Mays
ggcttcagtttgctttgtttcaatttgcgtttttgaagctttggctgttttccctggagtagagcttgaagtctttatttcttccattacatctagtacgtggaccatccttttcctcttaggggtaactgtaagatctttttgtgccttcggcactgtcacctctgccgaaggacttgtaacttctgatatctttgttctctcgacctccagctcactcaatttggccaatggtgccttcggcgttggagccggctcttcagtcttctgcataagcgcagtttctttagcttcgttagccgaagaggtctcaccgccaaattcaggcactgtggccgtttcaatgtagtgtggtcggtgagtgaggaccttcactttcttcctcttcggcgtaggctcactagagacagccgaagcaacatctttcacaggagccgcacctttccttttctgaccccgtagtgggtaccggtagtcagggtacacaaatcctatagcatcaaaaactctgtttagtctcttcttttttcggttcccgaaggccgcaaataatgtgttatcttctgctctggagtacggcccaaccaattcatcacttgtagcttcgatacatttcaaccagtcatcatccggctcaacaaacttaccttcatatctgaag

SEQ ID NO: 158720 - DNA, 546 bp, Zea Mays
caaaaaagtttaaacatgtcacagtaaagtgaaaagttgagagacctagttgagaaatggcttggtctcatccatgtatggtgaaagattgataaaacagctgagaggtttgagggttgatgagagttcatacttcatttgtgcttgattatgataatggctaaatggacatgtcgtgtggtgttgtgttagttgaatgtgtattgtgcaacatgtcttttggttcgtaaaagcgtaggtgttgagtgcgtcaatacggtcgacgacgatggataagatcaagtacgaaattcgtgagggtgaacaagaatgggtgaatgaagggcggagtaggcttggactaaaggacaaagacactaagaatggaccgtgggtggctcatattaggctcatgaagagcaatcatacatgtgtgatcgagacaacatcgaccaagacaatgaggagcacaatggcatcatggcacttggtagagacacatggatctacatgggtgatgatggcgtcgttcaagtcaagaaggaagcttaaggtggcaatcatggc

SEQ ID NO: 158721 - DNA, 516 bp, Zea Mays
gctatcattatgactcccactatagcccgcgcattaccgaggcaaagggagacatgcggagaagacaggatgccaccgcctgagcatccctacatgtggtagcgcatcagcctacgccgtagcctacacctgagccctgctctgattagacggggaaatggtacgacaagccaggagacttacacaaagaccaagagaagatattcgttctccatgaaccgccgctccacttactccatatctagcaatagattactgggcccacttatcggggctcagtcacatgtacgtgcctcccttggactataaaagggagggcacccacacggtagacaaaggaggaaagaggacctgaggagactctcacacggactgacagagactcccaagcaatagaactcacgatggatatagggtattacgctcgacggcctgaaccattctaacccatgtgttctcgagttcatcgaactagccaggcaaattcctaagcccccctcctcatcttaggatcag

SEQ ID NO: 158722 - DNA, 494 bp, Zea Mays
taacatgatagcgtaaaccatgcaacatttaaatctccaccggtttgagataaaggaaagacgtgctccacgttcgcgtaaataaaggcacagttacgggaggagacaaattctaatttacagccactcgtccacgttcgtatctgtgatattggcggcggttaacgacgacggaagggagaacaccgggcggcgattagcgacgagaaaatgtccagcactggcgctggcgatgacatgccacctgtagcgtctgtgcatagatcaacaggtacgtctatttcaatggacatgcatcctgtagcgtctgcgatcaccggttatacagagggtgtgtctattactcccccggtggcattgagggcacctggacaaattgatgaacacacaaaaatggcagacgtggtcggagcagataagcacatccccatgagacatattgggccgcatgaacaggacacacctcatattcttcaaagccatgtaagttctcc

SEQ ID NO: 158723 - DNA, 816 bp, Zea Mays
cggaaacacaccagccctagctcgggcttagggacagcccgaaacctctgagtacttcctcccgaagtacccaattcagaggttttgccacggtaggggtggtggcgctggtactgagacttgcccctcttgtgggctggacctccagtgttgcccctcctcgcgtcctggccacgaggctgatcaacacccgaagacttctgtgactccatggtgtactggtgttgcatctccacacccaatgcctgctccactgtagtacggaaatccaccaacggaaaggctccctgggcatgcctgatagaaggtttcaggccctgacggaactggctcgccttctccaactcattataagccacatgaggaacaaagcggaccatcttgttgaagcccacttcatactctgtgacagacttcttctcttgcttgtaggactgcagatcaatcttcattttctccaggaaggtgaccgggtagaacctcctctcaaactgcctgatgaaaacatcccaggacaggactcctggtgaagaggagtgagctgcctgcacgcctctccaccaaatctaagcctctcccttcagcagctgtgtgccaaagcgaacacgatccccaattccccaaacacaatctcgaagacattcatcttatcctccacgtaagttagccaatctgccgcctcgatcggagtaccactgccatcaaaagtgtccaacttcatggccatccactgcatcataggaagaccactgaaggcacctcagccccgcgacctgaagcagcacccgcgggaacagcgcccctaggcactcctcc

SEQ ID NO: 158724 - DNA, 1255 bp, Zea Mays
caaagtagtactgtttatggcgcaatatcatctgagaataattggtcacaagagcttgaattaaatttgaatacaacttgaatttgaaaagagggagagaagaaaataaaaaaggaaaagactaaaacctagtttgggctggcttctccaattcggcccactctttctctcttctaccccacggcagcccatttcctcgttccctttttcttttctgtgaagtcactggcgtgcgggcctgggtcctcggtgtctcacgccgcgctgtgcgccccacgctcatgccactgattggtgggcccacggcaccgagtcgttcttctcgccaggatcgcggatggccggttcggaccgattcctcctccctcaaacagaacgcgagttctctgcgcgctccgtgggaatcgggggtctctagctggccgttccggtctctgtcccgagccctatatatgtgtcgcttctcctctatgacgcgtagccacatctcatcccctcgacgcagcaagccggatgcctgtgtgcgtgctcggtccgccgccattgccatcgatcccgcatagcggcaacgccctgcgaccaccgcccttatttgaccctgggagcttcggctagccgtcgtccacacctcctgtgtggggctcggggtttcctttggctgtggggtaggcgctcgtggccacgccccctgggattggacgccagtggcgagggaatcgctcgccggacttgcgacgccaccgttgggccacctccttccgtggtctgacaccttcatgcgcgtaatcgaggtgatgttttctcctttgtgttcgcctgtcttcccggagcatgtagtttcactcgattagggaaacgtgcgggtgtgctgcggcaatggcgccgtcgcgccagagggcggaccgccgccgcgccacatcgggggtcgagggtcctagtgcccggacgttggggcaaagcaccctggcgagctcggcatagtgctaatttgcgtttgcactgtgtcccagtccaagattgtccacctgggcgcagctccggtgaggttcagccgtcgtggggagctcctggtgccatcgctcggcttggataggggtaggagaaagagggctagccgtagatcttcaaatggacgcccaggattagatccgcccatatccctgtatgataagatctggggcgcacgtagttagatcaacgatcgaagctggatcgcggtcacattggtcaggcaccgtcggatttagatccgagg

SEQ ID NO: 158725 - DNA, 311 bp, Zea Mays
aaaaactaccttcagaggagccacccttgcccagatatatcttaaagaaatagtcagactccatggtattccacggaagatagtgtcagacaggggaacacagttcacctcaaaattctggatgagtcttcatcaagctttgggcaccaagctagacttcagcaccgcctatcacccccagtcagatggtcagatagaaagagtcaacaaagtcctcgaggatttattgagagcttgtgtgttgacctttgacaagagttgggagtccagcttgccgtatgcagagttttcttataacaacagctaccagg

SEQ ID NO: 158726 - DNA, 570 bp, Zea Mays
ctaaaacataaataaaacaataataataaaatttgttaccttaaaattagcataaagcaggcttccggcgatatggtgtcgttgatatctgcagaggtcagcttctagcttcggtaggccaacgcttttggagagggttctaacaactttagcctcagtgcggttccgaaggcatcttaacttcccttcgttgaccccaccaaatagcgtagcccctggcttatacccgcaagatatggcatattttttcaactcttccttttcggcaactgttagttcttgtccaagcaagtcttgaaagttaaaattttcttcttctaaagtgtcatcgatctgctcctttccctttccagttgcagtggttaccgcagccacagcagcttcttcctcagccattttcaggagaatattgtcaataacttcaagtgtagtttccagattcgaaccttccgtggtcccatcttcggccccagcagcttcggcgtcgccggtttcagcttcggtggtctccactctggaagcttcggctgcggcgccttcggcttcagcggtctcgacaaaagcaatttt

SEQ ID NO: 158727 - DNA, 522 bp, Zea Mays
gggagagatggttgaatttattgagatattgcattacagtatctcccccttgctttaaccggataaactcttcttgtttcatatggagcactccctctggaacataatgctcccggaacgctagcttgaattcttcccatgtaatctgatgcccagccggttggattgctgaaaaatttgcccaccaagtactggcagaccctcttagctgttgtgtggcagacaacggcttttgtgtctctgtgcatcaaatcaacccaaacttttgttccatcactctcacccattcatcagcttctaaaggttcttctgctttgatgaagaggggggtcgagtctcagagaattccaaatatgttgtttcacgtggtccttgaggaggagctcttcctccgtgctgttggaactgattgcctgccatttcgcgcaagaagcgtgtattatccgcagtggcattgaccagggcagcgatagcctcggccaaagtcggtggtactgggggcgggttgggagtatcctccct

SEQ ID NO: 158728 - DNA, 623 bp, Zea Mays
ccgcagccacccagtggaaactggaccagttggactgttggagacttggagtaggtctgagaggtgggcccacgcatcgtgtcgaaactcgaaagccaccaaagcggcaattcgttccagttcgcaaaaatttcaaaaaccagagcggcacgagcaggtgcgggtacctgccttctatgcttctagcccacacggcaacacctgcacacacagagaaagataaaaaataggagcaaacatcgcatcctgatcctccgccaggaccgccaccaaagctacgtcaggatggcggcggatccgagcaggcggcggccggagtaccatccggcggtgaacgacgtcctgttgacgctcaccaacgccagaggcaccctcgccgacgtgcagcgccgactcgaccttgagttccgcgccgcctaccctgaccatgtcagtattctcgtcgccctcatccctaaccgctcctttcgtcgctgacgggatcggcggcggcggttgcaggcgaatccggcgaagctggtggcgcgggtgaagcggttggaggaagaggcggccgcgctcaaggagatgtgccgcgacctcctcacccagaagcaggtatcctcttcccccctatgttttca

SEQ ID NO: 158729 - DNA, 521 bp, Zea Mays
cggacgacaggttttaattttaataaatccaggggcgcattagcaaaaggggcgggccgaagaggtatctttgatttccagtcgttcgatcacaatctgaccgaccagattagattggccctgatatgaatcggtacgcgcacgctatccctcggatcaaaatcctacggtcatgatttaacgtatcacagatctaatccgggccgagggatcagagatccatggctcagatcagtttcatccaaacgctgccaaacttctaatcgtggccgaccaatcagacatcgatggtcaacagcgccccgcgccttgatccaatctgcgatcgctgatcacaccatggacggcccagaatgaatctggccgaagcggtactccccctctaaactcacccacctaccccatatccaacggccaggcgcaatcccccttgctcatctccccagtcaggaaacgcggcggcacggacagcccccatggcggagccatggccggcgatgagctgtccggccaaccaaggc

SEQ ID NO: 158730 - DNA, 365 bp, Zea Mays
ttgcatactatagattggatctggaatgttcctataaatggtttaccatttatctggccatagatttggttgacgtgtggatgataatgatgacttttggcctgtttctgagcttttggctatgcacatggcatgtgttgctctaggatcaataatcctctaaatcatgctttaagcagatttgtttatcttgccggtcactttcaatgcactattactttcactattttaatcattacttacccgaaaaatatgatagtcggctcaagggagctgatctggctagaatttgacgtttaatctgtgttgtgcatttgcagtgcgattcaccgaccacagcacaccctccctggttaaaggtgaat

SEQ ID NO: 158731 - DNA, 1121 bp, Zea Mays
ctcgtgactcactatcgcatgggtccccttgttagtcgctgtaacaccacatgaggagctcttcctccagctgtgggacccacctggtcagcgactatcgctccatgccactcacccgcattacatgtggaccccacgtgacagtctcaatgaaccacagaggatcccctttccgtgcgcgcagcgccgatctcaacggcaaccaccgatttcgctggagatggttaacagctcgcccctagccttatctacccgacgtgggggacctctcccagcctttccattttgttcgccagggccgtgccatgaaaaatcgtgaactatgggcgcctccaatgccgacctcgcccaccagagacaaaatcgtacctagtagttgctagggggcattgtggtgctgcgagaagggcgacggtggtcgattagcgcagatacagcagctgtaggcggcggaattcctcggcggtgtccgaattccgctgtgatccgtgggcggctctgcacagtccctaacttccggtaaacatcctccccgcgtgtaccctattgttcctgttactcgccaatgtcttcagttaggagttctagcgcgcagatcgcattcgtgtcggacgccggcgagagcaccacctcggccgcgtccgtgccgccgtgccttgggcgaaaggtagaggaaggatttgtggccgttcatcgtgctttgacggttgtgattagatcttagggtaccccttcgcgatattagacctagcgcgtaggttcggtatcgggtggctgagatctgatctcccttcatccgtcggtgctagatctaacggtcgcgaaggtttataggttatacgtgcgagcggttgaatctggtccttctatgttgatcgaacggccgagaacccgccataccccttcggccccggaaacttgctaaagagtccctagacaatttaagaataaatctgccgtccacatatacgtaaagatcatcaggtctagatcctggaatttacagatcaaaccccgtgcttcgctgtattagtgcgcgcagtctagggagcagagaaaataggaaaatgtagaaaatagatttctagtataaaaataattccagaactcatttaattcat

SEQ ID NO: 158732 - DNA, 900 bp, Zea Mays
ggatcatgcaaagaccggtgctcccgtgcggcagacaccaaattggattccacctaaccatttaccctcactcaatttcactaatgagactctaaatcatcctacccacggagacagcgcgaacaatggatgaacatgggcgttctcggtgatccagggcgatctagttcaatcagaggggtcgaacaacattaggaggacttaaggagactagaacaaacgactagagagcttgaaccaacctgaaacaagctggctagggcgaggatgctttcacggcgacggaaaccaaattggggagaatgggaaattggagtgttctaggggatgattcgaggcacgggctgctttactggtttcacaattacatagcatagtaggcgggggcagcaatttatagactccatcagcggtggcacatgaatttgagttagcgcggtggcggccggagagtgaaaagagtactgtcgcgagagctcggtggcatctaccgtggcgacctcaccggcgacgaaccagttctaccgggcggtttctagtgactcaccgcgatggggtaaagcgtcgaggcacgtagcccggtcggataacggcaaacgccggtgatgccagcgcgactaactacggcgagacacgacggcagtgagaacagtggtcggagtttatctccagcgtgatactttataccgaggagtgcttatctgagttcggtcgagcgtgaatcgtgacgccggcgcgaatccgggcacacaggtcaccggcggcgaggttctctgaacctaatccatctcgttcactgtaccatggcgtagcttatttagttggcctgacaaagcatatttggtaccaatttactccagattttgtataaggactgaatcaactctcgtatcaaagtga

SEQ ID NO: 158733 - DNA, 669 bp, Zea Mays
aatgttttgatgtagaaagtggaaatgaagatgccgaagatcggccctggagaccaagccatgttgtcttcgggaaataaactattaaacaagggcagatcgatgcaacgagggggaggtattttcgtgatatctcaattgtgagggctgaagaggagaataatgttcctcttcccgaagctgacgaagtggtggtttacagaagcttcatgaaagccgggcttcggttccccctatataaattgttggtcgaggttctaaaaacctttgatatttaccttcatcaactcactcccgaagccatcattaaagtagggatctttatatgggccatgaggaggcaaggactggaaccaaatgcaagatgcctttgcaacatccatgagttgtcttatgagatgaaggctaccagaaaggagcagtaccacaacaactttggttgttacaccttcatacctcggtttgaggcgagctacctagttccacattttggaagaggtggctaggctcctggatgtaggaatggttttatgtgaagaatgacctaagtgaaagggaggatgtgagagggattattcaatgccctatctggtctcgcttcggcattaggaggccagccactgcccttgggaatgatatacaagcatgccacgcggctttcaatacagt

SEQ ID NO: 158734 - DNA, 497 bp, Zea Mays
ctagtgatagagaggacaaagtagtaaatgtcaaagttctcagtgtcgatggagatgtgttgccggagggctacgcctttgttggcgatacagtcgttgttcgtgaccttgacagagagatccttgtgtggcgtaacatgcaagcctagctaaaaggccacctcctgcagtacgaacatgtgtgtggagactgagtcaacaagcgccatgagtggggtgtcattgattcggatctttagctacatggtagcgccgacgtcgatgctcgttagggcatgcgacgagatacccaatgccttggctacttcatccatctcctggtcatcgtccagttccatcagaaatacccccatgcctgcacacttatggttaggtgtgtattcctctaggcagtggtagcactccccattcgcctgcttcaccgccagcgcgttagtggccagccgtcagaaccgaggtctggtgggggttgtcagtcctaggaccctaggtttggg

SEQ ID NO: 158735 - DNA, 400 bp, Zea Mays
gagggggcggccattgttgccgaggtcggtgagcggaggcttgtcaccttggccgaggagaggcccgatacgtcgactgcggtggcacccgatgcatcgactgcagggggacccggcgcctcggttgcggggcgcacagaaccgtggcccgcctaggggagcagcggccttatcgccacgtagctcaatcccaatgagtggtgtgggcagccgcttctgttctggagccgcgacacctcggagcccctcctttcccttaacgatgagctggaggagtagttccaggataatttccgtgaatataccgaggcggcgatgaggtcgcttcggacgaccatggaaatcctttctagggacgttcccagggtcttccaggtaaggatttagacgtacgcctcgc

SEQ ID NO: 158736 - DNA, 911 bp, Zea Mays
ctcacctagaacttgagcacgttcaccttgatccctagctcaaatccttaagtccccattgacaaaattgttctaaactaacccctctgcaatgtgtgtgaagatggcatcaagatttgtgccctagatatgtcaaatctgggatttcctctcgaagttcagaagtgagacaaaccaaacttcatcacgccatatctttggctccagtcagcaaaacccataagcctccacacacaaacgacaaaggattgtcaggggaagagatctctcaacgggatcatggccataatcgcaaagatttggagccaatccaggcttgaacttgacctctctctgcgctgcctcgtgctcgacgccgtgcccaggcgccagagcgcgcactggcgctcacccacgcacgccctgagcgcgtgttagagccacccctcggtcgtggtcacccgcgcctttaagaccacccagacgcgcctcacctcactccgcactcaccttcgctgaccagacaccgtccttagctccggcgagctctgcgccacccgagcgccggccaccacggctagccatttccagagaccctcagcctcaaccgagcccttggacagcttccccgaggagccgtgaagcttctccaagaaaggatcgaagccctgcctcatcgaaatagcaagcttcaccatcgccggacttcggccgagctatccgatgagccattctccaattcctcgcgccatgccttccctagcacctagtgaagctcactgactggtttaatttaactctaccgccctggataggacggagccctcgccgccgacgagctcccccacctgcgcacgtggaccggcctactctgaccatccccggagacgatccgcacatcgacgtgaccgtcacgacctcccctacgccct

SEQ ID NO: 158737 - DNA, 587 bp, Zea Mays
aattacacgaattcggcctggagttcgtctgcccacgacgacggcgaacgctaaggacaacccgaggcgttcccggtgattaagcgtggtctagctcaattgatcgggcctacaagcatccttagcatgcaagggtgctaaaacgagggtaatgaggatgagagcggacctggagacggcagtccacggtgcgatggctcacggcggcgcagagaaccgaattgggggaaatcctgaattgaggcactacggtggctaatcggaggtgagggctggtgcactggcgcataacaacctaacggagcacgctgagcactcaatttatagagagcaatcgcgaatacgacgaatttaggcggggaagggcgggcagtgagaaaggggaggagtcaccggagttatctatcgtggcatttaccggggcactgtcataggcgatggataggctacctatggtggtctactgcgacatggtaacacaactaattacggggcgcacgagcggcaagcggccaactccggcgaggatcattttggtctgtcgtagggcaagtgggtacagcggccagcacacgaccttatccgcg

SEQ ID NO: 158738 - DNA, 307 bp, Zea Mays
gactaaaacagaaatattcctaagactcagatcccagtcactaggactgcgggttgattcataaaaagaacagggactcttaggaaaatgttacatcgcgaaggggtatcttacaatcagatccgcacgatcccaattcaacggtccagatttaattaagcacactccaaaacggtacgcaatcgtgaccctgcgatcacagatcgacgctcgggatttaaaatagccccaaccaaccgtgcccgctcacacatcgatctacggtcgagatcaggctgagtcgaatcggtacgagcctcaaatccag

SEQ ID NO: 158739 - DNA, 285 bp, Zea Mays
cccattgtcatctctagcccaacccacaagttgaagtgcccacgttgtgggccccgccaactagcctatctgccgccgtattgcacggtccgctggcgaaggatatgttttcacatggggagtggggtccaagcgccgcatagtttttgtgtcccacatgacagttactacggggtggacttggtggctctggcgtgtgagaagggatgggccgatgggactatgataaatgcacactgtccactactactagcagtgcatggcaagtggcccgccagatcagcg

SEQ ID NO: 158740 - DNA, 1242 bp, Zea Mays
gattaattgagaaatatttttttaatgtgacttccatgtcaaaacagagacactatatgataaacaacattattacaaaattataggaattggaatgaataaatttgggctccctatgaattttctaggaactatacaagttctaagaattgttttcacataaaaaaaatcccttttctaaattattttataagtttttctcactgtctggactaggcctcaattactggtaagtataggggccacgacgcaagtattctaagactcgatgaatagctggaatggatggcgggttaaatacgaaaaagagcaggggttctttaacaaaaggtcatggccgaaggggtattgagcgaccacagtcgcacgatcaagatccaatgcatcggattaaaccttgaatcagtacgcagcgcccatcgttagatccagatctgacggccgtgatttaatgaaaccgcgatctaatcctatccctctgcaaccgatccaacggaccacactacattgcatgaacatctacgccagatcgaaccccaaccgcacatccgaggatcaacggtttagaattggtcgcgcgaaggggaaagagataacctgatcccgaccgcaccttactagatctacggtcagggcacttcctcttccccaacggtgtagcacggtgcgccagtactccccacgacggaatacgccggcgagccctcccccaaaccgcgccagtaagcgattctcggctctaatcgactctactcgaagctatcgaggttgcgaacatgggagcacacacgtaccagagatggtgacgacaggaatccgaccccgcggctcgcgacatcttgcgacggtggtgaaacccgacgaccgattcccggatctggagctcgcgaagggactccccgacgccacgcgattggggacgcccgtagcccaccagcgagcaattgggcacggatgagaccaccaagcgcgcaccagagagcgagagcagacactggcaacacagcgatcaacagggtcttcactccgaaagaattcaggcggtgatggcaaggctagcagcggcgacgcggctcctgcggtctctcaattgatgcacactagcggcggcgaattgatgggacgaacatagaggagaaggggaacgactgcttgggtattataggcgcagagtagaggagggttacggaacccagctagcgcgaaggtcggcgggcagctcgggcgggtcgttaccgccgc

SEQ ID NO: 158741 - DNA, 1046 bp, Zea Mays
gctgaagaatcatttataagctggattcatcgtcggaggtgttggagagggagaagcactggaaccaccttctttgttatcatgtgagtgaggaggcacaggggaggcagtggtggtataccatgatcatcatcatcagtggaatctgaagaggtatcaactgcaccaaaaggaatcaggcttcgatcctcaatttgcttgattgcctcatcctcaacctgacgctcgaaggctaaaggatcctccaaacgtctatccaaggcacgagctcatgtatgagtctcataggtgagggacggtagatcctaacaatagacgtgagtgaccaagaactgtctagaaccgaggaggctagatcagctacacaaatatgtgacaaaggtcgtgggcatatggcagctattgatgagcacgaagatcgtccaatacggtgtcccgtatctcacaaatcagaaaatccataacgtctaacacgtagtgaaaaacaaaaacaactaggagccagagctgaatatgagtggtggcctctctatatcccatgataggtaaaaggatctgtctcattaaagcatgcagaaactttgcagctatggtgaagtttgctggagaacgccttgatccatctgtgaatggaggtagtaaaagagctgagacgtgagcactggcggattatggggaggctacaatagtgcaaaacaaaattttcgaccccataaaaccagaaactactgtgattatagatcatggaatcaccactagacgcgtagggcagcagaaagacgtctcgatgtagatgaacgcgtcgagcagcgttgtgctgttgacggcgaccttcacatccttgcacggtttgtccaagttctccaaatgtagcacctcttaggtatccacatgtatagggaggaagtatcgcgttccgaactgctaggttcgtgatagtggctaggcgagggcgaggggcgggcggctgctcatttactggtggcgaattaggtttaccttaaccgtgcccctgcccctcattatataggcattctagtgggctt

SEQ ID NO: 158742 - DNA, 412 bp, Zea Mays
gtgtcgtatgcatcttctttgtttaccaagaattgtcggaattagtgatctttgtgcgggatcggggttcgccggcatgtgctccgccatggaccgcggtgactgagggctgcgccgccgcggtccagagttggggagcctggggctatatggaccgtcgatcgatcaaggtgcggtcccgattatggcaagtgataccgattcatgaagatgatccagaccgttgaatataaaatgtacgacctgggttagattgtgtggcaataaaatctaaaccgtgtatccctgatccaatggccccagttacgtaccggttggatgcgtagatggatctaatcactacccttcagtgtagatcgtgcggccagaaatgcagaataccccttcgtcgtgcctatttgttaaagagtcc

SEQ ID NO: 158743 - DNA, 409 bp, Zea Mays
aggtgagattgaagctttcaacgaagtcttaactagcagaggggacttttgtgcctctgtgggtgctcgagaggccatgtcattgctcgaaaaagctagttgtgaacatgtgaaggctgtaattcagccagaattttcagtttcagcgaatgatattagagtaccttcagctgaagctaccgcccttggagggaaattttactctgaagtgtgggtgaacggcagaagagagatagcagacgaagctatcaaacaaagtgaagaagaatcccacctagattcagaggaagcaagaaaagctgaagaagctgtagagcgtgaaagacgtataggtttgcttgtcatattttagcttcgtaagtgctttagcttcatgtctaacaaaaacttacatttttatgtagcggaa

SEQ ID NO: 158744 - DNA, 368 bp, Zea Mays
tgtaccggccgattgaggctatggctgggttctccgagcggcggacatgaaatcggggctagtctgagtatttcccccaacctaattgcaactaggaccaactacatggctctggccacggtggccgtgagcatcgcggcaagacagccgtgttcccggcgatgggtggcggtctagttcaattaaaggggtcggggagcatcgcagatgcatgagaacgcttaaacaagggagcaggagacgggaactgaccggagtatggctggcgacggtgaagcttgtttcacggtggcggaaatcggatttgggggaaactccgaattcgcggaccttagcgaacgatcggggctaattcaaggtggctggtt

SEQ ID NO: 158745 - DNA, 582 bp, Zea Mays
gtgactgccgtaagaccttgccccagtacgtgtcgcgatgaactcactttagcaacaatatcccttcaccgttgtgatccaaatctcgttcaaattcagagcaaccatgaccaacttctataaattgagcgcttcccttgctccgcctgtaacacctcaggtgttacttagggttttcacttaagactacacaagtaagcccatcatcacatgtgacttaacttgagtaaaggaattcaaacatggaaatcaagatcctaaataagtgcaacctatcttagatgtcatgccttggcttaccatgcacatagaagggtgagaaattgcccaaaaccctaatgcaccccctgtggacaattggagtactataagtaagtatgacccaaaaagctatgaaaaccacttgataatgtcttgggccaattataaaagatgtagtgcacttaataccctacaaataatagtaagaaagtaaccccaaaaaggtttcagaaaaaccccaaaaggttcaccaaagggttgagcacaaaagaaaaatcaaaatttttctaagtccaaaaccaacccttggccaaagatcaa

SEQ ID NO: 158746 - DNA, 333 bp, Zea Mays
ggaggtttcagtacattgtatttgcttttggttcacctggctctaggatggatcggagcattatggccgatgcgggcatgttttgtgtggggttgaggaaatattgtttgtcgttgcttctttcagcgagttggtcacacaccttccttggtcagggcctttcggcctcaaggcgcctccactcaacatcgttgtagactcggtcgaggttttgcacgagggcgtcgagctcctcctcctgctaacaaagggaggcctcacacaccaggatgcacgcttggtgctggcgttggtactcttcttcttgattgggggcctccttgtctcctccgc

SEQ ID NO: 158747 - DNA, 504 bp, Zea Mays
tgtaggttcacttgcatggatatttaaattgtgctcataattcttggattgtatagtcgaagaggatatgacacataatgataggaattcacccacaacaaattagggaaacctatgagatgagggtgagttttttagtcttccattcgacgcaactggtatgcccacaaactgccttttggtatacacgaatttcaggttgctaaaattgtcttgctgtttcagttcctacatgctagaacgattcaattgcatgtagcagaggagctgagaagcagagaggcaggcagcaagcaacctaatgttatctgaatggaaaagcagtgtgtgcaaattgcaaccaaaaacagtttcttggattgaagagaggaaaaggagattgcacagaacaaaacagagcaataagggtgagagtgggaactgaactctgctgctagcacacataattcacatagctcagctggaaacaaaaaaagacaatcaaatgcagtagtagtagatcag

SEQ ID NO: 158748 - DNA, 473 bp, Zea Mays
ccggcagcgtcctccttcggcatctcccagtcactaacaagaggccacactctataagcaatatgctcttggactaagtctcttgtgccaataaaagtgcatacactgttaaaagccttatggcatgcttcaatttcatttccaggaacattgtgtggccttctaatgccgaagcggggccaaatagggcgttggatgatccccttgatatcttctctttcaactaagttgttctttacataaaaccactcttccatccaggctcctagccacctcttccaaaacgtcgagactggatagctcacatcagagcgaggaatgaagccgtaacaaccaaagttattatgatattgctctttgccagtagccttcgtctcataggacagctcatgcatgttacagaagcattttgcactcggctctagtccttggctcctcacaacccaaatgaaaatccccattctgatgatagc

SEQ ID NO: 158749 - DNA, 984 bp, Zea Mays
gtcctcacacgtcccagcaaaacggcattgccgagcgcaaacataggcacctcgtcgaaaccggcattgctcttcttgcccactcctcccttcccatgcgtttttgggatgaagcctttctcactgcctgttacttaatcaatcgcatgcccactcgaacactacatcactcctctcctttggaatcacttttccataccaaacccgattatatcttccttcgtgcttttggttgtgcctgctacccaaatcttcggccctacaactcccgcaaactttcttttcgctcagtacaatgtgtctttttgggttatagctctatgcacaagggttacaaatgtcttgaccgcacgtcaggacgaatttatatatctcgtgatgttgtgttcaatgaatccctgtttccttttgcttctactgaaccacccttgtctgcatctacttctgcccctacttcagatgagccactagcatataatgatcatatgcggcgatatagacttgaactgttagcatctgacagttctccaaagtgttctcctgtgcaggtttcaggttgttcccaggagccgttcacaacaacaacgacatcgacttcatctgatgtttctctgataacattgcccctgccagctccgtgccttcctctgcatactcagacaactgatgttactgacgtccactcgccatcagcttctgagacccaaccgctaatagaggaagtgtctgcagctatgccctccagaacagaggaagtgtctggagctatgccctccacatctacggtgcttactcgactacgcaacaacattgtcaaacccaagattccaacggatggcaccattctttatcatcactctcgtaagggtttctttgctgcacccacctcttacaagactgccttgactgatgaaaagtggtatgctgccatgaagtctgaattcagtgctcttcagcaaaacaacacatggacattggtcccta

SEQ ID NO: 158750 - DNA, 433 bp, Zea Mays
cggaagcagcggtccagccaccaaacagactctggtcccacctgcaggctcgcatcctcccctgaggcgggaccgggggccactgtcggtaccctaaatcaggggtaccctctcctacagcataaaggcatcgcacccatgcgacgtctcttggccatgcagaggaccgcgcctaactccaccggacgggcgggccaaagggcgccacgtggcgaggaaaggcaccatgcctcagtaagaccggacccccacagaaggtcaccgggcccctagatacatacaggtccagagccccaggggaggtccgaaccccgatagggtatcagaacgagaaggaccttggggtatgcaggggtccggtgctgacatgtgtgcaggccttgttctccgctccccgcgcaggcgaaggcccgctgcttgtggatcatgacat

SEQ ID NO: 158751 - DNA, 697 bp, Zea Mays
ttacgcatgatccaaaatagataaacaaacgataattataccaaccttcgtctgaaatcagttaagctaaatgtagaattgcccgctaagtaatcttgatacattcttgcatgtcctgcttgtctgtctcgaaatttaactaaatgtccggggatagacccaccatgctttcttttactgtgtgaaggctgatgaaagatatgatactcggcgaaactaatttcgtcatcatcgtctgatgacgactcattcaattgcaacagtgattgtcgaatattcatggctctgtggctgagccagatgaaacctaatcacatgtactctgattaaatggactggtcggctccgcatgatttaatcgacaacaaaaacaataatcaatacaagtggtctcacatgagctttccggcgtcgacctggaataatcagcagcgcctggggaaaaaaaatcaacgccaccactgtacgccaggacgtctgcacgtttggtggcggcgcaggaagagatggcagcgcaggaaggttgagatggcaggtacaggtacgtacgacatttgtgggactttatggatttaaattttgagaaaatcttgggatctgttggagatggtacccatagaatggaattaagagatttagggagatccttattctcttgtattgggagattattttttgggctctcttggagatgctc

SEQ ID NO: 158752 - DNA, 330 bp, Zea Mays
caccagttggaataatgtaataaaggttgtgtacttgtgacatgtaataatcaagtatgttttcttcttcagatgtcgtccagaactcgtgctcaagacggggcgggaacttcccgtggtggggaggaaactccgaacctgcctcttgtacctcccacgctggctgaggctatcgctgccttagttaatgcccctgctgataacactcgttttctacaagaaatggctaggaatcggtttcatcagcagggtggcagaggtcaaccccaaggcccagagacaccacctacctagaatttttagaaacttgtccacgtgtttttgttaaag

SEQ ID NO: 158753 - DNA, 596 bp, Zea Mays
gtgagcctggccaccgcggctctagggttaactctcatcactcttctctcgggtttagaccactcgcagccgccgccgcggctctagggtaactctcgccactctcctctcgggttctctcgccactcgcagccgccgccgcggctctcgcctctctctagggttcactcgctcttgcctctcgggttcactcgctctcgcctctcgggttcactcgcagtcgccgtgctcacgggctcgccgccgtcatctctccacccgtggtgacgacaccgcgcccgcggacgagctcgatctgtctatcttcttggctctcgcctctcgggttcatctgcttcgctgtccatctactttcatctgcttcgcaaggttagcccctttcttggctgctcatctactttcatctgctttatcttctcatttgatttcatttgcttcgcaaggatcgctctcctacgacctcaatcggttctcagttgcgagtgaaccctagtcgtgtggtctccctcttctcaggttagatcgctctcctacgacctcgatcggttctcagctgcgagtgaaccctagctgtgtcgtctccctcttctcaggtt

SEQ ID NO: 158754 - DNA, 539 bp, Zea Mays
gtttgagtctatctaagtctatcatcttgcactatgagtgtgcctactcttccagtgcacagttgctatcttccgagttatcctccgggtaggttgctatctggtcgcgcccaagacacatctcaaagtcccggccaacctgttgcgacaaatacacacggatatagttcttcatactgtagtcttaaagtttgtttcgcctgaatgcgacccgatagcacacactgccagttgactgatcagtggcctatcaggcggcccatgggacatatccacattatagtgacccatgggatatctacttcccacacacggggagtaaatacttgaaaggctttggacaagaggtcggccctacttttgatcaattactctccaaatatattaataagaaggtcgttccccgtggttgcccaacaaatcaaccccgatcacccgcaaaagaaacatgatcaaataaaacagcccaaaaggcgatgcaacaagtatcgcctgtttatccagtgtccgggtacttttcaatagcctacccgtcgccg

SEQ ID NO: 158755 - DNA, 351 bp, Zea Mays
gttcggaaaagcctgagattggtgatggggagtgtgggaaggctatctgatggatgggtatgggcatggtagatgtgggcagcaacaaggctgaggttggcggtggaagattggttgaggtggatgggagtggagcgggtgtggtggtgatcggcggtgatggtatgggtggcgcgacagggtttgacaagggaggtatcccgccataacctggcatgccatatgggatggaagtagggctggtggatgctgggggcggcagtggtgttggcgccctactgatcatctgagtgatggcggtggtgagatcgacaagggccttcgtcatggtgtcgatcttttgctctagcg

SEQ ID NO: 158756 - DNA, 599 bp, Zea Mays
ctgaggtaccaaggtgtcactgtttcgaaccttcgctccaacaagtaaatttctatgtgcacgttttgggctccgaacagtgtgcttggtgggcacaaggtttatactagttcaagcataacgtccctacatccaatcttcggtgcctcgtgctaccgacacctttgttgcttgatgcacatagtaggggttacaagcaggttacaaggggcgagagagggagaaagggctcctaggtctcttatgcgtggatgggcctaaagactacgggactagagtcctacactaagccttggcctcggcctccaagtccttaggtctcgtgcgggcaggtgcggttgccttccatcaagtgtcttctgttccccgtgtttgtccatctccttttataggccaaggcaggggttggtcgtcggtggcctccttgagaaaggggcttaatactatggtaaaactgggtgttttaccctagcggggccgtgttgtccacatgcgtcttgtcgcctgatcgtatccattcatgctcattatgacgaacaacgtgggcagtgtggggccccagcgtcatcattactacctctatgccacgctgacccttg

SEQ ID NO: 158757 - DNA, 317 bp, Zea Mays
ggtgcatcaggcgtcctcatgaagtgcattctctcatctactgggaagcgacttctggaggaggtccatgctgggcaatgcggaatacatgcagcgtccagaacactagttgggaaggtcttcaggtcaggattctattggccaacagcgaagagtgatgcagctgagttggttcagaggtgcgaagcttgccagtacttgtcaaagcaacaacatctaccagcacaacaactgcagaccataccagtgacttggccctttgcgtgctggggactggatatgattggacctttcaagaaagctcaaggaggatacac

SEQ ID NO: 158758 - DNA, 1523 bp, Zea Mays
catctaataaaaattacagcaaagactgcttttatagtaataagctattagcaatgtctatatatgctaaggtcgattaacagaataatttaggtgacatgccctttctctccgtgttaaattgtccaagtgaccatcattctttctctcgctacacatgcactgctagcacaccaacatcataactttccatccatgcacgtatagatactgtagagacgttgttgttgttgccacggtattgatcgacgacaaacatgaggagcacgagtgaacgcgtcgttgttgatagtatataagaatgtaagactacttccatcgtattgtcacactcttattttattgtgatgcacatctagtggtaacgatttatgatcgtctaattgcatgttatcttgattgaacatgtagatatgctaatgtgttgcataccagagtcattcatatgcagttaatactatttgctttggggttgggtctttgacccccccccaattgcttcctaagggcttcttgtcctattgttgatggccagacatcacttggtgatgtggtgctcatcgaggtcttgtgtatggtcgggtgccacgtgttgatgtcatgttgttgagtcccctattgcttcccaagtgatcgtgttgatggttgggcgtcacttggctattccctagcacaatgcatcaatcaagtcattaagattcatcttatgtataatacaatatttctcagcaccttaccatggcgattgtgggcggtagttatccccgggcatgtttgctgaccccatcataaatgaaaacctaagggggcgagtgacagtttggtgatctcactgttacagcaactctgtgggggtcctaacacacttcttattttggggcttggtaagagtgccactcctagatgttaccataactaagaccggctgcctaaagctaggagtacctaggctagtctgagctagggctatgaacttagcaatatcctaccaccattgctcaacaatcgccttatctgcctcccatgctttgggactttgaaggagtgcctcagcaacatcgagtggaccaatcatgtgactaacactataatggaggcgctggtggaggtggtgagttgggaatagctatcggcttctcatgttttggggcttctttttcgggccctaaaaggcaaattgtggggttgtatgtcctgtctagcaatggcctccttagtccttgagaccctaaatgcccatacgaggggccctacacacttatttcgttatgagccccggggcgtgaggggccctgcgggattatcctgttaggtgtcttgggaagcaagggtcccgagtggctttcccattaggggttctagggtgcgaggcaacccaatgtcttatcttattaaataccttggggcgcatggggcctttgagtcttatctagttaggtgccctaggacaaaaggcttgtactaccagatgcccctggcggtggggtatgcgggaatcatatagtgttgtcagtgtttcaaac

SEQ ID NO: 158759 - DNA, 669 bp, Zea Mays
gacgagctggactgggcggagcacgcaaggactggcactctccgacgactggctcctaattcagacctaaatcaaggttttccccaagttaatttcaagaatgatgagctaatttggtctggccacggtaaccgcgcggatgaaccaaagaaccacgcgttcccggcgattggcggcggtctagttcaattaggtgggtcggcgagcatcgtagacacatgagaatacttaaacgggtaagcagaagacacggactgacctgaatcacgctggccgcggggaggctaaactgcgcagtgttcttgagcagattgggggaaatccaaaattcgagttctctggtggggggtttgggatgcaggtggatgcagtagctgcgtgaatacttgacggagttgaggacgcgctcaatttatagaccccaaggtcggtagctctcaatttgaccgcgatgtgttggcagccgaagatagggaagaacacggtggccgtaaccgtggcagtcaccggtgtaacggcgcaaggagaatactcctaagggtgccacacttactaccgcgtagtaacaagcttcggcgtggcacagccaaggtcaccggcgcttccacggcgactccggtagtccggccacgtcgcagcgactatactcacggcgataaactccaattc

SEQ ID NO: 158760 - DNA, 390 bp, Zea Mays
gtgctctttgtgcgagcgtggacggttcgtgaccaaggaccagatggtctatgatctcgctgtaggagcggctcttctctgcgtcacaccggacggtccacactgaggccagacggtccatgatggtacagagcgtcttcttctccgtggtaaactctagaactcgcctcctaggagggacctcgccggagaggagagttccaagacgtgcctcaggatcgacaagccacccaggacgtctctagacgatgcagagtcaaagtgggataaatattggggatgagaaatgctaattactgctactcccagggcaagaaatgtaaaggcaatgataatagattgatttggatcgattgtgctatgcgccaatcggttgtaccccttcatata

SEQ ID NO: 158761 - DNA, 779 bp, Zea Mays
gtatgattatcttggagtacatggtctaatttacaaaaacttgggcctgttggtaaggatcttaggctacgggttaatttctaaaattggcaggggtctttagcaaattatctcgacaaaggggtatgctggattctgagccgttcgactcccatccgtcggtctagattaggacgatgccacgtcaaccatcggatcaaccatcaacggcctcgatcgctacacgaaccgggcacacacagaccgttggatccaagatccacgttcccgacatctccctcgacccggtacattataatctaatcatatccacccattctccgatcaacaactaggattaaatataccaaatgtatttcccgacctgctgaggcccgttcgatcgtgaatcaacgatcggatggacgtctccctcctctcgcagttgttccgtggcaaagcattgctcccgcgacgactccttgctggcgcggcagcaaatcagctccctaccgccccaacctccacccgaatcaacttacgcatagcttagaaacttacgaactcgaacaagggcttcttaccatggattataggtatccgcgacgctatccacaagcaaggcggatctatggcactgttgctactccattgagcaatcgatgaagctttggcggattactctacctggggaggccacgaccagcttcggtagacacatgctatcacctccgatgcatcataacggcctcgccaccgtcgtggcatgaatcgagttggcgacggcatcggttcccttt

SEQ ID NO: 158762 - DNA, 1340 bp, Zea Mays
caccggttctcgctctcccagatttttccaaacagtttgctatcgagactgatgcttctggcaagggcataggtgcagttcttacacaggaaggacatcctcttgcgttcgtcagtaaggcactcagcaccaagactcaaggcctctcaacttacgaaaaggaataccttgcagttctattggcagtgaaccagtggagaccttatcttcaacactcggaattcattattttctcggaccaacgcagtctatcgcacctgtccgaacaacggctccataccccttggcagcagcgcgtcttcaccaagctgctcggtcttcagtacagaattgtgtacaaaaaaggggtagataacggtgcagcagacgcattgtctcgccgcccccaagaaggtctcgaagtattccatgtgtcggctgctagtccacaatggctgtccaaggtggttcagggttacagtcaggacaacaaggcccagtctttgctaactgaattgtcactccacccaacgactgagggaccctactcgctgcatcaaggattgatccactacaagggtcgtgtctggctgggcaacaatttgtctctccagcagcaggtcctgtctgccctccacgatagtgctctaggcggtcattcaggttttccggtcacatatcgccgcgtcaagcagttgttttcctggcctggtctcaagaaaacagtaaaggactatgtggcctcatgctccgtttgccagcaggccaagtcagatagagccaagtatcctggccttctccaacccttaccagtaccagaacacgcctggcaggtagtttccttggatttcattgagggtcttccgcgttctggtaatgctgattgtattctagtggtggtggataccttcagtaaatatgcccactttattggcttgctccatccgttcacagctcttaaagtggcacaaatcttcatcgctcacgtgtacaaattgcacgggttgcccaaggcgcttgtgtcagacagagacatgatttttacaagtactctctggcaggaactgtttcgcctttcagacacacaactccaaatgagcacagcatatcatcctcaaagtgatggacaaaccgagagggtcaaccaatgtcttgaaacatttctccgcagttttgttcattcctgtccgaacaagtggagcgcctggttaccacaggctgaattctggtacaatacctgccctcattcttccttgggcatgtctccatttgaggtactgtatgggcgggcgcctcgtcacctgggaatacttcctgcagatgcgatcaccagctctgacctgtccgaatggctgtcccaa

SEQ ID NO: 158763 - DNA, 780 bp, Zea Mays
cttttagaggaaaaaactcaagcaaacttcccaaaaattttgaacctaaacaaccctcaagagcttggccagtgggaacgacaactccctaggccgcatatttgcttgaactaattttccttcggaaaatggaaaccccttaaaaaagtagggttgccaaactagccttattgttcggaaaaaccctcacatgttactccagctgaacatagaactatcttgagttattttgtttgctattcattgatgttgtactttccgtctgaagttgacactcagaagtccctctccaactgaatgtagttgatattctacaagacataatcgttttcaaccactcaattcaacagtttgtttctgacagccaaataaacagaccaatttgtcttcccctaacaaaaataccaactgcttctgttaggcacgaagtgttgggttcatttcgatgactttcatagtagtaactgtttcatgcctattgcctttttgtctgaacaatccattctctcctggtagtcgaatccacgagtggggaactagatgtgctatgaaaatgatgcttatagttattgcattctccaataaccgttgcagcaaatctcaagttcgagtttgagtatagctttgttaacaatgttagaagacatgacatgaacctgattagagaactatgttttctacttgagctgtgtcttgtttgggatggaatatttgtcattatcttgttgtgaaccagctatgttgctatgcccttgagttatactgatggggatgatctca

SEQ ID NO: 158764 - DNA, 898 bp, Zea Mays
agttgtcaataactaagctaggaaggtaaagcacataaccaaggtaacaaaatataaatgctaaagcttaaatgcgataaacatacaaactctcattgacacgctagtcttttattaaagtatcaagaaacatgcaagctttctcctaatccttattagagccctagtcaagtgaatgcccatgtgagggccaaccactcgatcaggtaactccgtagatagccatgagccttctatatgtgcaagtggtgcttcggttgtggcctcccccaaatactcctagctgtctcgactatcgagtttttagccaaaacacaacaatcctcgttccctccagtacatgatgtcgaccgcaccacaaaaaaagttagtgtgatcttgcaagattacaagctctactagtacaacctacgatgacacacgcaaacatcaagtgataaaatggtgtgtgcaagctccaaacctatctaattggtctaagtaacctaatcacttcacaaaacatctatgctaatcactgagtgatatttgagcacttgggtgtttatagttataggaatagagtctcaactctagcaatgtttattagctcccacacatctcaaatggttggttgggtgggtttatatagctcccaagtccaaggctagtcattgaaaatcacaccataattgtgtactcactcaatgtagagtattcgcacgtcacactgaaatattgtgtacttccaagtccaagtctaaggctagccattgaaaaccacacatttttgtagtcatcggacatgtatagtgcatacacatcaaccagatgttggaactacctgttatcgaccgttttagtatgggcatctggtgattttaccagcgttacactcgatacattcgttgcattatag

SEQ ID NO: 158765 - DNA, 494 bp, Zea Mays
gcgatcacctccgcattgttttgcatcagcgcttgtcgtgaatcggtcgccggggggaaatcgattttgcctctccggcgaggggcgccgccgtgatcgggttcacgggcgcggagtgcgctcgtaggggagaagctcgggtgccgtccgtcttgagataaacggtcacaattaggcggacagctcggggagaaagaagggaatcggtccgttggattttgagccagcggctaggattagaacgagttcagatttgatatggtccgttcgatcggaatggatgcgctggattaaatctgcgcatattggttcgatgcttcactctggaccgccgatctgcgatccgagggctcagggagcgtaccgtttcaaatcctagcaatctaatctggtccgttgattccagatcgcgtggcccctgttagtcgatacccatttggtggccgttttcctaatgagtcccccagagaagtagaaatcaacccgctgtccac

SEQ ID NO: 158766 - DNA, 525 bp, Zea Mays
ctcctcataaccgagtcctagcctcactcgtccgatttggcatcaacgacccagatcttatttacgcgaaccagtgtcctgattctaatctgagccgtcgctggtggatccaacggccgcggactcatcctcctcccacagcactgctacaaggcggcgcgttcatccgcggcggacgccatcgccggtgacagccaaatccggcaccccgacccacattaccccacgtgactagggaattacagagaggaagtgatgatgatctaaatcgaacacgccataccaggtattgtcgtctcgacggtgtaggtcacattgtatggcagagccgcggcgaacctcgatcacagcgagaaattgactcccgatatctccgtcaaacacgtccctgagctcaagcaccgtcggcggcttcaccccgatgacccaggcaacacccagaagggagtacggcggtatgggcggtgtttgccgcaatggcgcgattctttgaccgcacaagaagccagaggtgatggggaggag

SEQ ID NO: 158767 - DNA, 527 bp, Zea Mays
atcagtccacttcacgtgtgcacaagcacaaccatatttccttccggttcttttttttccttttatttattccccctagcccatgaaggcttcactaatcactacgacatcacgtccatgtcatccgttggattagttacattatgaattacagccacgattaagcttcctgcgttcgctcaaccacccggtttcccactaacctgtggccccttggtcggactcaactccaatcccaagcagcaggatatactcgacgaggtgagattttcctaggctcaacctcctaagccgtaacaaccaagcgataaattctcaccacggactcgtcctggcgctatataaaatctggctgcaaccctttccgatgaagctaccccgaaggacgagctagatggtggctggaaccaagcgtcatcgttgagggattgtcgtcggggcgagctatcgtgctgatatcgcagttagatttctcgggtgcttcgctgggccaagaaaagggggaaagtcatgctcgagcagcttcc

SEQ ID NO: 158768 - DNA, 645 bp, Zea Mays
ctattctaatatcgatccacttcccttcccatcgccaccccgcgctccctctagcgtgctccgcacttacgtagactgaggaccgcaacaatagctatctcttctttgaatcctcggtagacgatgatagtgcatcccgtgaggccgtgtacctaggtcgttgatgtggatcgcacgataaccagggagccaggaacatgaggccacaccccatgaagaagtcaggggcctacgatgtcaaggagcagggaggcgtgcgacttccgtggggagctggggacccaacggatgcaggggtctagggacgattaatgcctggtggtgagcgtttgctgcctgagcatcactaaggtctccttccattacaacgacaaccacaacaaagtgctcctcccatgtatgtctataatcttctcgacttgtcttctactcatgagttacatgctttctaattatgtaaagatggctactatggtaatgcaataggagagaaattgtaagtaacaatcacctctttttctttattgtttgatgagtataaagaaatatatgctccaagtgagaaggtagcacaacctattgactctcaagatcaaccatcaaatgacaaaaggttgatgaggactatcattaaccattggttac

SEQ ID NO: 158769 - DNA, 1042 bp, Zea Mays
acatacttagaaacgtaaaccttcatccgcttccaccagaagttttgcttcaaatctctgtacatttcggtttcgcctgggtgaacggtgtaaggcgttttatgagcttctctcaagatatccatcttcacctctgatttctgaggcacacaaagacagcccctgaaacgaaccaaatcattctcatcaatggtgaactcccggggtttaccatcgccaaccctctttcgagcttcctgcaataaacgatcctgctgctgagtcgcacgcactctcaacatgagggaggattgaataagcatccgagtctcctcactagcggtgctgacatagcataaagcgatccccaaacggtctagatctgcgatcaaaggcaaggtcacttttggaaccccggacctgctaagggcatcagccaccacatttgccttccccgggtgataatgaatggacaaatcataatctttaatcaattcgagccaccgacgctgcctcaaattcagctccttctgagtgaaaatatacttgagacttttatgatcggtgtaaatgtcacaagactcgccataaagataatgcctccacgattttagagcaaagactaccgcgaccaatttgagatcatgaattggataattcccctcatgcttcctcaactgccttgagccataagcaatcactctgccttcttgcatcaacacacagctaagaccaattcgagaagcatccgtataaactgtgaaatgcttaccactctcaggcaaagctaggataggggcgttcaccaacttgttcttcaatgtctgataactaacctcgcaatcactagaccagacgaaaagaacacccttctccaagagtctagtcaaaggcttagcaatgctggaaaaatttggtatgaagcgtcgataatatccggcaagccccaagaaacttcggatttcagagacactagaaggtctcttccactccaccacaaccacaacattcttgggatcaatcgcaatgccttgctggttaatcacatgacccaggaaagcca

SEQ ID NO: 158770 - DNA, 452 bp, Zea Mays
tcagtttagaaactgttgcatctagaaacattagatgagttgtggtgtactttggaactcatgccataggccacaagtatatctgcggtgttaccagaaaaaattcaacagcttattgctgagtttgccttcttgtttgataaaccaaccgaactcccacctgctcgatctcactgccactcatactgctggtcctgggagctaccccttttcgtcttctaccctaccgttgcaatccagctcagaaggacgagattgaatggcaaatcaccgatttcctccagaatggattgatccaaccaagttgcaatccttttgcgtccccagtaatcctcactcgcaagaaaacacgtgattgccatctgtgagtggactataggcggttgaatggttacatggtcaaaaacaacaactcattgccggtgatcgatgagttgctagacgacctacag

SEQ ID NO: 158771 - DNA, 512 bp, Zea Mays
atcaagccagggaagagctttgcttcatactgggaagtgaaaggtcgagcaaaatgtgagaacagtagcagaaaaaatcaacaaggttgctgagagaattatgttaaaaaagataaggaatgcaacttatacttaaatcaattcacaattaaaagaaagatatgtcaggaatttgtgtagcagcctgatagatgaattggaaaaaacagtgatacccttaaatcaattcacaaaagtgtgaagttagacatagttgactcacaattaaaataaagggagatcacgaatttgtgtagcagactaatagatgaattgagaaaaaataatgacacccttaaatcaattcataaaagtgtgaggtagacaactgtgccgcaacacattttcttcctgattcaacaaattaacgcgactaagaatggcattagatgggagtgctttaccacatacacagaagttcaggatagagacaccgaactgaaacaacacattgtatagaagtatggactaat

SEQ ID NO: 158772 - DNA, 312 bp, Zea Mays
ggtataccgaggcgaagacaggcttggtgccgatggagaaacagaaatccctgaagtcttggctgtcaaactgtttgccgttgtcgactgtgagttcggacgggactccgaatcgacagacaatgttttgctagaagaacttttgggctgtcttcgacgttattgtggatactgctctggccttgatccacttggtgaagtactcgacggcaacaaaggtgaatttgaggttcccttgagccgtaggcagtggtccgacaatatccagcccccagcattgaagtggccatgtgtgggtgatcagcttggtga

SEQ ID NO: 158773 - DNA, 362 bp, Zea Mays
ggacattacgaccaatttttggtcttcactccaaatttcagtcttagacaggccaatattcagtctgtctgcaggagggggttgtggcctcacaggaaatttaacaagcggtgtggccagtgattttggatgcagaggcggggaagaggaaagcatgaatccaggcgggaaagtgttttgcatggcattagcgcctagttagcatccaattagttttcaaactgaatggacggcggtgtattatggggcccatggtgaataaatgaaaactgtgatacttgagccttccttggtcacagtgccatgggcttatgacttgactttcggacggagtactatggaaaaatttctaatcatttatc

SEQ ID NO: 158774 - DNA, 436 bp, Zea Mays
ggaacagtacagcgttttacacgccagattacacggactggcctaagaacactagaaattcaagggcgaggcatcaaaacattagaaattctaaaggcaagataatacatatataattaggaatgtaattgaatcgaatacggacggatatcactaaaactatatttattttcatatttttattcagattcgaatactgatagtttcgaatacgaatacggatgttctcggatacacatacggatagttgtgtgtcgaatacggaactagtcggatacggatattatcggtaacaaattttctgtcatatatcgtgtaagacatcattccacacatatcatggttgtaatcatgcatccactctttgagtccaaacattttttagtattatatgtgtacatatgtcacatttttttgtaaaaattcatgaattttt

SEQ ID NO: 158775 - DNA, 946 bp, Zea Mays
ctttttcatggtttatggttcggaggcagtgctacctgctgatctcaagtttggggcaccaagattgatcttcgaaaacatagctgaagctaaagctactaggctggatgatgttgatatactagaagaagaacggttgaatacagtgattcagtcagccagatactaacaaactctgaggcgctatcatgataaggccatacggcatcgatcctttgcagtgggagatcttgtcctccaccgaattctaacgggggagggacgacacaaattgtcgccactatgggaaggaccattcatagtagcagaagtcactcggcctggatcatatcgtcttacccaaatggatggcacggaaatagggaactcatggaatatagagcatctcatgaagttttacccctagctagatttcaaaagctattgggacgacattgtattttgtaattgggagatacaccatcaataaaatggcttcattctcaaaggcactcgaattgttcattgtcaatctgcatgcttactcgactcagggtgaccactataccctacaaatggagcaatcggcttaagtcagcaacaacttaaggcggtgtgacatgctcacgcttacttaacccagggtgaccactataccctacgaacggagcaatcagcttgagtcggcaacgacttaaggcggtgtgacatgctcacgcttacttaactcagggtgaccactataccctacgaacggagcaatcagcttgagtcggcaacgacttaaggctgtgtgacatgctcacgcttatttaactcggggtgaccactataccctacaaacggagcaatcggcttaagtcggcaacgacttaaggcggtgtgacatgctcacgtttacttaacccagggtgaccattataccctacgaacggagcaatcggcttaagtcggcaatgacttaagg

SEQ ID NO: 158776 - DNA, 1384 bp, Zea Mays
catggtgatgatcaagttcaagttggaaacggagcaggtttgaaaattctccatactggtcattccttaattaatacttgtgatcggcctcttgatttgcgtaatatccttcatgttcctaagattactaaacaccttctctctgtccataaattcacactagataaataaagttttctttgaatttcatccttggcattttcttattaaggatcttctcacacggaaaacactgctgggcggaagatgtaaagggggcctctaccacctctcgccttcgaacgctgcacaattgaagcaaactctcatcagtcggtctttccctagtcgtgcccagtggcatgctagacttggtcatccatcccctcaagtagttcagtctattttaagcctcagtaatattttgtgtcctcgagagtccactaggtctatttgcaatgcttgtcaagtcgccaagagtcaccaattaccgtatttttcttctgttcatcgaactctagctcctttggagttgattcattctgatgtttggggtcccgcacctgtctctatcaatggttacaaatattatatcagttttattgatgattttacgaaatttacttggatataccttatgcatgatcgctcggaggccccacgattttttcaactttttcaaactagtgttgagcgcctccttgatgccaagataaaaatagttcaatctgattgggggggagagtaccaaaaactccacaatacctttttccggtctttgggcatcactcatcatgtctcatgtcctcacacccatcaacaaaacggctctgctgagagaaaacatcgtcacattgttgaaaccggcctagctctgttagcccatgcttcaatgcctctcaaattttgggatgaagccttcctcactgccacatacctcattaatcgcatgcctacccgtgtcatcgataacactagtcctattgaacgcctgttccacaaaactcctgattattcgctcctaaaaatttttggttgtgcatgttggcctcatctccgaccatataacaaacacaaattatctttccggtcaaaagagtgtgtttttcttgggtatagtgcatctcataagggctacaaatgtctagatgttgattccggtcgagtttatgtttctcgtgatgtcatctttgatgaaaatgtttttccctttgctaggacatcactcgagccttacccagatatacccaacccacctacagccgtgcgcaattttcatttggctgatcatagtgttaattttggttttgatcatatggccacaccggtgctccctaaccctttgcatgcagcgatttcaccagaaattaattcagctgctgcgcccgctgtgccaggagattcg

SEQ ID NO: 158777 - DNA, 342 bp, Zea Mays
gtaggatgttgtgatgtgcctcaagtactgtattgtaatccggtgggatgaaggattttcgtcccatcctaccgcttccatacagtctaccctcgtgtcatgacggaggtagacctattgcaacctggtcttttagtatactattgcaaaatggtcctcccgactcaatggcctcttcggtacagtactcctctatcatggatgcctcgggacgagcatgggttgatacataaccattcaatattgacatgaaacgctcgtacgtccacatttcgtgcaagtacataggacccaatgcctctatttgtggtaccaagtgcaccacaaggtgcaccataatat

SEQ ID NO: 158778 - DNA, 407 bp, Zea Mays
cggtgaagcccacaaataacgggcagtggtggatgacagggcataatctcttcttggggtccttcagcattataacatcacagtcatgccttctctgtctaactgcattggaaagtgcacttctatctgctccgtgcttcccggcccgatcctgccccggaggcgggtttgggctttctgttttgggagtaaaggagggacacgaaggcgggtttgagctcgatttcttttgaatcaccttttctccaagttcccttattgatggaaccagtatatcagactaacagtatatccctttatcgatggaaccagcttgaatggcagacaacgagcagcctaggatggatgtggtctgcaccggtgcgtctaacaaagttgatgaagacgcgaccaaacttgaatggcag

SEQ ID NO: 158779 - DNA, 482 bp, Zea Mays
cgaggatgcagcacttcgacagtttgacacccagggtacagcagctgatgatgatgatgatgatgattttgggattcctcctccgcctccgcctcctatgcctccacgctcccatgatcatgaggctgggagttctcgtgctgctcctgctcctcctccggctatggaccctgctcttgcggcgattctggccaacctggcagccgagcaggcccggttatccgagacgatgctctcaatgtttcagagcatgcaggacaggcaggatgctcttcagcagcagcttattcaggatagggcagagaatagggcattcatggccctcatgcttcagcattctggtatctcagctcctccagttcagtctgctccgccttcttcgcttcatgctccagtggtgccttcgatcttgtctgcaccccctgttgttacctctccgctccggccgatcaccttggcgttcacttctccggttctcagct

SEQ ID NO: 158780 - DNA, 594 bp, Zea Mays
cttttgacagaaccgaaaggccttcttcaagcttaggaaatctcatactcttagctatctcccggcacacggatatttctttgttatccgagagacagtacaagaaatcatcttaattggtaccattgaacactgaggcccccttcggatattttaatctttgggcgtagtgtctggcttctagtatttcttcctgggataatttcttcctcggagcatgtcaaataatgtagtcaacatcttcgttcgaagctttgggggcaggagcttcagtcttttctggtacaatctgccttgctgttttgtcctcatgtgctgtaggcttcgtctcggtgggcactgaaggcccagcttcggctttggcctgaactttcgtagcttcggtaattttcttaggagcagggctcaaggccttcgtagtctctataacagcgtctaatacgctggccatcctcctcctcttgggagttgcggcaggatttttttgcatttttggcaaatctgcctctatcggtgggctaaggatttctggcgtttttatcaccttttccacctgtggctcttcagccttatcatctctagcttcggctggcc

SEQ ID NO: 158781 - DNA, 1091 bp, Zea Mays
atgcctgataactaacctcgcaatcattagtccagacaaaaggaacacccttctccaagagtctagtcaatggcttagtaatgctagaaacatttggcacgaaacgtcgataatatccagcaagccccaagaaacttcagatttctgagacactagagggtctcttccactccaccacaacagcgacattctttcggtcaaccgcaatgccatgctgattaatcacatgacctagaaaagcaactttagaaatccaaaaggcacacttcttcaatttgccataaaattgattcttcataagcgcatccagaatgagacgaagatgtcactcatgctcttcctccgtctttgagtaaatcagaatatcatccaaaaacacaaccacaaagtcatccaagaactcatgcaacatcttattcattgcttccataaaagcagcaggggcatttgttaagccaaaggacatggcgataaactcgaagtgcccatacctagtgctaaaagctatcttctcaatatcctcttcgcgaatcctcaactgatgataaccagagttcaaatcaatcttagagaatacctgggcacctctcagctgttcaaagagaacgtcaatacgaggtagcggatatttattcttgattgtcacttgatttaaagcatgataatccacacataacctctttcttttatccttcttctcaacaaataataccgggaaagcccatggtcacctgctaggcctaatgaaacccttagcaagtagatcatccaattaccgcttcaattcaacctgctcctttggagccatccgatacggggtcttatgaataggctgcgtacccggaattagcttgatttcaaaagtcacatcgcgctctggtggaatgcctggtagctccactggaaacacgtcggcataatcacacaccacacagatgtcctgcacccgcaaggcagcctcactatccaccatcatggaaaaaaggattcccgacttccttgaccgacgatccggaagtaattgggacaacaaggaaagagtgtactttggagagcttcccaagaataccacctccctacccgatggcgcc

SEQ ID NO: 158782 - DNA, 325 bp, Zea Mays
cacatataattcaattcgcatgacatacaaacaaacaatatatattggtattcaagggaaaaatcactttatcgttgttctaacagatcactatttacttctatatcataggaacgtttcagcctttaacaatgagtttaaaaccaagttatttaaacaactacatcaatagaacacaattaaaacaagccaagtttcctatagaaacaaagaaatgaatagaccacacagtgctgacaacatggaggacaagaatacgacaaatatgaaagtgaaaaatgctataatctgaagttgttgtaatgctacagagtaaacccaattt

SEQ ID NO: 158783 - DNA, 1003 bp, Zea Mays
cttcagactatatcaagatatttctgtagtgttggattcttggccttactagttttgtcaacatggtcggtgatcacctgggaatcagatataagaatttccctttttacacccatagcttttagcttcctcaggcctaagagcaaagcttcgtactctataatgttgtttgtgcattgaaattccaacttgggtgcataccaagtcttcactttcaaatgtgaaataatgacagtggtagcaccggctctgaatgaccccccaagatccgtcgcaaaaaaccatctagagagcttattctagtgtacttgctttgtcttgtggacaaggtgtccaatcaacaatgaaatcttccaatgtttatgattggatagaatgatccaagcacaaaatcaatgacaaattcatttagtttagcagaccatgttctgactcgaatagtagcttctccatttcgtataatatcttttaactactgttgatgtttcatgcctcgctatgataagtaaatttgtgtgcatattccaggctttggacaatgtgcgctaagggacaagatttatactagttcgggaagaacatccctacatccagtatttggctacttgcgctactggcaccattgctgatcaatgcttgtagtaggggttacaagcgggtgagagacagagaggagaggctcccaagtctcttgttgtggagatggttatgctaagggctacaaagtggagtcctaactaagtattggcttggcggtggggctccgacctcttggtcctcttctatgtgtcctccttcttacgttggtccgccgtctttgcgtatgggtgttagtctaggcctgttccttcgtcaggagatcggtctcctccttttataggccaagaaggggtcggccagcggtggcttcctcgagaaggagtcaccgggtgatggtaaaactgagcgtctaccatggggtgaagccacgagcgcccatgggccctagggtcacctagttgtc

SEQ ID NO: 158784 - DNA, 1418 bp, Zea Mays
taggtctatgcgctatgtcttccttggatacagcaatatgcataaaggttataagtgtctagaggcatccactaaccacatgtacatttctcgtgatgttgtttttgatgaagtctttcccttcatagaactatattctaatgcatgtgttactgcgttcagagatcaatcttttgccttccaacttactcccttcatccaactttgaaaatatggtggattttgatacagtacagccgatcaatcattgactatttttaatgatgaaaattctggaggatcccatatttgtatgaaggatggctcagggaggatgctaatgatgaacactaggttgaatctagtgatatttcagctataatgatagaatctacgttgcagcaggaacctaagttgatttcaggtgatatacaacagcagtctggtgtcctaggagcaaaatatattagaagttcaaaagactagcacaccacttaaatgtcgacctaaggggcagcaatctcaagaagcacctccaaagtcattccctaggccaacaacagtatcagaaccaaaatttatagcacatccaacaacggtctacacagaccaaaggccccatgcaaagctacaagatggcaccgtgaaaaaaataaagtatggatgtgtaacttctactggagaacctcaagatttgtatgatttaaaagatacaaattggaagtgtgatatgaatgctgagtttaaagcactagctaaaacaagacctagcatttggttccatctgaaggagctaaaaatataacacagattgcaaatgggtatacaaaatcaaaagaaaggctaaaagtactctagacagatacaaggctagattggtagcagaaggtttcaaacatgtatatggcaaagattataaggatactttcagccatgtggttaaagcaactactatcagaatcatcttgtctattgctgcgactagaggatggtccttgagatagtttgacgttcataatacgtttcttcatggtactctcgaggaggatgtttacatgaaacaaccaccaggctatgaggacaagatgcagctacgctacatttgcaagctagacaaagccatctatggactaaaacaagcaccctgggcctggtactccatgctctgtaaatggctactgaaattgggtctctgttcatctaagtctgatactcttttgctcttttttagcaaacatggaattaggattactatgtttctgttggtatatggatgctattattgtggtgaaccctccacaggatgttgttttagctttgctaaaaaaatctaagagaaaatttcctctcaagatcttggaccgctgtaatatttccttggtattgaaatacagaaagtcatctgtggcatccacctctctcaaagtagatatgctatt

SEQ ID NO: 158785 - DNA, 379 bp, Zea Mays
ggttgacgtccctatgttaatgcacggcggttcccatggtgtaggctcgggactcgacaaacacggcatggttccccttttccctccgtgcatgtggatttgtccattagatatggtaccctgtcttgttgttcctaccatactgtctattgtataggcttcgatgctgaggtcgcccctgataggagagttgtgtctatgtcttatcacttgggctcctggcgtcacgcactgtcatggtcgacgtatgcttgtagctctacctcaaggcttaaacttgctcgatgggggacttgatcgtctagtccgccttgtagacttgctcaccaggggacttggtcgcccactctgcctcatagatttgatcgagggggggggg

SEQ ID NO: 158786 - DNA, 399 bp, Zea Mays
tctccttggatcatgggtcgaaactagtccaatccctccgcacgcacctgtggttgtgtggttgccctgcgccgacaggtggccccgcctcgtcagcatcccctcgcgcgcatcggctagcacccagacaccggatggtggacccacttggtcaggccgcctcgcagcgccatagccgcaaccttcgctgggccggtaggatctcctggcgtcggatcctaacagaaggatctccctaggttatgaagccgtagggatgcctatatatgcgagtgcggcaacctcccccgacatcgtctgctccctagtttccaagtccataggatcgccgtcgctaccaagtgaatcatcgggtcgcctgaagctaacccaagctcacaccatcgacaatccttggag

SEQ ID NO: 158787 - DNA, 609 bp, Zea Mays
ttcatatgtcgtatcaacgacatggtgtaaagtaaggaatcgttccacgaccttccctttaacatcaacatacctaaaacaaggatagggttatgtcatacaacattgtaattataaaatagtgacaatcgacaagtttagtgtatatacataccttagcatcactgccatttgctctttcacagatatgtcccgtgactcatcaataagaatagaaaattttctatctttaatctctcccatgatcacatctacaatttcttctgcacaacatcttgcaatatctttttgaatattaggagaagtcatcttgcaattcattgaaccacgactaaaagctttcctcacaatttcattcttatctttgtaccaatctatcatctctagaaaattacctctattcaaagatgttgaagactcatcatgtccacgaaaagccatgccttgtgcaattagaaactttgaacattctagagatgaagtcaagcggattcgatacaattcctctgcttcttcagtagcacgactaagctgacttgagatgctttgtctttgattttgaaaatcatcaaattaacacacttattatgagcactactcactccacca

SEQ ID NO: 158788 - DNA, 616 bp, Zea Mays
gttgtgccggtggattcacgcaacgaccggtgctcccgagcggctatcaccgaattgaaccttccccgagtgtttctcgcaacttaatttgaagattggtaacctaatttgccctggccacggcgaccgaagaccatgcggacaaaggaacgtgttcccggcgataggtgatggtccagttcaattgaaggggtcgaagagcttaaggaggacctagggatgctagaacaagccacggagagacttgaactgacctgagctgagctggccacggcgaggtcgttttcatggtggctgaaaactaaattgggggaaatccagaattggtgctctgcagtgaacgattgctagtgattcttggtggctggatgcttaactatcctacggagctcgtcgtggcttcaatttataggagggaagagcggtggcactcaatttggccgagcaatgctggcggccggagaatgagaagagcactggcgcagtggattggtgtcctccgtcgtggcgaactcaccgtcgacgattagacggttatagggagtcacggtgctgcgacggaggtgttcagatacttggcgcaaggccgtgcgacggcagtcaccggcgttcttat

SEQ ID NO: 158789 - DNA, 408 bp, Zea Mays
tcggagttcctgttgtagtagctgacagcttcggcagcgctgtcaccatcatcttaggttgttctggtaccttttcttctaccttttctgattctggctctctcgtcgggtctgcaatagcttcaataggcataacaggagcagtctctgtggaagggtagtttctgccctttaaattaacttcggcacatcgaccgtctcgatgcgcctcggtctacgtgtcaagaccttgattttctttatcttcggtgcaccagtagatgtcgaagctgtgactttcctttttctcccttgcttttggatgggatagcagtagtctgggtaaacgaacccaatagcatcaaacactctattcaacctcttttagccgcgagcgccgaaggcagctgtcatagcttcgtcttctac

SEQ ID NO: 158790 - DNA, 290 bp, Zea Mays
cttcgtatgaaattacacttatgacctaaagtcctatatataagagttcactaagggtgtcactgttttttcctcttaggtgacgcatagcacacattgcttgattctttcttcgtctccttgctatctacttcagatgctcttaggtgcttcagctaatcaccgatgtcaaagcttctactcgctcctttagcctgcgggacaatactgtgatgaaggccactatcctaaaacaaacatgaagataactgaggtttgttaatttgaggacctttggcaaaggcacatct

SEQ ID NO: 158791 - DNA, 401 bp, Zea Mays
caagaaaccctacgaggcagagcgaccgatctagctctctatcgagcaaccctgtgaggcggagcaaccgatcaacttactatcgagaaactccacgaggcagagtggccaaccacctatccaccgagcaaaagcgaggcagaggactcaaaccagtactattgacccacgccagcaaggataggacacatcatcaagctacgtctggaccagtgacgcgacatgccgaagggatgttgagaagtccctatcgacgtgatagtgcagcaccacatatgatctctatcctgcgggagcgaccaacctcagtcaaggagtacctaagcatcagagtcgccacaataacccacatacttagaaggacaggacaatacaccataccgagtgtacacctatgcaca

SEQ ID NO: 158792 - DNA, 740 bp, Zea Mays
gttttgtattaaaattgcatttactaattcatttattcattttaaatgagttctggactgggcgcataaaaaccagagaggtcaagggctaacttataagatttcccgagactcagattactgctatatggactgcgggttgaatctcaataaacccaggggttcttctacaaagtgggggtcgaaacggtatggtttagcttcggccgatggatcgcggatgaacgttcctgattagatcggcataactgcgaaccggtatgcattgtggaccggccgatcccagatctacggatgcggtgctgacacccccgggatctaatctctaccacccgtcactcaatcaacggctcggatgggcgcccggaaatgatacgcaccaaccagatcaccgccaccccatgtgaatccaacggcccagacaccgtctatctctcacccaacggaccatggtcgtcttcttcctccccgcgccctaccatccccctttctcactcttcatggctgtttgctcgccgacgaacggcgtatccggccctcttaccactattccccaacccgagatgtgctatgcaaggataggaacaaggcggagtgttgagagtgctcaccatcggcagtagatcgacgagctccccacaccacgaggtgcggcaacgcagcggtggcgcgccattggtgcaaagacacctgtcctccggtcatccctgcttccccgtgaccaccagcacgcacccggt

SEQ ID NO: 158793 - DNA, 828 bp, Zea Mays
tggtgccccagtggcatactcagcctggaacttgcctcctcccaaagccttcactctttttgtgtcaaatccacctgtcactgatggcagtttgggccttagagtgcgaccctctgctgaagaagttagcgccttgttttcctcgcttggggagattcctgatgatgaacggcaggtccattttgagatgcccctgaatcatagtgatgcagagataagtgctatgcttgatttgctggctgaggactcttctgatgctgctcctgctgggacactagtggtggcgcccctcccaaaggctggtacgaccttggatattcagaaacctgccagtactcgcccgaggcgcccttgccgagccaatcaacatgatccttctgctgatgagcagaaaaagaaaaagagacgccttcggcgagtatccagtttggatcggtacgttggtacttcggttcctgctgctcaagaagtgtctgtgactgaatttattgacgctgaccccaatgggtgtgcccaatctgctgctgatcccaatgtgggtgcttcatctgttgctgatcccaatgggggtgctgcatgtgttgctaatgaagacgacggggaggaagaggatgaagttcctttgactcggaaaaacagtcggcagttcatcgctagtggtgaaagtagtggagttccttctcctgctttgtctgctctcattggtttgcaagaattgtccctagcgaattttgatcagactcttgaggatatggttccagaggatttgttatcagagccagcagatgatggtgtgatggaggtttgtgctgatgtgcttgatgctgg

SEQ ID NO: 158794 - DNA, 653 bp, Zea Mays
cccaagtcgtcatcatcatcggaagaagtatctgtagcgacaccctaagtcttgaactgtctgatagcctcatcctcagccttgatatctgatactagagctagcgctagaacagtgtccttaggagctgggcgatagaaaccaaactgaagtcgagaagcctcgagggtggcctagaactgaggaggcctgatcagctgcgcaaagatgtgacagaggtagtgagcatacgacaactaacggcgagcacggagaccatccaacactgtatcctcaatctcacatattagaaaatcaaccacatcaaactctgagtgagagatcaaggcaccaagtagctagagatgaatatgtgtggtggcctccctgtatcccatcctaggtagcaaagtccgcctcatcaactcatagaggaactttgttgcttgagtgaagtcagcagaagaatgtcgcgacccatctgtaaacgaaggtctgaacagggtagcgacatgagctgtggttggaacaactctgtcattagggcgacagggaggatctgatgtgccaaagcacaagatgtggagcctcatcgttgattcaggaaatccaaagagctctttgatctgagtggcatgtagagtgacatcctctcgctcgaacctgaacctcag

SEQ ID NO: 158795 - DNA, 564 bp, Zea Mays
ccccgaaggtcttactcatcgcccatacaaatgttggcaaggcgttcttcagaccgtagggcattacaacatagcagtagagcccatccactgttacaaaagcggtatgcttcctatcttccctagacatctggatttgatggaaaccagagtaagcatctagaaaggacaagaggtcgcacccggaggtagagtccatgatttgatctatgcgtggaagtggatacgggtccttgggacaagccttattcaggctagtgtagtcaatgcacatccgaagcttcccgtttgcctttcgaacgatgactgggttggccagccacactgggtgatgaacatcttcgatgaagccagcatcaagcagcttctggacctcctggcgaatgaagtcctgccgctcaacggactatctcagaggcttctgactcactggcttggcgttgaggtggatcttcagatggtgctcaatcacctccctagggatcccaggcatctgtgacggttcccaagcgaaaacgtcgacatttgcccagaggaaggcgacgagcgcgagttcctatttct

SEQ ID NO: 158796 - DNA, 523 bp, Zea Mays
gcctaaatacacacctcaacgggctgaagaatttgtatttttcttcccagtagtttatcacgtgcaggtgcagctgcttcgaggtccccaaagccaaaatggcttttcgctacggtttgggtcaaatctgcgtgcactaacttcgtgttacaatggcccacactctacacacacgtgctcatgcagagtagatggatatggatcctatgaacaaataaaatgcaacttggacgattgtattcctacagggggggtaagtcatcagacgcctgcacaaatcacatatactatctctgcagcatgcagaccattgttgcattgtagctcgctcgcaagtcgcaacagagcagatcacacaaaaccttgctcaaatatttgttgtttttcaactaaaacatgacaaataaaaatgatcggagcaagtaccatgttacttactcccccgttctaggataggtctccatctcatatttcaagcagccaatcatcggctgcatccgtagctgtttagactgctgcgacg

SEQ ID NO: 158797 - DNA, 388 bp, Zea Mays
cccgggcgctagcgtggtcgggcaagtggctaatttcacgccggtgctcaaccggacccgccgatccgccgcgcagcgaggacgatcttcctcggagcctaatcgccggtaaaatcaccgtctatacccttgttgttctattggcttcgttttgcactagttaggatgggaaatggacaacccgagagcgcgtttggattactccagcgaggcaccgccgtgcgggtcgcgcgctccgccgtgggctggcggccgggtgttgatgacgggttcataaccgttgattccagtggcaacgagtaggattagatcctgataccgattcagccgaaacaaacagtgaccgttgatgcggtatccggtggtggtgatccgatcttgaactcat

SEQ ID NO: 158798 - DNA, 744 bp, Zea Mays
cccctcgccgccggtgaccctctctctgtcaccacgattcgtgctctctagcatggagattatcacggcagggtaaaaatcttggcaccggataggctcggacccggtcgacggtgagctcatcgtacccacttgggctgtggtcgggcaaagtggtcctcgccggagtaggccgccaaccaaccgtgcgccacgtgccttagggcgttaccacatcatagtataccactgaagcatggctgttcatcgtcagtgaccttgccacggtgaaatccacgaatcctatgcgccagtgctctcccctctctccagccgccagcacgccatgcccaaattaggagccaccgccctcgggccctataaattaagcatgccatcaactccactaggtaatcacacacccaacacaccagcccatgcctcaaattatccaccagagcgcttcaatttggtatttccaccaaattagtcaagaacaccgccatgtgagtgctcaccgtggctagctcgctacaggtccgttcacgacctcctcgttctcgtttccaatccctgtgtgttgtagatgcttatcaacccggccaattgaactagaccaccatagatcaccgggaacacctcggttcatccgcagtttgtgccatcaccgtggacagagtgattacgggctagaactccacaattgagtgagggattagtgtcgccgaggatagaattaggcgttgtgcaacggagaggcatagc

SEQ ID NO: 158799 - DNA, 659 bp, Zea Mays
tcttctgccacctcaaattgtgataatgccacataacaatgtgaacacaggatggcagggggcaaactcggcaacccttcgatattcctcgggagctacataaaaccaaaagtcccaccaactgccctacttattcctagcacagggaacaatctcgacaacttcagccgaggtcttcccagtccttggcgtgaaagtgcatgacccaaattgggctaccttgtcacatatttttctcttctgccagtgcaagcaataattcttagtgaagacttccatagatggttgcccgccgtatgaggagacggcccagacatacttcgcaagcgccaccactgcattcggtgtcaactgatgaacttgtacctcaaacttctgcaaaacctatactacaaaccgatacgtcgagaggcaaagaccggtagtgaaaaaggcttcaaaaacaatcaattccccctccggttcaggtacctcttctacccctggagctcgcccgacaccattcccaaaataacattgtcgctgcatctccagcacgcggcccaaaaaaatcctcgaggtctctaacacgacggtgtggctgggctgcagttcaaccaccgccaagtcgctcaacgtctcctcagatgacggcgtggttggtgacgcgctcgcagcag

SEQ ID NO: 158800 - DNA, 486 bp, Zea Mays
cataataccctatgttatgtgggtttctagaggttgtattgctctgagttcgagggtttacaagcgattgttgaaggtaggagatgaaggtgccctagtgatctagcgggatctaacctatttgtaggggtacctcctcaaccttatatagtcgatcgaggagatgacctagtacaaatcaaagcattcatgcgtgtctatcccactacttgctacgatcgcgccgagtcttccggtagcatgttgacctctttcgcagatctcgtgcccgtctgcatgagcaaatcgagtctcgcgacatttaattagcctttctgacccggcgtgtgagggtttaagccgactgtcggtacctctcagttgaggcccacaatacgtcccttggatgacttatctggggcctttcgggcggcacatgaagtaagtctatgccttgatggccctgggatatccatcccccacatcagagcaaagtgcgatgccttg

SEQ ID NO: 158801 - DNA, 904 bp, Zea Mays
aaaactagggtcaagtcttccactatagtcaacccctacctagtcttgaccatgatgtcatcgacgtagatctccaccttgtcccgaatcaggtccccaaacgtcttactcatcgcccgaacaaatgtttggcaaggcgtttttcagaccgtagggcattacaacataacagtatagcccatccactgtcacaaaagaggtatgcctcctatcctctttagacatccggatttgatggaaaccagagtaggcatccaagaaggacaaaaggtcgcaccccgaggtagagtccacgatctgatctatacgtggtagtggatacgggtccttgggacatgccttattcaggctggtgtagtagatgcacatctgaagcttcccgtttgcctttggcatgacgactaggttggccagccacacgaggtgatgaacctcttcgatgaagccagcatgcaacagcttccggacctcctcacggatgaagtcatgtcgctccacggactatctccgtggcttctggcttaccggcttggcatccgggtagatctttaggtggtgctcaatcacctccctggggatcccaggaatctgtgacggctcccacgcgaacacgtcggcatttgcttggaggaaggcgacgagcgcgagttcctatttttcccccagattccccgcgatgcgggtggtctgggaggggtctgcgccgacctggatgatctttgcgggcccgtcgtctgctccggatggttgtactttcgtcaccttggagggcgccctggtactgggggccgaggggcctctccttccgtcgtccggtcgagcgatcttggccgccagagtgtgtagcttctcgacggctgctagtgcggcagtgtggtcgccccgcatggtgaggatcccagcg

SEQ ID NO: 158802 - DNA, 585 bp, Zea Mays
acgggttctaattcgtataaacagaggggttcaagtgtaaatcgcgcagccgaaggggtatggagctctgctggccgctggattagacgccaagcgcgcagattaaatcacgctgaagtaacagaatccgacccttggatcgatttcctacggcacagatttaaaatacccagacgcgttggtaaccatcggatcacagatccatggtcgcagttctattgggcaaagggcacatgacgccaaatctgagccatcgatcaacagatggacggctcgaaccctttcttcctcccgggattccaccaaagcgacagggcgtggcggcgccagttcttccccccgacaccaggtccggccgactgcgccatgtccatctcccaccatgaccggctatctggtgcatgccacgacctggcaggagaactccggccgctagccccgtcgaactcccaggttgcccagcccagcaccggcgcgatgacaccctcaaccagaaccccgatctcacaccacgcaaccctacagtcaagtggcccatacggtagccacccagacacgaattgctccaccactacagcaatgtgc

SEQ ID NO: 158803 - DNA, 572 bp, Zea Mays
attatattctagcttggaaaggtatgaccctctgtgcctaggcagacttggctcactcctctaacattaaggaccggtgggaagcagcgtcatccccactcccaaaaacccaaaagcgtgagttcaacgacattgtggtatacactctatggaacctatggaaggagagaaaccagaggatcttcaaaaatagctctctaaaccctatccgggtagccttgaggatcaaagaggatgttttaagttttaggggggctatatctaccttataattgggttgttgcagccccttagcaactacctgctctatgtgggtctgctggaaatgttcctcccaccgtgtgtgttaggcgatgttgtatccagtcctcggaccttgtttcttgttttctaaactctttccccattaatggatatgcagagttcctgcatttcattcaaaacaatatcgaaacatgagacatgagtgtattttaaacattgaactttattatctttgatcaataattggcccaattgtataaaaagtttatagtacaaaacttgtaacattatatttgtgtacataaata

SEQ ID NO: 158804 - DNA, 439 bp, Zea Mays
ccccgcgtgttcttgcagccgctgcctcttttgtgacttggcatcgtcgtctcggtcaccccggtcgtgatgtgatgtccaagctctccagcagcacctccgttttcggttgtaggggatcttttgagcacatctatcatgcttgtcagttaggtcgccatgttaggctctcattccccatctcctcttctagagcagcaggcatttttgatctgatacactgtgatgtatggacatcccctgtaatcaacatttctggctataagtattatttacttattcttgatgacttctcgcattatctgtggacttttcctctacgtcagaagtccgacacttttcccaccctgtctcacttcttcgcttgggtctccactcagtttagtcgcaccatccggagcatccagtgtgacaacaggcgtgagttctataacaatgt

SEQ ID NO: 158805 - DNA, 679 bp, Zea Mays
cagaaaacacaatttagttcatcaaacatacagcacaccgaaaacagtacgtgcagcccaaaacagcaatcaataaatttcagctcatatataattcaagaatcgccgcgttctagagacttgaattattctaacactttaccatttgttagagttaacataaccaagggagaactaacaagtagacttactattttttatacaagtcaattcacgcgcgagaactacatacacatttaattaacgcattcaccacatgaacacagtttcacgccgcacactagtttctaacatgcttttcacataactcgtaattcaactactcactaacaataaatcacgcacgacaactaccacatcaaccgatttatttatttggaacaccgcctgcctagcgtaccactagttcccacattttgattcaagctcaacaatacatccttcattcgattatacaacagcgacctaagcgtcgcgttacccaaggcatacatccttcctcatcgcgagtataaccatatcactacatatacccgcacatctcaatcaaatatcttacgccaccaccactataatacaccatggcacacacgcacatacgtgccccaggttacgcacaaggcatcaacagcatagtgactctaaccggattaatcatactcctcattcgcctcgacta

SEQ ID NO: 158806 - DNA, 640 bp, Zea Mays
ccaggatcaggcgagacacaacgagcttctacggtcccccgacgatgacccctgggcgtcaaccgaggctaagtcgatggcaaggtgaagatggctagctcacggcaactcgcactctctctcctctctgggcttacggcgtttgacgtcaaactctcgaccgcggcggccccacactcggctgggcaaatgagatcgtgttttttgatgaaccggggacaaaacgtggtgctatatatagccttgggcgaaggcgggctgacgtacgcagtgatcggcttgcacggatcgtaacagactcagccaatgatccggggaaggagaagattctagccccgtggggtccatctgccgcaacccccacgcacgcagagaccaaagtccgagggcggaacaaactaggggtgaaaacaggtagggtacccgaaacgggtacctgatacgagtactgatttgggaccattttccggatacgggtacgggtatttttgcatccgggacggatacgggtactacccggataaaaactcatcggatacgggacggatacggaacagccaatacccggtaaatacccggaactggcgggaggatacgggtacctagttgtcgtctacccggtaccttttctccaccttgc

SEQ ID NO: 158807 - DNA, 657 bp, Zea Mays
ggcgccacatgaccaacacaagaccgcctttcagacccaccatggacacttcgaattctgggttatgtcctttggattgacaggggcaccaacaacatttcagcatgcaatgaatctaacattatcttcattattgaggaaatgtgcacttgtattttttgatgacatcttagtgtacagccctacatgggaggcccatctgtctcatttggagttggtgttgcagcttttgactcgtgacaattggcaggtcaaattgtccaagtgcactttcgggcagcaacaaatcgcttatctaggccatgtgatcagcaagtctggtgtggctactgacccggccaaggtggctgcagtgtcctcatggccggttccaacctcctgcaaagacttgagagggtttcttgggcttgcagactactatcgcaaatttgtccgtcactttggactgctggccaaaccactcactaccctcctcaagaaacattctgtctttgtctggacgtccgtacagcagacagcgtttgaggccctcaagcaggcattgttgtcagctccagttttggcattgccagattttactcgacccttttccattgagactgatgcatcaagcacaggaatcgaggctcttctgcagcaggatggccatcccttggc

SEQ ID NO: 158808 - DNA, 417 bp, Zea Mays
tgctcttttaaactgtaaccctaaaatccgtatttatctatacactttttgttaaaaaggaaaagaaaagaaaaaatctatatcattatcgcccaccgcttaatgtgtttagtgttcttctaatcccagccgtactctattcatcctatcaaaaagtccctagaaacccatgtgcatctcctcccagtttgtgcacgtcgccgcccttgacagttagccggccttatccctctccttaaccaacagccaccgcctctctcctaatccctcacatctccttctccctcgacgcaagggcacatctatccctaattcgtttccacgtgcactcctcgtctcctcctcacggctcgccaccaggcgccgcttctgcctccacacacgtcggcgatctaggcgcctagatccttatatcag

SEQ ID NO: 158809 - DNA, 713 bp, Zea Mays
ctcaacatgaggcagaggagatggctagagctaatcaaggactatgacttggaggtacactaccacccagggaaagccaatgtggtggctgatgccttgagtcagaagtcacaatgcaattgtgttatgatggattctcgcatcaacaccctgtgtgatgagttgagcaagatgaagatcaaagtgattccttctggtgctttgtctcacatttccattgagccaaccttgcaagactagataattatggcccaacttagtgacaaaggagtgcaaatcattaaggagatcctccatcagaagacagagaagtataagtgttttcgccaagatgggaagggtatattgtggtttgaaaacagattggtggttcctaaaaataaggatctcaagaagaaaattttggatgaggctcatctctccagattctccatgcatccgggaagcaccaagatgtaccatgatctgaagcccttgtattggtggaccagaatgaagagggaaatagctcgatatgtatcggaatgtgacacatgtcagaggatagaggcaagccacttaaaatcagctggtgccttgcaacccctatcaataccgtcatggaaatgggatgacatcagcatggatttcattgtgggtctacccaacacatctcggcatcatgattcgatttgggtcaatatggaccgattgccaaaagtggcacattttct

SEQ ID NO: 158810 - DNA, 372 bp, Zea Mays
ccaattctcaggttcacacacaggcacaggtgactcgttggagtcttggagggagagtgttggagtcttggagggacaggtcagggacagattagtagccaaactcacacaaatacccgggcaaattcatctgatttttttggattgatacaccgcacgcacgcattttggatgctaatgacgctcggcttgcatgcccacgcccagttcgtttttttgcggaggcgacgaccaaaacaaaatcgagcgtcaaacgttggccagccgtcacgtctggcggcatccaaacgcaccatttgaattggaactcactaacatcttctcatcgctgaggaccacccacacacacaaaacttaggctgctaccacgtg

SEQ ID NO: 158811 - DNA, 615 bp, Zea Mays
ggggaaatcagaccggggaaacagacgtgcgcgaagcggtacctgcggtccgagtcgttcgatctgaatcggacggaggggatcagaccggggaaatagacggttgcgggcggtgccgctcctctacacggcggtgaagtcgtcggcgttgaggcaggagcgagctagggtggctccggggtcgccggagtagggtagagacgaagagggtgccacggcgaactcaatggcgaggaagaggccacgaatccacgggcagagaggggagaatggcggtgagaaggtctcgggcgggccggagaaactccggtgagcgattccggctatggggaggggacttaaggcgcgctaaggccttggctggcttcagcagagacaggggtgacacagggaactactctggtgaactagaccgggctaaatcggctggccaccgcgagagcacggcggaccgccgcggtcgagcaccggcgaaggcgaaattggacgaacacagggcgcaataagggaaattgggcacggggacgagtgtctcacctcggggcggagctcggggaggcttggagcggtctccggtgatctagatggctaggaacacgggcgcgggtctctagc

SEQ ID NO: 158812 - DNA, 702 bp, Zea Mays
gtcttctaccattcgggcgttgattttccagacttctagtgaggacctcaatgagtcgggtttggttggatagaacttgggctaaatctaagggtagctctggaggtgcggggaggtgggtctcactctcttctctaccggcttctcttttagctctttggggaaaccctgctccaatcccggaggcggtaggcgtagttttatctgaagccatctgccagggggagagagtcactattatgcatatgtcaatttcaaccaagttattttattcattacaccaattcattacaagcatacagctactacaagtcgcactacacgcgagcgctctctgaggtacttccgaactctttttctaaagtgtccccaaattccttgagaaggtcatcaaggctagctagggacatatccttgacgtcggacaaattctctctcctggcgggaggtggtgctggaggggctttcttcttccgctcagtctggcatccttggctcttggtcttcttttggattttcttcgtgggggcgagcttctttagcttcttatcataatccatcttcagggttcggtaggcttcacgagtgttggcctcctcgccttctgctatatcgagacactcttggagggatgccttctcctttttaagttccttgacctgctgctctatgctttccactcgggagtttaggtgggtgcag

SEQ ID NO: 158813 - DNA, 586 bp, Zea Mays
ctgaaccatttctcgattccttgcgcgcatagcctctacatcacccagaggagctcctcgtgcaccttgattgaaccctactaccgtggtttggctggagcaggtgccgccgccgacctccgccgcctgcgctcgtggccagagcagttccagccacctccgacgccgacccgcacaccgacgtgaccgccgtgacctccccgacgtcaccgaccaccccactggagctctactgccgccggtaagcctcgccgccgtgatctttgccccggttactgttctagccaaccaaggatcgtgggttagatataggataagtttagggggttatgcttaaggtcagtgactcatgcgaatagtagaccgagggctgatttgtgagagaaaagggggaagaaaacccagggacttcagcgcaaatctgtttttcttttcccatttcgaatttacttttcttttaaatactacagagaacttgataaatacataacttgaagaatactcatccaaatttagtcaaaccaattttgctagactttgtgaaatataaactatcaagcaaaaatagtaaaccccatggttcctg

SEQ ID NO: 158814 - DNA, 1348 bp, Zea Mays
aaaagttggagttaaatggattcaaagtattgctgtcagtcaccgatatagtctgatactggtctgacagtgagatctgctaaactttggactcgattcaagatcgaaggagtaagtaaatgagccaggtctctatagtcgatttgtagctgatttatagagctacaactttgatacagatagatgtttaagttgctacaagaatcttggagtaaatcaaccccaaatgtgtcctgtcagatgctctgaatgacattccgatggtacagtaactgaatcagattacaggttcagcccctctcgccgccggtgaccctcgcgccgtgatccgcgccatcaccacgattcatgctctctggcaaggagattatcacggagggtaaaaattttggcaccagataggctcggacccggtcgacggtgagctcgccatacccacttgggctgcggtcgggcaaagtggtcctcgccggagttggccgcctatcgaccgtgcgccacgtgtcttagggcgttaccacgtcatagtataccactgaagcgtgtccggtcattgccgttgaccttgccatggtgaaagccacgaatcctttgcgccagtgctctcccctctctccgaccgctagcgcgccattccaaattcaagagccaccgccctcgggccctataaattaagcatgccatcagctccgctaggtagtcacgcatccagcgcacccactcgtgtctcggattgtccaccagagagctctaatttgggatttcccccaaatctgtcaagaacaccacattgtgtgagctcgccgtggccagctctccacaggtccgatcatgccctcctcgctctttttttagcattcctgtgtgctcttgatgctgctcgacccggccaattgagctagaacacgtaggatcaccaggaacacctcggtttgcccgttgatcgcgctgtcaccgtgggcagataaattaggagctaaaactttgcaattgatcgaggggtaatgatcgttaggagtagaattaggtgtcagccacaccggagcaccggtcgttgcgtatttcggctggtacaggctcaccggagatcggcttgtcgccgtccaccgccgtggggctggcgttgtaaagaaatagaaagggaggggccttaatgcagatgttagtgagacagagaaaagtggagaggattctttatgggtttttcaaatgaccagggacccctatgcaaaatggacaccgcgggcgcgtgcgcaggcgcgctttcgcctttgcatgggccggtttgggctagtttcagccgagtactattcacctttttcctttttctttttctaccagactttgg

SEQ ID NO: 158815 - DNA, 1331 bp, Zea Mays
tagacgacttcgcgatcagtcagacaacttaccatcgattagtcatccgagtcgctcaaacattagttcatagctactcattaccgtggtaactatactacttcaccctcaggcctgattagtgcagccacaaaagtccagatcaacagtgtatggcgacatggcgtccatagggacctccaatttacagaaaagtattaggactcacgagattcttaaaatggtttataaggtaacaaactagataatattatgtagtcactatcactatatatcatgtcttgatagtttatgcattgctaattagttttggctctgacttattatattttaacttttttgctattatcatgggtttttgttgtgtgctaggcgatatggatagttatacataaagcttgttttgaaaatactgttaaaatcgttaagagtccgtttgaatgtagatattgaaacaataatgctacacatacgactgcatgtccgactgagacgtacgacttgtatatccaacgttgattaatccatttcctatggccctatgccttgatgggattacgaggaggtgatttggatgtgctagtcggaataaagtcatacactagagtcgtatgtatagcacgactcatattgaaaatgttagtattgaattagatccaatactaattttactagttttaaaaatgagttgcaatacaaatctgttgattaaatgcaactgaaattgcaattacaatcaatacagagggtctaggatctgaatggtgagttggggatagttcaataccaaggaattgggatccaattttgactctaaattcattagacaaccaaatagcagaattcagaaatcctgatttcaattctcaattccggacttcaatatctacatccaaacgggctgtcaagtaaaacttaggaccaacagtgacatttatttaatcatttttacttcactgggaataggacctaacattgtttctatacatatctgtgtaaaagacacttctctagttaaagaagtggaaagcgcaaataagagttaaaagttgtgtacctttgcaccatcgtctttggattctatcaataatatagtaccataacatgtgtcacagaaacccttgctccctctaacgccaaagaatttgccttgtttgacgcaccctttgcagacagagtacgtacaagtataacacatgtattgtactgccttttcgcagctgctgcatatgtgccaacctgatacatgtggcatcaagaaatgagtgcatatgaaaccatcacatttgaaaatttgaattgtaacagtaactcatgcatgaacatatcca

SEQ ID NO: 158816 - DNA, 646 bp, Zea Mays
tctatcattctgtttataacttggtgagaacgatattttgacaaccaatggttatatactattttatcttgatgtgtttcactaaaaacatagacactctgcaatcaactgcaaagatagagaggcaacttgataataggattcaccagcgctggccacaataggtgcacataacctcacacaagaaagaacacgtgtctatagagaatggcaggatctgttcacccaacacctgatgagaaatgctagcaaggatcaagtgcctcctgcttgataaaataagaaaattcttagaggaagaagaagacactaccacaaaataggaccttcgtgaggatgaacatgatgcagacaccaacacacaatccaattagtgtgatgactcaaagattgacgacaaattgcatgtagaggagtggatttgtcgttggaggtttcagagaggggttggcacatgttgtttcctttccccatgcatcccatttcaataatacctaatagtacaatattgtaggttagagatttcctaaactgacaatgcaagggaagaaagcaagaacgaattctagggtggtgctaggcaagccttgcttttatagcagagaacagatcatgtgacaactagcttggccagagcacttttcac

SEQ ID NO: 158817 - DNA, 351 bp, Zea Mays
ggacgacgtagaacccttccagaacacttggaatcgcttctagaccgatcaccaaggacccgacatcggtgactacccgttttgaacacggcgacgcccttttctcccgacgtgctcatggcgtgtgggtggcccgattcttttgagttcctaatgacgggagatggtcgagtgctacgtaagatggggatgtggcttaaaacgtggaggtgcgcggcagtcccacgaattccgagtccaccggcgagcatctcgtgtgatagttgtgactcgtacagggagctctggttcgtctctgacggatgggcccgagcgcgaagtggcactgactagtggggccatcggccagag

SEQ ID NO: 158818 - DNA, 337 bp, Zea Mays
cttcaggtctgcagatgactgcatcatcttcatgtatgaacgactacctattcctattttgttcagttatgcaggtatgcatatgactgaagatgactccatttagcttatgtgcatcattcttcaacctctcggactccttccccttctgctccctcggatacaaggcgtgttagagtttgagactgcgagcaaacatatccatccatcctttactctttcttcagccatataggtacaatagtaattcatctgttggtactgagacttctctgctcttttcattgttttgagttgggtgttacgtttctgctcagattaacaagtatccagtaca

SEQ ID NO: 158819 - DNA, 585 bp, Zea Mays
gagcctacttgatgcgggggtgacaacaaaatcagagaggagagttttacttacaacgccgatggatgtggcgcagtccgcgatgatgcgcggtgcagtgtcctcctcattgattggcgagaaattcctcgagtcctagcagtgctcagcccgaatcgagggcacgagctgttaccctagatcccggcgcacgcctttgaccacgcgtagaggcccgtacgtcggcctggacggagtcaccagcgtcgacgcgagtagtctcgtcttctgtggttttcggttgtggttgttagcatacaatgagggagaaagaaggttaaggctcggtgatggtttgtggtgggtgaaagagggagtaggagcccggaagtcagttataggggcttcgagagagctgttcgacaggatgtgcaacggaatcccgccatccccacggcgccgagcgcatcgcgcggtccgttgcgaggggtggaagaactacagttgcgtgtggtggctgaggtgtgggtcccacggagacacatgcgtggcttacgggaggggcccgcatgtcggcgccatcctccgggtgggctatgcggctgg

SEQ ID NO: 158820 - DNA, 493 bp, Zea Mays
tgaacactgagctcttccattggtaactgttcctcgggaacacggagacacttcttcagttgagatacgtgaaacacattatgcacatccgatagactagcaggtaactcgagttggtatgtcatctccccaactcacctaaagatcaggaatggtccaatatagcgaggggacaattttcccttgactttgaatctcctcattccacgaagtggtgacaccttgagatacacattatctccttcctcaaattccagtggtcttcttctattatcagcgtagctctttagcctggtctgagctaccctcaacttctcccggattatacgggcttgcttttctgtctcttgaataagttaaggcccaaagaactgtatttctccagtctaatcccagtatagaggagtcctccacttcctgccatatagagcctcgaacggtgacatcttcagactggcctgttaactattattatatgagaactcatcataag

SEQ ID NO: 158821 - DNA, 367 bp, Zea Mays
aagatattgtattaacaatcatcgtacgaagaaagtaggcacaggccttgcgatcctagaacgcaggttccatggaagtgacattccagatgattattgtagggtagaagtgacgatagtcgtccaaggatccgaggaggacatgctaaacatccctgggctcagaggtatcgagacacttagacaagccatcaagaatttcatcctctaggctcgaagtgatgtcgaattggttgatccatcaccgccgtcatcgcatccccaaccatctccgactcctcaaaccgtagttcctattgtacatccatcatcacctcctcaaacttcacatgctgctccttatcctcttttcaacccactatctcca

SEQ ID NO: 158822 - DNA, 623 bp, Zea Mays
ccattatacaactcgacttccttacttattttacataagtacattacttaaactatactattctaattttcttcatccttaactgctccactgcccgcttcaggagaccgttcatctgcaaggttcatggcaggaggggccccaaaaaggtccaactccccatcagctgttctagatggtccagctcccattgctgcaacttctggtggcacgttcgggtgcagccgatcatacaatacgtgcgcttcttcatgcaaggtgttgcagtacgcttgcaggttttcgagggatgcgctaagttctgctacttgagctagagctttggcttcacaatcccaagcgaaagagcacgagtttatggcccaatcaatggtcgtattgcgtttcgaaatttcctgttccaggcgaataacttctgctgataattcagcaatgcagcggctatcgtgcgcatgctccctgcatccatggcatagctcagacctgagtcgctccactctagcctccaaatccccgatagggtcgttgcttccactgctacttccttcatgcctagaggccagctggtgcctaggtacaccatgtggtccggttgatttgtgttgagtggtcttggttcgcgc

SEQ ID NO: 158823 - DNA, 529 bp, Zea Mays
cggccgcgtcgagcttggccttgagctcatggatctcccacaccttgcgcaggtcacacacctccatcgatcccatcgccgaatcaccgatacacgccaacgcggattggattcaaatgggttggggcctagggaagataggcgagcgggcgggaaggtgggctcctgtgggtgggggattggggctgggtgttgcgggagatctgagagggaccgtggatggaggaacgacagcggcaacaggggataggggtgggtggcggagggaggaccgcggtgagctagggccagcgggaggctaggcgatggatggaagactgagtgggagggttctcttgcgtggagcagaagagctagggccggcgggaggctaggcgacggatggaagaccgagtgggagggttgctcgcgtggagcagaaggtggggggcgacgcacgcaggcgttggcggacacggagtcatggatgtacggtgcagattcaacaaaggcgaacacacggtgcagatctattaaaggcagaaccatg

SEQ ID NO: 158824 - DNA, 385 bp, Zea Mays
cgccggggaggttgccacgacggtggacacgaattcactgcgccaaggttcttcttcatctccggcagccagcacgactcgaccgaattaatcaccaccgctcgctctccctacaaattgagccctccaccagttctgcaaggtcatcaactacccagccaccaagaattgctagcaatcgatcaccagtgtgcccgaatttcttgttcccccaaatcaagtttccgccaccgtagaaccaagctcgccgtggccagccctccacaggtctgttcataccctccccgtccctgttctagcatctttgcatgctggtgatgcccctcgacccctttaattgaactggaccgccagggatcaccgggaacgcactcatctgtccgcc

SEQ ID NO: 158825 - DNA, 507 bp, Zea Mays
aaccagaccgcgcgacaagggtgcctcgctcgaccccgactcctagccgtctgctggtaagtctgcaaggtaaatgcgcccgctgcctgggcagaggccacttcgccattgattgcagagacccggtgaggtgcataaattgcctgcgcaacggacaccattcctggcggggctccggaaggggtagtaagacacctccaacccccaagtgccaagctccccgcctcgacaacgtcaactttccaccgctcgtgctcgctgtcccgcccatggctcaacccggcgaccctgctgactgcccggagcattcctgcgccgtcgcctcctccactagcaacatggaaagggagcttgagcggctgagttcccatgctgtggtagtgtggctcgggcgtgaccgccccgacatcagcccggagcgggtgatgcgggccttctgctcccgcttcggggtgaggacagaggacatcaaggtggctcgaagccctctgggcgacttcctcgtca

SEQ ID NO: 158826 - DNA, 571 bp, Zea Mays
aagtgtatgtcctgtttctgattactttgtatccgattacacgggcggcctacaccaaacaaaatcagatggaaacataccaaacaaaatcagatggaaacacttacagctgaaatgggaacacgtacaattacactgaccaaacagcactagttctttccaccaaaagtaccatgcatacatagtagtgcctgccagggatatatacaaggttacagcctcacacggcacaagttgagttgaaagcgcgtgccgtcagcatgatgtaaactgcatgctgcaacctagctagctagcgcttgtgtgtgctgctttgcccctgctgcattgtacgattaatcagcgggatttgttaccgagaacaagttgggaacatatataaatataggtgccaaacaaaattaaataaattagccagtttgttatttgtggggcaacactagcaccaggtaggtagctagctagcagccatcgtcatccatcaagataatatatatattgttttcattttgttttaatcgtttctgatccccttctcgcatccaaattaagcacgtcgtccctgtgtcag

SEQ ID NO: 158827 - DNA, 637 bp, Zea Mays
cccgagcccgagctagaagctttcctccctttccttttctgctctccgctcctgctctctggcgaccctttccacctctgctcaccaccggcaacgtctgcagcgctctggtgatctcctccatgtccaagtgtttctccctctcaattctcctgtaagcctcctcgctgctcctttcctcctctccctctctactctctggtcagtgtggtggcatttcaccctctcttgcaacatttctcaaattcctgtgaaattctatgaagtttgtgcatgattgtgtgccatagtgcctctttgaaccatactgcagttatccctctcctatttggaggtttcaaaccttaaaataaccatttcacctaaaccctaaaaccccgcatgccatgtgctcggtgaaatgcccaaaccagccaaatttgctccaatcgatcccaaatttttcaggcaccttcatgatacctccagtaacatattcgccaattttcacgccgatatgatatcccaggcactagtttctcacaaattcccatttatagtcattgatttctagtcgagtgccacaattccctcttcttcgcctaaattcaaaccaagtgcacacgtcactcatatttacccatataaacctactcat

SEQ ID NO: 158828 - DNA, 1572 bp, Zea Mays
aacagatttctaaagctctactgaaaaagaaaaataaaaagatcaaatagtattgggctggttctagcccagtcggcccaacaccagagggaaacgcgcgtgcgcccgcgcgctctggcgactttgcacagcggccctcgggtttctggctaactgtgaacgagttctttcactatttcttgtgtcgctgacagattgcagaaaagtcctccggtttctatgccttcgcagggggaagtcctcgacggcgctccgcacgggaagcttaacttcggcgagctagaccggccggagggggccaagaccggcgctcccgagcggcagacacaaacctggatctaccccgaccgtttcccccaacataatttcattagtggccaatcggtttgctctggccacggtgaccgtaagcattgcggacagaagaaggtgttcccggtgatctaaagctactccgtgcaaattggtggttcggcaagcatcacagagctatgagaaggctcaaacgagggagagaggaggatgaactgaccgggatggggctggccgcggtgaggttagtttcgcggtggcggaaacccgaattggggagaaaccaaaattcaagctcccggatgcacggttgctagcgattcttggtggtggggtgggtgatgatgttgcggagctagtggagggctcaatttataggaggcttcgacggtggccgagaattttaacggggattgcgcggcggtcggaaggatagggaggtactggcgcgcgtgaacccgtgtctaacgtcgtggcgacctcaccggcgacgatgggatggccatagagagtcacggcgacacagtggaaaggcagagccacgcggcacaaggccgagaggcggcggttcaccggcgagccaacctgcaccagccgcaaaacaagggagctacgacggtgagtcaccggagttatccccagccgtcgagcgacaacctggcagacttatctagttactgacgacgtgaatcccaacggcagcggcgtgaatctttgcgtagagaggtcgccggcggtgaggatccgacgctggcagtctgatctttatcgggctactgtaccatcgaagtgggattcagttggcctgacagtcaatgtttaggcttgatttgctcacaaatccctatcgtaacatactctatgctctgcagcaaagttagagagctacaaaccagcaataattcgactatagggattgaactcatttgagcactagataaaggttgaatttaaacccaaagatggctctgtcacactgaaaatctgaatttcagagtggaaccagcctgacagccagactttaggcttaattatcttcaatttattcttaacaactgagctcacattctttagcaaagttgttctcctatgattgatctacaactttgatgtggcacccttgggcaaaaaccctatattttgaaagttgcaaggctccaaagttgagcccaaaactctgaatttcagacttaggttgaaatagaggtcaagtggtactttttgcaaattagtccaaaacttgggtttggcttgtaaatc

SEQ ID NO: 158829 - DNA, 1061 bp, Zea Mays
atttggttgtaaatgttttattattaacaagaaagtcaagagctcaaagtttgctcctaaagtgaacgagggtttcttgcttggttatgcatcaaatgcgcatgggtatcgctttttcaacaataccaccggttttgttgaaataataatagacgtgacatttgatgagtctaatgggtcgcaagggcatatttctaatggcactgcaggaaatgaagaactaccttgtgaggccataaagaaacttgcaatagatgaagtgagacctcaagaaaaggatgataacgtaagaactttgttgatgataaatgaggttgttgatgtaggtgcaaaagtggtgggtgacaaatcatccacccaagcaaacccatcaacctcaagtcatccaagtcttgaagaaaatcatcaattccaaaggatgccaactgtggtagatgaatacgaaagtgttaatggtgaaatacctcttaatcaagtgaatgacgaggaggagcaaatacaaagacaaccatgagtgcctcatcctagagtccatcataccatttaaaggggtggacaacatcctgggtagcatcaggagaggggtaacaaatcgatctcgtttagctaatttttgtgaattttacacgtttgtttcctctcttgagccacttaaggttgaagaagcattgggtgatccagattggataattgtcatgcaagaggagttgaacaacttctcccggaatgaagtttggtccttagtccaaagacccaaacaaaatgtgattgggacaaaatgggtctttaggaacaaacaagatgaacatggcgtggttacaagaaacaaagcacggttggttgcccaaggctacactcaagtggaaggacttgattttggtgaaacatatgcgtcggtagtaaggttagagtcaattagaatattaattgcctatgctactaaccatgatttcaagctatatcaaatgtatgccaagagcgcatttctaaatgaaccactacaagagatggtctatgtagagcaaccaccgggctttgaagacccaaataagcgaaatcat

SEQ ID NO: 158830 - DNA, 1786 bp, Zea Mays
ctggagctctctggcacgaacctcaccggcgcgatacccaaggagatcggcgagtacggcgagctgaccaccctcgaccttagcaagaaccagctcaccggcgcggtccccgccgagctgtgccggctggccaagcttgagtcgctcgcgctcaactccaactccctgcgtggagccatcccggacgacatcggcaacctcaccagcctgacgtatctgacgctctacgacaatgagctcagtgggccgatcccgcccagcatcggcaacctgaagaagctgcaggtgctccgcgccggcgggaaccaggggatgaagggtcccctgccgcaggagatcggcggatgcactgacctcaccatgctcgggctcgcggagaccggcgtctcagggagcctcccggagacgatcgggcagctcaagaagatccagaccattgccatctacaccactctgctctccggccggatcccggagtccatcggcaactgcacccagctcaccagcctgtacctgtaccagaattctctctccgggccgatacctccgcagctcggctacctcaagaagctccagactctgcttctatggcagaaccagctcgtcggcgcaattcccccggaactcggacagtgcaaggagctcacgctcattgacctgtcgctgaattcgcttaccgggagcatcccggcgagtttgggcgggctacctaatctccagcagctgcagctgagcacgaaccagctcactggcaccataccgccggagctctccaactgcacgtcgctgacggacatcgaggtcgacaacaacttgctgtccggggcgatcagcatcgacttcccgagactgcgcaacctcaccctgttctacgcgtggaagaaccggctcactggcggcgtgccgacgagcctcgccgaggccccgagcttgcaggcggttgacctgtcatacaacaacctcaccggtcccatccccaaggcgctgttcgggctccagaacttgaccaagctgctgcttctcaacaacgagctgaccgggctcataccgtcggagatcggtaactgcaccaacctgtacagactccggctcaacggcaacaggctgtccggcgcgattcccgccgagatcggcaacctcaagaacctaaacttcctcgacatgagtgagaaccacctcgtcggcccggtgcccgcggccatatcggggtgcgccagcctcgagttcctcgacctgcactccaatgctctgtccggcgcattgccggacacgttgccgcgcagtctccagctcattgacgtctccgacaaccagctcaccgggccgttgagctccagcatcgggtcattgccggagctgacgaagctgtacatgggaaacaaccggctgaccggtggcatcccgcccgagctcggttcgtgtgagaagctccagctgctggacctcggcggcaacgcgttctccggtggcatcccgtcggagctcgggatgctaccgtcattggagatctcgcttaacctcagctgcaaccggctttcaggggagataccgtcgcagttcgccggccttgacaagctcggcagcctcgacctgtcgcacaacgagctctccgggagccttgagccgctcgcggcgctgcagaacctcgtcacgttgaacatatcctacaataccttctctggggagctcccgaacactcccttcttccagaagctgcccctcagcgacctagccggcaaccgccatctcgtcgtcagcgacggctccgacgagtcctcccggcgtg

SEQ ID NO: 158831 - DNA, 827 bp, Zea Mays
tgtggccatgggaatgcctgaagctgtggtgcgagagggcttcgctcatcaaggtagttgagcccttggaaggcagctggtgaaaatggtgtaagttttggttagttgcgtcggccgtctggtggtgacgaaaaacttcgcactacatatcaacaatttcttgctctagctctctggattttgctcctcatctaggatcatttgtcttactttggcctacatgttggtttgctacctcttggctacgagtatctccctttgtttggtagtggattgtttttatgcgaagtgctcgtaatttgtgttgatcttccactaagatgtcgaagacttcaccatcttccgcgatgtcttcggcctccgggggtgcggggtaaaatctgatgggacgtctcgagggaggtcttcagaactgcacgtgcgattggtgcattcagaagtggttgggtcttcagttcagggatgcttgttattcattgctcatttattgttctcgggtgtggcctgaggggtgtcatcagtgagggctgcttcgcctttattttcagcgagggtcgccttcgcagtgtcgtcgagtgatgtgctggtcgtagttgtcactttcttgggggccatcgcgggtttgttgtttcatagcacaaatggtaagcgccaaatgttgggaccttctgacacgtgaacaggtgggcccaatcactcggaagacaagagaacttaggtgcacaacgtgacggcaggtagggaactgtagcgtctcgttatgcgtgtcccatctgtgtacaatgcaagggtatttataggtaaatgagaggggcattgggtcccca

SEQ ID NO: 158832 - DNA, 860 bp, Zea Mays
gtttgtgagaaaccggtcacagaagtcgtccccattgtcgatgcaatggcgaggaagatgtatgagccattgaagcgcgtcctacccatgcacgatatgcaggtcctctgttgccccaatagcctaggctgtcatggattagatgactagccagccgcccgagtcttgcttgggtttgtacttgtcgacattcaaaaccttgaagttatgtggccactagatcattcggagccgggaggaaagggttgagactctgcatgtccctcgagcctcgtgtcggtcctctcgagcatgatcattatggtggtccctcggtaatgattgatgccgtgggtctagcagcctatctcgagctgaccggactagcgtggggctgttcatcgaggccgctgctgattctattctcgcgatgtgtctcggcgctgacaagccatggttccgatcatactcctcctgtcgccttatttcgttttcgtgacggcgatcgcgtgaagcattgatattgcttggcacgtctcgccgactgttgatgatataccgcatgtcaggttctggatgaggggccaaaggagatggttcgccgcttgggtgaggatttgctgacaccctctgtgtttggcgtgcagggtaggccattggcgatctgggctagaactccaccgacttcactcggtgtttgcatggcccgggtgaagttagaaagtaagttctggggtagaggcgggttgtcgcgtcggtgctcgacattatgttctgccagttcgcgatcttgggagtggcggcgatctcaacaccgagagttctgttgtttgcggaacactctatcatcaagtgtttcccctgctccagacacttcatcc

SEQ ID NO: 158833 - DNA, 348 bp, Zea Mays
tgccttcggcactgttacctccgatgaagggctcaaaatttctggcacttttatttcttcaatatttgactcttcagctttacccttaccagcctttgtctcaactagctcagctgaaggtagcttcggcattgtagctggatcttcaatcctctgcgcaggaggaacaatttcttttgtcttggcggccgaggaggccccttcgccaaattcaggtatcgcagccggttcgatgtaacgcggccggtgagtcagaaccttcatcttcttcctcttcggctcagccgtgatggccgaagcagcaacctttccagcagcagcaatcttcctttttaccccttgccctcg

SEQ ID NO: 158834 - DNA, 721 bp, Zea Mays
gccggactgtccgcgctgctcaatttgacttccaacactgggttaatctatctatgcgtccttgttatggattgcggtgcaacatgagccacatggctcttctgcatgttaaaaaaacattcttttctcgataataatgatatgtagctctcctacgtgtccgataaagaaaatatgatgcaacatgagataatttggacttcaggatgctcggtctgtgatagtatgatactgtgatgtaccagacttaacctttgtattgatttctccttttctttggactaccaagagagaactatacaagacttgttacatttcttctgactcctatcaaccagttctggatcgatcagcaaatgatggtgaaggccctatacacaaatcacgcaagaatttactgtagccagacgaacactttgattgctgccggctatccgtaacatgagtgatgcgtctgtgggtgcgtgtgttcgatcgatagtgcagtacggacaataatagtatatagcaataatggttgtcgatgctgtacggccgcctgtggacttgacccgaagaccaggctggccagtttgggagctaaggctcaaacggtgaatttttataacatgaagtctgcacactacccaaaaaatgcagcacaaagttgaatttttataacatgaagtctgcacgctacctaaaaaatgcagcacaaagttgatagtacatccgtttttta

SEQ ID NO: 158835 - DNA, 391 bp, Zea Mays
gttgcagataaccgtctcttcatcttcctcgtgcgcttccagtcaggcaaaggcggcggcacgcccccacgatcttgcgcgcgcgctggactcgcagcctcgcatcgcaagctagttctttgggggcggattccccgattgcctgccattattctggcttggttcttgcctctgtttgggtactccggcgaatcgtctgagttggggactggtcctcctcctcctcccgatggggggctggaaccggtcgcggcatgtgagatggcagcgtgaccgcccgcggcgccctccgctccctccgcctgattacggtacggacgtccctcgctcctcgatttgggtgatgctagcccacaatctctttgggtaggattggatccccgaattcgtc

SEQ ID NO: 158836 - DNA, 333 bp, Zea Mays
gagagcaccgaggtgactagggtgagacgtcctgcccggttgaggagttgtcctttccagcccgttagccgttgtccaatcttttccactaggggttgaatatgaattttttggagaggcctagtatgcagttgaaggccaaggtagcggcaagggaacgatttgcagctacccgggaagggttggagaatgttcgtcaagtccatgttcgcacaattaatcgggtgaaccgagctcttctcaaagttaatgaccagacccgtggcagaaccgagctcttctcaaagaatttgcttgacataatcagggctcacaaacatcgcagcatgtgtt

SEQ ID NO: 158837 - DNA, 977 bp, Zea Mays
atttggcacaaattcaaatttaaattcgaaatcaaactaaacttagaaaagaagaagatagaaaggaaagaataaaaagaaaaaaaaaagaataaaagccttatgggcctcagcattcctgttcagcccactggagggaaatcaaccgcgcgcagcccattccacctctgcaccgcgccgacatgtggggacacctggtcagccgggttgctcgcgtcgcgtgggactcggtctcgctgcgctcgggggcccaccggtcactctccctttttagtcgcgcacccggagcaatgacgctcgtgtgatccgcggcgggcaccccgccatgccctcgtcaacgccgtcacaggcggaaccacctccacgaaatccccgcgtccgcgggcgccgtggcttcagcccttataggtcggcaccataacagctccgccttcgtggccaactcgggagagctaggaaagcgcctgcgcgagagccgtgtaagggtgaggaagccgccgccacgattcgccaccgataggggaagtagggtgccatttgtgccagcgggagggtggtcgtgatccagcggtgttgtgtgagggtttaatcggtgggcgaactgctagtgctccgggaatttctcaccggcgcgctcttcaccgcgcaacagccatcgcctgtggaccaccatcgattcgtcatccctgccggtgagagctctccccttgcattcgccgtgcctggaattgcgtgaatcgcgttgtaaattagatattagggccctcctggatgggatggccgaactccggccatctctctatcgtcagggccggcggcgccgccggtcatgtgtgctggtgcgacagggaaggaagacctgatgcgcgccgttggatgtgtgtcggacggataggattagattacatcataccccttcgctcggttgaatcgtagccgtcgatccatgatcgggtgacctagagcggatttagtcg

SEQ ID NO: 158838 - DNA, 526 bp, Zea Mays
gtggaagcaggaagaaaaagaaaagcaagaaccacggccacgaaaagccacggttcgctgtttcagttgctgccgccaccgctgggggccagggcgagcgcgacaagcgcccatggccctagggttacaatggagacacgtgcccagtgcaccccaagagccgccaccgagccgctgactgccgtgagattatcaaactcgcacgacgcgtcagcgagcggcgcaaactgtccctcaaggacggcatgccaccccaccaccaaccaagccagaagggagctgacgggaaaaccacggctacggtaggaccagacctcggctaccagtcgcccgaggggtgcctaaaggacgtttctaccgaagattctgactccagtgacggtggcgaccgttgcaagaagctgtacgtaatgtacggcggaagctgggagctcacctcccgcaggagtgtcaagtccctacaccgggaagtactttcggcagtcccaggggtccccaaaactgctccgcaccaacggtggaggag

SEQ ID NO: 158839 - DNA, 591 bp, Zea Mays
gtcgctgtgcgttctgtttctccattctgccgtgaaatccggctgcgcagccgcttcgccgtgaagctcgcggccgtgagttgacctggccgccatcccgggctgggtacaaatgagccgtgcacctttccttcctcctctcttctcgtcctcgctcgcatatgctcagatttccccgcatcgccagacgccatgaccacccgcgcgcgggtcgggtgtgtgggggctgtcctccgccgtaacccagcaccgctcctctctggttcatagccgtcccactgccgcttccgcggggctctgctggcggccatcgtcacctatacccgaccgctatgggaggaagctgtgtgtgagatgtccgccgtggggtgactctggctcaccgatggagatccctcgagggcgggccaggcggatgactatggccactgggacgtcaatcatggcctcgcctggtgggattgtggacccgaggctacgcaatttctcaccggtgggacttcgatgccagcgttccgccacacaccgtgtccggcctcgtccccaccttcactcccggtgagaccctctcccctagcgttgccatgttcc

SEQ ID NO: 158840 - DNA, 684 bp, Zea Mays
aggtgttccggataaccgaaggcttggctggctaaattgaagctagggaaaggtttctgggttcaccagagatgacgcacacgctaagttttgggctaggcacgagcagaaaggtggggcgacggaaaggttgtcatggcggcgttttacagcgcacgggtgtgttccggtgatgggcttcggccaaacttcaatttgccgcatccaagagcaataagagatcaaatactaactgaaacagggagcaatttgataattactgacccgaggagcgctggccacgaaggagttcttcacgacggagcaagaacagaggagagagggatttgtgggttctttggtgaaattgagccgagtgctcgatcgcgaaggtgcaggatgtgataaagaagtggaacctgggcgcaatttataggccaacgaccggaattggatgaggaccgcggactttagattgcgcaggcgagctcaccgcgcggcagtacccagtgatggcacggtggccgccgtttaaccggagcctgccaccttagtgatttgctgccacgttgccgaggatatttaccgcggccgccagcccatcccgaccgccgtggcgttcttatcgccggcgagggctgacccttatccacggcgcgatttttctgaagactgatgaacagtgcgcctgactcagtgaagagc

SEQ ID NO: 158841 - DNA, 607 bp, Zea Mays
gacccagagtccagcttcgcgcgtcccggaccacctactcaaccaccctgtctcggaccacctactcatcgtctctatcgacgttgccgcgaagctcgccttcgccttcctcatcgtcatcctcgtcgccccggagccgcaatagacctatttgtgcccatactcatcaaggagagcccaccaagaaggtgcccctcaccgtctctagaaccacgtcgagttttattttacaatattacatcagcttcgtcgggcttcagacatttggcatcccgaacattgcaattgctctcttaacattataatctcgtgctctttgaacatttgtcattccttgccgctgatcgtcatttgcaagtttcctcttcccttccagcccatcgctccgttctcgtcgtctttgatctccattcgctgagtactcccgctcgtctgtgcttggaccaggtgagtcactaccagtttatgcggctagggttcatcctcttcccctcctccaccctctcctcccctctgcactctcctctcgtcctctggagctggatctgtgcttcccgtcacctggcccttttgtcctatactccggcctcgcttgcctcgattgccc

SEQ ID NO: 158842 - DNA, 331 bp, Zea Mays
cctaggtgcagagtccgcacatgcattaatgtagcgaggatcgacctattgttacggctaagatccgtggagtcttccgtccatctattagcgcacgaagcggagaagagatatggagggggagatggtgctgacctttgggtcccacatggcggtgagatgaaaccacagcccacacgcagcggcaaaaacactgtggaactaccaggtagtggggcccgaccgtcaatgtaagagatgggaagggggtgatgggccaccgttgcaagaagggaggtgggccgaggtgagggaattcggcccacatgggttcttttcctttcccttttct

SEQ ID NO: 158843 - DNA, 505 bp, Zea Mays
tgtcgctagcctttccgcgctgtttttcgctgctgctcctccagtttctcgggatccgtgtgggttgttgttgctccgtccgtccggtgggattccctatgtgcggcggcttcaggtgtacgggtgtcgagttgttgccttggtggtgagcatcgtcaggagtgcacgacagaggccgggtcggggattaaggttaacctcggccgccatattagtttagtggtggttagccttgtgctttcttttcgtttgctttgttcttgacaacctgtgtcagttcacagttgtgggcctggtgagcactgctgtatttactagcaattgctttgatttgcttgaaatggcagtggtttgcattgctccgcgagtgaggattttcagttcggtctgagtatcttgctatatgctgccgcgcttttggcccatctcggcgaactttcctctcgtcattcgtggtactgtaaacagtgaactgctttcggcgaactgcttccgaactaaactt

SEQ ID NO: 158844 - DNA, 877 bp, Zea Mays
atgaccggtgctcccaagcggctatcactgaattgaaccttccccgagtgtttcccctaacttaatttcagaaatggtgacctgattcgctctggccacggtaaccgtgcggatgaaccaaagaatcatgcgttcccggtgattggcggtggtctagctaaattatgtgggtcagcgagcatcgtagacacataagaatacttaaacggggaagcagaagacatggactgacctggatcgcgctggccgcggtgaggtgctctttgcggtggcggaaaccgatttggggagaacccaaaattcgtgagctttggtgaatgattgagggtgggattgggggctctggtttcgtgatgatgtagcgcagctgcctcggccttcaatttatagagggcttaggcggtggcgcgtaattcggccgagcaattctggcggccggagaaagagaagagcactggcgcagtggattggtgtcctgcatcgtggcaattgctccggcgatcaacggggagcaagagtgagtcacggtgatgcggtagacaggctagagacacgcggcggacaacgacgacggcttaatggcggtgagagtccttatccgagggcggtgagcaaggggagaggtaccgcggctagctggagtggcttccagctcaccggcggcgatgatcttttaccctgcaacgctatccatcaactccaggcacgaatccagttgccggtgacacgaatcgcggcgaagaatcggtcgtcggcggtgaggatcactgaaactgatccaggcggttactgtaccatgggatactccttcagtgcacctgataatcaatctttgggctggattttctcccatatctttatggcaaatcataccaag

SEQ ID NO: 158845 - DNA, 555 bp, Zea Mays
gtagaggtatgtatgcatattgatacgacataggtgggaatgggggtggaggtgtcgatgcaggcacattaggtcttaattgaacattatgatctgctaacctttccgataggtgagatggtccaatcggtcttatctgctatcgctcttgagtaggtgagcgaggtcgctttggtggctggtcatttttgttggccttctttttcacatatttagataataattgatcaaaggttgggccagatttaaatagtcgaccagctgccttgaatgtgttagttttccacgtacctatttctggtcgtcgaggcttgaaagtatgtggtcgtcactgctcctgggcgttgccggaccgtccgctggaatgacccagactgtccggcgatgtcccggaccgtccgtgtatatgcatcggaccatccgcgatgctcagaatagggacttgtgcctggctacctgcctatgtctgccccccaacgctggaggtagtgacggtaacctttagattctcctgtccatcaggagtcctttctgccaccacttttctgcaagagg

SEQ ID NO: 158846 - DNA, 453 bp, Zea Mays
ggccgaatgaactcaagatataagagagtgggttgaatgagcgcgggctgcgccctggcggaagtataagtatgtggagtctgtaataattcagcaacaagaatttggaaagtaataaatctattgtcgtcttcctggcgccgcttcctccagttcgttcttcttcttacccctcttccacgcctctatcccctaccttaacatctagtatccggagagtcgatcctggatctcccagctcaaatcccgtgccgtccccgctcctctgccatggggaactccggtctcgccttcgcgaagatgcttgatgaactccagaatatggagacacgtctgacgggcgcgattgagggacgctgccatagcatcgagcgcatcgtcgacgatcgttgcaccaccatcggcaaacactttgaacaacgctgcggcgacatcgagcatcaacttgctgac

SEQ ID NO: 158847 - DNA, 526 bp, Zea Mays
cacatatgaaagcgtcaatggcacaggcttctgtctctgaacgaccaccaagcagccatagaagacagtgtatgtgtggtaggccccttttttggaattctacggtgtaaatcactgcataggacagactataggtgagagtgtgcaaagcaatactaaggaaccactcaatgtgtcaagctaaaatgaagctcaccagcgcggatgggaccaaaaattttattttctctaatgtcagctatgaattcatcgactttcatatggaagacccttacaacgatatcggaacgatcgcatggctgctgaccaggctcgaagcgaagggcatcgactatctccttccatttagggttgcatgtgaaggtgacgaagagatccggtgggccgtatactctgcagatggccatcgcgtcctggtagttcatcacatggtaccttcgaccgcccgtaaaagatgcaggtacaataactcttccaccaaccgagtccgcactggtgagacccttgccaatggcgtcggttattg

SEQ ID NO: 158848 - DNA, 892 bp, Zea Mays
cacagatttgacaagagcacaaaccctaactagacttgtccacccccctcctgtatatataactccaccagcgccgcactttccagtcctctgttcctcgcctctttgtaccgtcggtcgcctgtgcgtcgccgactcgcgaagcagacagcaacaggctccgccgccaaagaaatcgggtcgctgctctgttccgtactccgtctccttggaaaccgttgtttcgaggtcgatctgtgtccgtaattcttcgattttttttgctgttgctcttcgttgctttgttgatggcgtggttggtgattcgctggtttggcggcgcggagcggaccttgttagcctggccgagcgcctcctgagcccagctacatggatccgccggagtcgatcaactgaccgagcgtctccttgcccccacggagtcgctcttgtcaagatctgacacattcgctccccattttctgccaacctcggaagcccagcacacaataaaattttgtttggtttggagagaaatttcggccgttcttgctttgtttttttttgtagctttgagatcgatcgcaggtgtaagtcaggtggcagcgtgagacccttacccttctggggtggatgagctgacacagttacacgcctgcgagatcacccacaacgggagcgctctttcgttacgcgcgccgcgtcaaatttccagtagcggctcgcgtacatcagggcgccacatttctttagcaaaccccacatttctttttctaccatttccttgttagtccagactccagatgggccattcgcctattatctcgagattttggtctgatcttgctcaacttgccggctggatttgtaagccgaaattagttggacctcaaccgaaggaccattcacccat

SEQ ID NO: 158849 - DNA, 1004 bp, Zea Mays
gaaaaagaaaaagagaaagaatgaatagtaatgggctgaaaccagcccaatacggcccacgcccaggcgaaacgcgccgcgcgcgcccgtgttggtagttttacacagaagacctcgactttttgaacaagcagtaaagaaccccgtgcactattcacatgtgtctctgacatctgcactgaggcctctccctttctatttcttcacaaggtgagatccccgaccacagacggcggagcagttgctccggtgagcttgtactggccataatacccaataattcgtgctcggctccgggtttacacctaattctacccacaacgactttaaaccctcaatcaattgcaaagttcgagctcaaaatctctctgtccacggtgatggcgcaaactgaggacaacccgaggtgttcccagcgatctaacgtggtctagttcaattggctgggccgataagaatccatagcacacaagggtgctgaaacgagggcaaggagggtatgaactaacctgtagacatctggccacgacgagctctctcatggcggcgttctgaccgatttgggggaaatgagaaattgaggggctctagtggatgatccgaggcaagggctggtgcgttggatgcgtaaatacctagcggaactcacgagggtggcaatttatagagttctacggcggtggcgtccaatttgaagaaatcgcgctggcggccgagagagaggggtgagtcatcgtggcgatctaccgtggcggtcactgggtactgagctacggcggtcactgggcagtctctacgactcgcgacgacgtggtaagatgtcctaaggcgtggtacaatcgcggtgaatggtgtacatcctggtgacgaccgctcggccacgtcgccagcgcaagtggatgagcgatagagcgcaacagtgccccccaagttcatctacggcgagatcttttcaccccgcgaagttatccatgcgctactgggcgcaaatcgcagcgtcggca

SEQ ID NO: 158850 - DNA, 642 bp, Zea Mays
ctcaacttagggtgaccactataccctactaacggagcaatcggcttaagtcagcaatgacttaagacggtgcaacatgctcgcgcttactcgacttagggtgaccactataccctactaagggagcaatcgacttaagtcaacaatgacttaagacggtgcaacatgctcgtgcttactcgacttagggtaaccactataccctactaatggagcaatcggcttaagtcggcaatgacttaaggcggtgcaacatgctcgcacttactcaacttagggtgaccactataccctactaacgaagcaatcggcttaagtcagcaatgacttaagtcggtgcaacatgctcgcgcttactcgacttagggtgaccactataccctactaacaaagcaatcagcttaagtcagcaatggcttaagacggtgcaacatgctcacaactactcgtctttgggcgacctctatgccttaccagccgatcaattggcataaattaggaaaagactccaaaaccagcacgccgcacttacttccgcaatcgttcaggacgactgttgaattctaacaatagaaacaaaatgttataattttcagcaccaaggacacattctagtaccctatccaccgagtatccgagcac

SEQ ID NO: 158851 - DNA, 830 bp, Zea Mays
tcttcctagaattctttatgggggagacagagtttccatatgcaccttgatgggcgaattaccccactgatgttgtccaaaatcggcagtttaactcttcctcctcgatagatcctcagatgcctcagaaaagcctattaaaaataacaagataagcatgtcaggatctgaattctacaagagtaaaactgatgcggtaattcttccactgccgtggaaaacttgtttaaacgtcactttcacatggagatcaagtttagaacaaccgatatgatgaaaaacgtatattgacgaaaaaaattgcagttaagatctttgggccaacctctgtcatgttgcatatgaagttcgggatggtcggtagagccctgctcccaacatgcacgtaagcgtccactgtcacatcctcatacctcacttcgatcttggggaactctatctgcactctgcaggagcgaggagacgggaaaatcaacagagtttcagagcccaaaagcaagatcagtatagctctgtgatgcctcgatacaaattttagcatgtgcttccgaaggaagcaaattatttgacagaagcggacacgtacgtagctcgtcgtacgagtacgcacgagcaaaatctactagcgctgctgccaacaggcgatctgatgctcttcacgccgcctgctactgctggcgctctggctcctgctttcgcatccgcacccggaggcccaatcatggcctgcacgtccatgggccatgccgtggaggcctggaagcttctgaatagcccatctggagaagaaaacttcgaggcgccaatctccgcggcgactgggacgtgtg

SEQ ID NO: 158852 - DNA, 271 bp, Zea Mays
cccgttttttgcaccaacaaaaacagccccgtatcatgatcaaactggacatttctaaggcgtttgatagtgtttcctgggcatttttaattgaagtcctcactaggctgggttttgggcagatttggtgcaacgtcgtttgcggcttgttgtcctcttcctcaactcagattttgcttaacggatgtccgggagaagtcatatatcatcggaggggtttgcgtcaaggggacccattgtctcctatgcttttcgtcttggttatggatgt

SEQ ID NO: 158853 - DNA, 570 bp, Zea Mays
cacctgtcatacagataattggatttgaatatttcatctaagcatgaacttcacaaaaatgtttgaattcaaatttagaaaaaaatgataacaaaccagaaaaagaaaaaaaaaaggggaaactacctgcgcatgggtcggccaccgctccattaggcccatctagccgtttcctgcgcgcacccggtgccgcttcctggtgggtcccgcaggtcagggcgggtcttcttctccccaaccgaagcagcgaccgcggcggacggggatcacaacaaaccgagcgattctctcgcttctagccggacttgcctcaacaaaccccaccgaacaacttcctctcaccccctttctcttggtgcgaccatgggactgtaggcgggcctcagtgcgcgctcgtttttccctcccgatacgagctaaacagagctgtggattccacagatttgccgccgtgatcctcgcgggcgtgggcgacttccctccattccgtgccagggtccgtggggcataaattggtgccctctgcgctcctctccacttgtccatctgcctcgcgacttctctctcgcc

SEQ ID NO: 158854 - DNA, 640 bp, Zea Mays
tgtgattatgccgacgtgtttccagtggagcttccaggcattccaccgaagcgtgatgcggcttttgaaatcaaactgattccgggaacgcagcctattcataaggccccgtatcggatggctccaaaggagcaggtggaattgaagcgacaattggatgatcagctggctaagggtttcattaggcctagcaggtcaccatgggcttccccggtattgtttgttgagaagaaggatgaaagcaagaggttatgtgtggattatcgtgctttaaatcaagtgacaatcaagaataaatacccgctacctcgtattgaggttctctttgaacagttgaggggtgcccaggtgttctctaaaattgatttgaactctgattaccatcagttgaggattcatgaggaggatattgagaagacaactttttgcaccaggtatgggcattttgagttcatagtcatgtcttttggcttaattaatccccctgctgcttttatggaagcaatgaataggatgttgcatgagttcatggatgactttgtggtcgtgtttctggatgatattctgatttattcaaaaacggaggaagagcagagcagcatctccgtctcgttttgggtgctcttaggaagaatcagtt

SEQ ID NO: 158855 - DNA, 668 bp, Zea Mays
tctctagatgacctatgtgtattggctagaacaagagaagagcctaagtaaaggcaaagtcattgaaccagttgaccccctttacgtttctccacccctttcttttgttacttatgggaggagagagtgacaacagactattggtgtgaaggatatataacaggggtaccgaagacgcgtcaacaacgaagacactgactgatgggactgagtaactcggacttggattgagtaacttggacttggtcgagggattccgaatcggacaccaggagactcaaccgacatatcagaataggatcaacacgtatgaacatataaggaaagaagatgattcatgataggggtaatatttttgttgtaactacatgtcgagagtaagtaatatgggcataacatggaccaggaatagtagcaagtggcggagtggtgggatgaaaaatcacgtctggaccaagcgaaaacaacacgttttgtttgaccctcacaagtaggacccactttgatcaatcgttgacccaaaaggccctagaaggtataccaaggatagtctgactcctcgcttcgttcaatccttgatacactttataatgcttgctagtacaccggtgcgttcaaggatactggtatcgagtacactttctatctatgctagggcagcaatggcc

SEQ ID NO: 158856 - DNA, 278 bp, Zea Mays
tgtatgcatgccatttcctggactaaaaatcgatcgcagctttggttcttttttgctttcctgtgctaatgatggatgcagtctacttgagacgtcggtaatgctgcctgctttggttgggcatcgggagttggtgccccccagatttagggtcttgtcgagcgaatgaacaggactaggtgcttccactaccccgcgaaagggtcttatcacagtgtagaaaagcagcactttttacctttcccttgcacgaacggcgacgatgagacgctgataag

SEQ ID NO: 158857 - DNA, 442 bp, Zea Mays
gaggacttggattattttgcagcgttggatgtggctgcagcggagccttcgccgcgagcggagggttccgaggaactcccgggcgcgagtactgggtataggcggcgaagggcggtggcgaagcggagagtgagtgaattgtcgcgaagtggtaggcgttatcgtagcgaggtggagagaggtgatcttcgcgtggacgggactagtaagcgagaattgttgtcctcgctgattggggtgagtgtaggtgagggggagctgcgaaatctgtttgagggtgaggaattgaggataatgttgttcaactacagggagatgagtatcatcctgaaggttgagccaatgtaatatatgatgccctcactgtgtgtatgtaaccgctatttgtatgataaggttgcgtgcctttgttgatctggccgcgcccatgggcgacttctgc

SEQ ID NO: 158858 - DNA, 551 bp, Zea Mays
ccaattttaaatgaagaacataaaataggaatgagaagggaaaatttaaaaggaaccctttattcctaccctaaatgaatgacaagaaaaataatattaatgtaaatagtagatgttatatttttattagggatatgtttgatacttggaaattggaagttgaatttgaattggatttgaatggagaaattagaaataaggaaagaaatttgaatttaattactagagtttgaaatttggaaagaattgtaaatcaggaaatataaaagataaaaaagaaagagaactacttgggccggccctacctccattcggcccatcacacttttccctctgtgcggcccagcgcccgtgcgcgtgccgacatgggggccccatatgtcagccgcgtccgcgtggtctcgcgcacacttgagtccaggtgctgactgggcgggccctctcgccactacttgtctgtgctatgcacgcgcatcgcgcgctcccgccgtggcattgacctacgggcccgggttgccagtaaccacatgcacacctaaaccggtctcgtc

SEQ ID NO: 158859 - DNA, 417 bp, Zea Mays
ctgagttgagctggccgcgacgaacggatcttcacggtggcggagaaaggatttgggggaaacaaggaattagggcacaccggtgatcgattgctagcaattcttggtggctgggtagctgatgaccttgcggagctagtcacgggctcaatttatagggagaacgggcggtgtccgcgaatttggacgagacgcacggcggtcggaggtggagaagaatactggcgcgcgtgaattggtgtcccatgccgtggcaacctcaccagcgttgattagacaacagtggggagttacggcgacgcggtggaaaggttgagccacgcggcgcatggccggaaggcggcggtcaccggtgagcttatctgctccagtcgtagggtagagggggaagcacggggggggggggtcaccggagtg

SEQ ID NO: 158860 - DNA, 452 bp, Zea Mays
catacagcaagggcatcgcacattacattggctcaaccttcgggatgatacccatctccctatagttgaacaacattatcctcaattcctcacccgcaaacaggcttcgcagctctccctcacccacactcgccccagccggcgatgacaacaatttccgcttgccagtcccgtccacacgaaggcgaccaccttccacctcaccacgatgacgcctatcacttcacgacaactcactcaccctccgcttcgccaccgcccttcgccgcctatgcccaacactcgcacccggaggatcgtcatcacccattacgcgcggtgaggcctccatcgtagccacgtccaatgccgcaaaataatccaaatcctcatccgaagactcctctgtccacacaatcgaactcccagaatcatcagactcaaaacacttagacacagaatcatcagaatca

SEQ ID NO: 158861 - DNA, 437 bp, Zea Mays
gctttgtcaaccggattataaatccaagaagataagttggatgccaccgaccgaagttctataactgggtacaaggctagaagtggaacatgataaatgtttaatccaatttagagcccgtttgattctcggctaattgtgccacaacttgcctaaggctattcggccaaattaagaaagtaatcttaaacataaagagttagacaaactatgtgttgagcatcatttgtcatttgtggcactggcaacggtcggcattgggcatggtctgacggtccagccctgaggaccggacggtctgacctgtgtatggtccacccttaggcgtagacgatcctcgattagatcagatcaggcgtaactaatccctttttcacgcatgtctatccctctaaacacgtggtttctgttgggagacgtctaggaacgggtctaga

SEQ ID NO: 158862 - DNA, 819 bp, Zea Mays
cgctctcttcattgtgctttgtccttagtcttagttacttaagacctatattcaagacaatgtatggaaatattttgcacaagagagggttctacaactagtgatccttttctaagtcattgttattatatatcaagtagatcacaaattgcatatatgtatcatgaattctcctcttaacttagtgcatatcaagaaagatatcgattgaaattatatgaggcactaagaaacataagtgttaattgaagttattcaatgatcaaacaagtaacagatgcgatcaaaagaacaacatatgcattagattatcaaacaagcttaaaccaggagaatccagtaaatatgctactttaacggtgaaagttacaatctttgataaagatgacattactttaccaagttggattgaaatgtagtagcaaaacttattctcatacttgagactatgtgagattactaagataaagtgttagtctcaatataatcaagatatagaaataggctccccctaaagatatgcatcaaagtttgaaagaattggatagatgcactcatttttaaagacaaatagggagaagcattattcatcttgatcaaggcttatagaatttgcaatcaacaacttatgcccagtattctcataatgaaagagatttagaatgcttacaaccacaccattgattgttttgaagatcttattgtccaagttggtgttgttgttctttatgtcttcctctttcatttgagtgtcctccctttgtggttgtctctttttccttccaaacttattgaaaatactcaagagagatgttaata

SEQ ID NO: 158863 - DNA, 399 bp, Zea Mays
cggagggggaggcagggacgtggtagcgctaggagtctacactacgtgcttaatagtagtagggatttgacctctgttggtgttttttcagcaccaacgacctccagtcccatacccaccgtagctacaacaaaaagaacattgtcagtgaacaggttgcaatgaagcagaactgaacaggttgcaatgaagcaggacaaaaaaatctaagaaacttctactcatggtttgcaatacatgcagttggctgaaatttattggcaaactatgcacaagaagcgtaaatacaaatctaaatttgagggggcatttaatgtacatacacaaaacacatccacaccaactttgcttccactacccaatgttgaatcaggcatgaaacctcttctcgagtccccc

SEQ ID NO: 158864 - DNA, 444 bp, Zea Mays
ataccattttcgaacatcaatattagaaaaaatcaacccgcaggcagccacgacaaatagtggagtagtagcaactgccacaaatgcagacagaggcactcatgactattatggtgttcttcaagacataactgagtacactcttggtggggccaaagagttcatgtttgtgttatttgattgtgaatggtttgatcctcaacaaacgcgagaggatgaatttgaaattgtggaggtaaagcatgaatcacggtttaaaggcaacgagtatagcaatgttgtgcttgcacatcaagcgcaataggtgtactatctaacatatcctcatgaaaacttgaagtcttgtttacaaaattagtcctgaagtccatccgttacgatatgattattacaacacaaataacgaagatgatgattctgttaatatttatcaagaagaaggcg

SEQ ID NO: 158865 - DNA, 1451 bp, Zea Mays
ctaagagggagttctgcgccaccacctcaacaattgtcgcgacgcgcagagcgactcctcatgtgcctgataatgagacgctaggaggactatgactaggaccacctgtaatcatgatgacgggccggaggtcgaggtgaatccaccactgatccggcgacccactcgtcggcacgtcaattggcacgcgaacggctacaagacccacgacaaccatcgccgccgtgggaccatgatgcccggccaagagtttagggtgtgttcgggttgtcagccttcaccccccagtttatgtgatacagtggccacccaatttcaaggtctccaacgtcgacaagtattaggctaagtttgaccccgacagctggctgactatcttctcaacaatagctcaagccacaggggccacagaggatgtcatgatgacgtacctacctatcgtgttggggtaggcacactctagtggctccgccatctccttgccacaacatcgaccactgggccgatttctgtgataagttcctctccaactttcaattactctccgacaagcctgcatagccatgggacctcaagtctgtcaggcgcaagaatgatgagtctttccgctcgttcctcaagtgtttccaaactagaaggaacccccaacatcgctggtgcattggtgattgaggacttctactgggagtctcacgacgatatcttcatgcgtgttatcctgcaagaggctccaattatggctgaacaactcttctagagggctgatgactacatcaccaccgataagcgagctcatgacctcatagagccatcttggcccacaccatagaaggaggggaacatgccgcaacacaagcattggaacaaggccaagggatgaaatccacgccatgtaaccaccatcggtcgagcgtgcggtgccccctgtggcaacccgcgaaagttgggcaaaatcctcgacgacccatgcccctacgacaaggagatgtgtcataccctgtgtaattgcagggactttaagaattcagacgactatggctgaccattccagttgctccctccaccgccgccccgatagggctagtaccaatagcctcggtagcaggggcgaagttgggggcattccctcaggttgacacggagttcaacttaatcttcgggggccagggtcctaggacaacaagaggcaacaaaagcctatggaactccatgtgttggtggccatgaccgagcccctgatgccctataggtggttggagatgttgatcaccttcagccgggccgaccaatggctcggcattgatcacctaggcaagtaccctatgcttgttaaactagtaatcaaagccagctgagttaagaaggtgctaatggacgggcaagcaacatcaacatcaccttcctcgaactcttgaggcactcaggatctctgtcgctgaactacaagaatc

SEQ ID NO: 158866 - DNA, 689 bp, Zea Mays
gccacaagaaacgtacccatcataaccggctctccctccggtgtagtggccacttgtgtgtagtatattcgcccagtcttctttatattcttgcccgctgcattatttgtcgtgtttaacttgccttgattcgaattccctgagttctgctgattattggatttgttctgcctcggatatgggcactctttgataaagtgtccagacttcccacaattgaagcagccggttgaagatctagggagggcggggaaacaagcaccaggggcactcggctgacttgttgaagtgggggcagtggcagggcggatgaagacatgctgtttgaaggggtaggagggtggacgaggtgaagaacggttttgattgaaagttcgaattaccaacctttgtcgcttttcaggcccctgactggacctgtcacctctaattcccttcgattttcctgggcttgtatgcttagcttctactgccagtgttgtgctgacagccctgctgtaggagagatcaaggcaggtggccatctttctttgaagtcggtcgttgaggcctctcataaagcaattcttctttttcaggtcagtatttacctaatcaattgcatactaggacaaatgattgaatttgttgagatattgaatgacagtatctcctccttgcttgagtcgcatgaatttaccttgtttcat

SEQ ID NO: 158867 - DNA, 618 bp, Zea Mays
cagggctctggtgcttgggcgtcctcgggctagtgtttggggaaggcgcgatactgttcacgcgatgaacaatagtgttggatgaacaggatctcgagtgaacagtggcacagatgaacagtaatgctaacgactagtagacgcgctgaacagtagacgatgtggtagaagcacgggcaagatacttgcttgcttgatttttcattaattgaaggggcacatttatatagttgagatagtggccttctaggtaaccaaccttatctaagatctaacaaaccaatctttatccatttgaaattatctcaaacgaccaaccgtatctaagaaaccaaaacttatccatctaaactccatctcagactaacaaactgatgtttatccattcaaacaaattagctgattttattagggttgttgggctgccggtcataacatctctcctggcctcaaaaacaggtcgtcctcgagctggaaggcacaagattaaggggtggagatcttccgcagtagccacctcgttgtcgtcggtggtcacctcaaggtagaagaggcgttcacaatgatggccccgccaaacggctcatcctagttgtagcatagaccctagtggcgtcg

SEQ ID NO: 158868 - DNA, 304 bp, Zea Mays
ggcataagggcctcgtcattccgaagcttaaagtcagtggactcataaccatactcatcagcttctctctctttttctcgtctgccttcatgtaaaaccattcactcttccaaccagttggccacttggtgcggtagctaagaactggtgcctttgtatcctttcgatacgcaaaattgtagcaaccaaaattttcatgaaggccatctgccctggccttcgtctggtaatgcagctcatgcactcggcagaaagcttcggcattagggctcatcccttggcttcggagggaccagatgtagac

SEQ ID NO: 158869 - DNA, 2391 bp, Zea Mays
gcgcgagcgcgcaggcgaggagcagcgtgtccgtccgtccttgcactctctgcagcctccctctctctctaccccgcccatctccctccccaggccttcaaatccgcggccgcgccacccgctgcgctgctgccccggtccttgcattgctcgactcgaggcgccccagcgctggtcgcctccgtgccttccgcggtgttcctgggcgcggctcctaggctcgctcattttacttctgctgctcctgtgctgcctcttggggggcgttcctttacggcccggagcagcgcctagctgcttccgccattgatccggcaaccccagctctaggtttgctttgctctcgtgtgtggtagcgattctggtgttgggggggtgccaccaacagttacaggttgtcgccacgccgagggtgtcgtcctgcgttccttttttttatcttctctccgtgatctctctagctgcatccttgcccccccttcgctccttgctttcttctctgcgctgcctttggtgtgttgccagatagctcccgggacttcaccggttcgctaaccggcaccggcccatagtctgcggacaaacaggggccagttcggcctatttcatttcacaaaagggggcaaagattaggcggcggaatcctgttctttcccgattccttttggacatactgctcgagaggaagtgaaagcgcgcaactttggaggttccgaggagggaggaacacatcccttgcagctgcatgaggaggcaggcattgatacaatgagagatgacggttcaagcaagaacaaggtaagcgtgtttccagatcggctgctccatcttcttcgtacccacgtctctgtgcccgtctctgatcctgtttcggtcgtgattggtgcgcaaaaaaagctgtcctggtccaagacccttgttaggaagtggttcaacatcaaaacaaaggcgaaggacttccattcggattatgcagctgaggaaggtacattaacattcatctagcagcaccccaccacgtcttttctcactatctgattctgatctaacagctaagagtctgcacataatattcggcatggtttctgttatcaaacgtcttgttttaccacagtaggttgcagtaggatcagaatgcctgttcttttcatgtgcaaattggcctcgtacttcctgttctcttcagtcaacctttcccccctacggttgcagacgcaagcagaatgtgctagcgacctacaataaactaggattctctttttagtttttttgtatctgtgctaaaaattctctctgaaaatttcagtcggagtgcagtggaggaccagcagcttctctgatagagatgcatgtaaatccaagaaaagtaggacaggtacattttgctgccccctgacagtaactgtgatatcttcagtttttttatttttatttcgtgctaaactacaaacgccatgatctagctaactttatgtttcacggtgagtgtgactgagttaactttatgtttgcatacatagagaggttgcctaagaggaatgtggagcgagatggtagagtagggaacggatttgatggtgcctatattacaaacacacaggactacaggtaaaatggattgttccgtttataagacttcttgaccaacccactaatcattggtttaagggaactcctgtggcatgacagtccatatactcgtgtgcatagggtcttcgttggtacatggaacgtgggcggaaggtcaccatctagtcatttgaatctggaagactggcttcacacttctcctgctgctgatatatatgtgatagggtacaattctgtattttgctaaaccagattgcttctctcagaactaaaaactaagaactcaaatacaaaaaagggagacctaattcaggttgttgtgccaggtttcaggaaattgttcccttgaatgctggtaatgttctattgactgaagacaatggtccagcgaggaaatgggtctctcttgttagaaaaactctgaataatcttgatcagcaaggctctggtgtctataattaccacaccccctcaccagctccggatccaatcgtggagctcaatgttgacttcgagcgatcgtcaagaagacaaaggaactcgtcgtttttccatcggcgttcgttccaatccttcaaccgtagctcaaggatcgacatgatggatccacactcgttagtggaccgtcgattcagtgtctgcgacaggattagcttcgggagcaggccgagtgatgttgacactagcatgaggtgtggtgggtcgtctgatgatgagaacattgacgaggaatcacctagcggtatattcttcccaccgatgccatgtgcatatggtgctccactgtgcactggttctagg

SEQ ID NO: 158870 - DNA, 626 bp, Zea Mays
acactaccttgactatctcttaattcctaggcgactccacatcatctagggatgcctcgggtgacctgtcaacctggagcaccctaagatctcttccatagggggcgagacctagattacagcgaggacaaagacaaccctgcaccattgtggactatccggcccaaagcacggactgtctggtgtgacactgagaaggcgccgctcttacgcccaggtcgtggatcgtccggcccagagacgcagttcatccgtgctgccatagagggcattgctaggcggtacaccccctgtgattagcgctgcctagatcagtgccaacactcttatctcgctctgcaaccctttttccgtgcctcgatgaactgttcatagctccagcaggccccctatcccggagtgcaaaatagaagccacccctggcgctcagtatgcctatgagttctttctcatctccgcacctcaaccttcactttcgtccgctcccaccgaatccgctaccaccctgaggatcgaccttctttctccccccacctattgtcgaaaccacaggagttggtctcatcacgacgctccacctctaagcccacctgctgctcaaggaggactgaagggagtacatcaac

SEQ ID NO: 158871 - DNA, 442 bp, Zea Mays
ggtggaaagaaaaatgacaagtccagaaataccagggtaactaatgacatgaagaaggaaaggttgataacagtaacataactcacataacacagatgacccaggggttatgtggaataagcacaaagctagatgacaaatattacaggagagaattgaaagggccagatagatagcgacatcacgacaaggagtgaagggcaatgtttcctaaacgattgctttaagagatcaaagatagcaagcatgcatacatacacctgaccgcaagctagaaaaacacaaatggcctagatgtcgaacgttcttatctttgttattttatttatagatggcagccgcatttgttctaagattattttgtatgccataccccagcagcaaccttttgtttcagcaaatgtaaaccaaccttctttcttattctaactttggtattcat

SEQ ID NO: 158872 - DNA, 659 bp, Zea Mays
caaggaggagctactgtcatgcagtatctcaacaaattcaattatttgtcccagtatgcaattgatcaggtaaatactgacctgaaaaagaagaattgcttcatgagaggcctcaacgaccggcttcaaagaaaaatggccacctaccttgatctcacatacagaatggatgtcagcatagcgctggcagtagaagctaagaacacaggctcaggaaaatcgaagggattcggaggtgacaggtccaatcaggggcctgaaaagcgaccgaggttggcaatccgacctttcaatcaaaaccgttcttcacctcgcccaccctcctatccatttaaacaacatgtcttcatccaccctgccactgcccccacttcaacaaatcagctgagtgcccctggtgctcgtttccccgccctccctagctcctcaactgactgcttcaattgtgggaagtctggacattttatcaaagactacccatatccgaggcagaacaaatccaataatcagcagaactcagggagttcaaatcaaggcaagggaaacacgacaaataatgcagcgggcaagaatattaagaagactgggctaatatactacactcaagtggccactacaccggagggagagccggttatgatgggtatgtttcttgtggc

SEQ ID NO: 158873 - DNA, 550 bp, Zea Mays
ccttactactttggataggagtcatcgctttactatgtcagagcttgaccatcatagggatgagctgagggtttcctagactgaagtgtcgtggcttaataagttactgtcttcaaaaaattctatcctcaaagagttgtgtgcctcaaagaaacttgtttagcaggagttggaaattgctcatcgtgacattaaggtcttagaggataaccatggtatcatgaaagcaatgtgtgataaagcgatggacaaagttgttcgtgttggtcgaatcttgatgaaaagacttggtgttgtggtgcctaaggacattgttgctgaggttcttgctgcgtccgctagtgtgagtaaacctccttcctctggtgatcctgctggaaaggcccccatcgaaaatgctcctgcacaataattgtgtaacaaagacaaattttgattcgttcgaacagaaaacacttttcattgagttggtatttcttgttgagatggtgcatcatagagttcatgtatgcgtgagcatgttgtgtcggcttaagtcgattattccgtt

SEQ ID NO: 158874 - DNA, 884 bp, Zea Mays
ggaagatcaaccggaataatttgaagaacattgtcaggggttgactcagccccaccagcggatatcagaattcttgcatctggctctccgacctccaaagcgactcgcttgctcgaagtcaaagaagcatgcatcgccatcaccccatccgtggtggagacaacccgacatggacatccatggaagtgtgcgaaggagagctcacttggacatcctcgagggctaggttgcagctcgcgccacccaccagagccggatcactaccggcaacaccctcgggggctgggtcacagctcgcgctacccaccagagccggatcactactagcaacaccctcgggggctgggtaactgccagcaccacccttgagggctgggttttctgcaacagccacctctaaggctgaaggatcctcagtcacctccatgggagtcaggcaatcctgaccaacttcttgacattgaagactgccttccaaagtcgacgatgcatgagacactgctcgggatacctctaatcccacgtctggaatttcagagcaaacatccatcatgtcgccagcagtcggctccgacagcatatcctcaggaacgacatcctcaaaggcctgatcaaaatccgttatggacaattcttgaaggctgacaagagcagacagagctggagaaggaatatcactatcccccctactacctatataacaccggttgttcttacgaatcagcaaagcttcttcttcctcttcttcgtcctcatcaaaaatacgaacaatagtcggtgcacggtcacacccattgggatcagcttctgcacggtcacacccattggggtcagcttctgcatggttacaccctttgggatcagcttcaacaagatcacaccca

SEQ ID NO: 158875 - DNA, 402 bp, Zea Mays
cgtcatcgaggtcatggtcaaggggctcaggccaagaccagctgctcagtatttttcaaggaagcctcctcactcccttgaaaaattgctgcaaaaatggatgagtacataagggatggcaatgattttcgccaaagaagggaggaattccataggtacaacgaatttgtcaggggcttcggaggaaggcttcatccaaggcatgtacgaaatatccataacatggtgtagagtcaggagaagatggcccaatctcagggtcagtcggaccaacaacaggcaaactcttagcagcaacattcgcacaacacgtttcgtccacctgctccgagaggaggaaggggaggtcgatgcaccccaaggaaaccattctaattgttttgtggtgaggacaaagaccac

SEQ ID NO: 158876 - DNA, 661 bp, Zea Mays
gttaacagctgaagtgtcagaccagcagtggtaagggcatcaaaccataccatctcatcgtacacacagaggtgtgttggactcaacgggcatcggactagcagcggtaagggcgttggaccatacgatctcattgtacacacaaaagtgcgtatcgaactcacagtggagacattgaaggactaaacaattatactatttacgctcagaccatcgaagatggagtccgactgtcactataaaggttcttgagaggagaaaggagcatcaggtgatctgacggtaaacgtcagactatacgccatagaggttggccaacggttgggaatgactagtatcagcatagtaggtcagatcttggcacatagtctaacgggtgcttattggatcatttgagtatgcaaagatgactattgatgttgcaatgactatatctcttattacaggctataaatagaacctcaactgacaattgagtagtgtgggagctaaggaacatatcaagagagctaagattcatctttagcagctctaaacacccaaatgctcaaaggatcccttggtgcaggtgctttatgaagtgcctaggttaattagatcactgttcacgcttactctaggtttaggcctattgtttgagtgatgttagagtacctcttgt

SEQ ID NO: 158877 - DNA, 745 bp, Zea Mays
gtaatgtggacgatattgacaactcattttatatatttttattctttgatgatatatggtagtttgatttttttatgatcggtttctctatgcatgcttgttgaatcattatttggaccgctttatcttaaacgaagtcaatgcttcactgggagttgcttatgtttgttagtcatctatctctataatgatgtggttgttgcatcagattgagattttttcatatgaatgatggtttgatagatcatgtatgtctactactttgaatgcatcctgtgatatcacgaggtacaaattgttcaagtgcagtaataggaggttttgttgtaagtgaggttaatcaaggtagtttggttatgtggattgtcttattgaagtccaattactcctgttgagcctagtatcatgttattattttagtgttgaaagtaatatttatgaagcttttgcatgagtctgtgttaagaagtacattagtgtttcttgttgttatcccttcattgctttatgagtcttgcaaattttatctcttctaagaggagaataagacgttatatgacatgagcaccatttgcttcatgtcaacagaatagtttggaggtctctagtagttggattctaatgtaataacaaccatgttttatagtgcttgagagtggtatgtcaggtgtttcatacattgacgatatatggatgtttggccttaatggcattaacaaacgaggttgttgaattcgatgattgt

SEQ ID NO: 158878 - DNA, 441 bp, Zea Mays
gcttcacataagctaaggcactacttcgaggcacacagagtaagggtcaccaccaatcgaggtctgggagacctattcagaaatcccaaagcatctgccagaatagccaaatgggcagccaagctatctagatacaacgtcacattcgagccaaggataggaataaaatcccaggtcttggaaaacttcatattagactggactaggccttcggaacgacaccagcatcacacagaaactatttggactatccactatgatggtgtgtggtgtcatgtgggagcaggcactgcaacaattattacatcacccataggcctcaaatacatatatgtcgtgtgtctcagtttcgcacttgaatcacacaaatgcacgaacaagatagcagaatacgaaatcgtcatccttggactccgcaaactacgagccctagggtaacaa

SEQ ID NO: 158879 - DNA, 553 bp, Zea Mays
gaggtcctcactcgaaatctggaaaatcaacggccgaatggtggaagaccgcaagacagaatgggggacttcctaagactcaaacctcccacgttcgccggatcaagcaaccccctcgatgcagatgattggatgcgcacgatcaaaaggaaactggaagccattggttgcccagaaaatcagcgtgttcaactggctgcccaccaactttctgggatggccttagcctggtgggacaccttcaacgtcaccatcagggatgctacctgggcggagtttgaagcagctttccgggagcaccatgtgccccaaggactggtacagcttaaggaggacgagttccgagaattgactcaagacggaaggtctgtcagcgaatatgtgcacaagttcacggagttagcccgctatgcgctagatgatgtcaatactgagagcaaaaagatggcccgtttcctgaagggactcaggccagaactcaaaacaattctggctagccaagacttcctcaacttctctcacctttccaacaaggccatgcaagttgaaagag

SEQ ID NO: 158880 - DNA, 366 bp, Zea Mays
tgcccgtaccacaaggacatgcgccacacccttcggaactgcagagacttcaagcactccgtcgggcacggccgacccttccaacctctacctcctcccccgccgcgaggaggaccaggagaaccacgacaaccctagcagcaggaggagggaggaggtggagccttcccgcgcgtcgacagagaggtcaatgtcatcttcggcggagacggatcgcaggagaacaagagacaacaaaagctcaacaatcgtcagatactggtggcggctactggtccacccgccccgtaccgatggtcggagcacccaatcaccttcacccgagcagaacagtggctcaacttcgaccacccaggcaaatacccg

SEQ ID NO: 158881 - DNA, 371 bp, Zea Mays
gttaaggggaagagataaacggaagcaagcctttccccttaaacacaaagagactgcttcgaacctgggatttgatgactcaatgagacagctctcaccactttacctagcctgcccttctaacatttaaaaatacaaactccttaaaattgcaagcacattacccaaacgaaagtatagttggatagtttaaagtatttatcaaccttgtactactattagagagtgcaagacaatttcagcagaaaaaagagcatttaaactgcagctgtagtttataaagaattcaaactactcatgtggtatttcaatattggtaattctgttacaactttttaaaactgttactctagctatggattgctcttggc

SEQ ID NO: 158882 - DNA, 335 bp, Zea Mays
gagaaagacacttatcccaattttttccatagtgtaacacacacactctcaacatgtcctcaagaatctgatttactctttccgtttggccgtcagtttgaggatggtatgttgagcttcatatcacattggttacaagtgacttctgcagctgttcccagaaacgtgcgacaaaaggtgcccccctatctgacatgatagttcttagtattccattcaagcgcactatttggtcaatatagatttctgcatatttttctgccctatgggtggtatgcactagcaagaaatgagctgtcttggttagcctatccacaatgacccatatagaatcg

SEQ ID NO: 158883 - DNA, 1149 bp, Zea Mays
gtatcccatctcttgcaattctagagatagcccttgtagccagaactggaatcttcctcttgtatttttcttcaattttttacttgcaactttggtccaccttggatctgcctcgtcatctagaaagtagcccctgcccctctcgtccatgctgtcgagttttcctttctcctcctccctcctcctaagagcctccagactcctagatgccatcttcctattcttaggcaccacattcgactgccccctagcactcagcacaatcccagcttcaacagaacctcttttatcttctctaaccctgcccacttcacttaattgagtgccatccaggtccccctctttgatctcctcgctgttagctcttcctctcagctctagtaattcctcttcatgcctttccatcacttcatcctgatcacacacattcgaatgttggctgtcaataagaatagaccctccgacttttttggtagccaaaacattgacttcagccatccctcctagctcctctctcccctgaaaccccttttccagaacagttttaggatctgatacctttggcctagcacctacctcacagctcaccgccctaatctcttcactaatggcataatcttggacagattctgtggcatcactgttttccactccttcctgagagtcaccaagactagagatctattcttttgtagtttcctttcctttcctatcgaatcttccccctattttcctcatctcttcctcctcaaaatgtctctatctttattagagtctttgttagctagtttatccaccccagaaacaccaccccggtctgctccgtgctattgaattccttcggctaagaaattcagctcgtagcccacattgttgaagaagacttccacacaacctttaattctggaagagttacaacattatattctcactctcacaggaccatcccttatcaggcttaattcatctatgcaatcggcttccccattagacttgctacttctttgacaatgttaacgaccctagcatgaactaggaggttgaagatcttaacccatgtgatttgtaagcttgcaaaagatttgggatccacatttgatttagagatcttcactttgaacctataaaaaggcatctcaaagctactta

SEQ ID NO: 158884 - DNA, 474 bp, Zea Mays
gtccaggaggtgccacgcccgagcatttcctcagatcaagcagaagagtgcaatgttttgagccagccagagtcagactctaatgactggagggagtctatcatcacgtatataaagaacgaagaggaactggatgataaagccgcagcgaaacacatcacaaggcagttagcccactacaccctcataggggacacactgtacagaaggggtgcaacaggagtcctcatgaagtgcattccttcggctactaggaagcaactgctagatgaggttcacgccggacaatgtgggatacacgtagcattcagaactctggttgggaatgtctttaggtctggtttctactggccgacggcaaagagtgatgcagtcgagttagtccagagatgtgaagcttgccaatttttatcgaagcaacaacatttgccagcacaacaactgcagaccatacccgtaacatggccatttgca

SEQ ID NO: 158885 - DNA, 798 bp, Zea Mays
gttgaaaatgagtccgacttcttttttatagcttgctcgatcgctcgtcatcattcagcgagcgatgtagtaccatgtggtagcgctgcgctgcgtgtggcttcctgtcgtcttagtattgagtgttttctcataacccatctgtgatataacggtctagcgagtcttgttagacgagaaatttaagaaagagacagacctacgtgcttcgcacatgacgtacgacgcgaaaataccctttaaataatctcttattatcacaaatgctattcatcatccatgatgatggatccttaggtccatcacttgaatcaaaagttctaatcggattatcccaccaggaacacctggaaaataaccgaactagaaaaccaaccgcactaatcgactacgagttaaaacagccctacgtaacacgcaacgataaatattcagtcattcaagatttattttagttattaaaggtttgcttcggtcattcaaagtttacttcaatcatttaagatttactttaatgtgcaatggaaataaatatacaactattcaaggttcatttcaaccattcgtcgtttttaaaattttgcaaggaaaaatattgaataatataagttttgcttgagccacaaaggaataagcattcatcagttaaagatgatgagttgagaacgagaggcggtttatgggacgaatgggtggaggcgcgatgataaggaattgtagatgttggcgtgacgtgtggtggtgggtgttggaccatgtcgaagcagagtttgactagttgcaaatggataatggtgg

SEQ ID NO: 158886 - DNA, 1136 bp, Zea Mays
gtttatttatacaaaggacgaggactcttctgtaaaacgcgcacagcgaaagggtacgctacaatctcagtcgttggatgcaacactgagggccacgattagatcaaaccagacaactcacctgagccactgcatcaataactgacgctttggattttaaaatgcctagatcgatctgcaagcgtccgatcatgatcaaacgatccggaacggatcaggccgaaccggtgcatctcccttctaatctcaaccatccatcaagatctgacggcgcacgcgattctccccaatccccaccgttagacggcggcgccgccaacggccagtggcggaacatcgccggtgatcaacaattcggcgccctaggtcactatctcaaagtccgagagtttctacgcgatacagaattgatggcgagcacgctggagtaggtcttaccggttgtctcggcgtggagagcatccggccacggcgaaggcggatctgcggctaagcgcaggtcgacggcgagaaattgcagcgccgcagagaactcccacacacttcctccactacgaaacgccttcgcttgatcacgtgaagccccgatcttgccttgagggctgccgacggctgtgaatcgcggattcgacccctgacgcgcgcggcggcggaggagagctcggtggttggcttcgtgagaaggacggacgacgctttaaatggagagcaggggggtatagcgccgggtcaaacaccgcaccgttcggagagtctggccgcccccatagctcccaggaatctcggtattccgctgcgcgcgcgcgatttcagcgaggaagaagcacaggacctcgctcacggtccctggcgcgaggaccccacacggcagcggaagaaagaacggccggcgcgactgacctggagggcccacatgtcggcgctgtctgctgttctggctgcactgtaatagtttctggtgggccgaaatggggtacataggccgagttaggggtttcattcctttttctttttactttcttttattttgtcttttccccttttttccaaattcaaacttcaattcaaattcaaattttgtgtcactttgtacactggataattatttattttgatcataccaactgtgatgaagt

SEQ ID NO: 158887 - DNA, 717 bp, Zea Mays
gcaatattgacacattttgtatagaagtttgaggctaagaactatccccctaattatcatgactcacttgtgcatgaatttcaatatcttgtggtccaagtcacattgcattggactaaactgcctaagccactcatagcccaaaatgacatcaaatgcacttaagggtaggactctcatatcagtgcaaaatgaaaaaccctaatagcaccattccagtcctcttaccattctatcacacaccatagtttcaccattaggcaccttcaccttaactagagaacaaaccacctctactaaccgcaactgatgcaccatgtgagcactgatgaaatttgatgaacttcctgagtcaatcagtatcactaaagtctgtttgctcatagtttcacttaccaccatgctattctcattatccctaccaaccatatcttgcaaggacactttgcaacacatttcttccttctcatcctcctgctccaattgttgcagaacttcatcaattaacactgtggaatcttcttcagtaactatgccatttagctgtgcttgttccctcttggtacagttagcaagatgaccaagttcaaacttatctccacaagcatagcacaacccatctagttttctaaactccctcacttgtctttctttggataaatcatcatctcctgtttgagcccttccttcatctctaaatccagtattcaacatttt

SEQ ID NO: 158888 - DNA, 471 bp, Zea Mays
cgagatttagactggatttgagaaaagataagggtattccctcctcaaggagtcctcactctcccatgtagcttcctcttctccttctctgctccactgaactttacagagcttcacctctaaggtgcgggtctttctaactgctgagtcaagaatcttcactggtttttcacggtactgaagatctttctgaatctacactgtctcttcttcgaggtgactttttggtgcttgcaggcatttgcggagctgggatacatgaaacacattgtggatgtcagacatggattccggtaattccagacggtatgctgcgggttctaccctgccaatgatgggatagggacctacgaaacgtggggctagcttcccttttacttggaacctcctgacaccacgcattggagaaaccttgaggtagacgaagtctccttcctcaaatcggagttccctccgcctattgtctgcata

SEQ ID NO: 158889 - DNA, 285 bp, Zea Mays
caggaacatagacagagactttgtcccagaaaagcgcaacgtgcattgcctaacaatagaacatgaagacaacaacggttctcgcccaactaaacacaaaaaagtcaatgcacaatgcagagtaatgagggaaccaagacagtcgcccttgatcccgcaactcccaagcaatcagcaaagacctctcaccaaatgaggaagcaagacttctctcctgccttaactacatcaaagacgtctttgcatggtctgctttagacctagtcggggtcagccgcacaatca

SEQ ID NO: 158890 - DNA, 558 bp, Zea Mays
catggcaggggtacacccggtatttcatgtctctatgttgaggaagtttttgcgggatccggaccatcaaatcgagttggaaccgattgctgtgcagcaggatctgactctagagtgtcgcccggtgcatatcttggagtcctcggagcgtgtcatgagaaggagatcaattaagtatgttagggtcttgtggactaattagtctgagcgcgaggctacttgggaacttgaggagctgatgcagcagaagtacgccgaacttttcattatgggtgagtttttgtcttcgctaatctttcttttgtcgttccgatagaagcatcagaattcgaggtcgaattctttttaagggggtagagtgtgatacccaattttctgaaaagaagttaaagtttattttcctctttttctgcattctatgttattggagtttggaattttaggaggcataccatagtgaagcagtagcacttttttgactttttccgctggggtcaggagcacagttgtgagagcgggtctgggccattgatctcgatccgatggatgggagcccac

SEQ ID NO: 158891 - DNA, 303 bp, Zea Mays
cctcgtcggagccccgcccgacgtcaagaacccctgccgcacgcgcaacagcatcaccgctcgtcgtcgtgcatcgttggagttcgtccacgccgttcaccgtccgttcacgccccgccgtccaaacgcatcgcggagttacgccgtccgtcgtcgacgcgttcgcgcagcacaccaactggaccatccacgctcaactccgagcctcgtccgcaccgtcttcgctcgtccttggtcgtgccttgtctcaccgcgaccaaatccctccatgcaccacaaggttgaagacaacccaaatgtttt

SEQ ID NO: 158892 - DNA, 659 bp, Zea Mays
agattagccattactaaacgagagctgcatacgcaagttgcagccagccagatagctagcctagctactagctaggaggtctcttgccgagattcggacctaaatttgtagcgtgccacttgtgtgcgatcaaataagcaacgctagtactctacgttacggcgcctaatcgcacatgtgcatggtcgcgacttgttaaagttgaggcaattatacaaacgtttcacccgggcaaagatcgaagaccacacatgataagtgggttcggcatttctaaagacctccagtccagcccggtcaaggaagatacggcagtcttgtataggtcggcccagttagaggaataggcttcgatcggaccactctatgaccaggcaggaaattgtggcccaacctgatatcaagataaaagcatcgtcggcccagttggagaaataggcctcacccgaaccgctcggtgaccaggcaggaaaatgtggcccggccttgatatcaagataagcctcgtcggctcagggttaacctccacgtacatgtgttcatttgtgtcgagcttaatggactagcacgaagaacgaaaaaagcacaagctacgacacaaaataattttagaccgggctgggcttgagctgaggtcccggcccaaggacgggaacgag

SEQ ID NO: 158893 - DNA, 479 bp, Zea Mays
gaaaaatcattgatgaaggctgactttggaactctgcagatccaaaaatacaaagattttgcctagggtcaacacatcaaaagtctagagatattataggagtacaatttttcttaagggattaagcattgtgttatacaaaaaaatggagataattggccctaagtctggctgttagataatacagaaactgaatatggacggtcagtgagttttgaagaactttaggcttgattcatgctcaaaggagtaagcagctgaacatgatctctatagcagaattgtagtttgtatatagggctacaagtttgctacaaacagattagcaagttgtcatgcaaaattcaagaaaaatgcctctgaagatcctcggtcagaacaactgatgaagcttccaatggtacagtgcactgaaatatcccagggttcagtccccctcgccgccggtgatccgcgcgcctggatgcgtgtcggtcgcc

SEQ ID NO: 158894 - DNA, 567 bp, Zea Mays
gaggtggtagttttcaggagcttcttcagagcgggattgaggtttcctttgaacgaaatgattggagaagttttggaaaactacgagatctatcttcatcaggtgactcctaacgctatcgttaggctcagcgtcttcatctgggctctccgaagccaaggtacagacccgaatgccgaagccttctgccgagtgcacgagcttcattatcagacgaaggccagagaagatggtcttcatgagaactttggttgttacaatttctcctaccacaaagatatgaagactccggtggttagctaccgcaccaagtggccaactggttggaaaaatgaatggttttatgtgaaggccgatgataagaagagggagaagctcaagacgctagtactgagccctttgagcttaagcttcgggctgactaggtcgctgtgccgtatggagctggggtcaccatgtcaacaagttgtggcagaattccaggtggtggccgagcagattagtacaagggatctagtccaagaatatctggcctatagggtgttcccgacgctgagtgaatggaac

SEQ ID NO: 158895 - DNA, 498 bp, Zea Mays
cactcctatagttatgtagccaccacggcgccgcattggagactggcctagacgctcaaagcttgccagcgccgaccatcagtattgctccccacctccccatgagtcatgagctcgtgaccccatcgttgctccccgtcaacactcgcaagggctcaaggcgtcggtggttctccagtaatccagttctagtcttcatgactccatccatcgccaactcccatggacacctccgatggcgaagaagcaaggtgaggacctaattcatgactcattgcctatgttgttcttagtcttgcaaatctaactctagtaattagttatttgttactttgttgttttccatcgttccgcggctaacttacctagtccgacaatccataagaatgggttactgctgtattagggatgccacatcgaacttggatccgccaccactaccagatatgccagccaaagtgccctctccagtaggtaccaaatctagtggtggtgtcc

SEQ ID NO: 158896 - DNA, 1445 bp, Zea Mays
ggacttagcagcttgaagggcggggattcagtcattaccttcaggattttggctgcttcagcagcagagggcgtcggaggagcttcttctcctgtctcatctaccttcggctcagaagagggtgttgtgtcaagctttcgatttttagaaattgtcgccttcggttcaggagctgtttttgatttcttcaaaactttttcatccaccttcactagccgagcagcttgcctactcaggatgctgacaatcctttttcctttttaccccttcggcccctttgtcaagcctctcgtaatctaggtattcgaagtttaacgcgtccatcacccaattcagccttcgtttcggctgggtgctgaaggcggcagtcattaattggtcttcctttttggtgtagttgccaaggatttcgttgcacattgtttcgataatttctagccactctttgcatggcttcttgaattgcttctcaaatttaaatcggtaagggagccaaacaagttcgtactttttaccccctcctttttcttaggcattccccaaccactagaggttggaaagattctatttgccaggtactcttgcactagatctctagttctgattttggctgctaccactctaaattctacttcggcttccccaaccactagaggttggaaagattctatttgccaggtactcttgcactagatctctagttctgattttggctgctaccactctgaattctacttcggctagctggcatggggaaccaagttgcatgtggcacaagggccttgtcatcccgaagcttaacttcaatggagtcatgacatagtcattagcttctcccttttcttctggtctgcttttatgtaaatccattcgcttgtccaaccggtcgacaacttggtacgatagccaattaccggggccttcgtatctttctgatatgcgaagttgtagcagctaaagttcttatgaagatcatccgctctggcctttgtttgatagtgcagcttgtgcacccggcagaaagcttcggcattaggactcataccctggctttggagagcccatatgtagacactaagtctaacgattgcattaggtgtcaactgatgaaagtatatctcaaaattctttaaaaccactccaatcatctcatgaagagggaatcaaagccttgccctaaagaagctcttaaaaacaatgatttcatccttccttggttgcgaaactagctcctccccggcaaaccggataagctttctctcggcttcgccaaagtagcccaattttttcatcataaccatgtcatctgccgtcacaatagatttaccaaattcaatatggctaggtttcattgggcttagaatggtcctatcctcttcacctttgttctcacttcctccttcagcaatgatctgttcagcttcagtagtggaggtaccttcggc

SEQ ID NO: 158897 - DNA, 815 bp, Zea Mays
ctcaatggagtactgatagttgctcggggtagtaaatatcgccttgtggatgaacttgagccactgtttcactccggccgccgtgtccgcctaactcacggccaattcagatgaactcaccggagttagccactgatcaaccatgcgtcacgtgccttggtgccttaccacgtcgcagtagctcatattacacatgtccggtgattgccggtgagctcgccacggtaaaagccaccaatttcttgcgacagtgctctcctctctcttcgaccgctaccgcgccatcccaaattcacgggccaccgcccctggagcctataaattgagtgtgtcgtcggctccgcaaggtagtcaagcaaccaatacaccaactcgtgcctcaaatcgtccaccagagctcgccaattcgagacttcccccaaatcggtccagagcaccgcgcttagtgagctcgccgtggccagtgtgctacaggtccgttcatgtcctctgctctcttttttcaatacccttatgtgcccttgatgcttctcgacccgaccgattaagctagaacccattagatcgccggaaacactttgaattctccccggattgcgcggtcaccgtgagcagagaggttgggagctcgaatcgtgcaattgatcgaggggaaacgattgttagatattgaattaggtatcaaccaagttagagcaccgaccattgcgtgtcttagccagtacaggctcgccggagctcggtctgtcgccgttctgcatcctggacctgacgttgtaaaggaatagaaatgcgagggtctcggtgcaattgtc

SEQ ID NO: 158898 - DNA, 1003 bp, Zea Mays
atccctaggtgaagttgagacgacctaataaccgcggaaatgagcacctcgtctccctcgatagaaagagcgagactataatctgatgactgcctcaacgcggcctcggagccaggaggggctactgattcccgggtggagactctgtcacgggtggctgtggtccctaagcctattctaggaaagggttaacttttcgcctcctcaactaggtgagggcatcggtcgaggggagagtggaaggggacaaacctacaactttgacaccaacaacctctatctgtgacgatcatggcacaatgaccaaagccatgaaaggcctgctgccttcggtgtagggcggtgttatcctgtttttcatggaaataactttcctcgcgccctacgtaagggcaggaaggtgggaagtgctgccaaggcaaaaaagggggataaaaatatcataaagagtagagcgaagataacaggccacgacacatggaatccaaccatgcaaacctttgcttcctcattgccacctcgccctaatatgccctcagtgtggacggacgcctgtcgctcaaaccgaaagcggggacgagactcgtcgtggatgaggcgtcgacggtcgtgacaatccccaatgatgggtcagatgaagcaaacacttccatgccaactgaccctgggtgacgataatgaagcctgacaaaagtaagctgggaggtgtagggaccaccggtggaggcgtctgtcttgcggatcaaaacagattgaccttcgtggcaccaagggaagatgtgttagttgcttcttccacaaagggcgcaaaaagatcgaccactggtgaatcgaagtgagctccatccccgaaggcgtccagactccctaaccccatgctcctggtctcattgtcctcctctgaagagtcggttttgataccatgatccctatgcatctagcgtttggccaggcaccacttcctctcaacttggttttgtttgactttccactagtgctccgc

SEQ ID NO: 158899 - DNA, 677 bp, Zea Mays
gctccaacgcaagcgtgagtgcagcatctggggtagtagtcgaaggagagtgagccatggatagaagccgaggaacgacggaatttgataccaattgttaggggatactggaggaaggggagagacagaggaaggagaggaacacgagagagagaaggtgaggaatttagtttaggtttttcttcttcgatacccttctcactgtccaggctggttcaaatacaactcacccaattcagaatacgtaatactgcctcatacgtgtacggtatacacacgtacacgtatggtacgccacacatctagacccactctggccctcggacgcggctgttgacgtgccgtttgcgtttgcctcgcacgcctgtgtcttgagtctgaatgtgatcttcttctccctctggcaaggctgaggtagtatctgtagtggtaacatgccactccaatatattaaaaagggaagaacttacaggaaattacagggaaccgaatcgacttacaagactattgaaaaatactgaacaaacctactgagcagacctattagccagactagcactgaaacaaccaactaactctttgaccactaacgcgacctgctccgctgatctatgctggctatggaagattttattatttctttctaaccaaacgctccaccagaagtaaatcataag

SEQ ID NO: 158900 - DNA, 533 bp, Zea Mays
cttaattatagccttttgcatgctcgcagctagctttttcaagcagtgagatggctccttgagtgccgatgcaagcacagaaatctcctctatccataaggatttcatcaaaagcttcggcttcgccaccgatccatctgataaccccgtcaagatcaccatagataaagttctactcagtagagaatgcgccaactttagcaaaactatttttcagcttcttgcaacattccatagcaacgttgtagccctcctctttttcctgacgaagctcctcaacatttttctgaaccctcaaccattcggtatcagatatctcgtgttttgcttgttcaacgttaaagttttcagtgatttcatcaagcttcttctccggtccttacacttcgaacctgtgcaatcccacttgaatagatagagcatactgtaaatcagtaatacactttgcatctgcttctttcttcttttcaaatttctccattttttgttctacctcagaaaggctagccaatttagcttcgctagactttaac

SEQ ID NO: 158901 - DNA, 374 bp, Zea Mays
gtaaactatgatattgtttgttgtgagatgagaagggaacttcgcttgctgcggcgatttgtgggtgccgaagacacgtgcttggttgaatccgtaggtggttctgttcgactgtaacatgcccttcgccattagggtgattcttggccttcggcgcacgtgtagtgtatatccggctgcacccttgggcggctttttgcgtggatgcctattagtgaaggcttcgtatcatgcgcttgttgcgcttgtccggctgcacccgtaggcgacttttgcacggatgtctttttagtaaagacttcgtgttgcacacttgttgtgcttgtccggctgcacccttaggcgacttttgcatggatgtctttttagtaaag

SEQ ID NO: 158902 - DNA, 684 bp, Zea Mays
gcgtgcttatgctggatcgagtagacgtgagcatgtcgcaccgacttaagtcactaccgacttaagccgattgctctgttagtacggtatagtggtcaccctgggttaagtaagcatgagcatgtcacaccgccttaagtcatcatcgacttaagccgattgctccgttagtagggtatagtggtcaccctaggttaagtaagcgtgagcatatcacaccgccttaagtcatcgccgacttaagccgattgctccgttagtagggtatagtggtcaccctgggttaagtaagcgtgagcatgtcacaccgccttaactcatcgctgacttaagccgattgctccgttagtagggcataatggtcaccctgggttaagtaagcgtgagcatgtcacaccgccttaagtcatcgccgacttaagccgattgctccgttagtagggcatagtggtcaccctgagtcgagtaagcatgcagattgacaataaatagttcgagtgcctttgagaatgaagtctttttattgatggtgtattttccaattacagaatacaatgctgccccgatagcttttgaaatctagctaggggtaaaacttcttgagatgttctatattacatgagttccctatttctgtgccatccatttgagtaagtcgatatgatccaggccgagtgacttctg

SEQ ID NO: 158903 - DNA, 590 bp, Zea Mays
attcacatgtaataccatctccaaccattccccgtatttctacatcctacttgtacgttttattatagtttattatatcaccctaaagatactctatccacgtcttcaaccattcacgctatcgagccctccctaagactctctccagcaacgaactgtaaaacaacctgtactctaaatttagaggatattgtgctcctttatccacccaataaggaaccctaaaagacactttaaaatttggagtctctgcttcagccgctacatgtagagaaatactgttcgtcctctatccacaatcaaagcgctacgacctgacacttgtgcacgtgacgaccactgttgattgacttaccacgttgcatgcatgcatattgtgttaaaaaaatggtgtccgatgctggattgttgcataatgcagttgcaaatagcttagttaaactattttaattttggtagagactaactgttttttgtttgcgtatacaagaaggaaaatatataatacaaatttgtgatacattgttttgctatatatgaatgatgagtaatttctccataaaatgaaaatatattgtaataagtatttc

SEQ ID NO: 158904 - DNA, 526 bp, Zea Mays
ggctcggcaagcatcgtagacttaagggaaagcttcaacgaggaagaggaggagatgaactgaccgaaataaggctggtcgcggtgaggttgggcttcgggtggcggagaacagatttggggcgaacgtgaaattggagagctgtggggagtaatcggagctacgcgtgggttctctggacgcacaattacctagcggaactggctgaggctttaattaataggcatcttcatcggtggcgcccaatttgggtcgagcaacgcggcggccggagataaggaagaggtctggcgtcgtgattacgtgtccccagccgtggcgagctcatcggcgatgatgggacaacagtagggaatcacggcggtgccgtggaaaggctcgaacacgcggcgggcacagagatggcacgacggcggcgagtggctttatctacggcggtgagcaaagggaaggggtaccgcggcggaatccactgagtcacggcggccgccggtgagtaactccggccgagctcaggagatggtgc

SEQ ID NO: 158905 - DNA, 508 bp, Zea Mays
aatttatttgatcgacgacagactagacgtccggtagatggctcttggctggtcttcatttcgcttcgtgcttcaatgcttctgttgattagacttgtacttcaatagctatttttggctttcctccgatctctatcgatatcttccttctgtcttgatacattcattgtgtatactgtatggatgtgactgcttgggaaaatctattgaaaattcctggacgtcccccctaatgggtgtagccaagggacggcttggtgcgctgagcgtttagcaaactgcccttgagtagtaacttgacgtgaccgtggggtgtaaccatatcgtccaagcagttgacctcagtcccatggtgtcgtgttacgtgagacggcgtctgccgcctgacttgtttccagacgatttgaatggcttattgaatacttgcgactgttcagtgaccgtggtaggagatgagtggttgcctcccgcctctataaatagactgcctgcttcactagtgtcttca

SEQ ID NO: 158906 - DNA, 498 bp, Zea Mays
ggaagactccgacaaccctgacgaggatgacttagatgcagagagcaactacaaggataagtcgttcgacctcctcaagtccgacaagcactgggtgcgcaacccggatgacaccttctgtggccccttctgcccctgcaagaagagcaggggtacaagagcaaggacctcctccagcacgctccgacgacatcgatgtctccaacaagcatcgacatcacggctgcaaatgtatgctttactttcagtcaaatctctgtgggaactaaactattgtatttgcatagacttcactgatatgtgcctttttgaatatttaggtggaggttatgtaatatcaccagtcgatcaatgaggacaatcagttttaaagcacatgtttgccaaggcctctccattgtatgtatctcaactctattgtgcgcaggcgagcaatggaataaaaaagccttactatgtatctcacctctattgctctgcttagccaaggcctctccg

SEQ ID NO: 158907 - DNA, 632 bp, Zea Mays
cggctcttcaatgctctctgcaattggagcagcctgtcttgcttcggcagttgaagaggccccttcgccaagttcaggcactatggctggttcaatgtatcatggccgatgggtcagaacctttattttcttacttttcggctcaaccagcacatcaatgatggccgaagcggcggcttttcttttcttcccttgccctcgtagcgggtaatgatagtcagggtatatgaagccaatagcatcgaataccctgtttactcttttcttgccccgacctccaaagggtgcagacagagcattatcttcggtcttggagtatgctccaagtagctcatcactcgtagcttcaatacacttcagctagtcgtcgtttggctcatcaaacttctccataaatctgaaggtatactttagtcggactagaccaccctcactagagttagtggtggtctcctttagcatttcccagctttcgacaagcggccataccctgaaggatatatgttcctaaatcaaatcccttgtgccaatgaaggagcaaacagtgctaaaaaccctctaacatgcttcaacaacgtcatcaatttccacctttggccttcgtaggccgaagcgagaccagattggtcgct

SEQ ID NO: 158908 - DNA, 693 bp, Zea Mays
gtgatatagctcgcgggaggccaagaaccgctttaaggtgctccggggacaaaaacacgtgtggaggaacactgacataaaaatggtcgctcggccatgaaaacgtgtgttatagctcacgggaggccaaaacaaccttaccagtctctatggtcaaatcatgggtggcggtcgggaggcacgaaatcgatgttcgacgacaaaaacatgtgtcacgggaggccaaaatagccttacgggctgccggggactaaaacgtgtactttggtttggacactaaaattctaccatgcctgaaagcttactatggtttggagactcaaacttcattttactatggtttggacactaaaaccttttagtgtcggtctttaaggttagggtttagggattggatttggggtctaggttaccataaaaacgtgtgctatagctcacttgtggcaaaaaatgtcgtaacggcctctccggtctaaaacgtaggtggcaggtcggatacatgaaattggctctttggccatggaaacgtgtgctacagctcgtgggaggccaaggacaattttaaggtgctctggggaccaaaacgcgggtggtggaacacgtacttaaaaatggtagttcgaccatgaaaacgtgtgccatagcctacgggaggccataaacagccttagcagtctcagtggccaaatcatt

SEQ ID NO: 158909 - DNA, 1016 bp, Zea Mays
caactttgctatagatgtttgggcttggtaccatagaaaatctggagaaaataggacctaaagttgctctgtcaggttatctgaatgagacgccatggtacagtaacaaaactggatcagaccgctagcgcggcaacctcaccaccgacgacctatccgcgccacgatttgcgccggggtcgggatgatcgggcggcgagcatctccgtgcgaagatctttttgctccgggtaagaccgccgcggtggagggcactaactccggctgccacgcggccatccctcctcccggccgtgtccgatcatcagcgccggtgacctcggttgtgccacgaccgaagcttgttactgcgggttagcaatcgtggcacccttaggagtattctccttgcaccgttacaccggcgactgccacggttacaaccaccgtgttcttctctgtctccggccgcccgcactgcccgatcaaatcacgcgccaccgcctaagccctctataaattgatggccgaacctgctgcgctaggtcattgcgaagccatagcaactactcccgtccccgattagccaccccagccggagaatcgctgtttgcccccaaatcggtccgccgcaccgcaagaaccgagcttgtcgcagccagcccaaatcaggtcccttcttgccatctgcgttcttgtttcggcattcttacttgctctggataatcactgacccgtccaattaggctagaacctcgttaatcatcgggaacgcgttcatctgtccgccatgtccacggtcaccatggccagagcaaaccatgtggccattgatgaaattaggttggggaaaacctcggtttaggtctgaattaggagccagtcgtcggagagtaccagtccttgcgtgctccgcccagtccagctcgtcggagcatggctcccgcgcggttcgccgtcggggatcagtcggtgtaaagaaatagaacttcaaggacctctgtgcaaatcgtcagtgactcattgaatagtgcttc

SEQ ID NO: 158910 - DNA, 397 bp, Zea Mays
ccggtgatggcgatgtggttgacgcttcggtagtgatccctcttttgccgcttcatgtcgaagtcgacgctggaccctctggtgatcatgtgaatgactccgcgatacggctgatcggcgaagtcttcttgttttggtgcttgggtgattttggtggtgtaggtttggttgatgcggaggcgggagtggggctggtacgacttgtacctcctggtggtgcggatatgcgtggttgggtagatgctgggcgtggccgtggttgtatggttgtgggtggtggtgttgatatgtgtgtgcgacaactctttggttgtcagcaggttgtgctcgagacatcctgtccctggtggccttcgtttccaggcaatccctcgttgggtgcgtgcagtcttcgccg

SEQ ID NO: 158911 - DNA, 305 bp, Zea Mays
ctggcgtagtaacttgatgtgaccgtggggtgtaatcataccgcccgagcagttgaccttggtccaaatggtgtcgtgttacgcgaagcagctgttgcctaactcatttttaggcggcttgaattgcttattgaatacttgcgactgtttggcgagcatagtatgaagtggacggtcactcccgacctctataaatagcctgcttgcaccgttgttctcttcactcatccttcgatcatctgttactttcttctccctttctcctcttctccatccgaccatgggcaaaggcaagagaggtcgag

SEQ ID NO: 158912 - DNA, 493 bp, Zea Mays
gtcacgaggcccgccactcaacaaggatggcacatggctacatcccaacatagcaacgccaaaaaaaggatcagggacacagaaatccagacttacaaccttatttagatcaactaagtcttaccaaacacttaattaattgtctacagccgaccactctcagctgcctagaaccaaccataaccgatcaaaggcaagctaactgacaatacacacctagcaaatcagaagaccaagcagattgtaagacagaacacaatcaccatgtgatacttcttgtcaccggagcccacccatgcgcgcgattaaacacctctcttgtcgtctctctgattcgcttgcttcctgcctccaacatcttttttgttctccctgtctgcattagtgcccagtaatccaaaagaaaacaacacatgaagattacatcagtggggtcattatggagctttttattaaagcaaatggaatttctggacttccagatcgcccatag

SEQ ID NO: 158913 - DNA, 606 bp, Zea Mays
gaaaaccagttgtaagtcttcgatgaagttttctgagttctctgttttgattactacgtcatccacgtaggcttccacacgcttgccccagtgatcgactaagcatgtttgaatggctctctgataagtccctccagcgtttttgaggccaaatggcatggaggtataacagaaagcaccgaatggagtgatgaacgctgtttttactcgtcttcctttgccaaactgatctgatgatacctggaatagcggtccagaaaagacagcacagaacatccagcggtggagtctaccacctgatctatcctagggagcccgaagggatcctttggacaatgtttgttgagatctatatagtcgacgcacatgcgccaatccactttattctttttgagtacaagaatagggttggctaaccactcgggatgtaacacctctctaataaacccagccgcgaccaagcgagccaactcagcgcgaatggcttctcttttgttgggcgtgaagcgacgtagtttttgccggatcggccttgcttgggggtagaccttcagtttgtgctcggccagttctctcgggactcccggcatatccgcaggttgccat

SEQ ID NO: 158914 - DNA, 460 bp, Zea Mays
cagctagaggccctatgcttacccccacaggtcgagtttttttatgttacaaccatgaaatcttgtaaagtttttaagccaaatcatctttggaaacacagatgtgtcctttttgtaattgcatattgttctttgcaattgcagtattgaatcttgtttttcatttgaattgatgtgcagaaaatgttgctagtttagaacagcgtcagattagctgtctacaaatccttgtgctttgtagtttctacaagaacaaaatattttggaatttggaagggatatggtacttttgtattaagcaaacgaacctgtacaaagctgccataatacttttttgacaacttatctaaaaataatttgagtatgtgcctttctttgtcagtgtgcttgcacatattctgatgattatttggcaccatatttgcacatggctgtatttggtactttcttctcatatggg

SEQ ID NO: 158915 - DNA, 493 bp, Zea Mays
gagagagagagagagagagagagaatttgcaaccacgtactagtgcgtttctacattttcaagcgccaaacagtaaaaaggtttgtttgtttcgggtaggagtatttctgggtggaatgggcccgaaatgacaggttcagtgaaccatagtaggagtaggactgtaggagtactatacggatggctcgtgcctcgtacgatggagttgtcctgtctctaccgtcacttgtcgctgtccgggtccggggctgtaaaaccgcatgccccatccatccctgcaccccgagaaaaccgcgggcgcttgcgtggcggctctagcctgttccccacgtcgatccgtcgcgtgcacgctgcctgcacggcggcgcggccttttgcgtccggctccagatcctcacttgacacttgacagacgggccaacccgggagcggggagagtgacggcctggcgtggtggttggtgtggatgagtggatcgggccgaccgagtgag

SEQ ID NO: 158916 - DNA, 734 bp, Zea Mays
gtttggttgtcagtcaccattgaagactgaagttggtctaacagtgaaccctaaagaactttggagttgattagagcttaataaagtaagtaaatggccaaagttcctatagtagaattgtagctgaattataggttaacaactttgttacaaaaggattatcaagttgccacacggaaattggagaataaggcgcttaatttagctctgtcaggcgccctgaatgggattccaatggtacattaactgaataagattgcagatacagcgtatctcgctgccggtgacccacgcgctcggattcgcgctggcgctgcgattcgcgcccagtaacgcgcggatgacgacccctggtgaaaagatctcgtcgtggatgaactcggagcactatggccgctctttcgcccatccacttgccggcgacgtggccgagcggccgtcgtcgaggtgtatgttgttcgccgtgatcgcgccacgccgtgaccctttcaccacgttgttgctagccatagtagttcactagtgaccgccgtagctcctcaaccagtgaacaccacggtagatcgccgcggtgactcatcccctcttctcggccgccagcacgatttctccaaattgggcgccaccgctgatggaccctataaatcaatgccccagtgagctccgttaggttgttacgcgtccagtgcaccagccctcgcatctgattagccacggtagctcgcgaattccaa

SEQ ID NO: 158917 - DNA, 448 bp, Zea Mays
tggcctaggttgttagctgctcatcgcccatgagaacatggtaccgctggagagtaagattctcggctatttcagcttcctcacgcccctgattcctatgatcctctgtgactgatgctgagaatgtggtttgatatatgattacgatatcgaagtatgaaaaatgtttgacaaaaatattgttatgacggtggctagtgtcgtgctgagagccttgcccatgtcccagccagaagaaaatggcttgcttcttagttcttgttggcctttatctcgttacacgacctctatatatatagtctacatttgatttcttttccaaacaaactaaaggtggattccttattaatttacactctccttttctaatctctactactctataagaaggtaacgtgggtgtccacaccaggcttcaccatgcttccaccccctcacgccacgcctg

SEQ ID NO: 158918 - DNA, 571 bp, Zea Mays
tggtattttttgatgatattcttgtttacagtccaacatgggaattgcacttgcaccacattgagttagtcttgcagctcttgtctcaggattcatggcaagtcaagctgtccaagtgttcttttgggcaacaggaaataacttatttgggacatgttgtcagtaagacaggagtctctactgatacttccaaagtagcaactgtggtttcgtggccagtgcctgctacaataaaagcactccgagggtttttgggactggcggggtactatcgaaagtttgtcaagaattttggagttctagcgaagcctctaacggaattattaaagaagaatgttgtatttgtgtggacatctcagcatgataatgcctttcaagccctcaagcaagccttatcctcggcaccagttttggcattgcctaattttcacaagcctttctccatagaaactgatgcttcaaggaagggtattggagctctcctgcagcaagatggtcacccgctggcatttgtgagcaaagctttgggaacaactaacatgtgccttttagcttatgaaaaagagtactt

SEQ ID NO: 158919 - DNA, 481 bp, Zea Mays
ctaacatcacccaatgtggaccatattatagttctagtaacttaaaatccttaattactttgtttgataaataaagtattttatgcacactccgctcataaacctagttaagattataagcaataaagacaatcttataccccaaacttcaacctctctatatgaaaggattgtggacctcataacttaagcttgaaaatgaactaggtgtcaggccttagaatatcagtagatactagtacataaaaaggggaacaaaaggtgacacagtcttatccataatggcataaataaagtcattcttttattagatgcacatgtttttggtggtcctgcactcctgtttatctctctaaaaaacttgaagtgtcataacaagatgcaaaagtagtactagtggcagagcttctcataggatgaaaggagcatgaccacccctgaacctgtgtaaactatatagttgcagccattttgcttgata

SEQ ID NO: 158920 - DNA, 682 bp, Zea Mays
caggtatgcaaggtttttcttcttcttcttaaaatcagtgttctggttggcctttggtttccagtttgtcttgtttttgtttttcccaccagatttgccttcaaccacgttggcattagaggtaccactatccattggaccagaacggggtacatccttagatcttgccttctcctcaacatcaagagtagcaattagactttcaacagtcattgcctccttcttgtgtttgagagccatggcaaaattcctccaagtaggaggtaatttggcaatgatgtcaccaaccacgaacttgttaggcaagacatagtcaaagtgtgcaagttcccccaccagaagctagatttcatgagccggttccacgactgaacggtgatcgaccatcctgtattcatggtactgctcattaacataaagttcacgtccagcatctgattcagtatacattcggtccaaggtctcccataaatcatgagccactttgtggtgcatgtgtatgtcatatagttgatctgacaacagtgtcaagatacaaccaaaataggtttcattatctgactcgaagttacggttctgctcctcagtgagaggaagaactagggaaatcacccaccagatcctcaatgacatgagccagaattttaccctagtctaccatctcttaaagttttgaccacca

SEQ ID NO: 158921 - DNA, 1001 bp, Zea Mays
ctcagggtctgctggtatctggctgactgaattactgtattcaatcgctcttcctccagcacgtcaatatcttctagcctggtagcttctgcttcagctatgctttcgaagaccagccttagtgccccaaacctgacgtcggcaggtagcactgcctccgaaccatagaccatgaagaagtgggtgtttccatgcagagctcgactgggttgagttcttaggctccaaaccacataaggtaactctctgatccacttccctgtgaacttttcattcttgtcgaagactttcttccggagtgcttccagtatcattccattagccctttccacctgaccattagctcttgggtgtgctaccgatgcatatttgatctggatgctccgttgttcacagaaatcaaagaattcagagctagtgaagttggatcccaggtcggttatgatgttattcggtatcccaaacctgaatattatatcttgtatgaattccactgccttggctgaagttagagaagcaatgggtttgtactctatccatttgatgaatttatcaatggcaaccaacacgtgagtatagcctccctgagctttcttgaagggtctaatcatgtccagtccccagcacgcaaatggccatgttacaagtatggtctgcagctgctgtgctggtaaatgctattgctttgacaagaattggcaagcttcacatctctggactaactcggctgtatcactctttgctgttggccaatagaaaccagacctgaagactttcccaaccagagttctggatgctgcgtgtattccacactgtccggcatgaatctcatctagtagctgtctcccagtagtcgaggaaatgcacttcatgaggactcccgttgcaccccttctgtacagtgcgccccctatgagggtgtagtgggccgactgtcttgcgatgcgttctgctgctgctttatcatccagttcttctttgttttttatatacttgatgat

SEQ ID NO: 158922 - DNA, 607 bp, Zea Mays
tgtgaagcagtacgcacccacgacccttggatcggagatctacggttcacaccccccgctgcatcctaaccgccagatagccatccaacgcccacgactgaacctagggaaacgatattcccccactgatcctgaccgtccgccagacgatcaacggcgaccagccctcatcttccccccgactagctggacgcggtggtgattacaccgcccatgacggtgccgcgcctatgtcccaagatccggtactgaggatggcgaaccctattccccaaggtgtgctatacgtggacggaagtaacgcgaaacagttgccaggtttctcacttcaaggcgcacagtagggacgacagtccacggtgacgggcggaagcacgacggtggcgggatcacgttgaggaattgcccatgttccctaaggcccgccttccaattgaggtcgcggacggcaccctagatgttggcaaccctgcctggccccactctgaggaccgagtctcggcgatgaagagcttcattggaggcggaacgaccacacaacaccctccgactcctcctctcacagcgatggcgaacacggcgatgtgcctgttgacgtgcgcaagac

SEQ ID NO: 158923 - DNA, 332 bp, Zea Mays
tgtgtctgagtgagcttgagtctgtaacgctgcgtgcctccccttttatagctcaagggggcacgtacaagggtgctgagccccgacatgtgggcccaggaacataacagacgtaatacttggagcaactaatgctagtcgccagtgcaatcttcttgtaccctgatatctgcggtctgcgtagcattggcgtccagcgaaagcttccctggcaatgtacgagtgatgatgatcgtggcacatgcgatagtatggacgtgccgtctgccacgggaatggacaggcacaccgcctgcgggatggtctaatcgccgtccgccagtagagtgaca

SEQ ID NO: 158924 - DNA, 587 bp, Zea Mays
ttggtgttggctattttgtggacatatggtagattacgatgaggttggtatttattttttgtttgcatcacgtgcaatgttgcacccgtacttattgtcttttgtgtaggagacgagaaaatgcggttgggagggatacgatgacaaagaagaggtgatgcatacaataaagtccaagagactaatgggacaaaagatgtgttgtggatctcagctcgtcgattcgtacattaacgatcgcatacaggacatgcgtaggttcgcgaaatcaatgagttttgatagctcgatgcgtgcagagcagaggagattgaaggcgacaaatgagaagagagaacaggatgcaagggaatgggaggcagctagagccaagaaacagatgttggggaatcttgctgatcgtctcaatggaagtgagtgagaaaaatgacatgatagttttgcttgtacaatttatttatcctgactttgcaaaattatttttcccattacatttgcagagattggatgtgccgtgaactatctcgcagatgaggcacgtgcaagatacgttcaggaaaaaatggcgacggtggagctgatggagg

SEQ ID NO: 158925 - DNA, 414 bp, Zea Mays
catccaaagttgtatcaacctttgggaggggcaatactgccaatataccagcaggagcagcgtcggaagaatcctcagctagcagatcaagcatggcatttatatctgcatcactagggttcaggggcacctcaaaatggacttgccgttcgtcatcaggaatctccccaagcgaagcaaccaaagcactgacttcttcagcagagggtcgcgctctaaggcccaaattgccatcagtcacaggtggatttgatacgaaaagggtgaaggctttggcaggaggcaagttccaggccgagtacgccaccgaagcaccaacattggacaccttgcccctgagaatcatttccagtcggctcaccaagtctgcagaagggattttcctgttggtaacccgagttgagtcagctagcc

SEQ ID NO: 158926 - DNA, 475 bp, Zea Mays
agagaaggggagaagagctatcgtggaaggcaaatgggcactttggcagaaagaaagatgggtgcttaggtgcttgagtactcttattcgaacactcgattgcctatattgatgatctacccaaccgcacatgactcaaagacagcacaagaggtccgagggggaacatgtgtcggttcagcttctaatgcatgaccacctgcgcatatggtgtttgttgattcaggccccattcatagactcgagagcctatagtgggcctagggctactattagtgccccttggtatggatactctgtgtgctacaccacaactgcccagcatggcgtgcaggatgaggaccccaccatcattgtgggtcttatcaagaagacctaattacgagaagaatgtgtggttaggacccctaccacatgtccacatgggaggtccctaccacgaatatcttaatgaagctcccgacctacagacacc

SEQ ID NO: 158927 - DNA, 408 bp, Zea Mays
tgctcttccacttagtgaattgatttggggtttttgtggggcctttttgtaatatttctcttactaagttttgtagctttactaatactcttcatctttaataaaggttcctttttgttgttttgatcatttgcccattcttccccctttaatcccattgttgcggtttaaggcttaagaaatagttagggttttagaatcttgtttgtgggtgaacattgtatgaagggtagactctctttcttgttatggttaatgcttagcttagccatgattctaaaacttttagtcccctcctttccattatagcacaaggtttgagtaggacataatgtgtttctttggccagggctctgggtaacaccaggggtgttacagtattctctattatttgttcctaaccctaac

SEQ ID NO: 158928 - DNA, 374 bp, Zea Mays
gccgccggtccgcaccaaacgcatcgccgccggtgtacgcaggtacggatccctcctcccattgccgtccccaccgtcttctcctcgcattgccgcgtttccttcacccttttcctctgtccatatggttgccgcagtgacgccgccgcccttgctccgtcgtcaaggttccgcgtcgtcccaaccatcgcgtctgcatcttcgtaaggtacggtgcacctcgtgtccatccttacccaccccgctgcctcctgtcgtgttgctagggttcatcctcgatcccgcgacacccctccccctcatgtccagtaggtccacttaatcttgaaaggtcatgaaccacctactaacagaacatttttcttcattgccgc

SEQ ID NO: 158929 - DNA, 440 bp, Zea Mays
tgcctcaatggccttgattttcttcgggtttgcttcaatgccccggtacgaaaccaggaaccccagcaacttccctgcggagacaccaaagacgcacttgtccgggttcagctttgtgcgggttgcccgcagcctgtcgaagaccaggatcaagtcttccactagggtcgaccctcttttcgtcttgactacgttgtcatcgacgaatacttccaccttgtccctaatcaggtccccgaaagtcttactcattgcccgcacaaaagttggcaaggcgttcttcagaccataaggcattacgacatagcagtaaagctcatccactgttacaaaagtggtatgattcctatcttccctagacatctggatttgatggaaaccagaataagcatctaagaaagacaaaaggtcacacccggaggtagaatccacgatttgat

SEQ ID NO: 158930 - DNA, 392 bp, Zea Mays
caaggaagcaattgagctcaaagcaatgcgcaaggctgcaagcatgaacaagcataggaagaaagtgttatttgaaacgggggacttggtttggattcacttgcgcaaggagcgttttcctgagcagcgcaaatccaaattgatgccacgaggggatggtccatttcgtgttcttgccaagatcaatgataatgcatacaagatagatcttccaccaagctatggtgtgagcaacacgttcaatgttgctgacctcttaccatatacaagtgaagacacttcagagtcgaggatgactccttttcaaggggagtaggatgatacgaccacaccattaagcaacacgttacaaccaacatcatcaccaactcaagtcgttgatggaccaatta

SEQ ID NO: 158931 - DNA, 484 bp, Zea Mays
gctaagggtagaattttctgagatgctcaatgttccaggagttcccaattagagtgccatccacctgagttagtcggtatgatcctagctgggccacttctgtgactatgaagggtccttcccatggtggtgatatcttgtggcgtccttctcccgattgtatgcggcggagcacgagatctactgcaaacgcttgggggcgtatcacattgttggggtagcgcctcagggtctgctagtatctggccgactgaataacgacatttagccatttctcctctagcacatcaatttctttgagtcgggttgcttctgcttttgcaatgtttttgaaggtaagcctgggtgccctgaaagcaaggtctgctagcaacactgcttccgacccatagaccatgaagaaaggtgtatttccatgcagggctcggttgggttgagtccgtaagctccaaaccatgtagggcggttctttgattcatttccc

SEQ ID NO: 158932 - DNA, 443 bp, Zea Mays
gatcttgttgccgtgtgatctggaaggttccgaacgagcctagattcgtgcaggaatggcgttaccgtgctttgtctggttgtgtagctgagtgcctgctcgttgcatagtgcctatagtgatagtttcagaatgctcaagtttttttttcctttgccctctttagtttcagattgcttaagctaatgaatacgtgagagatctcgaattaccattttggtagctcaatcttgttcctgcatgacgagttacaatgtcactctgaacgaactcatgtaaatatgttgttccatcacctcctttgtttcggggacataactctgacagtacggacgagtgtgcatccaccggccttactgtgctacaacctgtgtgcacgggtatctagcatggatggactaataaccctctaggggttaattcggatcacaattgaagtagac

SEQ ID NO: 158933 - DNA, 1116 bp, Zea Mays
acccttgctactactactacacctaccaactactactacactacataatactacgaactaagccgttggcggcttgccaccggcgttgctgcccttgccgccaccattgcctccattgccattgccattgccatcatcgctatcgctgcccttaacacggctgccgttgtcgccaccactattgcttcccttgctactgctgccgtcaacgccgcctttgccgccgttgccaccgccatccttgcccttgcttccattgtcaacattgtcatccatggctccttcatcaccaccatcgtagccatcgtcatcgtcatcgtcctcctcctcccctgactcatccaagtcatcgaggtcggacagctcgatgccccagagataagccctctccccgctgacatccccatggagtcgtccttgcaaacggatgatggggagccaggggacggcagattggtcctctcatcagagagctctgtgtcactgaagtcctccgatggcggagttgcaggttgtttcctcttgtcacccctggtgttcctcctacccttatcgtctttctttcccgccatcggagtttctagaagaggagaagaggataggaggaaacaagaagtatgtgcaagtgaaggagtttgcggcacacagttggtctatttaaagaaatgaaacagtacctctttgtattccggtcgtacaacaaacagtcgccagccttcaagagtcgtttggattccaagaaattgcatgcttctgtcaccctttggcgtaacacaacaccaacacctcaaacaactattccgtggacaagacaacgtacacacgcattgggcacacccattgagtgcacagattagattttctagaaaacacaatatatgaaatatcaacgacagtcctacaatatgacaaactcaagatcgatagaagtttactggtcaaacctgagtcaaccagacctatatcagttgaattcagtcggtagccttagcaagcctggccagacatgccctgactagagttcagtcagccaggccatagtcggttgacccttagtcggccaaaccaccctcaagacaaagttagttggctagatgccgtcagaccagaagcatg

SEQ ID NO: 158934 - DNA, 315 bp, Zea Mays
accagctttaaaaagacttttgaaaaccaccacttcatttttcccggcttcgggatagtttcctctccaccgaaacgaatcaattccttctttgcttcactaagatagcccaacttcaccatcttaggaaaatcagcttcggatatggtggactttccgaagtccaggtggctatgcttgctcggcactgcgctactgtagtcatcttcggaatcagtttcttcaacagcagtccgttctgtttcggcagcagggatgtcttcggcagcaggcacgtcctccggtgttaccaacccagagcgcttcattgcttcc

SEQ ID NO: 158935 - DNA, 617 bp, Zea Mays
agcgaaagccctagccacccaacctccgaccagtcgtccaggtcaagtgggcgacccagtcagattacacattgcgttgacggttatttacataggtagttatgcatattgaatttatcgtaaacaaataggaaaggaacacgaatcggcccacctagtcagatagtccccaccccatgtctcgctccccagcaaccgactgcacgattgagccaaccctaatttaatccccacgaccgtcgccgcctgctcccactatcaccgtcgtctgctcccataatgttcgtcaccagtgagtgcccccctccccacgcgccagtctacgtaacttaccttcaccttcgccaaactccgagcgcggctacattgcatccacgacgctagatccgtctttgtaactggttcgtccaactacctcgttttctgttcaagttatcttcaatcttgtgcataatccagcaatggttttgtaactattccccgttttgaccgtatagcatccccaactccgggctcatatcctcgcccccatatggttagtaacaccatcaatttatttggtctcgtttttttacaatctcgcataattcaacatcctttcgtttaaatcaatatcc

SEQ ID NO: 158936 - DNA, 975 bp, Zea Mays
actggattcggcagtagtctccttcggcatatcccagctctccacaagtggccacaccctataggctatgtgctcttggactatatctcttgtaccaatgaaggcacaaacattgctaaaagccttctagcaagcttcgacgtcactctcgatagccaccttcggcctttggaggccgaagcgagaccagatggggagctggataatttccttgatgtcttcccttttaatcagatcatttttaacataaaaccgtgaagatagtggacaaaagattggtgcgccgtggtagccatctagtggttcaagtcaaggtggtttggtcccattttcctgaagaagttactacctgggaagattatgatgtgctcaagagcagattttctgatgattttgattgggacaatcaaactccaggcagggggaagatgtaaggagcataggtgtgtgttgttgatctgtttcatctagtagttgtaatggaggagtattagctgtgatgggttgtaattgggcctatcaatcggcctgtgtctgggttaatctgtatgtaatagggagaagaactcctataaatgttggttgattgcagtagagaaggaatcaaaaaacaataatagaatccagattcaaatccccatacctgtgtcacttacctggtgaagactcctcggaatagcccgtggtgacctcatcggcgttaagggagctcacgtcgaaggggatctgttcctcctcgccacgggtcattacaggccgagggacaacgggtgtgtggaggacaatggagacgccaggcgtggagacagcggtggccggtgggtcacactagctgccttgtggtagctggtcaccgactcgccggtcggcgatcaggactacgagcccgtccgtggtttaaaaaagaaaaaagctcacgcatatcacttgctcaaacacataaccacaaagaaaaaatatgcccgctaaaatact

SEQ ID NO: 158937 - DNA, 402 bp, Zea Mays
cgtgtagagacactgatgcaggaagagctcatcggatcattgttccaagaaagcggtgaagagatctcatgtcctcattgcaaattccaactacagagctgagatggtgcactgcaaaagctcaatgctagaagctatgagaacaatatcatcaacctatagcaacaagtatatcctctcggtgcctcggtggaagatgaacaacaatgtgtgtacaatcgttgatttgaccaccagactatcgtagtccactcaagccgctgggtgaagccccaaacaacctaacgagccttgtagcgatctagggactcgttactcgttagcatgaaacttatgcttgaagatccacttgccagtgatgacatcgaaactaggtggatgaggcaccaagtcctaggtgcc

SEQ ID NO: 158938 - DNA, 560 bp, Zea Mays
gggcgccttatgtcgccttactgccttaataagagatgagatatgagataggatgggctgctagagacaacctaagatgagggttttatgaaggagctctttggcactctccaagatgactcagtcttgacaccaggtgcactctcaactaggttagtcgtgcaaggccatgtggttgtggttcttagtcgcctactcaagggcatccctcatcactatccactcttctttctacaacatctaaagcaggatgaggtctttctctagcttcttgaccttttcctccaaggtccttgagccttggaaggggcatgatgcattgatgatgtcttctaagctgcgagcctctcggccaaagtctttgagctttcttcctttgagaggcatgctctccacctcctatagaaaccttcatcatgctccaacttcttcgatgtgttgaggtataatggagggcatgctcatgtgcgggtcatcttgtctttgaagacttattctggctcttgcaacctagtgatcctctttaagatttgaacttcattcgccatgagcgcctactc

SEQ ID NO: 158939 - DNA, 431 bp, Zea Mays
cgtgcagcccaaaacagaaattaataaatttcagctcttatacaattcaagaattgccatgttctaaagacttgaattattctaacactttaacaattgttagagttaaaataactaagtgagaactaacatgtagacttactaatttttatacaagttatttcgcgcactaaaagcaccatactcaattaacaatgcattctctataacaatcaatagcgaagcgcttttcaccaatagtttgcattttgatttagacatcacctgagcactactacttttcatccgtgaccatcaccatacgcatatagactacaatacagaattcatcgtgactacgagcttaacccaagtcgtctaacaagtcggctagctagagcaacgacacagtccgctacacaacatacacgtcggtccgcttattattatca

SEQ ID NO: 158940 - DNA, 370 bp, Zea Mays
gttgactgctaccgagggggatgacccattgtcatctttgtcttcagtcttctggtgccatactagtctctaggatggggtaatggttcatgattgggagatgtggagggtccctatagcggtggatactgctgacctttctgtgaaggcaaaggtactcttattctgcatgctctaggcttcatagtgttgtacacaacattttgtgaccataataggttgtccgggtactattaaggttgacaaatgtttccctataggtcttcatcattggccggctcttgatgacgtgcagcccactgagcaggccctcaaagtggtgggacctcctggattggctcatgttgtcgtgtcatcttgggtccaagcc

SEQ ID NO: 158941 - DNA, 577 bp, Zea Mays
cttgttattgccaatttagtactcctgcacctcatagctcaaaagggcatgacatggatatgaaattcacacagtaccaaactagggtaatcatgtgaacatggactaaacaaaatgtcataattgcacatagcatgacttgcaaaaaagatacaggtttatccatatacaccaagagagttaatcgttgtggatataacaaatgaaatagctacccatgaatgattcaaaagatatatcctatatagcaccagtcatgattaagcaggcttcattatgattcatttaacacaggcaatcataaagcataactactccaaagacaggtagcacaacaagccaacttaagagcaatactaaattgcaattatgtacttaacatatacgggtaccatcctttggagagcaagttgtagattctcatcaaagtcctttacttgattcaccaataatgattcaggacctatacaccttatttcacttgagatgaacatgggattagtgtttcacaataattcaaccttgggttaatacacaccaaaataattaacaacttaagtatagagttttagataac

SEQ ID NO: 158942 - DNA, 584 bp, Zea Mays
cgccggcaacgtggccttacggccatcaccggaatccgcaatattcaccatggttgcgccacgcctccagcctttaaccgcaccgccgtgactcacgttagccatccgatcatcgccagtgagtccgccacgatattctccaggaatcaactgcaccagtaaccttcttcttctccggccaccgcacgtctcaatccaaattcaccggccaccgctcaagcctgctataaattgccgaccccacctgctccgctatgtaattgtgcaaccagtgaagcaaaccgtgcctcgaatcctccactagagctcactaatttctcatttcccccaaacctgctttccaccgccgtggtatagccctcaccgtggtcagcgaatcccaggtctgttcatgctccctactgtcttgtttcaacatccgtggatccttctgatgctccccgacccgaccaattggactaggacaccatagatcaacgggaacacgcttgattgtctgtagtccgctgtcaccgtggacagtgcgtgttagagcgccattagtaaaattggttgaggggaaaccctcgttaggtcttgaattc

SEQ ID NO: 158943 - DNA, 755 bp, Zea Mays
attggctcaaccttcaggatgatacccatctccctgtagttgaacaacattatcctcagttcctcaccctcgaacagatttcgcagctccccctcacctacactcaccccaatcggcgaggacaacaattctcgcttcccagtcccatccacgcgaagacgacctctctccacctcgccatgataacgcctacaacttcgcgacaattcactcactctccgcttcgccaccgccctccgccgcctatacccagtactcgcgcccagaagttcctcggaaccctccacgcgtggcgaaggctccgctgcagccacatccaacaccgcaaaataatccaagtcctcatctgaagactcctctgtccacgcaatcgaactcccagaatcattagactcaaaacacctagacacagagccaaatgaatcgtcatcagcagccacggtcgaagccgccacaaaaatatcattgtcagtagcggttgcgtgcgcaggcccagacccaagaacctgcgcagcaaccgaggttcagtatcacacagacaaaatttacaaactcctcaacacctattcagccacctgcgaaggcccggtcgcggctgtagggtcttcggctgccggctcggccaccaccctcgcgacattttcgcccgtcggcgcagaggctgatgcagagtcttcaccggccacagtgggcacgggcacagccgaggagccttcaccggcatccgagggcggcaccggattgacctctgcagc

SEQ ID NO: 158944 - DNA, 1361 bp, Zea Mays
gtaacagaccacttggtcctatatatatgtaaccataaccaaccatggttcatagtgtggcataagaaatagaaaaatctgccccaaacatgtgttcactctaacaaatggtatctagagcctagttcttcccaggaggggaaggcttcaactgctgtggtgccatatggccagccattcccactccctctcctctcacgagtcaaccacctctagtgtccctgctgttgtgcagccacgtacctctagcgggcccatggagcaggggcgtgcgggcgcccctaggcatcgccatgtctccccttcccaaaagcgacgttgtggccaccatggtcggcatagctcccccgttgtctagaccgtcgttaaggagtacaaaggtggtatatgacccactcaccaagaccaactacaacgagtggagcttggtgatgaaggtgaagctgcaggcctagcagatgaggaatgtggtgattatgattttcacaaggaccgacgggggcaggaggcccgcattgttgttgtctcatcagagatggcatttgtcctcacagacaatgagaccgccaaggacgccatcatcgtggcacgtatcgacagtgctcacgcccacagagccacccagtagaagttgcatcaggagtggggtcgcctggcgttccggtcgggcaagaacattaacaacttcactctctgcctctctagcctgatgcagcaaatgacgtggtacagcaggagaaaaccatcgagaagtttctccgctttgtccccaagaaatacatgcaggccaccctggcgatggaaacgttgttggacccctctgagttgacgatcgagaaggtgataggtcgcctcaaggttgtcgacgactacgtccagccaccacccattgagccattcaccatcaatggcaagcttctcttcactgagaagtggctcgcccgagcccgtcgaaaggagcagaagaaaggggaggcttcaggttcgtcaagcgatcgcaagcatcggtcgtacaagagggacaaggctccttaggcacgcgaaggcgtagatggcggcaccatcgacaagcgcaagactactcgggacgacatctgccacggttacctgccacaactacggcaagaccggtcgttcgaccaaggactaccgccaagcggagcgcggaagtcaggcacacgtcgcacaaacgcgggagggtgaaaggccagctctgttcctagtacacgggagcattgagctgcactcctctcccgcaccggctgtcgccgctcttctccacctagacggtcgtgcgcccacgtctttcttggcaacaattccaacgtcgataagatcaacgactggtacttcgacatcgg

SEQ ID NO: 158945 - DNA, 405 bp, Zea Mays
ggcgtctagagtggtttatagttgataattatggaaattctctcccttcccggtcgggaagacagccagacgttcgcactccgagttggactgagtctcccacggatcaggaagtggctgaggcaggtgtgttgctggctgaagttggactgctgaaagagagaggtctaactgctgaagcggtggtcactgactttgtttttaagaacattcagccactgaaagatagggcctatccggcatatctgtatcgagggctggccgactcaactcgggttaccaataggagaattccttctgtagacttggtaagccgacttgaaatgatccttaggggtaaagtttcaaatgttggtgcttcagtggcatactcggcctggaacctacctcctcccaaagctttca

SEQ ID NO: 158946 - DNA, 603 bp, Zea Mays
cctctgaataagctttgctcttggcggatttgccgtggggttactgtcccgacggaggatactcacgagtccgttgtttacatcccttttcttatctgtggccttgctcttcccatttctcccttctttcgcggtctccttgacttttacagtctgaatctgactcacctgaatcccaactccattctacaaatctctgtctttgttcatctgtgcgaggcctaccttggaattcttcctcacttcggtttgtggaagtatttgtatcattgtcgtcctaggatggctgggggcagcaccagctcgtgggcggtgcgagtctggagatgcgccgtgggaggaaaacagaataccttgatatcccacttaaggatagcattaaaggatggcgtttagagtggttcattgtggaaaaccatggcaagtccctcccccttggtcagggagacagccggatgttcgcactccaagttggattgagtctcctacagacttggagataatagaagccaaggttctgcttgctgaaatttgcttgttgaaggagagaggtctgaccgctgaagctgtggttgcagactttgtttttaagaatattcagcc

SEQ ID NO: 158947 - DNA, 968 bp, Zea Mays
acctgcatcgtcatatttaatctatacaggatgtacaatgagcatttacaacacctgcacatagtttacaatcatcagctacacctttatcatctacgtacacaatagatcagatcatgaggattcctagttaccgaggatttttcaacgcaaacatctcctagatcacctaactttgccgtgaaaataccgataagtgatagtctcctacagctgtacggatcataatcagaatctctttggggagtcatatgggctttgtcgtctgtggctgatgtcgcgccatggatctggaactgggtcgcttcctctcatctggttctgcatgtcactgactgtgttgtgggccacagatcccgaggagaatgccagatgtgatggggaagcaacgcagctccagttccattgcttcagctggcgtaacgggcttgagcatggagacaccgggagagacatgtttgctctcacatcaatatgcctgctgcaggatggatgatggcagaagtcaaggtactgggtgtgatgggatgaaccggaaagaaggatggtcagtaaatgcaggttactgtgcctggaagttttgtggggtgaaacgcatgctgaggaagatcccgtaaaacctcgcgctcttatccctccaatgtcccgcagaggagcaacacttctcttcaatgaaggttctttgttggactgcaaacaaatttaagggtagcaagatcattgcaaaacattaacatgactggaaatgcttctaagaaactagcacaatgtctattaaaaatggaccagcatgtaagccacttttttatgacatgcctctgcaggcgaagatagtccatttctcaaagtggtgttgcatttggccccactgatttcctgattgtcttgaacaaaaggatggcgcagcaactgagttgcagatgggcgctgtgccggatcacgttttaagcacaaactaaggaaatctt

SEQ ID NO: 158948 - DNA, 327 bp, Zea Mays
gcgggatgtatcttgcctctttctcttcttgtctacgccgcggtaacccaaaaattcaatctttacccttcgtgcggtctagcttctattgccatgtttggatggttttacacttttgtgcgagatcataccgtgtacatatgttctgatggaatatgcaataaccaaacatgaggcgttgctcaaaccactgaagatttctatttgattcagtgcaaaatcttgagttctgtcgaacttgggataatgctgtttgatgttaaagccttacctggggaaagaaggcctcaattcaaattgacagaatttacaagaattttgaaatat

SEQ ID NO: 158949 - DNA, 366 bp, Zea Mays
tgaacattaatggagaaagcaaaagagcagtacccgcatgaccaccatgatgacttcctccgtagaagaccaagcaagaacagcaacagcgcaatcattaatctaatccatccatcagttgagaatttctgttgcgacaacctacatgcacacaccatatctataaatgttattgagttattctacatttatgtgggatggacaaatttagtcggataagaacagcagaagaagctgaacttgaatcccacaaaattcaaggagacctaccagaggtgcgcagacaagattgagaatgtaccagaaggcggctaccacaggttgccccttccattttgtaaagcatgcacaataattccttgcgtg

SEQ ID NO: 158950 - DNA, 465 bp, Zea Mays
cgcccatactcggtttttaaaaaactcttctctgcccgagtcgagcccaggctcatttcttctcccctgctgcatcctctctctgtctctagcgcttttcccccgtcgccggcgacctccctccccggcggcgatcctccggcgccctgtgcctgcgaccctcgctcggtgagcagcactccgctctcctctccctctatccctttctctcttgttctctgtctgaggcagtgaagcacctctgtttccaccccttttgcccaattccaaatcctgtgaaatcttgtgaatccatgttgtggtatgtgtgtctctgtgtgtattgagcatccctgcaggtttctagctccctttgggagggtttcacaacctaaattgactcaatctcccaaaacctaattcaccgcacgccaagtgttcggtgaaatgcccaaaccagccaaaaatgctccaattgaacccaaa

SEQ ID NO: 158951 - DNA, 369 bp, Zea Mays
ccgctcgcccctttgccgcatcacccgaacccaccacggcgacccctatgccgctgcggggcctcacgccgcggcttcactgtccacaccgtcatcgccattgcctcggtctcggactccgcctccgaccccaccgcggccgcggaggcgacgtccccatctccgcccccctcgctgccaacgcaaacgccttcctctaaaccaggacccccggctttgggcggcatcgcgaacacgaggtcttggtcgcagtactacggcagcggcttctccatccgcgtgcctccgtccttcgacgacatcctcgagcccgatgtaattaccgacctgaactgtttcttcactcctacattccatcgtcctcctgcg

SEQ ID NO: 158952 - DNA, 791 bp, Zea Mays
ctcgggttgagtctaaaccgcccgatcccgggtggacaaccgagatctaacggcagggggcggacttgggcgcggcggcgccgctcggtcccgcggcgggagttcgccggagacgagcagagtggccacggcggggctctggtggcttagggaaagggccagacacgttcaacacgtcacggtgaacacaactatgggcgcagaaccggcatgggggcgccagagaacgcagaccgcagtgaaaaaggttccgcggcggcgcagctaactccggcgagcaatcgcgcgggctccagtgtggtacttggcgaaataaaggcatgggaaggttgctcacctcgagtgcaaactccgggacgcttggagaacggcgggggtgcggtggagcctcgagtcgacggcgacggggctccgactgcgcaagaactgctctggtgagcgtggaccaggcgcaacaggagggagagggcacaccgaagggtgtcccgagtagctgacggcaaggcgaagctcactgtggcactgaacggggcacgggcgcaacggcggccacggaacaggcggtggacgtcggcgggcggtggtggagctctcggtcgcgcggggcagagcgagagagagggcgagggagctgggcaaagggcgcaaatgggagaggggaggtgggcgagcagggcgcggggctcaaaaggggtgcgggggctcggacgtgattggagaactcgcggtcgtgggcgtgtccacagcggggagatcgtgggggagaggttagagacggccgacaggtgggg

SEQ ID NO: 158953 - DNA, 779 bp, Zea Mays
gatgaatataatggaagctattgagcagaccctgcccctagcttcgacgtacaaagctactatacccgtcgatgctgaagataccgccgcagccgaagccgataatcttgtaaccacactgtcataaatcgacagacttatttcggatgtggttactgagaaagatgtagccgcagtgccttttgatagggggaagagaattgaagagacctcttcggaaaatatgaatttcgaccttcggcacctaggcgaccaacaacttcccgaagaggacatatcggaattaaaggaatttgccatatcctgcggctaccaacctggatcgatgctcttccgtggagttgatgaagaaattgtgggatgcatccgactatgccggggctaagattatatgcactttatgtaagagcattggattcccgaagcttgaaaaggatattagctgctatagacgacaacacatcattggcagcttgttttactcaaacttcaaagtaagactcctttacaggttatcgatggtatcttcgtgttgatttaggtattctaactttagtttgtttttcagagtttattgctaagcaaagccttgaagatgcaacaagatgacaaagataggaagaataatattgtcgtcaaaggctttgaagataagatcaaaaaacttgaaggttctttgaaagaaaaagatagcctgttgcgttcaaccgaaggatcacttgccgaagctcgggctcagaatgagaaattaagcaaagagctgaaggaaactcaaacac

SEQ ID NO: 158954 - DNA, 444 bp, Zea Mays
aagcagacatctcaccttttctcttcaacaaggatggcattcagatttatttcctcatttatgttgatgatatcctcatcattagttcttctctcgctgccactgatcggttacttggatagctatgagatgattttgcggtcaaggacctagggccactcagatacttcttggggattgaagtgtgtcatcaccctgctgggctcactttgactcagcggaagtacatacatgatctcttattacgcacaaacatgctctcagctagtggcgttaccaccctcatggtaccgaccgacaagattgcatccatggatggtgcttgtttatctctagatgatgccaccaaatatcgaagtattgtgggcggcctccaatatctatctttgactcgccccgatatttccttttctgttaatcgggtgtgtcaatatatgtaaacac

SEQ ID NO: 158955 - DNA, 1686 bp, Zea Mays
accatgataaagcatataaagtcacatggttcacatttggaaagatttacaagccaaaccctaagttttggactcatttgcaaaaaggcccctagttgtgatttcatgctaagtctgaatttcagattgatgagctcaactttggagccttgcaacttttaaaatatagggtttttgccctggggcaccacatcaaacttatagacctattaatggataacaagtttgcttaagagtgcaagccatgttcttgtgagaaatttggagataatcatgctcaaactttggctgtcaggctgattaagtctgaaaatcagactgacagtggactgacatcaacttcaagaccaagttcatgcatgatctgctgcctttttgtgacaacaccatacagcaaagttgtagttggtataatgctctacaagtttgctgcagagttggacttgtgttaccatatgaaattaagagaaaaattgccttcaacagggactgacaggctgtctgaatgagttagtcgccatcatacagtgtctgaacggataggatcggccgcagcagaaaaaaatcttcaccgccgacgaccctcgccgtgattcacgccaccgccgtaggattcgagtcgccgatgacccgatatggccgccaggtaaaagccaccccctggggataactccggtgactcaccgtggctgccccttctgctttgcggctggagcaaattagctcgccggtgaccgccgcctcccggccgtgcgccgcgtggctcaacctttccaccacgtcaccctaactccccactgctgtctaatcaacgctggtgaggttgccacggcatgggacaccaattcacgcgcgccagtattcttctccacctccgaccgccgcacgtctcgtccaaattcgcggccaccgcctgttctccctataaattgagcccgtgactagctccgcaaggtcatcagctacccagccaccaagaattgctagcaattgatcaccagtgtgcccgaattccttgttttccccaaaactgtttccgccaccgtcgaaccaagctcgccacggccagccctttccaggtcagttcatccctcactctccttcgtttgagcactcttgtcgctctgggatgcttactgtgtcaccaattcgcactgggagtccaccaatcgtcgggaacacgatcaagtgtccgtagtctccgcggttctcgtggacagaagagagtagatcaccatttgcacaattaagttaggggaaaggcttaggatgggtccaatttggtggtagttgctcggggacgccagtacttgccccaatcggccggcgtaggtgctcgccggagcgcgaccgcgttcaccgctgtcggggtccttcctctgtgaagaattggaacttgggggagttttctgtaacctgtcagcgacgcggagaaacagtgaacgaacttgtatctagttagcctataacccgaggacccttctgcaagaattccaccgcgggcgcgcgcgcgctttctcctctggattgggccgcctgggctgaaaccagcccagcactgtttaccctttttctttttctttttcagtagagctttggaaatctattataaattgtacaaaaatcctaaaattgagaaaccaattttcctagactccttattttccctaatatttaataaaaata

SEQ ID NO: 158956 - DNA, 689 bp, Zea Mays
aaccagagccacgattcaacgcgaaggtgacatggacaaggagtaataggcttacaaacatctagcactagtcggtcagagcaaaagccctcatttaatttgagagatttgacctaagttgaagcttgttcatgttacggcatctgaccgaccctggagatcacgttccggatgattaatgggatcgaagctaaaattgaagcttgggaaggctttacgggttcaccaggaactaggtacacgattgaatttaggccgaacgaggatagagaagtggatcgacagagagggtgcatacagcggcgttcttcggagcaacggagtgttccggtggtgggactttggtaaactttgattgattggcgtcgagagcaataggaagctaaggacatgctagaacacgaggcaattgagcgagtactaacccgaagagggctggccacggagaggtcctgcacggcggcgctcggaacagggcggaatggatttgtggactgtgtgagttttccggtgaaattgagttgattgcacaagtgctcgtgtgcgtgatgtggtgaagaagcaggacccaggctcaatttataggccgatggccagagttggatgaggctcgtggagctgtaaacgcgctggcgagctcacccgcgcgggcagagccacgatgatggcccggcgactgccgattaacc

SEQ ID NO: 158957 - DNA, 535 bp, Zea Mays
cgcttgcagccaccctctgtcctcgcgtgtggatcagacgctgccggtgggccatccatgtcagtttcatcacccaaaccgaatcacaacagactgtcgtatttccccacccgccatccgcgttctccggggcttggcacaacaagcgcgccaactgggcagggttggtagcttgcctcgccgcggactccgcgcacctataaagccgagtcgtgttcgccatcgttgcctcaagctttgctacgaaatatagtgagagggaggagagaagtttggggccgccgccggtgacttcggtccgcgttgactcgctgcccttggtgtttgggcccggagcttcaccttccggtgtggagtgcgcgggcgttgttgctgagctttgggggccggccaatcgcgagcaatagctcgtcggcgtttcccttccaccgcggtatcgtctctctccgtggatagcactgcctcgaccaccatcttcggtgagattcgctcctatggtctgatgtaccctcctacttagcatagcgccgtcagg

SEQ ID NO: 158958 - DNA, 790 bp, Zea Mays
ccagctcgtgggaggtgcaagtttggagatgcgtcgtgggaggaagaccgagtacctcgacattccactcaaggacagcatcaaaggctggcgcctggaatggtttatcgtagagaatcacgggaattccctccccctcggtcagggagacagccagatgttcgcactcccagttggactgaatcccccacggacttggagatagctgaggctagggttctgcttgcagaggttggcttgttgagggagaagggtctgactgccggggctgtggtcgccgatttcgtttttaagaacattcaaccgctgaaggatagagcgtacccaacttacttgtatcgtggtgttactgattcgacccgggttaccaatagaaggattcctgctgtggacctggtaagccggcttaagatgaaccttagaggcaaggtgtcgaatgttggtgctcctgttgcgtattcagcctggaatctgcctcctcccaagacgttcatcagttttgtgtcaaatcctcctgctggggatagtggtttgggccttagagtgcagccctctcccgaggaggttgaggctttggttgcttcgcttggtggaatccccaatgacgagaggcaggttcactttgagatgcctactagcccgagcgacgcagaaataagtaccatgctggatatgttggctgaggattcctctaactcggctcctgctgaaacactagttgtagcactcatcccagagtctagaaaaacattggacattcagagacctgatactattcgcccgaaacgtc

SEQ ID NO: 158959 - DNA, 278 bp, Zea Mays
attgatgcagatggaatcgttcctccaggcattcttcccaaacatcctcaagaagacaaacaacgcgcagcaggacacgtactgcatctttaaaaaccaggtgctcaccttgttcgtttcctcgttatatctcgcagccatcctctccaatctggtatccggccactcgacgaggacgatgggccggaggaactccatgatgataggcggcatgtttttcttggccggcgccatcctcaacacctccgccgtccacatcagcatgctcatcatcggcc

SEQ ID NO: 158960 - DNA, 835 bp, Zea Mays
gaaaaacccttaaagagtccgcagtattgtttctctgtgccactgacaattgcaaatagacccttcccctttctattctttacaacccgcgatccccgacggtggacggcgacaggccgagctccgacgagctcgtactggccggaattggcaacggctagcccttccctttgcttgacaccaaattcaaccccgaacgaccattccccctcatttaattgcaaggttcgagctcttaatcacactgcccacggtgacagcgcgagcaacagataaaccgagacgttcccggtgttcctacgagttctaactcaattggatgggtcgaggaatatcaagagcacacagggatgctaaaacagaagctaggagggcatgatcggacctgtgaagagctgaccgcggcgagctcacacaacacaatgttcttgaccaatttgggggaagtctcaaactggggagttgtaggggatgattcgaggtgagagctggttcactggatgcacaactatctagcggagctgatggcacgctcaatttataggattcatgaacggtggcggctaatttggagaagatgcgaggcgaccggagaggggaaagagcactggcgcaaaggatttgtggcgttcaccgtggcaagcttaccagcgacaacccagctatctaaagcgggttagtgcgatgtggtaaatggcctaaggcgtggcgcaaccgcagtgaagggcacaaactctggtgacggccgcttggccacgtcgtcggtgcaagtgggcacggtgtaggatggaacagtgcttcaagctcatccgcggtgaagatcttctgaccccga

SEQ ID NO: 158961 - DNA, 408 bp, Zea Mays
ctacttattatgtaggacataggctgaataggttgaggtaagaaagattatgaccaggaaaagacttcatccaaaatgtttatgtcttgattcatctcgagattcgctttgactgttgtatccttccttgtcgaggttgatctcctcctttctttcggtcttggtgtctccatccgagctagggagatatagttaagatagctggggtatatgggtaggacaaaatcttatttatcaataggtttggatagatggattatgtaacctattgggagtgtatggctgagttgatctaaggcactaacttaggcccaaaacatgtttatagggtctaatctatttcaccagtattaactaacctatttatgtaactcactttagattagatcatattaggttagatgggat

SEQ ID NO: 158962 - DNA, 712 bp, Zea Mays
gggagagcatgagaagggtgaggaggaggagaagcgtgggtacggcggcggtgctgcggtgggagaggcgcggcggcatgatgatgagggaggaggagagcagtagagattgctgtcgagagggagtgtgtcagtaccaaggaagactatgcaggagaacatcagagtggtgggaacgaagatggaagccggaaggagctgcaaggatatgtgttgggccgtcgcgtgcctaggcccagtgggcgggcgctacgcgtcggacatctggtccgtgtaagagaggagagtgaggagtgtatttgaactcagccttgccactgtgaatgttaagatatgagaaatacaatgatcctcctcctatcttcttcttccccacgttatcctcttccctttctgagtagccatcgtagttggtagctaacaattggtatcggctgagttcgtcgcattaggagcaactcaggtcttcgaggcagaaacttgccaagaatagctgatgtaggtgctggttcatcttctcagcctcaacgaacatatgtcaggacaaggaagtgtttaagaaatgcagcagctcaagatattggagaagaggacagtgatgatcaagaagatggtgctgctgctgcacaagtagaacaacaacaaacacaagaagcaactggagatatggatgaagatggtgctgctgctgatgcattttgtttggatgctg

SEQ ID NO: 158963 - DNA, 300 bp, Zea Mays
tgaagaaagagatagcacagtatgtggcccggtgtgacacctgccaacgaacgaaggccgagcaccaaaaacctgcaggcctattgcaacccctcccagtacctgaatggaagtgggaagaaataggcatggattttgtaaccagactaccccggacgcaaaaagggaatgactctatctgggtaataatagatcgcctcaccaaggtagcccatttcattccagtgaaaactacttttggaggagccatcgttgcccgaatttatctcaaagagatagtcagactccatggcatcccaa

SEQ ID NO: 158964 - DNA, 526 bp, Zea Mays
acctttaaagcaatatgctcctgaaccaaatccctcgtgacaatgtagctacagactgtgttgaaggccatcaaacatgcttgtgcttcgtttccacccacgatcgaaggtctcctgatgctaaagcgtgatcaaatggggcgctggattatgcccttcacatcctctctcccacacacatcattttcaacataaaaccattgcttcatccatgagcccgaccatttttctgaaacgttggcacatgacacctcgcaacaaactagtacacgaagctataacatccgaagttgttatgatattgttctttcccaaccgccttcgtctggtaggacaattcgtgaatactgcaaaagaagttggcatctggctccagccattggttcctcattgcccaaataaaaagtccaaccttgataaaagcctcaggagtaaactgatgaaggtatatttcaaatcttttcagtatttcgactaacatcttatgcaagggaaagcgaagcccaaccttcataaaacttttgaa

SEQ ID NO: 158965 - DNA, 1056 bp, Zea Mays
cccagtcactcgctctatgattgacaccatcctgcgggtgcactacaggaacctcaacatcaccactccgtcgccagcacctccactgatcccggtgaactaccctagcggcctggctaatgccaactagggtgcggccatgactgacgaactttatgctcttgtcaacaacaagacatggcaactcgttccccgaccccgtggcacaaatattgtgacaggcaagttgatcttcaagcataagttccactctgatggcattcttgctcatcacaaggtgcgctgggtagtccacgaattttcccaacgccatggcatcgtctacgatgagacgtttagtccggtcgtcaaaccaacgaccatccggattgttctaagcatcaccacttctcgcgctcagccgatccgccagctggatgtgaagacagtttactgctagcaacccttggtttcatcgaccccgttgcccttgatcacgtctatcttttacagaagtctctatatggacttaagcaggctccttgggcgtggtaccagctgtttgcctccttcattcgatagctcgactcaattgcctcgacctccgacacctctttatttacaaagagggcgcacatcgcctacttgctgctttacgtcgatgacatcatcctcacaagctcatcctcaactctcctccagcatgccatggctaaactcaccttcgagttcgccatgacggacctaggcgacctgcaccacttcctcggcatctctgtcacacgcttcgttgatgaactatttttgtttcagagatagtacgctatggatcttttctagcgcgccggcatggatgagtgtcactctgtagctactcttgttgacacttatgatggtgccaagctctccacttctgaaggccttgactatagaagcatcacagatgctcttcagtacctcaccttgaccggacctgacctagcgtacgcggtccagcaggtgtgcctcttcatgcacaactctggtgagcctcaccttgcgctggtcaagcgtatcctatgctacgtgaagggcaca

SEQ ID NO: 158966 - DNA, 627 bp, Zea Mays
ccgacggaaagaattcagcaatccctaaatcccctttgcccttggctcttgtaattgtaactcctctcgtgtctcagtacagatttaattagactctacgtagcagtctagggtatttgaatctgtcttctggaactaagacctcgtgggtatgttgattagcaaacgcgtgtggccttgcctgcagtacatgccttcaccgtggagatctcggattcgttgaattctccaacgagatatgatagctgcttttgttatgatatttggaagcatggcagctttaattatattctgcgttttctgggattactggatcacgggtcgggacgaagaatgtcgacaacagaaatctgggaaaattccaaacccccacccaatctgggaaatgtcagtctctggctcactgccactcaataccctgatattcagcttggtttgttggccgattggtacacacagaactatttttagtggcatttagccgtactctggtttatgttcgggtttcctgccaagtttgttgatatatcgtgccacttctttttgaatgaaactggtgggttgcctgctctagaggtaggagtcgttggaatccaaatcaaaataaattagtccagtatgagagag

SEQ ID NO: 158967 - DNA, 373 bp, Zea Mays
cactcgacaaatagcttcggcatttgggtccatcccttggcttcgaagggcccatatgaaaatgctgagcctaacgatggcgttaggggtcagcagatgaagaaggatttcataattatccaaaatttctccaattatctcgttcagcggaaactgtaatcctactctgaaaaagcctttgaaaactaccacttcatcatctttcggtgtcggagtggtttcttccccggcaaaacgaataagcttcttctcagcttctccgaagtagcccagcttcatcatcatgggcatatcagcttcagacacagtagatttttcaaaatccaagtggctgggttttgacgggatcagaatgctataatcctcttcttct

SEQ ID NO: 158968 - DNA, 825 bp, Zea Mays
caacactcctataccgagtggagtcctctggtgataaaggttctccattatctgttagagtaatcttttcagcggggaccatcggtgtaacaacaacactagcagcatgcatattagctcgggaaagatcatgaatgtatttgtgttgtgttaaagtgagactgtcgatatgatgatgtacttgaacactcaaaaatagctcaggggtccaagatcttttaccgcgaaatcatctctgagttgcccaagcaagcgatcaatggccaccgaagaggaactaatgatgattatatcataaacatatataataaaatagatcttgatgccacctttgttaaaaagaaacagagttatatctgcttttgaggccgaaaaatccaaggcaagtaatgtagtgcttagccgagagaaccatgcacgcggagcttgtttaaggccatacaatgacttatcaagtttgcaaatatactctagacagcacaatcctcaaaaccaggtggttgcttcgtatagacgtcttcatcaaggaaaccatgaaggaaggcattttgaatatcgatttgctgaataacccagccacaagagacaaccaatgatagaagaagtggaaatgtagtgggctttacaaccaaactgaaggtgtcatcataatccacaccatattgctgcttgaatcgtctagcaaccagtcgagccttatagcgatcaatcgggccattaggtttctgctttattttgaagacccatttgcaatcgaccacattcaagccaggtcgaggaggaacaaggtaccaagtagcatttttaatgagagcacaatactca

SEQ ID NO: 158969 - DNA, 365 bp, Zea Mays
cggctgaaagggtatcgagggtgttcagccgtccgatcagatcctgatggtgaggattagatccacagccgctcgaaccggtatcctaggggaaccatcggatcccgatctaatggtctcgattcaatgtgcgctaatctcatctcgtccgcaagatcggatatcaacggtgcacaattagtgtggtaacgcagtagcccaaaactcatatcaaccgtgcgttgattgatcgatggcccgcacggctcccatcctcgtcaaccaaatttttctaccatggcgaccaggcacggcggagcgcccaccccgcggtggcgccattaccgacgaagtcgtgtcccatgacccggccacccaaactcgac

SEQ ID NO: 158970 - DNA, 585 bp, Zea Mays
agctgagtcacacattgtttagcgtgaaatagtcgaagctgaacgtgacagagtttagaaaaatgttgatgaccttcgtgaatcaaaggaacaatgtttttctgttgctgcacaatgctgtgagaaattgaagagtatgttttctagtgtggcgctttttctagcgacgaaaagtttattcgcggcgacgccgaaggggcaataaagtggattcaaggtgaagttgaaggctttgacgaagttcttactggtcggggagatttttgtgcctccgtgggtaaatagggagcggagtcgctgctcaaaaaagctagttgggagcacgtgaaatctgtgattcaaccggagtttaaggtttcagctattgataccaaagacccttcgacaaaagctattgcactagggagaaattttattccgacatctggcttgctggtgggagggaaatggcggatgaagctttgagagccagtgagggagaggttctttttgaatgctaaatcttgtccttcgattttgatgtgtattttttaacaaattgcattttggttttacaggctcacctgtcacactcggttttagaag

SEQ ID NO: 158971 - DNA, 550 bp, Zea Mays
tatgcacaatcttcaatgcctaagatcttttcagacttcttacagattttgatgtgcatggcaacttgcttgattcctactcctaccttatatatttggcaatgggcattgctttgcacacggagtcccgggattggcattggaatagtacattacatggtacaatttctcaacatatatcctcatcaagatataatcagttacggtagtaaattgcagaaacgtgctagacaaataaaatcaccattgtacactatttagcatggtatacccatcatagcaaccttgcatatctctatgttgtgaaaaaatgtactcgcaaaattagggaacctttctttagctttgcaatactgcatagacaggacctgatggaggagctgttgtaaagcattaacagattagccaagaatttaacctaagaagctagaccaccgagggtatggaacgtttgtcttgccattaggcactgatgaaggcaactatgattcaatttggtgaaactgcactccttatatctacacaggctaaggttctacttaaaacaaac

SEQ ID NO: 158972 - DNA, 326 bp, Zea Mays
ggagcgacgcggtgagccctgacctttcttgtccttgcccatggctagatggaagagaagagggggttgagaaaaaagcaacagatgatcagaggatgtgtgaaaacaacaacggggcaagcaggctaattatagaggccggaggcaactgttcatcacctaccacgctcaccgaacaatcgaaagtattcaataagccattcaaatcgcctgaaggcaagtcaggcagcagacgccgctttgcgtaacacgacactatttggactaaggtcaactgcttgggcaatatgattacgccccgtggtcacgtcaagttactactccag

SEQ ID NO: 158973 - DNA, 378 bp, Zea Mays
tcgtgaagagcagcttcagaaagacaaagaggttattaaacagatagttgacatactccatggaaacccgtactccgagcaccttaggagcatgggccatgttgagaaccttgatgactatcatatcacattgaaccttgactagacgttgaaccagaagacatataagacgcctctcacttcagaggtggccgctgtatggatcgaggggagcgaacgacaatgccagtttagcaagagtgttatgctacatgggaaggataggtcaagccacgtcatccgctcataccacggatgctacgatgcactatcgtatccactgttcttccctagaggtgaacttggatggcatgcaaatatcccaaaggttggtgtatc

SEQ ID NO: 158974 - DNA, 481 bp, Zea Mays
aatagatccatcttatctcgaaaagattctatcctatcctaatagatctgaccaatctcagaagattcttactcttggagactcatcttgtcctaatcagcatacttacccccaccaatttgcttatctcataaaagtgtaacaagcatgatctattctaaaataaattaagtagatcttatctagtctatctcacccatatccatcttaaccatactccggtaactttgatgatatacactgacctcgaatcaatgagctcaagaccggagaagaaaggatcaacctcgtcaagaaaggagggaggtcaaacccaaccttcagttgcattgccactcaacacggagttctttctcactataaactttcttaccccaggctattcttgccctaacttatccatctcttatatcctacataataagtggctggagacctatgctctcctaataaacccctattgactataaaaaaatgaaac

SEQ ID NO: 158975 - DNA, 665 bp, Zea Mays
agcctctgaccatatacacaccgcaacgatcaggcccactggccaaatatgtctactctaatcgtcctacctcccgtgtatgacacctggaccttgatttgaagttggagacggaggtgaatacggctgcggcctccctgcacagcacatgcatgcaacgtttagcggagtaatatcagtaaggtcatgtttgaatatgatctcctagaattaaactatgagatgatcgaggtagaaaaattgaattttatccaactgtctaccgcccacacaccgtgctgattaacacctcccgtttttctaacataaaagagaggaatggtcaaactatcagattttggaaggataaatggctaaccagtcggcctctttgtgagcaatttccgaatctatttaatatagtgcggaataaatcagcattagtggtagacgttttttcagctacgaatcttaatttatcttttcgccgaataattaggggattaaattgatggaatgacacaacatgttaaacttgctatctaatgttactttgaatctgtctagcgacaaatttgtttgggatggtcataagaatggaattttctcagtccaatctatgtaccattgtttgatgaataatcccaacgacgaacggaataaaaagctctggaaacttaagctcc

SEQ ID NO: 158976 - DNA, 1004 bp, Zea Mays
tgcacctaggcaggaggacgagctagcaggccaaggttcatcgatgcgtgatgatgatgactatggggaggactacgatggagaggccgatgacgaggttgttacaacgacacaggcaacgaacttcaggtatttttattttgacgacgagttctattttctgttggattgatattattacccgtgcacaatttacaattttgtaggtttcggcggtcccttagagttccaccgacacgacccttggaccaacgtagggtcataaaccctgcaggagagaggagctgggtggaggtggcatggagtggcaaaggtcaccggacaccagttaacacagtgctgggatctatagcttgttttcactatccaggggtggtacaattcaacggggcagagatagggacgtatcactgggctcactggggcctcaaaccatatggacccgaccgtactcaccaagacgcagtgcagtcatcgttttgggtttgtttattatgtcttttaaattttcttactgtgggcatctataaatgaatttaattgcttcttcattatgcaggaacaatttagattggacgaaacagcgaacgaagaacatgcaaaacatgtattccacaatgctgctaggaaagttacactactaaaaaatcaccttcttgcaatgggcaaaaatcgttgcgatagaccataaatcgttgcgaaaggcaccaattgcgatagaacaactgccgttgcctgctgttgcagaaaacagagtggcaataggctatagcaacaattttacgttctgttgcaattactacatcttttgtaacgtattcaagtgttgcaatcgttcgttgttacaatggactattctgttgcaataagttatattgcaacatttacgatagttgccaaaaactctattgccacaacatatttcatggtaataagtgttaatgccacgtttaaatctgttgcaaatggctttgttaccacaagatgcttcgtggcaacaaaac

SEQ ID NO: 158977 - DNA, 386 bp, Zea Mays
ccttggaccaccgcaatttggtcgaagttgtgggtttgacagtcataatctcatagatagtaagtttagtctatctcttagacattgaggagctactcctacaaagacaagttttaccatatttgtagctcgttggaagtctccattgtcctgcttgtattggtcatgttcttcgtctgcatttttttgtctttattatcttatttcagagtcaagacaaaaccatgatttctaggttgcttacatccgcgatagagtcattatgatgttatcccaagctcgctacaaagaagttgttcggagacatggagaagaatacaaagacttggatgatgacaaatttgagaaagccgtcaaacagaatcagagaaagaaaatgaaggtaa

SEQ ID NO: 158978 - DNA, 567 bp, Zea Mays
agtaaatccagtcgcaggcacttcttcagtagcaggaaccgaggtaccagcgtcctgatcaaaactggatactcaccgaaggcgtcttcttttcttcttctgttcatcagcagaaggatcaggctggttggctcggcaagggcgccttgggcgagtactgacaggtttctgagcatccaaagtcgtatcagcctctgggaggggtgccactaccaacgccccagcaggagcagcgtcggaagaatcctcagctagcagatcaagcatagcacttatctctgcatcactagggttcaagggcacctcaaaatggacctgccgttcatcatcaggaatctccccaagcgaagcaaccaaggcactaacttcttcagcagagggtcgcactctaaggcccaaactgccatcagtaataggtggattcgacacaaagagggtgaaggctctaggaggaggcaggttccaggccgagtatgccaccggagcaccaacatttgacactttgcccctaaggatcatctctagtcggctcaccaagtctgcaaaaggaattcttctgttagtaac

SEQ ID NO: 158979 - DNA, 542 bp, Zea Mays
atgggaaaccctgccgactgaagaccagcaggagttcgaggagcataaggaaaggctgatcaaggaggctcaggcgaaatttctgaccaacttcaaagtggacagaaattagaaggtcgtccgggtgcgggcgactgatccggccgcgctccaacctgcagcagcaacccctaatgtaagtaccgcaaacgatatccaatccctcaagtcttacgttgatgagcagcgcgaacaaatgcagaaaatactaggggggtatgcaagaggaccatagaaaactagtgcgcgcatttgaaaaatccactgtgcccaattttccatcacacaatgtaggcaccacacacgacgcactagaatcatcggctgcaaacgggcatgtacaaccccaaccattatatggcatgccgttgaactcctacgtcgaaaaaacccaacctcctacacaggtatggaaaaaacctgccgatctgcccatggctggaccatccgcacatgagcgcggaccgtccggcccaccggcgactggccctgtttaccaaaac

SEQ ID NO: 158980 - DNA, 401 bp, Zea Mays
gcagattagagcaccatagcgtgcgtatcttggcaaagtcactgtgtacggtcgcttccctgctccatatcctacctttttgctgtgagttccaagtcaagatatggtcggggcagggagatagaggggaagaagttggctgtgtcagctaggtccaagccgagacaaaaatggtgtcaagtcgtgtctagcgccctagggtaggggtcacctctttccagggtattctagggttaatttggcaccactttgtcaattgggtcgaagggttttgaattttggattaaggtgaacatgtgggatctttgttcaagggttagtttttatacttaggcaaattctaaattctcccttgtgctgaaccttaggtgaaccttttgggacttttctgaaaacttttt

SEQ ID NO: 158981 - DNA, 637 bp, Zea Mays
tggggatagagatagttataactttatgggatgggtatgaggtatctaatcccggattgacagtttgacacttctattgcagcaaaagcataccattttgacttagagttttccatctatgataccaagggcaaatataaggatgggaacgtgctcaataggaaaaagggcatcccgtctaattagcaccgcaactctttgatctccatcgactacaaaaccaattaattaatgctcacattcacccataagcaaatgcagaactaatattgctaagagagagacacggttgcggcggaatgactataaaggcaatgcttgaaatcaaatacggtgtatgcattcatccacaagctcgatatctccatccgcacttctgcaggagggaaactgaagaaggaaaagcaatcttacctgcggcacgggcggctcgcccgtcctcgtagcacgagcgcaggagatgcggcccggggtgaggcactgaggcagggtcgcggccgaggggatcgcaacctcagggcgagatggcaatggtagtgtgatggggagatggcggcagcgggccagaatcaaagagtttagtcaaatctataccaaacaaaagtgcaattcttgtttttcgtcaaataaatttaag

SEQ ID NO: 158982 - DNA, 313 bp, Zea Mays
catcaatgttcgagacggggcagttccccaacctgctgcaagaagtgctgcacacgctaggaacctacgtccgccccttgtacgaaacaaggcgagtgagcgagcctccctgggcttgctaccacatcactcgcatccacgtcagggtgatggatgcagcggataggggattcaggactctgtctgctcatgagtccctgacaccgctatccacctacgctgcttcggtcagcgatgctgccagacggaccctgtggtctcttacccacacctactggcaacagctgcatgacatgaggttcaggcatctccc

SEQ ID NO: 158983 - DNA, 542 bp, Zea Mays
ggagacacgagcgattatcctggtttaggctactcaaggccctacttccagcagagaggatgatgcttatattactcgcactgtggtgcctgtagtaggggtttacaagcacagcgagagaagggaagtccccaggtccctagagatgattgaggcaagtgccaatatctaagacagagtgagagggtgagtgttcgtcgacgtgtgttgtgtgcatgttgatgtcgtcgatgtcgatcccccgtccgtggagggacccctgccctatatatatgccaaggggagcgtccttagtgaagtcgggtcttgtattcgaacaagagatgcctggcgtctgtcgtgacggcgtactacgcaccagattcgtgcatgttaacttcccgtagagagctgaggccgagaccgaggggttgtccgtacgcccgagcccccgagggagaggccacccatgccgtattggttgtaacagcgccgaggtataggtcaaaggctgcttacggggtgcgccatcatcctggcgtgtgatgacgtcgagattcctt

SEQ ID NO: 158984 - DNA, 297 bp, Zea Mays
ccctttcaacacgctccattcagcatagaatatcgctctatgctgatgatgtggtgatattcttgagaccggctgctagtgatctgtacttggtaaccaagatattggagttgtttggggacgcctcggggctaaaaaccaatgttcagaaaagcagtatggcccccattcactgctctccggttgacatggaaatggtcacccagatttttccttgcaaagttgaaacgttccctcttaaatatctcgggctacctctttctctcaggaagttaagcaaggagcagctgcagccac

SEQ ID NO: 158985 - DNA, 602 bp, Zea Mays
catgacagcaggcacatcagcacaaacttccatcgttccatcatctgccggctctgacaacagatctttagggaccatatcttcgagattctgatcaaaatttgccagatacaattcttgtagaccaacgagagcagacaaagctggagaaggaataccactactctccccactggctatatagcaccgactgttctttcgaattaaggggatttcttcctcctcctcatcttcatcaatattatagacagtacacccattggggtcagcatcatcaaggttacacccattggggtcagcatcatcaaggttacacccattggggtcagcatcatcaaggttacacccattggggtcagcatcgtcaaggtcacacccattgggttcagcattagtcgggtcacacccattgggttcagctttagtaaaagtcggtactggcacttccccggcagcaggagcagaagggccagcaccctgattcaagcatgacactcgccgaagccgtctctttttcttttccttccccttagcaagagaagttggatgattatttcggcgaggatgcttcgggcgaatactttcagatctttgaatgtcca

SEQ ID NO: 158986 - DNA, 650 bp, Zea Mays
ctgatagaaggtcctcagggatgatctcttgcagcgcttggtcataatcagatattgacaacccctggaggctgacaagagctaacaaggcttgtatgggaatgtcgctgaccctgtggtgacgactattcttatggatcagcggaatttcttcttcttcctcctcctcttcctcatcaggcgcaccgctagtaacctcaacatcatcacaacctctgacattgtcctcgaggatggtgctcgccggaccatcaccgagggatagtgtggagaggccagcatcctgctccaagcatgacaaccgccagagtcgccttttctttttcttctcctcggtaggtgcagctagatggttcactcggcgtgaacgcttgcggtgagcaccttctggtctggatttcctcgtcttcaccaaagtcttgctcaatcacaaatgctgttggctcagagcgggcagagtcagatgattctccggccagcaggctaagaacaacattcatctcagcatcattagtgctggatggcatctcaaagtgagtatgcttctcagcctcgaggagattttggaggggagcaattaaggcctcaatgtcatctgaggagggtcgcactctatggcccgggctgccatctcgaataggaggattgga

SEQ ID NO: 158987 - DNA, 385 bp, Zea Mays
tgtaactaaaatatatcgagggcctacgatcaaacttctctgccagaacttgtaatgggctgtataccaaatcaggtcttcggtgcacttgctgtaactgtgtttacacatgtgagtatgtgacaggaaactgacacaaaactattttttgttgaaagctgctaatgctcagtccttagtctacattcaaaaatggtaaataacattattaaaaccaattacttgtcatactaccttggtctagtttgatttacaagtgatgctcgaccaatttaaacaatacttgagtcagtgaactgtaagttccaaagaaaatttcgtagattaaaggtccaacatagtgtctactgtctattttttatcagtaagcggtccaaaacctacc

SEQ ID NO: 158988 - DNA, 335 bp, Zea Mays
acagcaggggaaaacccctattatgctagatatatattgtgtataaaaggaaagggataagataattgtaccgagaaaaaggagaaaatgaatgtgagaaagactaaacgggagaaatcatttacacaagaaagggagaccatctaccgttttcttttgtcctgtatgatatggagaatgatttccacattgagctctttttcctgacatgaaattgtgtttctgtcatggtcgggtggacgtactctaggcgtcaccagggccgtgacgtgcgccgcgccgcggaacgcgcgatggccgcgcacgaggacgcactgagcacgatcacctgcggt

SEQ ID NO: 158989 - DNA, 574 bp, Zea Mays
gtgagatggttttgtagggtcccccctcggccttatatacacgaccagagaattatcccattacaagttgtaatcactatctacttcacttatctcctttgtcgcagcttgcagtctgatatatctgaagtcttgatcatcttctcgtccgagttatcgcaagatgcatagctccttaggtccttacaactgcaccacccaagatatcagttcctcggtagcgcctaactcggacatcggtcttggtcttcttggatgaggctcgcctaacccggctataacttgccagcccatcccgtaggacgacccaatgggaggcccattaggcggcccgtgatacgttttagtgttcatgaggacccgggggatatctatcctccacaagccctgaggctcaagccaacttttgagagtagttggctcgagactctgaggaggaatgatgtcctttgtttcttccaagctttttgaaggcagttttgttccattcctatatctattgggggcaccataggtgcacccaatgggtgtagccctcgaactttgaattgatttgagtatcaatcaactcgaa

SEQ ID NO: 158990 - DNA, 695 bp, Zea Mays
cattgccagatccgcgccctcgcttggatctagaccgaggaggagtgtcttcattaatttctagggcgtcgtcgtctgagtcggactcaaccatagatggatttctatgacgcaccatccttaagattaaacagagaagaacacatggtgagagagatatttgatgtccaaggagtttaacgaacatgtttgaggaaagatacgtatgatattgagcatgcacttcaaccgttcatatgagcggtttagctacaatgaacaataccaacctacttaactcaaacaatgctcgagacaatgataacagtttaattgtgccatacacctaaactacacaatattcttgaaaggatactcaagataatcaagaacggtattggatcgagtcaaaaatagggaaaatgagacaatacctcgatctgtgaaatcgaccatgaaaatcccaatgaagagtggagagatgatggaggagcccgagggggtcaaatctccaacaatctccacaatgatttgatagtttgggagggatttggagtgtaggatgtgagagagggagagagaaaggtgagggcgtcggcggctgcaacaaatgagagagtgaagatagaaagtggggaggagaggagagaaaaggggcggcggcggctggtcaaactgaccaaaactggttcaaccggttcagaagccggttcaac

SEQ ID NO: 158991 - DNA, 702 bp, Zea Mays
ggctaacggcggcgcggatcaactccggcgtggaattacgcaagcacaaggacagtaacggatgaattaagggcatggaaggttgcttaccacaagcgcgaactcaagagcgcctggaggatggcagggaggcagggaagtcttgggttgacggcggcaggctccggctgcgcaagaagtgctccagtgagcgctgaccgggcaaaacagagagggaaagggcaaaccgaggggtgtcccgagtagccgacggcgaggcggaactcatcgaggcaacggacagggagcgggctcgacggcggtcgtagaacggacagcggtctctgatgagcggcggcggagcttgtctggttgcgtgcacagggcaagagagggggcgagagagtttggctaagggcgcaagtgagcgaggggaagtgggcgagcagcatgcggcttctaaaggggcgtgggcttgagaacgtggccggagaacgcgcggtcgtgggcgggaggttggggacggactaacgggtggggtccgtaggacagagagagcgggcgcgcgtgcaagaggaacgacgccgacagatcggccccacagagtagagagagagagagagagagggagagagggcgcacgggttggcgccgacaggcgggacccgcctatcaggcaccaagggcgcgcggacgcgggcgcacgcggggctaggcttaatg

SEQ ID NO: 158992 - DNA, 515 bp, Zea Mays
cctagatgcttactctggtttccatcagatccagatgtctagacaagataggaagcataccgcttttgtaacagtggatgggctttactgttatgttgtaatgccttacggtctgaaaaaaagccttaccaacatttgtatgggcgatgagtaagacttttggggacctgattagggacagggtagtggtgtacgttgatgacatcgtggccaagactaagagagggtcgaccctagtggaagacttaaccctggtcttcgacaagatgcgggcaacacgcacgaagctgaacccggacaagtgcatctttggtgtctccgcggggaagttgctgggattcctggtttcgcactagggcattgaagcaaacctagagaagatcaaggcaattgaggcaatgaggcctccggcccgcatcaaggacgtccagaagcttacgggggtcactgggtgcccttagccgcttcatctcaagactggctgagagggagctacccttcttcaggctattgcg

SEQ ID NO: 158993 - DNA, 736 bp, Zea Mays
tcaacgaacctatcttattccaataagatgaagtgacaaactaacaacacgtcttactctatctaacactaatgactaactgacacaaatggcaaagcatctaattatcacataggatacactttagaagttctctactcctttaaagcatgagtttccaccgttgcgtgcgtgaagagcgtagatttcgtctaacaaccagataagcttttgtgcatgtaatcagataagacaacaaaaatattataaacttacatgcatatgatcgtataagatagcattgtcgctgttttagaagccctccccacacctaatgtcgcttgtgtccttcttttcccttcccatggatgttagcgccatcctcgttctcgatcgtggttgtttgatcgtgtgccctaactgcgaggtctccggttctttgtggacaccctcctaacacttttgggacgtgtgaacccacaccagtttgtgcctcttggcttagcgagcagggtgattgttgccgtggacgagtgtggcgagatgtacctactcgagggcctttagatctatcaccttatctgcagcggcggcctcccaatcgatgtcatcatatagaagggcgtcccagttcccacccatggcgatggtgtcatggtccttgccatcttcaaaagctaaaccaccataaccagtggtcatggtgtggcagggcgatcatgcatggaagtctatggcaccaaacaacatcctcgcc

SEQ ID NO: 158994 - DNA, 847 bp, Zea Mays
tagcacaacaagtgcgcaaaatcgaagtcttcttcaaaagaccatccatgcaaaagtcgcctaagggtgcagccggactagcacaacaagcgcacaaaatcgaagtcttcttcaaaaagactatccgtgcaaaagtcgcctaagggtgtagccggactagcacaacaagtgcgcaaaatcgaagtcttcctaaaaagactatccgtgcaaaagtcgcctaagggtgcagccggactagctcaacaagcacgccaaaacgcaaagcgttacatccgtgcaaaagtctacaccaagaaactgtccgcgcacagaccaactacaaggcgcagccggaccaacgtatgaaatgtgatagaccaagcgcacaatgcccccatggacatagccagacacgcgaaggcgtacagcctcattatacaaaccatagttacacacgtacagcgagggcatcacaccttacattggttcagccttcggaatgattcccatctccctatagttaaatagcattatcctaagctcctcaccctcaaaaagacttcgcaactccccctcacctacactcgccccaaccggcgaggacatcaattcccgcttgccagccctgcccacacgaagccgaccgccttccacctaactcaccctacgcttcgccaccgcccttcgccgcctgcgcctagcactcggaccaggcaaaacttcagcatccgtaacacgcggagaagcctccgccgcagccacatccaaagccgcaaagtaatccaagtcctcatccgaagactcttccgtccactcaaccgaactcccagagtcaccaaaatcagaaaacttagaagcagactcatcc

SEQ ID NO: 158995 - DNA, 522 bp, Zea Mays
gagatgatgcgcgcgatgactgaagcttttaaaaaataccaggactctgcggcgacatcctatgagcagcttgatcgacgagttgcagaacttgttacacgcatggacgtactggaggatcgtcccccaccaccaactctagccccaactcactctcctgtggacgacgacgacgatgacgacgatgtttatgcaccgctgcgacaatgcctcgcaagtaatcgacaaggtatgggaggtaatggtagacgtcatcataatcctgaaccagaccatgatccatttgctaagattaagttctctattccaccattcatgggttcttatgatgctgaagcttacttagactgggagatgatggtagaacaaaaatttaattcccatcttgttcctgagcagcatagggttaggcaagccactagtgaatttagagattttgctatcatttggtggaatgaacttgttaacacacgtgctgcaccacaaacatggaatgcattaaaagaggagatgcgagctcgc

SEQ ID NO: 158996 - DNA, 349 bp, Zea Mays
ctttgacaagtttggtatacactgtaagctaaatggtaaaggtcgatcctgaataaacacatacttggggtttatgtagccgaactacactgaattccaccctttaacatgcttaccattatctacctccgatctaccagaagtgagaagagtagacaaataactatgaaatcccacatcaccatagagcttgaagctaaattagacattaacatgttcttggtccttggagccagaagagtcatatgtcttgaccactagactactagtgatgataatttgtgatagaaatatgaagatcttgtagagacctgttgtatcctctctactcctgatgatttcttcatat

SEQ ID NO: 158997 - DNA, 513 bp, Zea Mays
ttacagtcttacagacccaacgcaagtactcaaccctaactcccgtgctccatccttgtgccgcacttagtgctcctctcctgccctagcggtcgtgtgcatcccaccctggcggccgacaactcctctcccgtgctccatcccgccctggcgcatttcgctcctctctccgtgctccatccccgctcggccgctcctctcccgcgtgctcgccaacacaggctgctcttctcccgtctgctcgccagcaccagcacggcccatgctccatcctcttaaacgtcgagcccctgcgtgacgacgatggtagcataacgtaacgacggtagcacagtaccacggtagccccctgctcacatctatatatgcatttctttgttgacttactggagcatgaaggtatatgcatagcttttatgcaatctagcatctaaccaaacacgtgcctttaactataaattatttatttaacattattgaccccaaactaatccataactgggtggaaaccca

SEQ ID NO: 158998 - DNA, 434 bp, Zea Mays
ctaacaggtatcctaggacttatcgtagccgctcatcacggaatagatggctcacacccttccaccttcctctgtcatccatagacagcgacgcaccctagactctggtggtgccccactagagcagctcactccgatgctccgacgccccaaacgctcatccaaggagttctacatgatgcagggatatatccgaacctattgagggagggcttatcgaaatggcgtcgtcgtgaagatagtttacgacatggagaggatcttgtggcgctatttgacgctggtgagcaattccgcccgccatgcccactaatcttgcctggagaagccacaaacatgctccatgcaatctaaggaagctcctcgaccctctgtttaactgtggatgtcggcgcatgcacgagtcaacgacgatggcacaccctactctccat

SEQ ID NO: 158999 - DNA, 373 bp, Zea Mays
ccgtgttgcgtggctgggggtctctgctgcgccatagccggtatgtcctcctcccacgtgttagccattgattctgtgtaggttagcacccgattgcgttgagattggggcgttcgggcctaacatggggggatctgaccatggcgccgccgcgcccgtgcttacgttgtcgcgtcggatggctgggtggagaagaagcctcttcgtcgtccatcctgggatagacggttgtgataagaagtaggaatattgcttcgcaggaaagatcagggccgcgtattgagaatcgaacggtgtagattcgatcctgtggatcactatgcactttaaatcctggctgtcggacctaatctgaatggctctggatgcgtcc

SEQ ID NO: 159000 - DNA, 452 bp, Zea Mays
cagaaattcttctggcaaaacattgtttgccggttcggagtcccgtccgagctcacagttgacaatggcaagcaatttgacaaccaagacttcagggatttctgcttctccattagaaccaagcttgcctttgcctcagtgtaccacccacaatccaatggcgtcgtggagcgcgccaatggtaaaattttcacagccgttaagaagatgctcctcgacgacaagaagggcaagtgggtcgacctgttacctgtagtggtctgggcgctgaacacgactgagtgcagggcgactgggttcacccctttccgcctgctatatggatcggaggccatgaccccgcaagaaataaaacatgggtcaccacggactatcacttcagccgtccccgacgtagacgagcctacttcgaaggacctcatcgacggagatcgtgtcttcgccctacaggc

SEQ ID NO: 159001 - DNA, 381 bp, Zea Mays
gggagattctgtgatgcagtatctcaataaattcaatcacctctcccaatacgccattgatcaggtggacacatacttgaaaaaagaattgcttcatgaggggactaaatgaaagactccagcgcaagatggcaacgtgtctggacctcacatatagcagggctgttagtacagcactatcagttgaagccaaaaatgcgggacaagaaaagtaaaagggatatgcgggtgaaatatcaactcagggacctgaaaagaggacgaggttggtaatccgaactttcaattcaaatcgttcttctcctcgcccacccacatatcccttcagacaactcgtgttcattcgtctcactcctgcccccgccgcggccaatcagccga

SEQ ID NO: 159002 - DNA, 635 bp, Zea Mays
ggtcagacagcgattttattatgcctccatatgaagaaaagctgcctcgctcaaatggctccgctgctataggtagaaaattaaccgctaccgttcgaagtggtatttaatatcgggcgggaataggctacaacagtctaaaatcctgtatatatctgcgaacacaaggatcgatatgtctttgtggttcagattgatgatgagtgattgccaacttgaatagtgttatgatgtaagtcttggactaatcagagtatgggagcctgtatttgcaaccatatctgttggcttgtgggtgtggagtatggggacagtagtcgatggcgaaggtaaaggtcacgcggagcacgtgctgaagggctaggtgtggcggaggatgagcgttgggccttgattgagggactggagaagctggaggatcagatgtagtgactaccacttgggacatacaccgacgagtagatgtggtagagcggatcgtgtcaccggcgcgaccaaggactggcgggacacatgtccaagacgtgggggggcccgtatgaggtacactactcactacgtttttggtggttgagcctcaataccacgagcgcaacggagggctggattcaccgagtttgggcctcaaaactcag

SEQ ID NO: 159003 - DNA, 400 bp, Zea Mays
cctgcacccgcaaggcagcctcaccctccaccaccatggagaaaaagatccctgacttccttgaccggcgatcaggaagcaattgcgccaacaaggatagagagaacttcggggaactccccaagaacaccacctccttacccaacggcgcctgcaataacactgtcttccagaagcaggatataaccgcgcgatactgggataaccagtccatacccaagataacatcgaatgcccctaaggaaatcaccaccagattggccgaaaagacctcatcagcaagaatgacagaacatccctgacaaactgagcagctactaatggagccattagcagatctaaccaaaattgggtgacccagcctctgcaccgaaagaccagcccgcgacacaaaatcctc

SEQ ID NO: 159004 - DNA, 464 bp, Zea Mays
ttatcaagtgcaacgctctggacagcaaggccagagaaataatcagagtcagaaccaaccaaggagcaactctcagaccaaccagaggtttggtgggagttcacagaactgtcaatgtggcgccagtaacacgcaggccagaagcaacgcaccagtccaacccaatggctgtttcaagtgcggtgagctgggccactatgctaacaactgcccaaagcgcaaccaacagacaccccagaaaagcaataaccagagaaatgaccagaacacccccgctcgtggatctgcacaaaacaagactccgcagaactagagcagaggaagggtcaatcacgtcaccgcagaatcagtgcctgaggatgccgacatagtgtatggtatgttcctcgttaactccatacctgcatcagttttatttgactctggagcatcgcattcgtttataactgagtcatttgtggaaa

SEQ ID NO: 159005 - DNA, 304 bp, Zea Mays
caatcttttgcgtgggggagcaggttctttcgcttcagtagccgaagaggtctcaccgccaaattcagacactgtggccggttcaatgtagcgcggtcggtgagtaagaaccttcacctttttcctcttcggcgcggactcgcttggagcagctgaagcaacattcttcctagaagttgcaatttttctcttctgcccctgtggcgggtagcggtagtcagggtacataaatccaatagcatcaaaaactctatttagcctcttcttttttcggctcccgaaggccgcagatagtgtgttatct

SEQ ID NO: 159006 - DNA, 385 bp, Zea Mays
actttagtattctaaaactgtagtagttttcaaacactttatttccaaatagagcctaatcggtactaaatactagttagtggttgcaactgcacaggatcaaataatggagtactctgtgggagatgcatacttgcaggcaggcaggctgcttacttgcattgaatgggaggtgccaagaaatgattgcacttgcgcacaaaggaaacgagagattgatgagaagccgcacgagctagccaacaagcgctgagttggcgccggcgtgctcctcgcccaacacgaaaacgttgttgactgacttaatggctgagcacccgaccgacggcatctctagtgtgatagagataccggacacggccaacctggactacgacgaccaaac

SEQ ID NO: 159007 - DNA, 529 bp, Zea Mays
gtcgacaagcatataatcaggggcggagggcccaatatggctctgtattgctcgagcaataccttagcccaaccaataagggaccagccgacaaaaaaaatcctaaccctaactcatgttcgacactgttccacgcgaggaattgccctctgccaaacgaacagtgcctgccgccagcctccaagctccgtcgaccgtgccccaagctctaaccctctgcatctggatccggccagagctccgccatgcctccacccagcagcctaggccacatgcatgcatcgggctcctccccatcaccggtagccgcgcgcctgcaccgagcttctccctagtagccgtgccgaactcctcccttccctagcagccgcgtgcttgcaccgagctcctccccatccccgatagatcttccccggcagatgtgccgacgccgagctcctccccggtcatcgcgtcgagctaccgcctctacttaggccgagcttcaaccagccgcgagcatcgagctctaccgagacgtcgaggccta

SEQ ID NO: 159008 - DNA, 742 bp, Zea Mays
cgggtgttggtttttgtcggctcagaccgggcctgcctagcgtggcaacatttagttggcccatcccataggacgacctaggagagaacctgccaggcgacccatgacacgttttaatgttcatggggacctgggggatatccatctcccacacgagggaaccacggtggtcggcccccgtcattggccggacgacaatgggtgttggtagttttgtcgtgcgtccgcccagcgcccctatgtaaccgccatgtccgccatcgcaataattattgtctcttggttgtgtggcctcgaccatcctgggaaaggcttggctcaaacgatggttcctgaggagacaagttgaaccaaggcggggcgaacaccacaacacacatcgtggtactagtgggagtctccctagtgccctctgtgggcgaggagtggcccttcgatgagttggccatggggcattcctgggccaagttgtggatgcccatgcccattggggagctaagtccatcttccgaccttgagagggggaggtcacggaacgagccctggttcggatcgagcatccccatgatttccatgaagtcaggctgtagcgcgacttgccgcccatcacttcactgtgggatcgagccggaggccaccaaggccctcggtaatgtcgagtgaatcgttggtcaggggaactggggcttctgtggccttgaccatcattcccctgttgttgatgacgaagtcgaggtttccg

SEQ ID NO: 159009 - DNA, 372 bp, Zea Mays
taattccagcgaataagtgtactgcaggcacaatttaacaggagttcggggttcattttgtaaatccgaggtcttctctgtaatgatcttaacactgactcgggtggcgggttgatttgagaaaagccaagggggtctttagaataaatgtcaaggcgaaggggtatgatcaaatgagatccgtccgatccagcacgagcggtgcagattagattatgtacagaccgaagcggtacgcgaccgtagccacccgatctgggatctacggcccacaacacggcggcatctgatcctcttgtgatcgcattgacggctcggattcgatttcgcgaagggttatcctgggatttaatctgggtcgtccgagatttc

SEQ ID NO: 159010 - DNA, 558 bp, Zea Mays
ataaaattattagctttcttgacggtaatgtcagatataattcgattttcatggccgaagaagatgcgtctaaaacaacatttatatgtccaggcttcattgatttatttgagtgggttgtcatgacatttggtctgaaaaatgctggtgctacttatccgagggctatgaatttgatctttcacgagctgttgggaaacattgtggaagtctacattaatgatattatagtcaaatcggctgagtttagttctcatatagctgatttgcgcaaagcctttgataaaatgcgtcggtatggtctgaaaatgaacccacgtaaatgcgcttttggagtgtcggctggtaagttcttaggattcatcattcatgaacatggcatagagatagaccctgaccgaattaaatccattcggaatgtgggacctccgacttgtaatcttgaagtgcagaagttcctcggcaagataaattatttacggaggtttatttctaagctagacgggaagattgatggcttcactcctatccttcggcttaaaatgatgtcgaattcac

SEQ ID NO: 159011 - DNA, 766 bp, Zea Mays
cgagaggggggaatgagttacggcgacgatctaccgtggcaactgcaaagcgactgaactacgacggtggatggtcactacggctcataccgacgcgataaacttcctaaggcgtggctccctcatggtgaatggcgaacacaccggtgacagccgctcggccatgtcgccggtgtgcactaatgaaccatcatgcacacagtacttccaagctcatccgaggcaagatctttcaccccgtgatcgttatccgcatttaattcgggcgtgaatcgcgtcgatagcatgaatccgcgcgcgtggtcaccgacggtgaggcacatgaacatggcgatctgatcctaacactgtaccatcgcaaatactattcagttgatctgacaggacgatttgtagtgcttcgttctccaaattttgcataacaacttgatcttcgtctagcagggaaattgttgccctataatccctttctaactttgttatggtgtccaccagcaaatagccacagaatcttactcaaaaccgagctccaagttcatccaacttcactgctaatgagaattcagtcataaggtcgactgacagcccaactttgggttcaatttactccactttttgtataacaacaagacttaattaattaagcaaagttgtacacctaaagtagctctagacctttgatgtattaaccctaggcaaattctttgtacttttatatctacaaagctccaaagttagccatattcactgattttcagacttagcc

SEQ ID NO: 159012 - DNA, 1564 bp, Zea Mays
atgagttaatgattgctattcttgttctctgatgactataatctcatgtctctctcacctagttttagcaatacatatagcacttgtattattacagaaaagtgcaacattattgaaattgtcacatatcataccctttttaagtgtagctatcgtccaaaagaatttgggaccaacaacaaacaacgaactaaataatcgataacagtgcaaggaggtaagggtgttgtagcatccctagcctccacgctggattcgtccttactaaactaggtctatgaaccataatgtcaaacaaataaaagcataaattgaagaaggaagaggaatgatgaactaaacctaatatgaatcaacaaaaaaatactctccctattttaatttataagttattttcaatggaaagcatcaaattaacaaaagacaattgcatgaagaaacgtcaaagacatcagattatagccaatggggaacaagagcagcaaccattagttcatgtaagtaataaaatgacaataaataaaagtaaacttaaaaggtgtgcatgtacaaactaacgtgactatgtgagtatacaataaatcatcaacaactagatatggtagtgtcgggatctctaaatagtgtacatatttttcctaataatgataaactaactagttgtgcttcataacatatggatgttggtttagactaagattattattttgtaaaacaagtcacttatatattggtatcatgagctaactaaaaacaaaatagtcttcttttccattgatgcggtgggcctgacctgttctagtgctaatgttttatacatatttgcttgcaacttgacatatatggagtggttaataatggaaaacgaagatggaatcatgtacagaggagatcgatcgaatcgatggtgggtatatatcacaccttgttgtgcgagtgatagtcgtagagtagcgtcggcgtcaccgcctaaggactgagccctagggctaagggtgccgacgtgtcatcgaaaaccatcatcgcaagccccaggcctagcaataaggtcgtgccacacggtggggactactacgaggaggaagatgacgatagcgacttcaggtcccaactgctattggaaaacaactatacaatgttctcgtcaccgacgctactctacgactatcactcgcacaacagggtgtgatatatacccaccattgattcgatcgatctcctttatacatgattttatctttgtcttccattattaatcactcaatatatgccaagttgaaagcaaatatgtatagaacattagatttaggactggtcaggcctgtcgcatcaacgaaaaagaagatcgttttgtttcttagttagcttatggcacaactatataggtgatttattttatagaataacaatcctagtttaagtcatcatgcgtatgttataagcattagaagttagtttattattattagaaaaaacatgtacactagttgtagatcatgtcactaccatatctgattcttaatgaactactgtatactcatgcagtcatgtttgtttgtatatg

SEQ ID NO: 159013 - DNA, 751 bp, Zea Mays
ccttattatccggaaggcaacatagaaagtcgtcttcatcagtgccattaaacaccaaggatcctgggggatacgtcaaatccttggcataatgcatagcttcggcaatctgctcctctgatagttttttccctgccccgtgacgcactataaattccaatccctcagtagaagcttcagcatcagggaatttacactctttgctagtttttgtagcatttgaaggtcttgcatcgatattcatttcaacaacctccgtaagccccattcctgcgggaaccgagggcccaacttcagttccaacctgattcatgtcggcttcggcagtttccttcgtattcttttcacccatgttaggtacttctgcagaagcaggagtcagtacctttgtcgattccatgacaacatctaatatgttggccattcttctcctttttggagttactgcaggaatttctgacaccttcgacagctctgtctcttgcggcgggctcagaatcttcggttgctctgccgatttctttgattctggctcttcggccgtttttgctctagcttcggcaggacgcttcggcacttcggccgtcttggctttttgctgctccgttattaccttctgcttagacacattggccaacttcgccttagcttcagcaagagcggggcagtctgacccagaagcaaaagacccttcagcaggtttcggcacttcggttgtcttagtgcgcttggggcgatgcgttaaaacttt

SEQ ID NO: 159014 - DNA, 607 bp, Zea Mays
ctgtttcttccctgtgcgttcatggcaagtccccacatcgattccccatgtgatgtgttcctgtgcatccatgagtcaattgtggttctggctgtgctctccataagttgattccggatgcacatccacacctgccaggacccaaggtgaggattagtggacgactgctctgccgcgtctaaccacaaactccaccctgctcttcactggctcctagcttcacgctaccttcccaccaggctcagattgaaccatgtatgcctctgctcctcctgctctccctatgcgttgtttcttaacgaagttaagatgcttgcatgctagttgtttgcttaaattagcctaaaaggtgaatgatactgcttgagtgcttgtgctttgttttatacttgcttagtaaagtggtatgttggtcatgtgattttatatgctagtatggtattgatgctaagagttagcaacgttaaggtctgatatttttcagagttttttttagtaaaattacatgtttgtatggtatcacctaggcgagcatcttgcatcttatttgcctaggtggctcgaaggaggttgcttgccttgttgccttaaaaccatgctccgaata

SEQ ID NO: 159015 - DNA, 632 bp, Zea Mays
aacatacctctcggataaccatgcagtatgcataatttcctgacgctcgatgagcctcatctatcactaagcaaactatttgttgtaccatgcatataccttttaaaaccaaagtttataatgaaaaaatgtatataaataataaaagtaaaattgaagcatataacaaaagtatgaacataaaacaaaaaaaccaactatatagagttcttaaatgctgattttcaagtaagttcgtgttcagttatcattctaaaaatagtaaacggaccttcaactgatagcaagatggattagcaataacaaccaaagaatatatcacaacctctggacaatggaaacagcttgttttcttcttatttttgttgtctgagcgtcaagtttaattaactggaactagcaataaagatttccagaaacgtttacaaataatcaccagattgtatatcattctgaagaacttgtggagtgacaaagaacactctctttgacttccagtgaactgatcgaatagaagggcattgatctcctttcatatctattatccactcctgaaaatgcataactatgttagtttccagcatgcggcagagaaaaatgtgcagcgcattacagaaaaatgtacagcacaa

SEQ ID NO: 159016 - DNA, 406 bp, Zea Mays
ctgtgatgaagaaatagctttgacacatgcattgtattgtcaatttttttttcttttaactgaaactgataccaattgttgtcttcagttgagaaatttggatatatcagatttccactgataaagtaaaaggtctaaaaacataaaaggtactttgttctactttcacatacatacctaagtgtttaacagaaaagtatcctttcatgcattaccaaagtgagagaacagcaaattcatttttttagcctgtcatgtaagcatgactgtcccaatactacaaccatgcagtgcatgaaggtttcagatagctaattctgaggcagataagggtgtcggcaccactaattatgaaagttgctccatctttaatttactagttagttttacggtttttatatatcat

SEQ ID NO: 159017 - DNA, 453 bp, Zea Mays
caaaaccattgggcaaagaactgtccaaagaaagcagctcagaagtcgccagcagtcaatagcccagcaagacaaggagcgccacagcaagcaccaggaggtcgtggttaggcctacaaccatggaaaggtgaaccacctggaggccaaagcaatccaggatgctcaggacgtggcagtaggtatgtttccagtcgaatcctatccagcaaaagtattatttgatactggtgccacacattcttttgtttctacatcttgggtagaagcacataacatccctatagaaccaatgattccacctttaagagttaattcagttgggggaaaagttcagttcgataggatttgtccaaatctaaggattgaaataagggggatagacttcctcgctaacctagtagtaatgggaactgaagggttagatgtcatcctagggatgaattggctacac

SEQ ID NO: 159018 - DNA, 752 bp, Zea Mays
gacggtagacacgaatccactgcgccggaattctttttctcctccggtcgccagcgctgctcgaccgaattgatcaccaccactcaagtatcctataaattgaagcctcagcatgttccgctaggtaatcgtgcgtccagtgaaccaactcgtagctccgatcgttccccacagctccccaatttgggatttcccccaaattggttgaagaacgccgcgaaatcaagctcgccgtggccagcgctcctcgggtcagtatctatcaaattactccctgttctagcttgattgtagcctcctattgctctcagtgccaaccaattgaaattcggctgaagcctttcaccggaacacgcgcctgctctgtagaacgccgctatgccaccctcaccgtcgacccgctcttcggttcttattctgcccaaaccaatgtgtgtacataacccctggtgaacccgcgaacccttccccagcctcaatttggtcatccccgccgtcgtttggctggaacgcgttcatccctataaccatccgccctgtcaccgtggactgattgattcaatgcccccttgatgaaattgatggaggggaagtgtgcggtaggagtctaattcggtctctgtcgctcaggagctcctgccatggcggtatccggccggaacaggctcatcggagatcagccgagcactgtttgccgtcggggaccccatcctgcgaagaattagaagtacgaggacttttctacaaaccgt

SEQ ID NO: 159019 - DNA, 541 bp, Zea Mays
gtgctagtcttcttggataacatcttgatttatagtccaacgatggagcaacacattagccacctctagcaagtattttcccaactcagagcaccagttatatatgaaaaggagtaagtgtaccaatcctctttgcattatctcagccacatcatttcccaggagggggttgctactgatccttccaaaaccacagcgatgcgtgattggcccacccctgcaaatgctactaacctacgaggtttttaggactcactgggtactataggaaattcatcaagcattatggcatcattgctagaccaatcactaatctcctcctgaagcaatagttcctatggtctcctctggttgctcaggcttttatgcagttaaagcaaggcatggtcactaccctggtattggctattttagattttgcactacagttcattgtggaaatagatgcttgtgaaatgggcattagagcagtgtttattcaaaaagaccaacatgtttcttttctgagtaaagccttggggccgcaacactagaaattgtc

SEQ ID NO: 159020 - DNA, 514 bp, Zea Mays
ctcggggtggcttggcgcgacttctggcgggctggacgaccggtagcgtggccgcggacctcagtctagcatgggcggcgatggcagagcgcgagagagggcgagagtgtgcaaaatgaggcaggagagagagagcgggtgcgggcggggctaaaaatgagctggagcgcatgggcgagcaacgtgggtggtctccacgacgggtgcatggacgggaggttagggaaggagagtaggctgacaggtgggtcctcgagccagctagggcgaatacgcaaacagagagggagtgagcgagcgcgcgaagaaaccgataagttggccccactgggcagcgggagagtgagagggagagagcgcggacacgggccgtcactgacaagtgggacccacttgtcaggcaaagagtgcatgcgcgcgcggcctggctgggctgcgcttaacgggctgaattcgcttttcctttttctgggattttccaaatgcttttctttttattttgtctatggatttc

SEQ ID NO: 159021 - DNA, 689 bp, Zea Mays
caggggcaaaatgggaggaagtaactaatgcctgtaacgcttgggcgatctctgagaaccataatgtctgtagtccatacagtattgatatgtcacggctgcttcctcggtaacgcgcgagtcatgatgagtatagcgcatgcggcagtatggatgtgccgccagctaatggaatggacaggcacgctgcctatgggatggtctggtcgccgtctgccagcggagtggacggggctcattaaatgctgaggcgacacatcgcctgccagtggaatggacagggctcattaaatgccaagacggcacatcacctgcaagtggaatggataggcggcgcgccttatccacaataaatgtagaggccacgcggcccagaggccttacgtcaggctccgcccgttggcttacgtcacgtgtagtaggccacgtggcagcatcgggtctccacttgggcggggagcggaagagtattcgataaggtccggacacgtgtaggctccggacccctgcctgtccttgattaaggcctgggtattctctgtcccagaatctcgggaccccgctgtgagcggctcggaccccatacagaggggtccggatcccatccgagaggtccggcttgcccacgtggatgtcctggaccatacccggagtcctggatttgtatatgcaggggtccgacgctttcc

SEQ ID NO: 159022 - DNA, 829 bp, Zea Mays
gtgcattttatttgagatagaaagttcaaactcatttaaaagagaattcaattggaaataaaaacagaaaagaaaaagaataaagaaaaggaacattacctgcgcctgggccgaattccacctgtctcggcccattcttcccactgcgcccactttgtctgccccttcctctgcgtaatgtgccactggtgggcgggcccgggttgccagtcttccaactgcccagctcgtccgcgcggctccatcaccgtcaccgccagctgagccccgcctgtcagactcgtcttctccctcggaacaaccttgtgcgcgcccggtaacaacccacgcgtggtgcgcggaatccgtggctcttctccttttctgttccgcgtatgtgcatgggcgcgttgtcactgccagtggacctcctaccgtaataacagaatgccggagctctcggcagatccccctcgatccgaaaaccgcgccgggggtctcgggctacaccgccgccctcgtggctccgaccgggagcatataaaccggccccgcgacctcttgctcatcccatcggtgccccgcgatcgatgtcggggcatccatccctgagagcaccgccgtggacccagccacatccgccatcgacaaattccgggccctcgaccagcataagcctcgattgttggcttggggattcgccgtggcattcccatggtgcacgcgaccttcccacccttggaactagatcatgcgccgcccaatttctcattggagatcgcacggcgccgccgggaagcaccttgtcgtggccggagttctcggccacaccgagcgcttggtaagaacc

SEQ ID NO: 159023 - DNA, 982 bp, Zea Mays
actaaattttggagaccataccatctttcctttgtgctatctttttcagtcttccattttgacaaaccacacctttggatggcgtatggtatgaattggatatatgtgtatgtgcggttgggttttattggatcttgttgatatatataaataattattcataatggttggtattttccatatttgacctaaattgtgtgtggtacccctacttattaaaggtgttttcctataatagttgtcgcctaagtaattttccacaataatagaatgtacacttacataattaaggaaccatgtgcaaaacatctagattagttgtcatcctttattttaatgagttctctaaattaatgtggatggatcggtcacatgttagttcgataaaattacaaaacttgtaaattttttcaatgtctttttccaagctatatgaatcagtatataggattaacttgtttgtaaatcccttgtgcattgttactttctcaatatactcaagttcaccttaatttttctatgtgtgttctatttttagaaatgccttttctgtcttgtatttttgtggtcatgagaaaccttgtttatttgtgatgtatggacaatcttactaaagcatcagctctatatgtgttaattaataagctttaagaagttgggtatataatcttatgttaatactaggaaatgtcttacacatcactagctactttgcttttagaagatggtagagatagagaaaataacttggagtatggtatgaaaaagtccagcaaatttatacatgtaacactcaaatttgtcaactaaattaattacatgggttgacatgagtcctaatattggaggatgtatgtaacaacgttgaaaatcctagagccaaaaatatatacttacatttttttcctaaaccttacttggtaagtgagcatactaggaaccccaccctagatgcactagtttaaccctatttagatttgtg

SEQ ID NO: 159024 - DNA, 324 bp, Zea Mays
gctgaacctgctaaaaattcatctcctatcagtgcctcgtcaccagttgtggagtctcaccctcaatctattgttgaaggtcgagctagaaggaagatagttcggcccaaaagactgattcaagagtgcaatgttgcttttgctttggctgttgctgaagaggttgataatgttcaggaaccattgaattactcagaagctatattgtctactgatagtgagaagtggattggtgctatgcatgaagagatggagtctcttgagaagaatggcacttgggaacttgttcggctgcctcctggcaaaaaggcagttaagtgcaaa

SEQ ID NO: 159025 - DNA, 578 bp, Zea Mays
cggacctgctcgacatcggcgagctcgcgggcggcggcgtccgcgccaaggaggcggaggtgtgcccgcccgagtacgacaactacgtgccctgctactacaacatcacggacgccgtcgacgtctcggatctgggggccggcgtcgtcataagctacgaccgccagtgcacgcgcgacggcagggtcacttgcctcgtcgcgccgccgcggagctaccgggttcccgtgcgatggcccagcggcaagggcttcatctggaaggacaacgtgcggatcagcgggcaggagttctcgtccggaagcctgttcaagaggtgcgcgaacaaaacttgctccgtcgctaaaattccaggtggtgggtttggtgtactggttgtgaatttggtggttgctcattgataacaggatgatggtggaggaggaccagatctcgttcccgtcggacgcgcacatggccgacggtgtggaggattatgcccatcaaatcgctgagatgattgggttgcggaatgaattcaatttcaatgaggctggggtgagttattgccatatgttcagtttaacctatgctattac

SEQ ID NO: 159026 - DNA, 351 bp, Zea Mays
ttgcgaagcctgtagaaattttctccacgctcgggaaacccttcgcagttcacaaagctaatcgcccacatgtggcctctttagcgctggggcctggacattgtcgggccgctacccacggcccaagggaacctcaagttcaccttcgtcgtcgtcgagtatttcaccaagtggatcgagacaagagcagtatccacgataacgtcgaagactgcccagaaattcttctggcaaaacattgtttgccggttcggagtcccgtccgagctcacagttgacaatggcaaacaatttgacagccaagacttcagggacttctgcttctccattggcaccaagcttgccttcgcc

SEQ ID NO: 159027 - DNA, 686 bp, Zea Mays
agaatctcttcttttcttttccccaatattaacaactcttcttctctttctacaagatggagagcacctttgtccttaaaatatcctattgctcggaggtggaaggattcccttaccttcttcggagttgtgcgcttcaccttggagttcgcaagaaaccagagtatgtctggaaggaataccgtgaagatggagttgagaggtgctccatggtagtctacctaggagaaagccgaagctacccaaaccacccacctttctagatcaccgctactggctaccgcttcccagaaacatgccaaaatgcttccctaaaagccctccaccaactatgccaaaactacagcaaagaagtcgtcgagacaccccttcgctactttccaccctgcaacaaaaataacctgcttggaggaaatgactccaagctttgttaggaagagagcataatgaggatgatcccactgtaatctacatggccagatatctccacacccttgacacccactttgatgaccttttctcccattacacccacctaaactctcgggtggaaagcttagagcagcggatcaaggaattgaaggaagaaaatgcagccctccaaaatagtcttgagttggcaaaaggcgaggaagccaacactcgtgagtcatacaggaccctgaagatggactatgccacgaaac

SEQ ID NO: 159028 - DNA, 433 bp, Zea Mays
ctcacctgaacaccctcgggggctgggtggtagcttgcgctacccaccagagccggatcactaccggcaacaccctcgggggctaggttgcagcttgcgctacccaccagagccggatcactaccggcaacaccctcgggggctaggttttctgcagcagccgcctctaaggctgaaggctcccctgtcatctccatgggagtcgggtaactcggaccaacgtcttggcattgaagactgccttccaaagtcgacgatgcacgagacactgctcgggatacctccaatcccacgtctggaatttctgaacaaacagccatcacatcatcagcagttggctccgatagcatatccttagggatgacctcctcaagggcctgatcaaaatccgatattgacagtccttgaaggctgacaagagctgacaaagctg

SEQ ID NO: 159029 - DNA, 933 bp, Zea Mays
gcagatcggcgcttaccaatgcttgaagaagttaatgaatcaagatcattagagccagcagcatcacttaccggcccgacaggtgccccctcagggtcgatggcagtatgactgctaccgacaccgaacaaggcagcaacaacatctcccatgtcgtcgacgtcatcggtaagctaccctaactcaacgagctcgtcgttgatggttctagggtaccgaccgttgtcgtcgtcgtcatccataacccccttctcggcactgtacctcaacggccctggcggcactagcacgactacaacgtagtcggctggcgacctaccaaagcccacaagcaagcagcgaagaggagattaggttagggttagggatttgccgactggggagggagagccggagagggacatacctgccaagtcggagcccagagccggagacgagggtcaagtgcatgacgacgcaggagggagagccggagaagaggagattagggttagggttagggattgggattgccgactggggagggagagccagagagggacgtatctgccaagccgtagcctggagccggaaacaagggtcaaccggtcaagtgcacgacgacgtgggagggagagccggagaagaggagattagggttagggatatctagattggggagggaccgagggagagacggagaggggcgagccgcacggaaggagagtaggagacccatcgatgtcgccggtgaagaagatctagcagtggcgacggcgacggtgacgaagcatcgggcggagcgaatcgagtgaggagagcgccagagtggagagccggagagggagagccggagtgggaagggcgggaggccggatgcccggtcttatgcccccgctccccgacaccgggccggccccgtgcctaccgttttctggtgggccgggccatgcc

SEQ ID NO: 159030 - DNA, 521 bp, Zea Mays
atattctatgttgctttttcatcgttgacatggaccaacatgaactgttatctttttcttttcttttagcgtttcgttgctggctactgtgttgccattttccttcttaccttcatcaaaaaattgactgcatcgacgatacagttccgcgacacaaagacaactacctaaccatctgtgcttgattaccttttacagaacaaaaggatccatttctaccgttgcagaacgacattgctggttctgttgccttcgcctacaactgatactttcaacatctttgtgtaatatgctactaatgcatttcgtatgatgacatgtatgcattctacaatgctacattgattatattatccgtacacttaaaataaatcatatgtatatatttatgtttattatcgcatatcacatacgaatttgatatcacgcccagggcgtgcggcatccactagtaagaaagataggaatgctataggcagtcatccaagtaatctacgattactgaagctggctcgtgttat

SEQ ID NO: 159031 - DNA, 533 bp, Zea Mays
ccagtgacgggcacatccagatccaggtcagccagcccgtggaccctgctgaccctgagtcgccgatgctcagcgtcaacgccagccccacgcactgctgcattagcctgaccgacaccttctacggcggcgggggccaagatcaaacgaatgtcacctcggcggagcagagcagcatcttgcagtaccgcctcgctcgctcggccatcaccgcctcgccaggcacgcttcacctggcacgagtcgacggcgggggacagggggactattgggcgtgcgcggacgttcggccggacgtcgctaacaagggcatcctcggggtgctggagacgaccaatgcacgtctcgatgcggcgatccagttggaagccacgctgctcagtgtggcgaagaaaagcggctactggagccctaaggtcagggagatcgccgaggtgcacgtggcgttagtgaagatgagagcggcgaccgacatcgacgcgatcatgcgccaccgtcggtgcctccagaatcgccgcctcctcatccaagag

SEQ ID NO: 159032 - DNA, 847 bp, Zea Mays
attttccaattacagagtacaacgttgatccgatagcttttgaggtcttgctaagggtaaaactttctaagatgctctatgttccatgagttccccacttccataccatccatttgagtaagccgatatgatcctggccgagtgacctccgacacaatgaatggcccttcccatagtggtgacaacttgtgccgtccttccccgttagaatttggcgaaggaccaagtctcccactacaaaggatcaatgtcgtatagccttatcatgataacgcctcaaggtctactggtatctggctgactgaattactgtgttcaatcgctcttcctccagcacatcaatatcctctagcctggtagcttctgctttagctatgctttcgaataccagccttggtgccccaaacctgaggtcggcaggtagtactgcctcagaaccatagaccatgaagaagggggtgtttccatgcagagctcgactgggttcagttcttaagctccaaaccacataaggtaactctctaatccactttcctgcgaacttttcattcttgtcgaacactttcttcctgagtgcttccagtatcataccattagccctttccacctggccattagctcttgggtgtgctactgatgcatacttgatctggatgctccgttgttcgcagaaatcaaagaattcagagctagtgaagttggatcccaggtcagttatgatgctatttggtatcccaaacctgaatattatgtcttgtatgaattccactgccttggctgaagttagagaagcaatgggtttgtactctatccatttggtgaatttatcgatggcgaccagcacgtg

SEQ ID NO: 159033 - DNA, 662 bp, Zea Mays
gtcgaggccccagagctacgtccaccggatcaggatcccgcgggagcgagtggcgcggcggtggcgacgacgttgggggaggggcggtggaggcaaagggaggaggggaggcggagagaggtcgcgtcggcggtggagggtgatcccgcatggggagagaacgcacggggagtgtggggatggttgcgcacggaggtggggcggttgtgcacggggagtgtggggatggttgcgcacgcacggggaggccgacgcacgaagtgaacgctgggccacacgctgggctggcaatggatactgggccgaggagaggcgctggcaatggatactgggccgcactttgaagaggaggggcgctgggccgcacgaacgctaggacatatgcgctggtatggaatttatttgattagtaccatatcggccactgagagaggcggaacgtggcttataagcgttgttgtggatcatctgttgcttactctaactcctccaactctggtgccacaccaacgtatgttttttgcgcagggctgaatttggagggtgtgtacggcctatggggcccacatgtaggaggcgtatagacagaacaggtcccacggttcagaggcagaacggccgttggcagaacatgtcagaggcagaacggcagactactattg

SEQ ID NO: 159034 - DNA, 782 bp, Zea Mays
ctgggcggcagcatcagctcgtgggtggtgcgagtctggagatgcttcgtgggaggaaaacggaatatcttgacatcccacccaaggatagcattaaaggatcgcttagagtggttcattgtggaaaaccatggcaagtctctccccctcggtcagggagacagtcggatgttcgcgctcctagttggattgagtctcccacagacttggagatagaagaggccaaagttatacttgcttaaatttgcttgttgaaggagtgaggtctgaccgctgaagctgtggttgcagactttgttttcaagaatattcagccactgaaggatagggcatacccagcttatttgtatagtggtgtcaccgattcaacccgggttaccaacaagagcattcctgctgtggatttggtgagtcgactggaaatgatccttataggcaaggtgtcgaaaattggtgctcctgttgcatattctgcctggaatctgccgccttccaagtccttttttgattatgtgtcaaatcctcctgctagtgacagtggtttgggtcttagagtgtgaccctctcttgaagaagttgaggttctggttgcttcacttggagatcttcccaatgatgagaggcaagttcactttgagatgcctatgagtcctagtgatgcagagataagcgctatgctggacatgttggctggggattcttctgactcggtcgctgctgaaacaatggctattgcaactatcctagagcctgagaaatccgtggatactcgaaggcctgag

SEQ ID NO: 159035 - DNA, 604 bp, Zea Mays
tccatatgaattacactaatggcttcaattcacatcttcaaatgttgttgtcttcaatgcaatataaccctttgtagcttgattacctttgacccttgcagtgatctcttcttcaccttggctttaggtaccttagtcctcttgactttctcccttgcttagtccatcgaagtcttcattgcctttgtccttggatcacaaaattgactctaagtcatgtccattgattcccgacttatcattgtccatccatcatctttacaaccttcttgtcttgtgatatccataatccataatccataacaaaaggtactagggcattacaaaggctcaatgctaggacacatccaggcaatcccgcgatcgtggtgacccatggtcgcgccctaactagggggaaccattgattatatcctccagtagaaggatgtcaaccatggcctcgacagccatgccaaaatcttcctccatatcctccagagtgccaccagccatgtcctctgataagtcaccgatgccgagctcatagcccgatcagaactaaacgaaggctagagtgctaatagcaccacgacaagtgccacaacgaatagcatggcaaacc

SEQ ID NO: 159036 - DNA, 989 bp, Zea Mays
acgatttgcaaaagagacccccggcttctatttcttcacagaggaaggtccccgacggcggtgagcgcggggaggctccgacgagctcctgcaccgaccgaatggggcaacgactagggttcccgagcggcggacaccaaatcggacctaccccgagcatttcccctaacttaattgtgcaaatggtggcctattctatcctgcccacgagaaccgcgaaggccatgagcatttgatcgcgttcccgatgattggtggtctctcagttcgaattggtgactcggtaagcatcacagagctatgagagtgctcaaacgagggagagagagggatgagctgaccggattggggctggccacggtgaagctgttcttcgcggtggcggcgacaaatttgggggaagtttgaaattggtgaactctggaggatgattgagggtgggagtgggggctctggtttcgcgatgaggtaacgcagctgcccggaccataaatttatagagggcttcgacggtggcgctcaatttggccgggcagagctggcggccggagataaaaaaaggaccctggcgccgtgggttcgtgtcctcagtcgtggcgagctcaccggcgatgatttaacggctgtaaagagtcacgatgacgcgacagaggtgctcggatacgtggcgtaaagccgagcgacggtgatccccggtgggcttatctgttcaagccgcacggcagaggggaagtactggggggttcaccggagtgccgtccagcgcatggctttaccgagcagtcttatctggtcaccggcgacatgaatcgcaatggcggcggcgtgaatctttgcgcagaggagtcgctggcggtgaggatccaacgctggcagtctgatccttatcggactactgtaccatcgaagtaggattcagttggcctgacagtcaatgtttaggcttgatttgctcacaaatccctatggtaacatactctatgctctgt

SEQ ID NO: 159037 - DNA, 626 bp, Zea Mays
gaaatcaccaacgagttaaacaaacttcacctcacaccaagggtccttcaaatgattgaagggaatgcaatttggggtgtgagaggtgaattgaatgctcttgtttgagtgtaggtcagccaagaattcatggatgggcagaagtgaatgaagagagagagagagtaaaggggtatataaagaagcccccaaaagctagtggccgttggacctttttgaccaaaaatcggttgagccggtcctaaaaccggctgagccggtttctgccagaaggtttttcggttcagtgactcgctcagttgaaggatcgaagtcaaaaccttctgatagagcagaaaagtggaacagtccaaaaaccggctgagatggtttggaaaactggttgagctggttttcaaaaactggttgagctagttttaaaactggctgagcgagttttaaaactggctgagctagtttttaggaaactgaacaaaaactcggggaagtctgactggagaattaaagcagtttttccaagagcattcatgatcaaaatcaaggttttcttagaggattttgaagagaattagactgagctcatcacaacaacttactcaaattttgcggatccctcttaattgaat

SEQ ID NO: 159038 - DNA, 501 bp, Zea Mays
gttttttcttctgcatatgcttccaacactctgctttagaaattccaccacttggtgctattggtacattgttatcagcaggtccatctgctacatccccatgaccatgaacaggctccatatcagtagttggggttgagacattgccaaccaatacaacatcttcaaacaactcatgttcaccatctatatcacgatcatccatgccaaaatctcccatgcttggggatagttggcgagggtcgatgtaggcatcatcacgactaggatttggttgaatggacctggattctgcacaacgtttccttgctgctggttttttctttcttatcatactgtatggtgctcagatcagggtgatttggctcggagttgggctctggttttaggtgttgtgggataaataaatgctgaatttatatgaactttgggcaccaactagctacagttcgatgaatgtatttatatccaatagataacatcatttaattatagcatcaa

SEQ ID NO: 159039 - DNA, 588 bp, Zea Mays
gggaaaagttcagtccgataggatttgtccgaatctaaggattgaaataagggggatagacttccccactagcctagtagtaatgggaactcaagggttagatgtcatcctagggatgaattggctacacagaaatcaagccactgtcagttgtgacaagagaacagttaagttggtgtccccatccggaaaggaagtagtaaccaagctatacttactgaactagaagaaggagcctgtcaccatttatcagtagatgacaaggagtccaatccaattgaggcaattaggattgtgtcagaattacccgatgtatttcctgaggagctaccaggcatgccacctgaaagaaaagttgaatttgccatagagcttatcccaggcacttcccctatttccaagagagcctatcgagtgtccggaccagtgttggtggaactcaagaagcaaattgatgagttattagagaaaggctacatcagaccaagtacctcaccttgggcagccccagtgttatttgtggagaataaggatggtacgaagaggatgtgcatcgattacagagctttgaatgaagtcactgttaag

SEQ ID NO: 159040 - DNA, 686 bp, Zea Mays
ggaccatctgtgtctatgacttgtaggcctaatggtaaaccagataagcccacaactaagagtgacaaaatagcaaatggctcaagcaactcataggtaggattaggtaaaaaaatctgagaccaaacattgaacccgatcggaccgagaccgaacccgattagactaaaatatctgttatcgatttcacattaggttcctagttgctacaaaccaatatttgtttcagttcttcggttatagacatcagttacctgattaaactgaacaatccaacattcaacctagtcggcccaatgcaccggcaccgaacagacggtaaacggtaaccctagattctcaacccaatccactgtctagtctctagccccaaggagtggcggcgagccagtgacgcaccgcactaccaagtcgtacatcacgccggcacccggcaagctacagactgttgtccgctagggcgctagatgtcgtcattcaccgaaggttgtccctccctcgttgtcgctggctcactgcatctgcagctcgtgacgcgccgacgcctcccgtgaacttcaacgaccgttggtcacctcgtctgtttccggtgcccccaagtctccaacaccaagtggccaaaccccactgcttgtcgtgctcccctcaccaatgatcaaatgtcccagcccacaacagaatatttt

SEQ ID NO: 159041 - DNA, 382 bp, Zea Mays
ctaatttctataattatttctctatttttaatcccttctggactgggcctcgaattccagaaaaatcaggggctagcgcgtaagttttcccgagactcagaacacagtgaacgtggacggcgggtttattatgtgaaaacagagggtctctttatgaagtttgccacgcgaaggggtatccgggaatccagaccgtccgatctctgcccatcggcccagattatgtctacgcagcaaataacgtataactattttcgaccgccagatctaacatccacggtcggaattagaaacgtgaaggggtatgcacggacgcgatcccaaacgttcaactagcatcggacgttcggggcttaagggtttccagatctaatcttgaccg

SEQ ID NO: 159042 - DNA, 1273 bp, Zea Mays
gggtggccgagcaaacctagaatgtacaaggcctttaggcccaaaaaacaggtgtcactgatttatggtagatcctagacgtcatcttgttacgatgtttctgattagctccgggagtattttgatgtggggcagttgggttgaaaatcttatcttcttagctttccaacggtatctagaatgtcgaaaacagaatctgtatgtgtttgggcattcgttttcgcgataaccactcctgcagtacgaacaagatccacgaataaatttgacttcgacttcccttaagcttggaactctatcactggttgggccttgaccatgtagtttacttctatgtactcataaagtaccttgtttctcaattatcgtatagtagggggtacaagcgggtgagagagggatgagctcccaagtctcttatgcatgggtggacctaaagactacgggactgtagtcctgtctaagccttggacatcgtggtggctcatgcctgggctctgacctccgggtcttctggtcttgtcaagcgtgtgtcttctgtcttctgccttccatttggcccctcattgttgcggtcgacatcctccttttataggccagggaggggatcggccatcggtaacttcctcgagaaggagctattatgcccgggtaaaactaagcattttacctaggtgatgttgcgttggtcgtatgcgtcttggttgcccggtcatatatgatcgtgcttatttatgatgggtggcgtgggggtgaagagtctttggttccatcattgtcgtcctagcgttgtatcgacccctagctaccatagcctgggtctcagcatagctcgtcgtgttgcggagtctgtaggcggtcagcactgaggcgtaggcttgatcggctatgagtgggtcgcgatcctaggagcctgtaggttatgagtggaacatggactgattcgccctctatggctcagcgctaggtgcagttaatgtggcacagtgggttagtcctattaggcgcagtcgcgcagaatccacttgtcacagggcaacccctgccccctttgatcgtgaggcattgccctctatggattcatcgtgttcgggcctgatggcccctcttcccctcccctaggaataccgggagtgccacgatgcctttcatgcggcgtaagaggatgtcaaggccgaggccaatgtctgacggtcgtgtggctggtaggttgctgtcctattgcctttccattcctcgttgcgcttttcactcctttcctgtcttcccctcc

SEQ ID NO: 159043 - DNA, 350 bp, Zea Mays
gtcgacttcgtgtgggcagggctagcaagcaggaattgttatcctcgacggttggggcgagtgtaggtgagggggagttgcgaagtctttttgagggtgaggagcttaggataatgctatttaactatagggagatgggaatcattccgaaggttgaaccaatgtaaggtgtgatgccctcgctgtatgtgtgtaacttatagtttgtgtgatgaggctgtgcgccttcgcccatccggctatgtccataggggcgttgcgcacttggtctagcacatttgttatgtcggtccggctgcgcctgtagtcggtctttgcgcggacagtttcttggtgtagacttttgcacg

SEQ ID NO: 159044 - DNA, 453 bp, Zea Mays
ctgggagtggagaatctggggttgccggctatggcgccgccgtccctgctcgggcgccaccgtgcgtggccggggcgagagatgggaacgttttagccgttgatctgtggagatgagtctgggattagaattacatacacgttcaactaggttagatctaggctgtcgattgggtgatgtgcgagtgagattagactcagtttatttaaaatcgcgtccgtcgatctctgatcggatggcaggcgtgtcgtaccggttcgcttgtcacgtgacctaatatgggtcgcagattgtcgatccaacggcggtgatgcgatgataccctttggcggtggtagtttcgtaaaagagaccctgaggaattagctaataaacccgaggtccacgcaaagtatagaactattagaaatcagtccttttgtttgcaaatgaaccccatgcctttctagaaat

SEQ ID NO: 159045 - DNA, 477 bp, Zea Mays
cggggctggtagtgccggaggatgtttctgacgaaggtgcacctgccactgaagctgagcaggttgatgctgaggaaggtgagtctgaagatgattacagtgccctgccatctaaacccagccacctagagtttgggtggtccactgttactgaagatgatatgcctaagttgatgaagttaggctatttcagtgaagccaaaaagaagctgattcgctttggcggagaggaaattactctgaaaccagaaaaggatgaggtggtagtctttaaaagcttctttaaagcaggattaagatttcctttgaatgagatgactgcggatgttttggagaagtttgggatttatcttcatcaactaactcctaacaccatcgttaggcttagcgtctacatctgggctctccgaagccaggggcagaaccgcttgccgaaggcttctgccgggcacatgagcttcattatcagacaaaagc

SEQ ID NO: 159046 - DNA, 546 bp, Zea Mays
gtggtcaaatcgctccttactaatatggtcacaatagccatatttttcggaagagatctaaggaacttgtgagtgaaatccacatcttgtacattaaaaccaagtcccgtgagctcattcactatctaatttaagcggttaaacatgttagacacattttcatcttccttcatgaggaattgctcaaactttcctttgcatacatacaactttgcactcttcacaattgtagttccttcatgaatttccattagctttgtccaaatctcatgagcggttgtgagatttttgatgcgatcgaactcatttatgtctaattcatcatataatacattcatagcttgataattggttagaacattctcattatcactgagtgacggttcatcttcctttaatacaataaatccatctctaacaataggccaaatctttcctcccatagctttaagatgcattgacattcttattttccaatagtcataattgttcccatcaaaatgcgaccgttttccaatgtgcacattgttgttactagccattttg

SEQ ID NO: 159047 - DNA, 900 bp, Zea Mays
ccaccgcgaggctgatgaacatccttgaagccaagcaccggtggaagagcgccgctcccacaaggccacgcaccgccagcggaggaaagacaagactggcagcaccaacccgctagggaggacaaaaggcatgaactctctggcgacaagttcgccggggaggatggcgccggcacaaatccttctgctgaacgccggcgcatcccatccaagtaggtggcacaccatgtcaagcacccgctcagtctgggcatgctcgagatgaacttacaaggccatggtaaactatggcgacacaaagcagaaaccttgaaggcaaaggggcgcagagagctcaaaggcgaaagggcaccgtgagtgggaaagaagcaagacatggctgctactcgagggatgaacccctttttaaaggcagatttccccgctcgcgccctgaagtgtcacatgcaaagtctcccccgatgcgcaccagggttcccttcctatgacacgggggccaggcctcacatgtcatacaattggcccgaagcgcgaagaaggcgaatcgacgcacaaggagcatgtcactgccccgcggtagtgcgccccttcatcttcgctacgaccaacggtcaagaaggcgaaccaccgcacaaggagcgtgctaccgccccgcggtagagcgccccctcgtctttgctgcaaccagcagtccaacctctggttgggggcctaggcccacatgtcatgacctggcacaccggtttctgtgtgtggagaaggcaaaccgacgcgtgaagaacgcatcaccgcctgcggtagtgcgcctcttcgcccccgccgaaaccaacagcccagtctctggcacgggggtcttggcccacgagtcatcctccttgggcactggtacctgtgtacaga

SEQ ID NO: 159048 - DNA, 393 bp, Zea Mays
gttgttgatgaggatgatgaagaagaggacgaaatccctctgatttggaagaacaaccggcgttacatagctagtggggaaagtagtggtgttccttctcctgccttgtctgccctcattggtctgcaagaattatctctggcgaactttgatcaaactcttgaagacatggtttcataagatctgttatcagaaccggcagatggtggcgtgatggatgtttgtgctggtgtgctcgatgccgggttggggtcatcccgggcagcgtctcgcgcctcatcgaccttggagcgcggtcttgagggtcaggaagctggtttggattgccctgctcccatggaagtgactgagggaccttcagccttagaggtggctgctgcagagaactcggcc

SEQ ID NO: 159049 - DNA, 497 bp, Zea Mays
tggaactgtgtcctcaggagttgggcgatagaaaccaaactccagtctggaggcctcgagggtggtatggaactgaggaggccggatcagctgagcaaatatgtggcataagtagtgagcgtacgacagctgatgccaagcacggagaccatgcaaaattgtgtcctcaatctcacaaaatcaggaaatcaaccacgtcaaactcagagtgtgaaatcaaggcaccgagtagccagagctagatatgtgtggtggcctctatgtatcacatcctaagttgcaaagtgcgcctcatgagctcatatagaaacttggctgctgaagtgaagtcggctggagaacaccgctacccgtctatgaacggaggtcgaaacagcacagcgacgtggacagtagcaggggcaactccgacgtgagtgcgacgaggaggatctgacgtgccatagcacaaactgtggagcctcattgacgactcaggaagtccaaacagctctctg

SEQ ID NO: 159050 - DNA, 500 bp, Zea Mays
ttgtaggttaactgagtcgatttcatagacagagttacttactccaattgacagaaatggatatgcaacaaacaaggggttctcatggtgaactaaacggtaattggtacttagttgatcgcataggaaaatgaacattcgtttgtgtaccagcaacattgagcaaacaacatacaaacaacatgagtgcaaattaattcacatgcgacactttggtggatacacaaaattgagcagacgacgatgaggaatacggaaatcagacaagagtactcatgttgtatactatgatggaaaactaaaactaggttacatggtctacatgataacgacggattatttaaccttaatagtctaacaatagcggattcagacaaccgaggtaacgttaaccctaactgtcacaacaaagccatgaacaaataaatggatctagttaaataagtgaaagtacatctaaaccctagtgcttatccaaggtaggttcttgtgggacacgg

SEQ ID NO: 159051 - DNA, 781 bp, Zea Mays
taggcatgcctgcttagattgcaaggttatacctggagagtgtgtggtagcccaacgtaagcttgtcgtagctgacttccgttttaagatttgtttacaacagaataagcataacaaggtcactagaacaaagtggtagaagcttaaaggggatgtggcccaaactttcaaggagagagttatcgaggagggcccttgggcagaagagggagacgcaaacatcatgtggaggaagatggcgacatgcatccaaaagatagcttcagaagagtttgggttgagtcaaggaaacagaagggaagttaaagacacttggtggtggaacgaagatgtccaaaaggctatcaacgagaagaaagattgctacaaacgcttacatcatgacaagtgtgcagacaacatagagaagtacaggatagcgaagatgtctgcaaagcgagcggttattagagcccggggtcaggcctatgacgacctttatcaacggttggacataaagcagggagaaaaggatatatataggatggccaagattcgtgaaaggaagacaaggtatgtcaaccaagtcaaatgcatcaaggatgaagcaaaccaactattagtgaagcatgaagagatcaagaccagatggaaggagtacttcaacaaattgttcaatggagggaatgagagttctacaatagaattggacgaaccattcaatgacaacgacaagggttttctacgaaggatacaagaatatgaagttaaggaggcgctaaaaaggatgaaggtaggaaag

SEQ ID NO: 159052 - DNA, 686 bp, Zea Mays
atgaaatcgtctcgagaacggtcaccgacaagttagctctgggccaagtcaagcttcagcattcagcgttaaatcaagacactgggatcagcatttgtttcagcttttgttttcaagtgttcctttcgttgagatgagaccagctaacatttcacttcatatttcaggctcgttggttcaggtagacccacttcagttcctcacagctcaactgcttcactcttcctccggacgtccttggtcacaaatcaggaacacatatgacacaactactgcactcattcattaatgccttgggatgcatatataaaaccattgtctcgccaatcgtttaacttacccagaaacacaaagaaaaatatacacagctgatcgatcgagcagcagaaacctgcacgtccaaccaaccaaaacccaagatgtcgagcttcttcccatttccgtccgcccctctcgccgttcttctcatcgtcacgctccacgcctccgccatccatgcgcagatacctgcctcggcaacgaccggcgccgcggtggccgccacaaacccgcagccaggaggcagtggcactggcggcggcgtagtgggcgcgggcgggccggacgcgcctctggaactctacatgcacgacatcctgggcgggtcgagcccgacggcgcggcccatcaccggtttgctgggcaac

SEQ ID NO: 159053 - DNA, 377 bp, Zea Mays
gcttgtgttagctagctgtgcgagccacaatgggctcctcgaaatgtcaatgtgccgtgggctgcggccacagacaactcatcgatgacacgcatgcatggctgcgtcgtgcgtggacgcgtgcacgtgtacaccatctgccatatacgcaccggactagctgtaccgcacatccagtgtttccatccaaggctggagtacgcaatacacacataaacatccacacgttcatgacgcgtacgccagccaaaaaaagcaccatcatcgcaaagcaaagcactgcacgtactactgagcggtgacagcacagatcgatgcatggatcgaagcggccagcgtcgtcccactcccagtcccagcacactactagcgctagt

SEQ ID NO: 159054 - DNA, 627 bp, Zea Mays
acgtggctgctgttgtgcccatccctctcggcgtaattaatctctcctgtaggttcaccgtcgttcacttaccgcgaatcgactagtcgggggaaaaaattagggaaccgtggtgctgggccgtagaccagccatggcgccgcctcacccagggggggggccgacatcaccaccgtgccagtacctgagaaatttcccccttgagttcgctggggtctccatgcgatgttgcacttacgcgcgtgtcgggcaggacctgggccatcgagttcggcgtaggggatggccctcggggcgcagcgtcgtctccgccgtgatcggggcgcctctgctcggctgctggcaggaggttaggggagctccccctggcgttggacttttatccgacggtggggttagataggcgcgcagcagttcgctagggcgcgatctgaccgtagatcttggaataaacgatcggggtttgatccgtggctcggatactcggggccgtggatttccaatcccacgggtatgattagataccggttcaggtaacactaatctaatctgcgccattcctgcttgatcggacggcccacctcggccgttaacacttcataccccttcgctgaggcagtttagcat

SEQ ID NO: 159055 - DNA, 474 bp, Zea Mays
gaaacggggaggggctaaatctcgaatcagcgagagaaagacaatggcagtgaagaagaggatccaaccttgatgtcgcggttccttcaatggacggaggagggctgaagcgcacacctggtggtgttgttcgtcggcaaccggccagatgaagatccagcgaagggcccaacgaagacccaatgaaggaacttggtatagggcagtgcgcgcctaattgcgatttgttgaacgggtgtctcagtcacagaggtcaccgcttccgccctcgtcggcaacgcggatcgtggcatcaccgccgcaggcgtcccctcgcctctgggcatgggcggtggcggttggacgagggttgagtgggggaggagggcatcggcgtgccgacgggtcgtgaaaacccacgaagaaaccgtaccaatatcagctctggagtgctgcagcctgcgccgctgcccactggactcgccttccccttct

SEQ ID NO: 159056 - DNA, 292 bp, Zea Mays
catgggtgctgtgcttcctgcaagcaattctacggtctaccattccgttccggaaaaacaaatagctacaaaatgcagggcgctgctccaggaggcgataggcgtattgaagtcctgtttggtatcacaaatttgaacaaaagttccatacattgaaaatccttaaaacatttgtggaaaaaataccagattagcatcgcgtttctagtaaagtatgacgtgtttaccttccatcaggcagcctcaaataaatcagtactaacaaagcacagttttagggcctgatggctga

SEQ ID NO: 159057 - DNA, 872 bp, Zea Mays
gaaggggaatcctaaagcttgggccctccgatctaaaatgaacatccacgattacaacacactaactccgaaccggtatttaacccaggccacaggattcgggatctacggccgaaaactgcccgaggcaatgttccaccatggtcgttggatggacgatcgatgatccgagttcaatgggtgaaagggtaatcagccgacttaaccctagccgcccacagaagatctagcggcccacggctaaagcggacgaaggggtatcacccggtctaatctggaccgttcattcacggatcaacggcccacgctacttcttcttcccccggcggcagaacacgaccggcggtggcgcagaagcgcccacggtggcgctcgcaacccgaatcgccccgagcactaccacgacctaaaattatctggtacaaaacctagcggggaaaatggcgaacacgtggagagggatcataccggcaattaagtcacgcagccccctgacgacggtggatggcggaacggcaattcccctgcgctccgatgagcaatccgtgcgacccggcgacaatacagagctccgattcgcccgatacacaagcgatggtgtggtccgaagctctcgaaccaagccctaggcactaatgacgacgggagcgcgagatgactgtggcggcggacctcccttcctctcgactcgcgacggtggtcggtgggtgatgattgctcggccatggattcagagaggcgaggcttggttccccataatataccatgggcgtgagagactaggaggtcagttaccccgagacgtggaccgggccgtggccggaaccagctccgtggagctcgcggtgtttgttgactgagctatggaggga

SEQ ID NO: 159058 - DNA, 453 bp, Zea Mays
cctcctaggcgactttcagaccaccctaactggctacgaacgacgagatctagggtttggggagtcaggacaagaggagatcaacaagatcggatggtggagcggtcgtcagagacaaggaagacgacaagagaagtcacatgctcatagtagtggctagagaatatatatgagcaaaagaacagcaaccagagggcatggatacgagagagatctgcaagatttgactatggagacatcaccggagatgggcaaggcgacggtaatggcaagtgatgatgagagagacgcgcacgagagaaatagagagaatagagaaagctaggatagagtgggaagatagggttcggagagagatgaacaaccacaaggggattatatatcaccggcctcgcttcgaccctctgtcgccagggtaggcggcccggctaaccaggtcgcgtctcgtgccag

SEQ ID NO: 159059 - DNA, 478 bp, Zea Mays
aatttatagccgatatattgttttttctgatcaagtatacggctgccttgttaggcgtattcctgggctgagctagcccggtctaattaagcgcctcgatctgtaaggagacggtcggcaggttggtttttattcagtctagctagctagattccaatgtcagaaataaacagtcaattagtttttgcaaggaaactgtcagttcagctttttgctagttcatacgtacgtgctatatattttgttattctcatcgatccgattcgtacttctgacgcgcaacaatctattggtggtgatccgattcgtactttttgttatcaaggggtccactcagcttatttcataacttcttggtagatttaagcggaagcagctcttgttagatgattctttctaaatatgagcaggaggcatgttaatcatgtataataaatgagccttctagatggttatctgctgatttgcctaatccttc

SEQ ID NO: 159060 - DNA, 669 bp, Zea Mays
gcggccgcgggcgtcactcctcactcgctctcgctctcgctcaaaccctaactcgctctcgctcactgcctcactcgctctctcttagtcgcgggcgattcggcggcgaccggcgagctctcctctccctcgttccattcgcctcagctaagcgctccggtctccatctccgcctccggtctgtggtctccggctctccgcctcggcgcctccgctcggatcgatcgtcgctcgtcggagatcctctccggctctcccccgctcggatctgcgcacttgtgaaccgggtaactcagatccataaccctcgctcggatctcctgtcttcttctccccctccggtgtgatctgcggagatcccggtgctccggcttattagggtttacacgcgcatttgtgaaccggtgcgatctgcgcttctgcgaagatcccggtgctccgttctccctcatctctctcctctctcctgtcttcttctcccctccggcctccggtgtgatctgcgcttctgcggagatcccggtgctccggcttactccgttgaggaaccaggactccggggtccggtacggcggcactggcactggtactctcctctctcctagctccggtctccctctcctctctcctggctctggtctccctctcctatcttcttctccccctccg

SEQ ID NO: 159061 - DNA, 579 bp, Zea Mays
tccaaaacccgcgcaccaagtgctcgatgaaatgcccaaactatccaaacgagctcaaatcgaccccaatattttctagcacactccagctactatgagtacctcacatgccaaatttcactcctatccaatactgcaggcacctgttacacaacctattcatctttttggtgatccttttcgagctgtgtgccaaaattatatttcctcatccaaacttcaaatcaagcactcacttcacttattcccatacctatttacctatcagtgaagtatcagctcattttcctatcattgcatgccctattttgaatttcaaactctctatgacacaattcaccgttcaaacgtcgttatcgcaccgtttgacctctgttttcccaaaactctcggtttttgtgtcataactctatgtgtatgtatttactcacatttcatatacttatgactatgtgactaatacgtgctcacctcttgtgccatttcagtatgcctgcttgctcgcctgtgtgactccagtcctgcctggttcttctctcttgagacgtacctaggtagctattccattctacatcttta

SEQ ID NO: 159062 - DNA, 796 bp, Zea Mays
gttagatctattgatatgaagaaagatccatttagaccgtatgaagacggagaggaaatattgggacctaaagttctttatcttagtgtcattggagtgatcatgtatcttgcgaattgcaccatgcctgatatttctattggtatttcgaacctacgctccgacaaataaatttgtgtgtgtgtgttccgtggtctagatggtgtgctcgatgggcgcaagatttatactggtttgggcagaacgtccctgcatccagtctttggtggctcatgctactgacacctttgttgctcaatgctcgtagtagggactacaaacgagcgagagagggaggagctaccaagcctcttatgcgtggatggacctacagactatgggactagggttctaagttaagccttggacgtcgcgccttagctctagcctctaggtcttctgatcttgtcgagtatgtgtgttcgtcttccgtcgagtgtcctgattgacctccttttataggccaaggtgggggtcggccactagtagcttccttgagaaggagaaactatgatgtggtaaaatggagtgttctacctgtggtaaggttgcatttgtccatatatgtctcggtcatctaggtttccttgatcctgctctttatggcgggtggtgtgggcagcgaagagtccctgcaccatcattgtcgtctttgtgccgtgtcgacccctggccgctatagcctaggcctcggtgctgctcatcgtgttgaggggtctgtaggcggccagcgcacttaggtctagcctcaatatgt

SEQ ID NO: 159063 - DNA, 420 bp, Zea Mays
ggcttattgaataactggaagcggggtcatggcactatttgactgagtcgctgacagattacaagaaaccccctcacgttctattcccttccacgctgaggtccccgacgacgacgagcgcggcagagctccggcgagcgtgtagaccggccgaacggggcaaggtctggcgctcccgagtggcagacaccaaattgaaccttgcccgagcatttcccccaacctaatttcaaaaatggctaactggttgactctggccacggtgacagtgcggagaatcaaaggaacaacgcgttcccgacgattggtggcggtctagttcaatcggatgagtcgacgagcatcacgggtatgtgagatcactcaaacgagagagcagaaggtttgaactgacctcaattgcactggccacggcgaggg

SEQ ID NO: 159064 - DNA, 415 bp, Zea Mays
gtcagccgcggtactcatcccctggctcaccgcccgcgggtaaagtgctcaccgtcgtcgtgacatcaccgttggccaccgcgtgtcctaaccgcgccatcgcatcgccgtgactccctctaaactccccgtcgaccaccggagttactgccacggcggtgaacacgtgttcactgcactagcattcttcctcacctccaaccgccgtgtgtctcgtccaaaattcgcggccaccgctcgctcctcctataaattgagccctcccctagctgcgtaacatcatcacccacccagccaccaacaatcgttagcaaccgtgcctccgagagcttgaattttggtttctccccaatccgggtttccgccactacaaaactcacctcaccgcggccagcccctttccggtctgctcatc

SEQ ID NO: 159065 - DNA, 418 bp, Zea Mays
caccatgcaaccagagtgtggaggagaagaccctacgtgaacatccatggaagtgcaagagggagaacccactcggacaccctcggggactgggtcacagcttgcgctacccatccgagccggatcatctccggcaacaccctcgggggctgggtcgcagcttgcgctacccatccgagccgaatcatctccggcaacaccctcgggggctaggtaagcgccagcaccatcctggagggccgagttctctgtagcagccacctctaaggctgaaggtccctcggtcacttacatgggagcagtgcaatccagaccagcttcctgaccctcaagaccgcgctccaaggtcgatgaggcgcgggacgctgcccgggatgaccccaacccagcatcgagcacatcagcacaaacatccatc

SEQ ID NO: 159066 - DNA, 410 bp, Zea Mays
tttcttttccaaatgctttgaatatgctccacaactcttcatatgcctcgataatgttgatgtcgttgacccttgcatgtaggcatacattttcttacaatacttgcactttgccttcaatgccttctttccatcctcggatgcatctccaatagtcactttatcaaaaacttcccacactttggatttagagttgttatcctttactttcacccccttacgccttttcttggcttttcttttgtcatcattatttgattccacaacatcaatctctctcccacctaggacagtcatttcatcctcagacatgtcatcgttcttgtcaaatgaatttctttctgaatctatctcattactttgattcacccccttcccttgcacaccagattccataacctagcaattta

SEQ ID NO: 159067 - DNA, 468 bp, Zea Mays
tggaggggaagctgcagagtggctgctgcccctgctgtttctgcgccaacacatggggaggagaagcaagggggagaaaatcgtgcagggcgccgaccactagggagcaagggggctgcgagctgccccatccggggaaggtgtcgagtgggggagaacagggagaaggagcgccagccatggatggctcctgctgtccctgggcctagaacagaggagaggaagaggcctcatggcttgtggaagaaggagaggctgctgctgcgttttggaacagagaggaggagaagtgtcgtgtgggggaagggaaggagaggggtgggttgccatttatagggaggaagctctggacatgtcagccaactccaacaggtggcaggtgctacaatgatgactttggacggacatttttggtgttttcccattggattaggatcttggtcactgtagaagatactttccttgatc

SEQ ID NO: 159068 - DNA, 287 bp, Zea Mays
cgaaaggcaactggctgttggggtcaatgggaggaatgaccactgtagcagaattttggttcttccgcttgggcgccatcgcaatctcgttagcggattgaagggaagcgaaatcagagggaagcagagtaatatttggaggcagcaaggtgaagttagggctcagaacgcagaggcatgcggtgacgtgatataaatggggttttcttgggtcagacaccatttctaaaaagtgtcaagtcatcactcggaaaaagcaagacgtcctcgcataactcgacagctac

SEQ ID NO: 159069 - DNA, 750 bp, Zea Mays
aagactatagtacacttgatactcttgctcctctattcacacacttaaccaaatctttacttagggattaaccttctcttgcaaagaaccatacaaacttgatagggagggtattaatactagcaggagcacaaggaccacaacacctgtgtagctatccttggatagaactcgagggcagagaagaaactttcactgaaccaggatctcaaggtagctgaacatgggcaagtgaaactgaccttgcacacaaacacattggggaaggactcccagggtgccaacacaacaggagctacacacacatggcaaacatgcacacgcaccacaccagcccaagaacactaaacctggtcagcctccatagccaaaatatcatcctttgttcaacaaaacaaataggggagggagccgataaggcctccctcgtggacaggcttaaatggttccaatttgatattctctgctgaagtgaaatcactaatatcctttctgtccaaacttatctcaattccacaaacactagtacactgaaccagtcactactacttcactgcgcaactcagtccatcctgatatttttaggggagatggaagtctctaggccttctattatgcaccacatgcttatcttcatccaaatgcataagtgacaccagtagggaatatgtgatcttctttagtttactcagcccactctgaatccagttccctagtcctgctgccctattcatcaccctcatgttcagt

SEQ ID NO: 159070 - DNA, 439 bp, Zea Mays
atagtgcctcattatgtactgtgctaagttgctcatagatctgtaagaactggttccatgctgagaacattgtctattagcaatgatgaactatctacagttttgaactcactttctttgtgtgatgtgccaagttgctaatgatgacattacttacatcctgataccattgttgactagcaatgatgattactgctactcctacttctactttcctatgctgagattactgctacttctactttcctatgttaacattactgctacttctactttcctatgctgacattactgctacttctactttcctatgttgacattactgctacttctacttctattgtaagtaatggataacatggtctctgaggttgctacttctacttctacttcttcccctaattttttgcttgttccagctatggctgacatggtctct

SEQ ID NO: 159071 - DNA, 526 bp, Zea Mays
gagcaccaggggcactcgactgatttgtagaagtgggggcagtggcaggacgaatgaaaacagactgtttgaacggataggagggtggacgaggcgaagaacgattctgattaaaaggtcagattaccaacctggtttgcttctcaggtccctgattggacctgtcacctctaaatccatttgattttccctggcatgtgttcttggcttctactgccagcgccgtgctgacagctctgttgtaagtaagatctagacaggtggccattttccattggagccggtcgtggagtcccctcatgaagcaattcttcttctttaggtcagtgtttacttagtcaatagcatattgggataaatgattaaacttgttgagatactgcatcacagtatctcctccttgctttagttgaatgaactcctcttgtttcatgtgaagtactccctctggaacatagtgttcacggaatgctagcttgaattcatcccaagtgacctggtgtccagctggttgaactgctacaaa

SEQ ID NO: 159072 - DNA, 1091 bp, Zea Mays
tggcgagctcactctggccggaatacgccacgaccagtgctctaaattggtttactcctaattcaacaccgaagaagcatttcccctcgatcaattgcactagcggagctctaaatcgtcctgcccacggagacagcgcgaacaacggatgaacacgggtgttcccgacgacctggcgcagcttagctcaattgaatgggtcaaggagcatcaggagaacctaaggacactgaaacgggagagcagagagcatgaacagacctgggagtagctagccacggagtacggaggattttcgttcgccgatgacaaaaaagggggaaaacggcgctgcgacgtttccgggcggaattaggaggtgaggctggggctacacggtcgcaaaggactatggtttcaccgtgcacaaccaatttgggagaggtggagaggatttcgcgaatttgtgcttcaaccgagttcactggtgaagatgtgaatacctcgccgtgggtggcacggctatttaaaggcgcggtggtccgactaacgatccacggccgcggattacaccgttcgtgcatggttaccacgtaaagaagggacacagtgagggaggagcgaggcatggatgacacagcggcggaaatgaccgagccacggcggccgccggtgaattatctccgactaggctcaggctaggtccgcgaggtcgcgacacgtccaaagttacctccctgcgaatatccacggcgtgccaggcatgaatcacggcaatcggcgcgaatccgggcgtgcggatcgccagcggcaagggggactgaaccctgggatatttcagtgcactgtaccattggaagcttcatcagttgttctgaccgagaatcttcaaaggcatttttcttgaatttttgcatgacaacttgctaatctgtttgtagaaaacttgtagtcctatatacaaactaaaattctgctacagagatcatgctcagttgcttactcctttgagcatgagtcaagcctaaagttcttcaaaactcactgacagtccatatccagtttctgtattatctgaaagccaaactttagggccaattatctccatcttt

SEQ ID NO: 159073 - DNA, 357 bp, Zea Mays
ctgaactcggtctcttgtgccaatgaaggcacaaacattattgaaagccttctgacatgctttggtatcatttccaagcacagtagtcggccttcggaggccgaagcgagaccagatagggcgttggataatcccctttatgtcctccctttcaatcagattattcttaacataaaatcattcctccatccaggctctgggccacctttttcaaaatgttggaactgggtagcttacatcagaacgaggaatgaagccctaacaaccgaagttgttgtgatattgctctttgccagtggccttcgtctcgtacagtagttcgtgcatgttgcagaagcactttgcacttggttccag

SEQ ID NO: 159074 - DNA, 499 bp, Zea Mays
tcgtcgtgccattgtcgttgtccaccgcgtgtcctaaccacgccaccgcatcgctgtgactccctctaaactccccgtcgaccaccggagttactgccacgacgatgaacacgtgttcactgcactagcgttcttcctcacttccgaccgccgcacatcaacgccaaaattcacgatcaccgccgaagagccctataaattgagtccggactccgctgcttcatcacatcccgcacctcaacaactgagcactcgaatcgagtacgccgcagaactaacgcagtccccaaatctccctctcctctgttcttgctccgccgtgaagaactccttcgtggccagcgttcctctggtcagtaattatcaaattactccctgttttagttagtctttgatctcctattgctcctagttgcggcaatttggagtttggccgaagcccaacaccggaacgcacccgtgcgctgtcaaacaccgtcgtgacccccctcatcgtcga

SEQ ID NO: 159075 - DNA, 437 bp, Zea Mays
caagccgaagctcacaaagtcgaagttgaagatttaaagaaaaagcttgcagaaacgagtgaaaagtttgatgttgcaatggtgaagcactagataagcgaaattgaaaaatcaagggtacaaaagaatgtcgaagagctccacgactccaaagagagatgctatgaaatatccttggaatgcaccaagaatctaaagaacagttttgcaaaggtgggagcatactcttccgagcataggttcatctgtggtgaccccgatggggttatccagtggatcagcgaggaggtcgaagcttttgatgagatacttagcggtcgaggggatttctgtgcttttgctggtgcccgcgaggatgtatcaattttggaaaaggtcagatgtgaccatgcgaaggctgttgtttagctagaatttgttatctcagccgacgacat

SEQ ID NO: 159076 - DNA, 562 bp, Zea Mays
attttcccgaaatggtcgcgctgagtcaaaaaacttaagaaagttttgtattccaatcgctggcttaaagtcgaagccttgtcttggcttctcccataagccaaaactttccaacacaagctagcccctggtttcgggtggacgacaagcgagtggcgaaagccactatggtcgtctatataatataactcaattgttcctccacacttgacgcacacgaacctcctcctagaaacaacaacggacctgttctttgactccaacgtgcttggtacatgacatggaagaggacgacggcgagctcgagttagggaccattcgttacctcatgcgccgctgtgaacacaatgagcatcgacatggtgattctgttcctggctgagttcggatccatcgagaccatcttagtggcgacgcgaggatccgagcaaactacttcttcgatcatccggtgtacaccgatgctcaattccaaagtaggtatgtaaacaatattcgatcatgtctcttttcatttaaacgaagataaggaaaatgtggtcatttctgcactgtgttctta

SEQ ID NO: 159077 - DNA, 573 bp, Zea Mays
tttaagtgcaaaaagggaaaacttgtaaacagattttgaaaaaaacacaaaattatgatgagaaccaaataacaaagttaaagtacactaaataaactacaaaatgtagtaagaaagtttgatcagtggagctttgcaaaattctctaaaagacccctcaagctaaactttcaaaaggaaattcagaactgaatttttacccctttatgaagttcagccgttttctctgttttccaaaactcaaatctacaaaacccaaatatgaaagtcgcgccaaattaccttgaacatactactggtaaagtttgaaatcaaacaaaaaccgtttgacacatgttgactcgactttagtctcagttttcaaccgagcgacaaacccaactacgccccctcgtatctcgcgaatccgagatcaaatccactcaagtgttataagagaaacaaagagtaaacgacaaggaagaaatcgtgtgcagggattcggaagagttatgagaagatcgcgagccaattagcgtttgaaaatgaccagaccgagcgaggccacgtgttcgatcgcttgcctgaccggcc

SEQ ID NO: 159078 - DNA, 622 bp, Zea Mays
ccgagctccggtgaacctgtactagccaagacacgcaatggccggtgctctaacttgggtgacacctaattcaacacctaataatcgtttcccctcgatcaattgcatgacccgagctcttaatcacactgtccacggtgacagcgcgaactacggttgaatagaggtgttcccgatgatctaacacagtctagcttaattgaatgggtcgaggagcatcaggagaacataagggcagtgaaacgggagattaaagagcatgaacggacctatagcacgccggccacggcgagcttacttcgcacggtgttttggactgatttggggggaaatcccaaattggggttctttggtgaacgatttgggacacgagtgggtgcgctgagtgcttgaataccttgcgaagctgagggtacgctcaatttataggattcatgagcagtggtccgtgaatttgagatgtcacggtggcggtcggagagaagggggggcactggcgcaagcaattggtggctttcaccgtggcgagctcaccggcgatcaccgaatatgtgtaacccgagctattgcgacgtggtaagacaccaaggcacgtggcacacgatcattgagtggctaacgc

SEQ ID NO: 159079 - DNA, 1545 bp, Zea Mays
agaaaagaaaaaggtatcttaccattcgtcctgggcccaaagctgacccgtcggcccatgtaaccttcagccgcgcagcccacctgtgtgcctcgtgctcacgctcatgtaccatggatgaagcgcacgccgagaaccacactgtgagccaccattaccgagtcgcaaaatgtcagcaacgtccagggatccgaaagccagtcatactaccagcggcaacgatggagatcaagccaacttgtctcaacggaaaagcagccagaaaagcgatcgcgtcagctgaagcaaagcaactggcgagcaagtgggccgattgggtcgtgtatttagagcctggtgggccgaccgtagagcctggtgggccgaccgtgtgacgatataaacatgtgccgtggttttgtaaagggacatcgaataattaatgaacggaatatcaactggttgccgtcacgagaccttcttcttccccacgtctccaatctctactgcttcccctcttccctgctctataggcttctagagggtgctaacacaaaaaggatggagctcgccgccgtagcagaacctgcgtccatcacctcctcgtcctcgatgccatgcccgagggctttgcttgatgcctcgaggagactccttggcctcaccgtgtgagggccgcgtccactgatcaccaggcttcgtgccgcagggatggtgtgggtgcgccgcagtccgcgctcgtcgtgggtgaagaagacaccaatcaccggtacgttccacactgtcgcgtttgcctcgctcgaatctgtccgtagaacagtgcacgggtgggggagcaccaggggaagcgcggggaagggtgttgccagtaatggcgttgccgctgttcagcgttcgccgcagtggtcgactggtgaaagaagaagccctctgcgccgtccatctcgggattgagggttgtaattagatccatggatggggcgccctcgaccgtcggttttcgatgtgcgtcctcgattaaatgagtcataccccttcgctcattgaatacgggccattagatcccaatccagcggcccatatgtggcgctggttcattaaataccagatccgatctgggctctcaaaatcagatcggacgaccatgggttcttaccggttcggataaagggcaatctaatctagaccgcaaggagtagatcggacggcctaggatgcttcatacccttggctagtgcacttttgcttaagaacccctagactttagcaaaacaaacccgccattcttggttatggcggggtcttacaccttggtccctggaattcacagataaacccctgaaacttatctcagtatggaattgatattaaatagctctagcacttccttaatccataacttttgcgatttgactccaaattagtccattcaagtcacgttagcttcataaaaatattttctacgcagtagcaacatcatgtgtaccatattccatatgtttataattagacaagtgttcaatctatattcagtagattaactccactaatttaggttaatctctc

SEQ ID NO: 159080 - DNA, 452 bp, Zea Mays
caaatttcaaatttctgtgaaatcccatgcatccaattggtgaaatgtgtttcttggtccctattacatatccctgcaggtccttggctccttcgggagggtttttccaccccaaataagcttttcaccgaaaccctaaatccccgcacaccacgtgttcgatgaaatgcccaaaccagccaaacttgctccaattgaacccaaatttttcaggcaccttcaccacactcccagtaacctacttgccaaatttcacaccaatccgagatcccaggctcaaatttcaccaaaattcccgttttgcacgatcgtttccgagccgagtgccctaattcctttttcttcgcctaaattcaaaccaagcacacacttcactcatattgacctatctaaacctattcgtgaagtatcggctcaatcccatatcgtttcgtgcctcagttcgaattcca

SEQ ID NO: 159081 - DNA, 658 bp, Zea Mays
gttccgtagttgggcatgtcgtaggttgaataactcctttgcattgcttggccttagattacttctagctttctgaagcaaatgatatcgaacaacacagtatggagctataaaattaggagtatttgcatatcctgcgtcaactaaataaaatttgcatgtaggaacatagaaaccatgagccattgcatcctgtaacactcgggcatctgcagctgatccttcccatccagcactgacatgcacaaatttactactgaagtcacacgccaccattacattctgtgatagactgccctttctattttgatatgggtcttgcagctaggagatatagcaataggaacatgagtaccgcccatccctccaatacagtcctaaaaatataacagttaaattatttcgatattgaagtatagcatgagttacttaaaatcaaatagggcatgagttaccttaaagtatggcataaacttggggttgctagatataacaaccgaggtattgattggaggcagttgtatcatcctatatgataatgagacaatagattcaagtacaagattgaaatattgactaatagtctctccgctatgctgaaaccgttcttgtatggaacgattacttgcatttgttgaaaggcaaaacataaatattg

SEQ ID NO: 159082 - DNA, 636 bp, Zea Mays
tgagcatgaaggcgctgtgtcggcttaaggcgtttctgaattaagccgatcgccccttgagagttttttgcatgtggacgaacacataaactttttttgcttaatattccatgagttccctaccgaagtaccatccatctgagttagccagtaagaccctagccaagttacttctgcgatcatgaagggcccttcccatggtggtgacagtttgtcccgtccttctcttgacatatgcggtgaagcaccaggtctcctactacaaatgcccggtgtcgcactgccttatgatggtagcgcctcatggtttgctggtatctggccgacagaaagaccacatttaaatgttcctcctccagcacatcaatttcttcaagctgggttgcctctgtctctgctatgctctcaaatgtcaacctaggtgctccaaaggccagatctactagtaacaatgcctctgatccgtataccatgaaaaatggtgtattcccttgcaaggctcggcttagctaggttcgcagactccagactacataagtcagttctctaatccacttccccacgagctttaaatttttgtcaaataccctctttctgagtccctcaagtatcatcccgtaggctctctccacttgc

SEQ ID NO: 159083 - DNA, 577 bp, Zea Mays
gcggatgtgggcatgtgggcaagctaagcttcttgaccaaatctgaactcaccaaattgttacagcttcctccatcaataataacatgagcacgtcgatccttgatgacaaagaaagtctggaacaaattatggcgctgctgctgcccggaggtctctagctgagcactgaggacacgctgcacaatgatgtttcagaaatttgctgtcgcggcatcaccatcaatggcagcatcatctccggcagcatcatcacttgtaacaccatcatcctccacatccgacgcactaatgtacccatcgtccgtagcaatgtacgtctgttggctaggacaatccttcttcacctgaccaagcccatggcagtggtggcattgaatgctcgaagtgcgtccggaaggtgccgccgaatctagtttcttggtaggtacctgcaaagtagatgtacctgcagtgggagcgaaagacgaaggtcacgtgggcgctgaaggagtcggaggtgtgcgaggtgtcgtctttggcaaggaggtggcgccaaaggtacttcgggattgatgctgtgattgatatcgtccctg

SEQ ID NO: 159084 - DNA, 899 bp, Zea Mays
gggtcgcgccgctggagctccctggcggttccactcgatctgaaaaccacgccgagcttccaggctacatccgccgcccctgtgcgctggtacctttcatcccggcgccttgcaacgggcttgcgcaattcgcgcaaccgactcaataaaactccgcaaaacacccgtcgccgctgggatcggtgcaacagggattggatgaacaacctcagacctcagggtataaatgggaggccacacgactcttcccctcggccatctagatgcaccatgcagagagagagagagtgggggagaatctcgtgagcgttcgccggtggaggaaaaggacgccgccgtggaccacactgctccgtggctgggatattccagtgtttgctttgggtgagtaatctcctctctgtttcaccgtatcctcagctgcctctagctctagccgcgaccgcattgggatacctaggcactggctcgttctactctggcacaactccaccgggagggaacactgccaccaccactactgggttccggggggaagaagatgaagcgttaaccattggattggatatctgcgggtaggattaaatcaggttcaaacgggatgtagaccgtcgatcttgaagggacggccaagatcatatcgtgcgtaccccttcgcggcgatgcgttgtgtccgtccgattggggttggatggatgggattatatcatgaggatactgattcagctgggtagatctgggccttcaaatcttgatccaacgactgttatagtgtatcatttcattatgtgtggaggctaatttgggccctcgtttctggatgggcggctcagattccatcttaccccttcgccgcggtcactttctaaaagtgcccctcgggtttcgttgatttatcc

SEQ ID NO: 159085 - DNA, 465 bp, Zea Mays
gcaagggaatgggaggcggctagagtcgagaaacagatgttggggaatcttgctggtcgtctgagtggaagtgagtgagaaaaaagacttgttagtttctcttgtacaatttatttatcctgactttgcaaacttatttgtcccattacatttgcagagattggatgtgctgtgaactatctcgcagatgaggctcgtgcaagatacgttcaggaaaaaatggtgacggtggagccgatggaggaggaggacacatcaaggttgagtgagcttatcgctctcgctgatgtaggattacacggggaagaggaggatgacacatcaaggttgagtgagctcatcgcactagctgaggcaggattacatgctcaagaggaggaggacgagtttatgtctcaggccaccaaagaagtagaggccgcttattacaagcagaagtgtgatgaggctgaggtagaggaccag

SEQ ID NO: 159086 - DNA, 336 bp, Zea Mays
tcatagctgaattaaatgcaccctaacctagctacataggttttaagaaaattcaattttgttatgaatgaaaaacattaggtggatacttgtttagaactatatttaggatatatcctttatttgtgtgaacgtatagttgcatgtgctctatgtctaggttagtatgtgttgggtacctggaaacagggtacccaaagaagacccgaaggcctcccaaagacggtccacgaacgaggcggctcgcctgccaagcagttcggcgggaagatccaaaaggccacttagggacggcccgacaagtcgaccgacctaccgaacaaatgttcgccgagc

SEQ ID NO: 159087 - DNA, 507 bp, Zea Mays
aacaattgtcgactcaacgattcgtgttgctcgcggccaaatcgatcatgcatcaattaacaaaactcttccctgagaattgttgaagtcgacgctctactgattgaagccagcaagcagcgcatcctcaaaatgcatggaggccaccttcacctacatgtgatactccttctcatacatgtgaaagtaatttacacacttagactcccataactggggttggctaccattaaagtgtaaaaatatcaactaaggcaatctattgcatccattatgccctaactcatgaacagactcatgtggatagtattgtttaggcatgaaaccagagttgcatgtaggattgcctaggtatgtacccttgatcgggtagtaggcctgggaaaatccatacctggatgcatgctcccagtgagatgtgctgatgcggtggccaaatttcccattggtgtgtgtacatccagcaagtgggcacacggacaccaactagtgagggccaaatatgcc

SEQ ID NO: 159088 - DNA, 402 bp, Zea Mays
atgtggttgaaaggtcttctggaggagcttcgggtgttgaaaaatgagattatgttacttcattgtgataatgtagcagcgatcaatatagcaaataatgcagtccagtttgaccgcatgaaacatgtggagattgataggttcttcatcaaggagaagattgatgctaggactttgaagttaaagtatgttaagtctcgtaatcagttagcagatagtctcacaaaaggtctaggtcctaaagataatgagttggcatgtagcaagatgggaatgttgaatatatttagcccatcttgagggggagtgttggtgtaaatagttcaatgtaaaaggacctccttatataatggagtaatatactttgtgggagctgcagcccgagagggtacagcacaatac

SEQ ID NO: 159089 - DNA, 665 bp, Zea Mays
tgagcagaaaacggcaaatgaagcccatgacatgatccgaatcatggatctttcgcccggaaagcttacatttggatgctactggtccactacaagaatccagaatcatcaatgtgtcaggtaaatccatactcaattcaacaggagcacacttggtcacgcttcgatgcaacaggtccccccctcaagaaaatgacagggacttcatcttgcctttcgctggtcaatgacacacttatatcggctttacatggaagcagactaacatctaaaatctgtacatctcataactcacctgtttacaaggtgacaggaaaaaaaaacaaacgctagcaggtatatgacatcttaaagagatgcagattagaaggcaaccttggtcaatggcaatgctaatcatgcaaactagttcaattaacctcacatcaaaagtcgaaaaaatcagttcaaagtgcccagttacacaactaaaacacataatactaataccaaggtcaccatgggcggcagttgtttgtatgcttctatccaaattgtacaggttgcatctacttcaagaacccaacctctttcaaaaagcaaccacaaatcaacagatgtaaagctagactccatcagatctcttatattctaatctcttatactctcccctatcccttaagggc

SEQ ID NO: 159090 - DNA, 579 bp, Zea Mays
ggcatgactggggtttgcattgggatcacgctctcgtcccgttccatcagattagccgaaagcgtctatctgcatcctccgcccgcgcgcgggccgcagctaagctaccacaagtacgtactgctgtacgctagtatatagctgtgcaggacaaaagcggtatggatggggatgcgacgataaaggagacgacagttgacggccgtcgtcgcgcggcgccgcgaaatgattaggactgggcaatcagttttctcggtttattcggttcggttttctcggtatataggcccacgatgctgcacgccatggccaggcccacgcctttaaactcttccaaacattaaaaaaaaaactttcatgaacattggttgtttcatacagcttttgagcctcatgccctcatgttacctagtgctatctagtgtatagtgtatagtgtataccacacccaacttattagacttatatatattaagctataagttcatatcttctttacagtacgaccgaagaaaacagttttctagattactgaactactttattatctttgatcttgtcatccatccttcaaaaaac

SEQ ID NO: 159091 - DNA, 752 bp, Zea Mays
ggaaatcagagttcctcgacatcccactgaaggatagcatcaaggtgtggcgcctcgagtggttcatcgtggagaatcactgcaagtcccttccccctcggtcgaggaggcagccagatgtccgtactccaagctgggtagaatctccaaccccttcggaggtaacagaggcaaaagtgttgcttgctgaggtctgtttattgaaagatagaggtttgactgctgaagatgtggtcgctgatttcgtcttcaagaatattcagcatttgaaagacagggcatactcagcttatctgtacagtggtgtcaatgactctacccgggttaccaacaagaaaattcccactgaagatttggtgagccgactggacatgattctaaggggcagagtgtcaaatgttggagctcctgttgcctattctgtctggaatctgccacctcaccggtcattttctgagtttgtgtccaaccctcctgctagtaatggtggtatgggtcttagagtgcgaccctctcccgaggacattgaggctctaattgcccctcttcaaaatattcccaattatgagaagcaaactcattttgagatgccagctagcctggacgatgcagagatagatgttgtgcttagtatgttggctggggaatcttccgacttggcccatgctgagccgatggctatcacagctgggcaagaggctggcaaagcagtggagactcggaagcctgagggtgcttgcctaaagtgtccc

SEQ ID NO: 159092 - DNA, 1613 bp, Zea Mays
cgatagctttgtaataaaattgcttacacagtattagccttaattatattatatcacatacttttacaattaaatatttgttatcctatgtttggtagatttatcttactaatccaagttaatatatctgaaaaaagaggtcatgagtggagtttctagaagaagagcaagcaagcagatcgcaacaggggatggctcgaaagaaaaaaatggctgtcgtattcctcctcctgtagcatcgtggaccggaaactttctgggccgccttctccgcgcgctcacaatgtccggctcgggtcgctcacggtgggtaatcacgcgacggatggaagcccttctggcgcgacccagaactccacgctaccttctcatagaggtgaggtaaggtcttcttgttctgtcctagggtttccgtcggactttgttggctcgcactcctttctgcatcttgcttcctcgctctcgtggctttggtcgcttccgtcgtcgtttcgttccagtttccgtggcgggtggttcgaatccccgatttgtcctccgcatgtggaagaagagtggtcggtgttgtctcgcggggtggtgacgaagatggatccgaaggggcgaaaccctaactgggaccgatggaatcagaaagatgcgcctcaaggatctcaatcgtggaacaagaatcggaatctcagctggagattgaagccgaatctgggcaaatcggatgtcaaggaagacatcggggcctcgtctgccggcgatggaggtcaatcaggtatcctcaaaacccctcccgcggctttgaaaaaagagattgagaatgtgcgtcgtcctttttgtcaaaagtgtggggttgatggtcaccatgctagagattgttttagatctttgtggtgtgacatttgtcacaaagaaacccacacgactgctcgtcgtgtgttgcctaaacagaacaaaccttgtatgcctattgttggtatggcggctgatggattagtgttttactcttctcattttgcgaaacccttgtccagaaaacccaaaagaagcttcatcggtttggtgactgttatggagggtttgatttctgctgaagatcttgagaaggactttgggttccactttccgtggggcaaaacttggaaagctaccaagtgccatgccgggttccttatgcaatttccttctcaagagaagcttgacgagatgattaatttccctgagctcaaaatgaaaatgtcgggagctaaaatctctgtttctcattggagctctcaggctaaacctaaatctaagctgcatgcagtttggattgttgctgaaaatgttccagtggaactgcaaaactaccaagcaatatgtgaattaggatctacaatcggggctgttgaagaagtggacatcctatctttagattctaaggatatggttagattcaaagttcatgtcaagagtgtcgccatgatcccgcccatcattgaagtgggggttaaacctttcctttatgacattttctttaagattgatgatatcactgatgagggttggaacgatgagtctatcaaccttggcaaaagagcttcagtggatagacatggccttgatgacccttatgaaaaact

SEQ ID NO: 159093 - DNA, 767 bp, Zea Mays
aacggaaaggtgcatgttatgtaatgtactgatgcgtgcgagcgcaatctaaacggtacgggcctagtatgcgatggtagagattattccaatgcagttgtgccatcgactattaactgctaatccgcggctgtcggaatgattaccagcacatgtttaaataagactcgcagtacatcaagtatggaaggcctagagtttgtagtagtttagacttctagtgcgagtgctagatcaagcttttggatttatgggttaggctcaatttagaaatttagttaaatcataaaaaaatcataaaagctcatatagggtaaggccgtaagggaatagttggataatagttcttatccgatcgcggttagctttttcgatcacgaacgaataagggttgagtccttatctaaccgcgtgccagattggatcctgaggctatagttcgcgtacgcgaccctatataagacacctaatagatattgcctgaatccaacccaacgcgagttagatttttgtccctgctctcttctatgccattgttgtagccctctttatctcaagcgccgacgtgtatctacgatcgagagagcaggtctccgaaatcagttgccttcgagattctgcaccaaaaggaggcaaattaaataaggtttttggaagcgccttcacacgactgctcgctttcttctcgatgaccctgttgtttcgatgttgtcgaccttattgcttccacctacatcgacaaccagtatgtctgatcagcacacgtc

SEQ ID NO: 159094 - DNA, 894 bp, Zea Mays
ttccccgcaacggtggacgcctgaatctgcgcgatgatctcgccgggagctgcgcgatgtctgctggcgcttgttcgtctcgcccatccatgggacccgcatgtcatcactttccctcttattcaccgcaacagaaccgcgcgtatctccgtctacctcggtaccggcggcgcggaatccgcgcggatcgaacgaactcggccaggaagggcgcggttcgcccgctagcccttgtggaacccgcggcactataaatccgtcgcgcccctgcttccgccctctgcctgaccgtgcaccatggtgaaaccgagcgaaccgaggagggagagagagaagatgccgcaagggagcaaaggttgggaggtgctcgtgaggctgccattgaatcgagcttagaagccccgtcgcgtcctgaggatagtatttgggctcggtggaggaccatggcgccgacaatgtctcgtcgggggtagcggctatctccggtccgcaagaactcggtgacggaattccctgcttcactgctgaaggtaacatgccttccctgaagtttgcggtcgcctgcgctctgtgtatcatcatttgggaggggagttagggcaatggatccctgggtcacttcgcgccggctatggcgccgctggggtggacgttgtgtgccactgctgctctggtcgggggaagaagaagagggcgaggccgtcgatctagaatttaacggcactggttagggctgggagttcgaagggcgctacaccgttgatcgactgctctgcggttaagattagatcttcaggaaacgattcggtcggtcgatttatcaaaagagcccctctgttatttggtattcaacccgccgtccctcgctactgtgctctgagtcttaggtttatt

SEQ ID NO: 159095 - DNA, 461 bp, Zea Mays
aggcgacggaggggacctcgaaggcacacttggactgcttgacgaacaattagtgctactggagtaccgctagtacggtgcataggtgacgtagatggtccgcctaggtggagctgtatatcaggatgtcatcgaaaaacacaaggacaaacaggcgaaggaagggcctcaatacgtcgttcatgagagcttggaaggtcgccgacacattgcagaggccgaacgacatcaccaggaactcgtacaagccgtcgtgggtgcggaaagccgtcttgtggacgtcgttggccctcatgcgcacttggtgataacccgaacgtaggtccagtttggtgaagaaccaggcgccattgagctcgtccagcagctctttgacgactcggatggggaatgcgtccttgacggtgagcatgttcagtgcacggtagtcgacgcagaaccgccatgacccgtcgggcttt

SEQ ID NO: 159096 - DNA, 824 bp, Zea Mays
ctaggttgctccccctgtttgttattcaccctccttccaatggaacaatcaggttgctccccctgtttctcattcaacttccctacagtagaacatgggattgacccaaccatcactgtgtcgccatcctctgtctcctcctgaatatcaatagttggatcatcatgatccccattaccttcattactcctcgatatctcaatagttatcccctcctccatttcctatggaatcatacctccaacaatcacccctccctaggcccactagcctcatcactacctcgaccataatcatccagggcactattctcccctctctacggtcccttccattgaccggagagaagtcctccaggatgtgatctagatcaaccttcttcgcgtagtatggatctttctctcaaaatgtcatatccatactcacaaatagtctccgaccaataggatcccaacatttggaccctttctgagtagatgtataacccacaataatacatttgactgcttgaggatctaacttgctcaccattggtcgatgatcttttacaaagcaaacacatccaaagaccttgggtggaactcgaaagtcactttttaccaacataagttccataggtgatttcatatcaagtattcttgagggcattcggttgatgaagtatgtggctgtcattactgcctcactccacaaatacttaagcacattcatctgaaacaatgagagatattgctacctccaacaaatgacgatttttcctctctgctacaccattttgtggtggagttccaggacaagttgtttggtgaataactccatgttct

SEQ ID NO: 159097 - DNA, 915 bp, Zea Mays
ggcgaggcttaccggcggcagtagagctccggcggggtggttggtgacgtccgggaggtcacgacggtcacgacggtgtgcgggtcggtgtcgaaggtggccggagctaccctggccacgagcacaggcggcgggggtcgtcggtggttcctggtccggccaaatcacgacggtatagttcaattaaggtgcacgaggagctccacggggtgatgtagaggccatgcgcgcaacgaattgggaaatggtgcagaggcttacccggtccacgtgtgccggcggggaaagaactccggcgagcacggttacgctattccggtgacgcgggtccccggttcaagcttgagtaagcttcacggcctcaccaggcagctaactgaaggcttggatcgaacggatgaggacgggaaaggggctggccacggtggttgctctcgggtggcactggcgggtcgcggggaggtcaccggagctaagggctggctcgggcaagtcaggcgaggtacggaggagttaacggggaaggcagccgagcactggggcgggttttatagtcgtggcgcgggcgtggtcacgggcggccgcgggcgcgcgggggttcgcgcacgggcgtgccctgagcgcgcccccggatgtcagcccgcgtcgaacacgtggaagctcgcttctgccatggttcaacggcggatttgagcaccatagcgtgcgtatcttggcaaagtcactgtgtacggtcgcttccctgctccatatcctacctttttgctgtgagttccaagtcaagatatggtcggggtagggagatagaggggtgagaagttggctgtgtcagctaggtccaagccgagacaaaaatggtgtcaagtcgtgtctaacgccctagggtaggtgtcacctctttccagggcattctag

SEQ ID NO: 159098 - DNA, 473 bp, Zea Mays
gttcctagtgatcctacatgttctagctcaattcgctgggctgatgagcatctatagcacataggggtattgaaacgagagcgaggagggcgtgaacggacctgtagagagctagccacggcgagctcacacacggcggtattcttgactgatttggggaaaactctaaattagagctctctagtgcacaatctgaggcacgggctgttgcgttgggtgtgtgattacttagcggagctcactggggcggcaatttataggttccatcggtggtggcggctaattttgagatggcgcgctggcggccagagagaggggagatcactagcgcaagagatgcgtagctttcaccgtggcatgaccaccggcgatgagcggacatgctaaggcgattcactgcgacgtggtagagcaccaaggcacatggcacccgagaggcaggcggccaactccggcgaggttatctagaccgg

SEQ ID NO: 159099 - DNA, 594 bp, Zea Mays
ccgaagcgaagctagatcagtcgcccaccgccggacgaccttgtgatttctgtctactttaaagttggccagaaattttgtctgtgcttccttgatcaactgctccttatgtttctcgaactcctgctgaacttcaaccagcacagtctccataatcgattcgatgattttgcttggagacacgtcaaaattgtcctttgaaccgactattggaggccgatctggtagatcttcatcatgcaatgtccccagcgaagtcatcaaaaagtgtattggcgccgatctcggcgtcaatcactatgaagtgtaccggtggcagcgtggatggtctgtggcctagggtcggatggtccataatctgaatcaggagctagatcttctctgcgccgaactggaagtccgcacttggtggtcgaacggtccgcgtgtgcgcagaggtgacggcgtttacaacagcacatggatctaacctctcgggagggaccccgttagggagaagagatcctaagttttgttttggtgtcgacagaccagccaagacgcccctagaaatgacttaagtagaagagatataaagattgagatgaagaagac

SEQ ID NO: 159100 - DNA, 736 bp, Zea Mays
gtagatgaagacttatattatgtgtaggttaaccttactagtttggatatttttcttagttgagttttggatgaagtatagtgacattgattaagcaagtattgtgttgttgttgtgctatcagtgctctttgtggagttttggcatttcttcgatgaactgtgtcgtgcagaatgttattggcttcttgtcggctttattgctccattagttttgtagactttctcccttttgtggggtgcaaagaatgtgagattacatgattatcttttcatgatggcaagaacaaggtttaggaagattaggagttttgtttcaatagaagcacttgttttctggtgctttgaggtgaggtgtttgatcttcttatacattcatttggtgtggatgtttcaccattgaaataaaatgaattgttgaagctggtaagggttgtgcttagtgcatattacccttcataaaagagtgttgtttgaagacattgatgttgatgtatagctgcatcgaaattcgatggtgtgaaatcgtagtgttgattgcatctatgacttgctttgagcttcattgcatgttgattcatgttggatatcaggttgtgtagttttcttagacaattagtccaaggtggaagttcttgtgttaattaagaccaataatggacccatgttttgaatagtggtgctatatggggtaccttggatgctatgcttagagtggtcgaattcgaggacaaatt

SEQ ID NO: 159101 - DNA, 810 bp, Zea Mays
ctccggaccactccatggaacggggtcccattctctagagccggctcccaggctgtcgggtcctcttgctttcgcagagatgtcctaagctgcaagcctggctgttcaattcggatgtcattatgtctgatggaaagggaactgttcgggtgggttagataaaataatatctggaaaactgcaaggtaagaccatggagcagtaggataaactatcatagaggcacatcttatggggtgaatcttttctttataacctgtcatgcatgggtgcagaccaacaggccgggcttatgagggcagacctcaccgggttggcgtacacgtatgcgttatctagttacaaaagggaaacaaattcaacccctcggacttgctcctatggatagacttacagagatgttctagaggtgaggaagaggtactctttcagtcatagcgagatagttacccccgggtcagcgtattcctgccaccttgaagggtccttcccagctgggggagagttgcgtagcccttcttggtttggtacttgccgtagggttaggtcccgaccctgggttcccatctgcatttgatgagagtgctcgtcctcgtgctgtagccatttctgcatgtactcggaggcctggacccgtggggagtccaggagggttttcgggggaaggcaggcttcggccccgtagaccggggagcacggggtccctctgggggtccatctagttgtccccaccggagtaggagcctccagcgaagacatccttcaggttcccctcgggtgactgatacccgaggtcccgttcagtcgcgg

SEQ ID NO: 159102 - DNA, 341 bp, Zea Mays
cttagagagcatgtcaaagtgtataagtttagcgaaggcaccagacctgtttggtgcaacaccagactgagcatcgaatacatagtgcacaacggtcgacaacaggaagattccaatagctagatgatgtggcatgtgtccggtgagttctaacagattgacgaagttgacattttttccaacagtaacctctaagacgataccagacatgtccagtgcgccaatagatatgtttggtgagtacagaaaatcaagagtggggtcccaacgacttttttgagatgggcaacctatatatactccttcaactaggcacaactttatcaatgagctaagaaaca

SEQ ID NO: 159103 - DNA, 647 bp, Zea Mays
gctgaaggttattgcgtgctctaaccaccgataaggagctagggcactagtggttgtcgccaggacctgccggtcgttgagcttctgctgcctcctattctcctgcgatccatgtcctctgaagatgacgttgacctccctgtcaacgcgtggcaatgctccgcccccttccccttcttgctgctgaggctgcctgggcttgtcgggccctcctcgtggtgggggaggtggtagaggctggaacggtcggtcgtgtccaacagagtgcttgaagtccctacagttccatagggtatggcgcatgtccttgtggtacgggcactgggcgttgaggatgtcatccagtgtccgttcacctccgcggggcgcacctcaggctcgagcgacgggtggtccggcgacatgtacctcctcacgaggcctcttctcccagtgcctgtcaggttgttggttcgtgtcgcgccgtggtgctggtggtgcgggtttagtacctccgatgaggtcctgggcccgctcgtcagcagtgatgtagaggtctgcctctcaaaacagttgttcagaggtggtcggtgctttctgcaatatggctcagacgaaggccgagtcattggatccctggtagaaatcttcaatcaccactgccttgg

SEQ ID NO: 159104 - DNA, 494 bp, Zea Mays
tccgtaggagcttggaaccaggcacccatccgctcagacagtaagggattgaggcaggggacagcaccgccgccgcacaggcaactcatcggcgacaccgctccgggctgaacggttggcacgagcaggacgcagaggcatcacgaacatgggcgtgggcttcccgtgcgaggtagtcatccgaagtccaggtaatcgcgcgccagtgacatggtgccgccgcatggggtgggtagcgatactgacatcgggatctttggtaaggacttcctcgagttaaccctttccactgccttcctttccgattacctgtgatcatcgggacaatccggggcgtggggttgacttgcagcggcggggcgccaccgtgggcgctgggcggtgccgccgtgccatgctcggttgggggaagaagcgtgtggaccgcaggatctggcagggatggtgaggatcagatcgggttcaaagaggatatggaccgctcgatctgaatg

SEQ ID NO: 159105 - DNA, 927 bp, Zea Mays
tccgcctgttgtccgcataactcttctgccgactctgagcttcaagtaatcttctgcggattagggcaactttctccttagcctctttaacaaaggcaggtccttccagtgccttttcccctacgttagaccacatgagaggggtctggcatttttgtccatacaatgcttcgaacggtgacatcttgatgctggcctgatggctgttgttatacgagaactccgcataaggcaaactggattcccagcttctatcgaatgttaacacacatgctcttaataaatcttcgaggaccttgttgaccctttctgtctgaccatctgtctgagggtgataggcggtgctgaagtctagcttggtgcccatagctttctgaaggcttgtccaaaatttggaggtgaactaggttcctctatctgacactatctttcttggaatgccatggagtctgactatctctttgagataaattcgggcaagggtggctcctccaaaggtagttttcattgggatgaaatggctaccttggtaaggcggtctattattacctagatagagccattccctttttgcgtccagggtagtccggttacaaaatccatgcctatttcttcccacttccattcaggcactgggaggggttgcaataggcctgcgggcttctgttgctcggctttcgttcgttggcaggtgtcacaccgggccacatactgtgctatctctgtcttcatccctctccaccagtatctggttttgaggtctaggtacatcttggtggttcctgggtggatggagtaggttgagttgtgagcttcctcgagcaggacttctcgtgcctccccttttggtacacacagacgattcttgaaccaaagggctccttgtccatctgtcctgaggtccggaagttgttctttgcgagcttt

SEQ ID NO: 159106 - DNA, 649 bp, Zea Mays
cgaagtgccatttgatacccaaaatatgatatgcgagtgaggtaggcctcgtttttggaattcaattgtgtagagcactgcatggaaagggtgttagaattcatggtagattatgtaatacgtggggaataattgtctggttttttatgtacggtcgtatgtgtgttgtgggatgagaacggccatacctgcagtgcatgatccaaaaatagatccatttcttatgtcatgcatcaaatcatttaatttcatatgataaactcgaactataacattagatctatcgggagggttctgtccattttcaaacatgctttccaaaatttcaggccagtttgcattgcatgtaaaggtgacaaaaaaatcaggtgggccatgaactcgacagatagttatgatgtcatggtaattttggatcatatatcttcttcctcctgtatgtgacgcaggaaggatgatagttttgccaacttcctcaccactaatacaaccacgactaatcgcatctgtgattccctgtatgctttccatgcgcaggtttttttgattgttaataacatagttcaacctattttcatcgatgcatgctctagcgtccactttagcttgacttgataataaaccgtagcatagatatggatttggttgg

SEQ ID NO: 159107 - DNA, 566 bp, Zea Mays
ttgagggggaagagttaaggttgatgttgtttaattttcgggaggctggtcttatcccgaaggaggagccaatgtaatattggttttgctatcgccgttctttggcgacgattagcgaaaatgctgccctcccccctcacaaaagaactatgatggtcatatttgtggtgggtaaatattttgtgtacagtgtatactgtggttgtaacgtgtattgtgcgctgaattgcgattggtggcatctttgagccctttgtgttgatgtttgtttgtgatgatttcgtggtatttgttgtgcctattgtgagtttgctgcaaccttaggcgattttggtgtggatggacatgtacgtgtcctagacaacttcgcaccctgtaggtgatgctgcgcccttgagtggcttttgctcgggcattgtgcgtctcatagacgactgtgcaccatttgggttacgcatctgttgtgcctatccggctgcacccttaggcgacttttactcggatgaaaatgtcttgtagaagacttcgcactctgtgggtggtgtcacgcacttgttgtgcttttc

SEQ ID NO: 159108 - DNA, 644 bp, Zea Mays
ggcggcaaatgagaagagagcacaggatgcaagggaatgggaggcggctagagccgagaaacagatgttggataatcttgctgatcgtctcaagggaagtgagtgagaaaaatgatactataattttgttagtacaatttatttatcctgactttgctaccttatttttctcattatatttgcagagattggatatggcgtaaactatatggcagacgaggcacatgcaagatatgttcaggaaaaaatgtcgacggtggagctgatggaggaggaggacgacaacacatctagattgagggagcttatcgctctcgcagagacaggattacatgggaaagaggaggaagacacatcaaggttgagtgagctcatcgcactagctgaggcaggattacgtgctcaagaggaggaggacgagtttatgtctcaagccactgaagaggtagaggcggcttattacaagaagaagtctgatgaggctgaggttgaggatgagctattctctcaagctgtagatgaagcagaagccaattattacaagagaactgctgacaactgtgatgcaggacaatgcagcaagtggaacgaggttgttgttgaggattgcgcgacggatgactccgaagatgagttacttatag

SEQ ID NO: 159109 - DNA, 900 bp, Zea Mays
taatatttaggacctagcaaaatttgtttgaccaaatttggttggataaaatttgagttacgaattttgcaagttctgtattcatttaaaagaatacatctttaaaggttttaaggaaaaccagtttgcaccgaggcccctctggtttcctctaactatttctttcaaaggtgcccctgcggaactattcccctgagtcactgacttcgcaaaacccccccggctcttctttctttcaacccgggctccttccccccttgtaacagtaaccgtggagaggaaaaagggtagtgcggcttaccggcggtgagagaggtccggtgaagggctgggtgaggtccgggaggtcctagcggccacgtcgaggtgcgggtcgtcgacgatgatggccggaataggtctgaccgcatgcgcaggcggtcgggctcattggtggcatgtgctctggcctgctcacggtggtagggctctatcaaatggcacagggagcttcacgggatgctaaggatgctacaggtacaaggaatcgatgaatggcttaccgtggaactcggtctacatgcgacgacggccggttgaagtccggcgacgtcgatccagcgtctccggtgaggtattgtccaatcctcggctcggggagcttcactgaggtccgtagaagctaaccccaaaggtcgtatggggtagaggatggctagtttggctggtctacggtggccgtggcttgcgcttccgccggcacgaggttctctaggcaaacgccagcgaactcgtgctcgggcagggtcagggacgcgtgggggtgtacggtcgaggcaggggtcgcttttatagccgcgggcgtggggctgcacgcgtgggctgagcaccgagggcgtgctctggcgttgccagggcgcg

SEQ ID NO: 159110 - DNA, 366 bp, Zea Mays
ggccagaagggaggcagagagggagcgactggggagagcgagcacggcgcgcggcatgggagggcgcaggaccaagctcggccgaaaccagggaggtgagcctatagggaggagctgcaggggcgctgctgtgccatgggaaggagagaagtagagggtgacgcgccatggaggagatgaggtcggcatagggacgatgcagatccggttcgtggcgagaccggcgtccaggccaagcatcagagccgacggcgtccatggctgagaagggagaggaagaggataagcgcgcggtgtgccagggaagaggataagcgcgcgcagggagaatatcaggaaggggagaagcggcggggataaggctga

SEQ ID NO: 159111 - DNA, 745 bp, Zea Mays
ggctctttaacaaataagcacgacgaaggggtattctttgattttagccgttggatcataatcgagggcctggattagatctcattatttacacaactagcacgcataatggccgcaggatccgcgatctaaggccttgatttaatgcatcccgcgatccgacttctaccgtttatcgcaagatcaacggttccgaattcgtggaacccgaccgctgtactcgttctaatccaatcgcccatctacgatccgacggtccaaataccttcttcctccctcaaggtcggcacggcgacaacactgccgcggccgcgcacatcaccgaaggcagtcaagccggcgacccaagcccaaaattactgtccgtctagcaccacgtgaacgggaaatcaatgcaagttgaacggggtaccccataccgtggatctacgcatggttgatgctggccgtgacagcacgcaatcctggcggaaaatcacggctccgatgtgccgtggccactgtgggcccccgatctccatcgacgccgcgattacttccgccgcacactggtgttgctccctggtgcgctctgcccacggagtaattgcgtatccgcctaatgctctgaacgccggagaggctttcccccacgcacagcggattcgacggtggtgagaggtgttgggtgaggatttggggtgttccgctcaacctgcccgctccaccgcgccgtaagcacaattgccaatatcaggcgagccct

SEQ ID NO: 159112 - DNA, 391 bp, Zea Mays
attgtccaaaattattgcgccgaggagggggatcaaacccatgcgccctggtagaggcagcggacgacactgctatgctttgctagccacttgagcccaagcaagtttgtgtctaatagtcaatagatgttataaatatgggtagagtgggtattcaaaataataaaaaataatcatgtcaaatcgggtcggcactatgggctgaaacaacagcctaataatggcacacctctcgggtcgggctaacacgagcccaattttaatagtgtcgggacagaccacgacacaacccatttgaccatctatatcgatgccccaatccgcgccatcgtcggccgcaagccccgcacatctcgcgctccacgcaccgtcgcacatctcacactcctcg

SEQ ID NO: 159113 - DNA, 417 bp, Zea Mays
gatcaatgctggaaagatatgcaaacttcagaaatccatttatggcctgaagcaagcatctcggagtaggaacattcattttgatgaagtggtcaaatggtttctttgtcatcaaaatgaagatgcttgtgtttacaagaaggaaagtaggagtgatgttgtatactaatcttgtatgtagatgacatattattgattgggaatgactttcctatgatggaatccgtcaaggcttcactaaaaatgagtttttctatggacttaggggaaacaacttatattttgggcataagaatctatagcgataggtcaaagaggcttataggattaagttaagatacgtacattgacaaggtgttgaaacagttcaacatggaacagtccaagaaaggtatcttgcctatgtcacaaggtata

SEQ ID NO: 159114 - DNA, 348 bp, Zea Mays
catttggataggcagtgcaagtgggatcaggatatgtgatgctgagacagttaaagttatgatgaagaatcaacagaattgcagtatgattgggaaactggtttcagaagttggactatgggttagcctctcaataacttagttttaaatggtctacgttgacatgtctttgtctaaaattttattggtacttgcattatcaacctaccaagaaataaagtttgttctgttttttctgctcctttgatctctttgctaaaattcatgcggtgatttgtgttccaggccaatcaagaggctgaacagagctatgcaggcgagcatgcattcattatattcccacagttg

SEQ ID NO: 159115 - DNA, 1127 bp, Zea Mays
ggagtgagtcttgcacgattgaatcacttgacgcagggggtgagctcgcctctaaaaaccttagcgttccgacatttccaaaggtgccgacagcataggaggatgaagccattgaagccctatccttgaagagcatggggcaagcaagctcatggaggcgggagcagtgcatacttgcgtgaatggtgatgccgacaacagtccagaaggcattggcaaagctgcagtggaagaggatatgtgacgttctcataggttatgtagaacaaacttcaaaggtatcactgtcaaggatttttcttgtgtaagttcactcgtgtttggagtctgtgttttgaggctagccaagagaagaagcagactcttagcaacgctttgctttcccagatgaaggtggacaaggaggtagaaggctccctatggtttgttagcattttgtagaggagccctgagtggagggagccgtctgttttggcaagcatacattgtctgctgtctggcatgccagagagcctaatgtcccgaagaagggtgtttaggctatcaagctcattctttgccttatccgagaggtgggagacaaaagccataacaagagggtgagagaggaccctaaaaatagaggagctcgacatcttggaatgagacttgagggtggaaaattttgtggcaaggtcattatccgagcactagacgtcgtgccaaaaggaggtgatttttcaatcatggatgacacaggtggtgatagcatgacagaggtggagcaaggacagcaaggaggcccagtgggcacccgggaggtcactagtgaggcttgctagatagacacagtagtggacccaaacacccaaagaggagcaagacaaagtgtggaggcggtggatcagcttaaggtcaagacagttgttgaacctttcaagatctcggacgccaaggccaccagagttttttctctcgagcatcgtgtcccaagggacaaggcatcgagacccacgaacaatatccttgcccgaccaaaggaagccatggcgacgttggtccagttttttgacaacccctttctgaagctggacgacacaatgtagtttaagtggatgtcatggacggatttgatgaagaccaagcac

SEQ ID NO: 159116 - DNA, 387 bp, Zea Mays
tgaaggtgcctgaaaaatttgggttcaattggagcaagtttggctggtttgggcatttcaccgagcacgtggcgtgcggggagctagggttttagggaaatgaccatttgaggtgggaatgccctcccgaaggagctaaaagtttgcagggatacacaagggaggtacatgaactcattccatcaattggattcacaggaattcacagatttggaagatttgcaaagggggtggtgaatgaatgccacagagaccttcaaactgagagcaaggagattgagggaaggagagagctgctcaccgaggggaagggcacgggcgaggtcgccggagcccggcggggatggtcgccgccggtggagatcgccggcggggggctaatcgccg

SEQ ID NO: 159117 - DNA, 879 bp, Zea Mays
ctacagtgcaaaacagtacttttgagtaaaatttaggtagactgctgcaaacggccttagcggacaggagagtacgttcgttcgttctgtcgtgcaatgatgcaaagggaaaatagagagactcgttagtatcattagcaagaagaaaaattagagactcgctagtatcattagcaagaagaaaaatagagagactcgttagtaccgtctgatccggaccattctgtagtttgtccccatcaatctgtgacgaaggaacaccaacatactgttcgcacgtccccttcagtacgtgctacggtcatcgtcattatttggatgcacaatcctctgccatcgacacctagcagatggcaatagtaacttgccatttgcccatttggtaggccgtacagccatacgtttggcaaatagccagctaaatctatctcatatttcaaatttcactatataattagggcaatctatagcatgaaactgtgtttgacacggccatatacacaatcagctgtccatagcctaaattcagttttctgacacacatagcctaaattcagttttgagtcaagtataactaacagacaactgatgttgtacgccagtcctccgagtctacaagccagtcatccatccgtatcgcctttcagatgcgagtgcgtccatgatccatccccgaccaacgtcacctgatgttccaacccagcgaacgaaacagattccattttccaatttctaaccaattccggctctctcgagaagactcaattctggtgcctgtcgtaatcatcacgcggacacaccacacagttcgtgatccacactgctgcacgtgacggcacagtacagttgatttcaacgacgtagctttcatagtgtgcc

SEQ ID NO: 159118 - DNA, 531 bp, Zea Mays
aaggggtatgggccacgatgggccattggattagaatcctacggatcagatcagacctacctgagattgaattggagcgaggtgagaaccgcacgatccatgatctacggccagatcgcgcactagcaatcgttacgcgactatctaaatcataaccgcccattgaaccacccacgacctagatttaacccagccgaaggggtatcctatttctaatcgtagccacccacgcgatgatcaacgggcatgaccacatctccttcctccgaccaaccgagacggcggcgccgccctgaaccacggtggtccattgccggaccacacccaaaactctactctggccgccgtgaatcgatccaaggagcgtaaactactgcatatgggtagtgagatcggtggagggcatcataccggagtaattcgcgacggtcgagcgggtccactgtaggggatttctcggagtagatttgaaatccggcgagcaatcaccggcataccagtcaccaaccgcaaccagaaagaagtggcaca

SEQ ID NO: 159119 - DNA, 400 bp, Zea Mays
tggacgatatgattacaccccacggtcacgtcatgttactactcaaggacagtttgctaaacgctcagcgtaccaagccatccctcggttacacccattggggaggggacgtccaagaattttcaatagattttcccaagcagtcacatccatacagtatacgcaatgaatgtatcaagacagaagaaagatatcgatggagatcagaggaaagccaaatatagctactgaagtacaagtctaatcaacagaagcattgaagcacaaagcaaaatgaagaccagccaagagtcatctaccagacgtccaatctattgccaatcaaataaatttcaaacctaacaggtcatgggcagatcacattgttattctttaaaacaggaaatgaagacaacatgct

SEQ ID NO: 159120 - DNA, 1119 bp, Zea Mays
ttaccccaccaattgcgggcagccattgaagcatccatccaagagccaaataatcctaaaaggtattcaccttccaccaccagagtatctcatctccctttctttttttttacaagagcggtgaatctgctgctgctgctgctttttttactatctaggggtggcactggattcgagacagattcactgcctgctagtaagcagagaatgagagatgccctttttttcatcgactgctgatcaggaaaatattaaaaaagaagccgaccaacaatggtcaggaattccacagtggtctactgcatgctacgatctgtcatgcatggttttttatgtctatagaataaatttaacggggactctccaagtagattgggtaggagaaactctggattttgtggcataatacagtacgtggtttcatggtgtgcgaaggactcttccatagcagagagagagagagagaggcaactgtaagataaacccattttttgctgggaatgggtagctagctgtgcctttgtcattttgcaggtaggtctgctacttattagccctctctacctaccaccgctagtgatcaatgtagtgcacagtcaatgcctcaatggtagctagaggctatgcttgattctaggccaatgcggcagttagtggagtctcttgagggggtctttaagaggctaagtggaaaaaatacaagagacgagcttttcacgactctctatacatgttgtctttagcaatatttattacccagagtctcaagcttgtatcatgcagtcttatttgtctattgtattttgaaaaccgaaccagcatgtcctaagggattttaggttttagggttttgagtccgccgggatgtcaccctaacagcccttgttgctgtgttagttgtgagcaccactttttttttcttattctaatttgagactcgtgttcttccatatatgcctcaaataactacaacttttgctttgtttctttgcttactaaatatttctttcatcagtaaccaagggtgctacagtcatgcatgttaggcggtccctttctttagaaaaaataggatttcaacaaagatagaaaaataatattactggcgcttgaaaattt

SEQ ID NO: 159121 - DNA, 1016 bp, Zea Mays
tactaagattaagagtagatcactaggcccaaaactaacccactagagcgccaacaagttctctcactaaataagcgacctgatctgaattcttctgctgatttctgaagatcctgttgtttctttctaaccataagctccaccaaaagtagatcagaagcccatcgaatttttttctagattgcctattacagagacctcttagattcctccaccaatcatacaacgactccgatgtctggtttcctcccaagaaagaacagttcccccatatcaaaattttgttccacacctctctactgaaagggcaatctttgcataaatgggttaccgtctctagtgctgagttacaaagacagcaaactgggttgcactgccaatgtcttttctgaaggttgtcagcagtcagcactttattatgcaaaagagtccatgcaaaaaacggcacttaggttcagtttttgctttccaaatggggtcaattttcattatgcaataatttgctgcaaattggatcttataagcgctgcttgcactgtactcaccatcttctgtccatctccaagaaatggagtcttctagatcgttgagctcgtgtgtactattgatggcctgccaaaggccgagcaattcctttaattcttctgcaccatcgtagggagagcataactggatccaacggttgtttctcagggcctagaaagtcgaaatgttcttcctttttgctttgttgaaaagacttggtgcaatgttttttggtgcttgaccatggatccaactagatttccagaatacagcagttttcccattacccaccttcacacaagtggaagcgttgaaaagatcttcatctgattcatcacatggcagctgcaaattcacccatgctttgtctttggccttccatcgaaaccacaaccatcttagtcttaaagccctcgcaaaacgattcaggtctagaatgcccaatccccctttgcactttggtaaacaagtagtagaccagttgatcagac

SEQ ID NO: 159122 - DNA, 878 bp, Zea Mays
gtgatttcaattgaccagccatctcgtcgaccaaagcctgatattgaaaacaaatgagtacaaagacagtaatttgcctcgaatatagccagaacaggaaaagccaaattacctgaagattagagaagaataaaggaaatcccaaatcacgagaagccaggtgatggctcgacgaaggaatatcaaccggggcaatctgaagaatatcaccagggatcaactcagcaccaccagcaggcatcagaactctagcatccagtgcgctgacctctaaggcgacttcctcatttgaagcaccatgccatcagaatgtggaggagaagacccaacgtggacatccatggaggtatgagaaggggagcccacttggacacccttgggggctaggttgcagcccgcaccacccatcggagccggatcaccaccggcaacaccctcgggggctgggttgcagctcgcgctacccacccaagccagatcattaccggcaacaccctcgggggctgggcaaccactggcaccatccttgaggactgggttctccacaacagccacctctaaggctgaaggactttcagtcaccttcatggaaattgaacaaccctgaccaacctcttggctccggagaccgccttccaaggtcgatgatgcacgagacactgctcgggataactctaatcccacatctggaatgtcggaacaaatgtccatcatatcaccgtcagttggctcggacagcatgtcttcaggaacgacatcctcgagagcctgatcaaagttggctatggataattcttgcaggccaacaagagcagacaaagctggagaaggaatatcgctactcccccactgactctgtaacgccgactgttcttccg

SEQ ID NO: 159123 - DNA, 569 bp, Zea Mays
ttgtttgctagaggatctatgtatcgagtatttactctcttcctctgaccctccttatgtagatcaaggaggggcggttacaaatgtcgtctcttggaagggatcgttgcgctagggtaaacaaaatagttcttcctcgataaaagcattaccgtgcattattattcgtctccgcataaatctagtcatgtctcttcaagacttctggtgaagcgtgccggcgatgggagtccgaacatcattattactccttttgtccacctctgtctatgttgacccttggtttccctggcctgacctcgggcctcccttcaccgtcttgtgttcttcgtaggatgtcaaaggactcaggtctaggttatgtaggtctaggccatgtaggtcatgaatggggctcatgcctagggcccataggtcataagtggggataacgcctagacccaaagatcatgagtggagctcaggcctaggtcccgtaggtcatgaatgtggctcgggcctaggacccataggtcatgagtgtggctcaggcttaggacctgtcgggcatgagtgggagacagacttgc

SEQ ID NO: 159124 - DNA, 607 bp, Zea Mays
gcctgaccaagaaaggatgcggtggcttcgtgaagccccgctcatgaaatatagacgaacgataccatgaagcccgacgatggcacacagggatgacctcctgcccaggaacatcaaaaccctcctcacgagaaattccataggcgtcttggtggtttcaatcaaccctagaatggttccagaacgccatgttttgcgaatggaagaaatggcagctacgtagacaaagggactcggcgttaaaaaggtggatagagagagccaaaacgacaaagctcccgaacttaggacaaccattctgctgttgtttaggctatttgatgaggtgcgtgccccggtaagcatcaatgcctagttataacatagtcaacctctaaaacagggaacgaaaaatgggcacaatgtaagaatgccttgactagctaggtttaaaggcatgacgcccaccaaatctagccaggcgatagatgccaacatcgcacgaccatgtttcggtgagaccgctcgcctgtctttgtgaataatctctatttcgcaccttttgctggaataggacctcagaacccatgccaaataacgccaaggggtgggccgggtaggtccaaac

SEQ ID NO: 159125 - DNA, 603 bp, Zea Mays
agactgacggtgactacccaaattaactacggggcgagtattaccgacccgaggtgaccctagaacaggttctaattggattaatccgaccctgcatttgcctgaccacggtgatggcgaacaccgtacacagaccaagatgttccggttgattaagtggggtcaagctcaatgggtcaagcagacgacgatcgcaagcatgtgtaggtgctaaaacacggactagaagagcgacggcggacctggaggcggctggtcacatcacgacgtctcatggtggcgcagatagatgatttgggggaagaatgaaattctccgtctatggtggctaattgaaggtgggaatgggtgctctggcttcatgataacatggcgcaatagaccgagtcatcaatatataagggcgctaagcggtggtgtccaattttgaaagggaagaccggtggccgagaggagaggtgagtcaccggcgtgaactatcttggtgttccccggggtaatgcctccgacgacgaactgacctcctacggatatctactgcgacgtggtagatcttctaagcacgtggcgtggctacgatcgacggtgaactctgacgaggac

SEQ ID NO: 159126 - DNA, 391 bp, Zea Mays
ccagattgaggggctctcaatcggtcttgtactggaggtgtcaacctattgaatacagatgtttggggtaccttccaagcggggtactgtggcatcccaaatgagtatggtggcatgccccacatttgatttgggacatatgttggaggtatgtatgtgtatggatatggcataggtggatatggtggtggaagtgtccatgcaggcacgttaggtcttaattgaacattatgacctcccgtcctttccgattggtgtggtggtccaatcggcttaacctgccgtcgcacctgggtgagtaagcgaggtccctttggtggccggttgctggggccaaccttctttttcacatatttagacaataattgatcaaaggtcgggctagatttta

SEQ ID NO: 159127 - DNA, 376 bp, Zea Mays
cgagaggtccatgaatgacacgattctcggtctgaactagcatgggtctattttgaatcatgtcgggccatgttgtgacactatcaaatgagttgtgtctgccgggccgaaccttgacactattaaattagtcgtacctcgaggcagcccgctaggcataaaacatttggtcatctacagtccagtacctcctccctcaccgtccttgatctctagagcatggaaaaaagcgagagaatgaacttgatcttgtcttactccaaaccacatacctcgacatttgcattaacctaatctacgagtttggatcatgtttgaaaaactatcccattgaagcaaagtctatctataatatagaaaccgtagtgatgctcgt

SEQ ID NO: 159128 - DNA, 452 bp, Zea Mays
ccatggcgcaaagtaaattggaggaggtggtgacgtcgcggcgagaaatccttgctcctccagttacggttctcgccccacgaggatccggttcaacctagcgtgctcctacgaccccccctgttctcatcatgaggccagatcggcggtctgggcacgaatcgcccacggcggcggtcggatctcaaaacggcaccacgccctttggtgctttcgttcgatgccatggacgagaggaggtggccggtcttataggtagtcctgcgaggatctcggccgatctgttccttagctctgcgcaaatcacgcaggaacggcggagtcgctcgcgcccagcccgccgcgaccatgggttcctgcttctacgcgattctgtttcaggctggaagaaccctctgaccgatcggacccacacctcagtgagagtaagggcttgggtgagcgaggcccac

SEQ ID NO: 159129 - DNA, 720 bp, Zea Mays
ggcaggcttgagctttatcactattcatgatcgagggcctttggatgctgaagcgagatcgtattggatgctgaattatatcttttacatcctccctctcaaccaagtcattcttaacatagaaccattgcctcatccaagatcctagctatttttttgcgaaaggtgtgggaacaaggcatcttgcatcagagcggtacacgaaggaatatcaaccaaaattgttgtggtattgttccttccccatgccttcgtatgataagataattcatgtatattataaaagtaatcaacgtctggttgcaacccctagctcctcattgcccagatgaaaaccctgattttgatcaaagctttgggggtaagttgatgaagatatatctcgaatcttttaagtacttcaaccagcattttatgcataggaaaccggagacgagccttcataaaaccgtggtaaaacaaccacttcatcagcttcaggaaaaggaacaatattctctcctctggccctcactatagttgtatcacgaaaatatttacctttcagtgcttcaatatgtcctctcttaacagtggattttccaaattcaacatgacttggcctccatggccgatcttcggcgtcatcgttgccactctccacatcaaaatcctcactgtcactagaacccccagacaaccaagctaacatgtcatcaataatcttctcaacattggtcc

SEQ ID NO: 159130 - DNA, 975 bp, Zea Mays
caattcttgtagaccaatgagggcagacaaagcaggagaaggaactccactactttccccactggctacgtagcgccgactgttcttccgaatcagagggatttcatcttcttcttcctcctcattttcatcagtaacacggacagcacacccattggggtcagcgtcagatgggtcgcacccattggggtcagcgtcggtaaattcaggcacgggcacttcctcagtagcaggagccgaaggaccagcatcccgatccaagctagacactcgccgaagacgtctcttcttctttttctgcccatcggcaggagaagcaggctgattggctcggcaagggcgttttgggcgaacactgacaggcctctgaatatccaaggccttactagcttctgggagaggcgccaccgtcaatgttccagtaggagcggcatcagaagaatcctcggctaacatatcaagcatagcacttatctctgcatcactgggatccaaaggcacctcaaagtgaacctgctattcatcatcaggaatttctccaagcaaagcaaccaaagcactaacttcttcggcagagggtcgtactctaaggcccaaactgccatcaccagcaggaggatttgacacgaaatgggtaaaggccttggaaggaggcaagttctaggccgagtaggcaacaggggcaccaacaattgataccttgcctctgagtatcatttcgagtcggctcaccaagtccacaacaggaattcttctattggtgacccgggtggagtcagctaggccccggtacagataggccgggtatgccctgtccttcaatggctgaatattcttgaagacaaagtcagcaaccacagcctcagcagtcagacccctttccttcaacaatccaacctcagctagcagaactcctgcctcagccacatcctggtctgtgggggattcggtccagctcggagtgcaaacatccgg

SEQ ID NO: 159131 - DNA, 414 bp, Zea Mays
cgaagaggtcgaagcttttgaagaaatactcagtgatcgtggagatttttgtgccttcgccagtgcccgaggggttgcagcagttttggagaaaactggatgtgaacatgttaaggttgcagcctaggcagaagctatcttctctacagatgatacaaaggaaccttcaaccaaagctactttgatgggcgggaagttctattccgatatctggatgaagggtggtcgtgagatggccgatgaagctataaaaaagagtgaaaaagaatctcatgatgcacaagtggaggcaaaggaggctgaagaagctactgaacgcacattgattatatgtatcccctttttaaaaaaaactttttgtctcgttgtttgtttataacttcgaaaattcatcattatgccttttattaccat

SEQ ID NO: 159132 - DNA, 376 bp, Zea Mays
tatcaatccaacaaaaaatagaactcatcgtcaaaataaaaatacctgaagttcgttgcctgtgtcgttgtaacaacctcgtcatcggcctctccatcggcctctccatcgtagtcctccccatagtcatcatcatcacgcatcgatgaaccttggcctgccagctcgtcctcctgcctaggtgcattgtggtctgccgcctcgcgctcttgctcaaatgcattgtggtcctgctctagcataagtccacttgagcctatcgcctcacgctcctgctcaagtgcattgtggcctgccacctcgcgctcttgcccaggtgcactatggcctgccacctcacgctcttgcccaggtgcactatggcttgccacttcgc

SEQ ID NO: 159133 - DNA, 630 bp, Zea Mays
gcaggcgcgaatcgttgggtatcaggcggatggttaggtttaggcttaggttagctagaatccaacctttggatctagggtgattggcgcggatcgagcgacctgcttcgatcgtttcctccagccaccagaggcggcgccgcccgcgtccacaacgagaagctcactagagacgaggggtacaggcgctctgggggtcttagggcggctaggatggcctaggaagatgggaacgggtgcgggaaacctaatggtaggggcactagagggtggaggtccacggtggggcggctcggggcagcgctcggaactccgacgagcaattgcgcacaatagagagcatgggagggaaatggagggggccgaggaggtttcttacctctgagcaagacttgggatcccctcgaaggcggcaatgacatggtggcggctccgggactacatagggaagagggtgagcgagggcatgacaaaccagagggagaaaggggaattggggtgagtctcgagcgcctggtaccgaggcgaagctcaccgtgacaagggcgacgacaggagctcaacgacgacggcagaacgaccttcgtgatggcggcagcgttgctacatgctggtgggggaaatgggcag

SEQ ID NO: 159134 - DNA, 460 bp, Zea Mays
taatttgacattgttcttaggtggctcaatagatcctacttgtctcccacatagaggtgaatggggttgttttgttggtcgattgttgggaccgaccttctttttcacatatttgaatagtaactaatcaaaggttgggccagatttggctagccgacatgatgctttagatgtattggtcttccacgtacctatttttggtcatcatggcttgaaggtacgtggttgtcgctgctcctggttactgctagactgtctgccagacccatctaaaccattcgatggggtcctggaccatccgtgcctacgtggcggaccgttcgcgatgcgcaaaacaggtcgctgcacttggtcgcctgcctgcgcctgcccccaacattggagtccgagatggtgatcttcaatgtctcccctccatctagggtcttttcaacaaccactttcctgtaagaaattttgg

SEQ ID NO: 159135 - DNA, 418 bp, Zea Mays
acactcattacagcaattctctgccctcatctaagccagtcggctcgttttggtggaaagatattctcaaaatccatgattcttttaaggaaattgcccaagtgcaaattggaaatggtaaatctacgcttctctggcatgatcgatggaatgggcaatgtttatctcaaaagttcctggagctccggtcttttgcctctatcaaaaagattaccatccatcaagcttgattagcctcctcgaatgaaatgctccatatccccctctctgctgaagcgttcgagcaacttctctcacttcaggacacccttggtaatattcagttgcttgatcacaatgatatttggagatgcagtgcctcttccactcggttttcctcttagacggtttatactcacttgactggcacccgtcaaac

SEQ ID NO: 159136 - DNA, 541 bp, Zea Mays
ggccgagatctctgtgggtggcttcaacggtgggagatcacagaactgctcgccggagtacctactctaccgcgggatccgccgccaccattgagctcgggtgtgggttgtcgcggagtcctaggtggtcggctaggtgtggccggtctcctcgctcggtcatggccatggcgcgccgtcgcctaccacttcgccctcgtctctggccatcgggaggatggaaaagacgctcggatcattggatctcatccaacggccgaaattagacgaaaggtactagttcgtgctgatgcaatcatggccgttgatctaaccagggacgattacgattagactgggcgcttacctcttcgttggttgagtttgtgctgttgatctatgatctaacggttgcgatgcgcgtggggttaagctgtcgtgccaactttacatacgagccctcgagatttaaggtaataaacccgccatccatgctgattaaaaaaataattctaaccgggtccttttatttacggattcaaccctgtgcttacaagaaata

SEQ ID NO: 159137 - DNA, 326 bp, Zea Mays
gttggacttcccaacaacaagatgggtatatgactatgacagcaagttttattgatgagaattggattttgcagaagaaagtcattagctttttcaagataaaggggcataagggggatgatattgggaaaagcttgatcaaaagtttggtggactggggtttggatagaattatgactgtaacagttgataatgcaagtgtcaatgatagtgctattggttatttgagaagacaattacagaaaacaacaatagcagatggcaagtatctccacatgaggtgtgctgcacatatagtgaacctcattgtgcgagatggcttgaaa

SEQ ID NO: 159138 - DNA, 547 bp, Zea Mays
gaaagaacgtcacgttcttggaagcgattcacgagtctgtggagggagagaggacagttgcgttacttgtccggcgatgacgttttctacagttcacacagcagcttctgcttccactcagttttccatcagtgggatgcgataagcaagatcaggagtcagagccactaccactagaaccataataatctgaactgtcaacggggcgagcatgcgtagtggcagcggtaaagctgtgctagagcgagcgagagagcgagcgcgacgtccacaaaccaccacggcacaacctgagcgagtgcagtgatctcggtttcaaaaggctgtatgaataccctacaagtgtcaagtgcgcgtgccatccgattaaaagccagcaccatttagtgcagaaatgggtcatgatgctacagcattactactacttggtggtgagtagcatagtctatgtcctgtccgaaatgcatgccgtgacacacgttcgatggtccataataatctactatgcctccacctcgacagtgcgtgcgcccagcttccattccag

SEQ ID NO: 159139 - DNA, 414 bp, Zea Mays
aggcggtaggcgtggttttatccgaagccatctgccagggggagagagttactattatgcatatgccaatttttttcatttattcattacaccagttcattacaagcatacaactactagaagtcgcactacacgcgagcgctctctgaggtacttccgaactcttttttctaaagtgtccccaaattccttgagaaggtcatcaaggctagctagggacatatcctcgacgtcggacaagttctctatcctggggggaggtggtgctggaggggctttcttcttccgctcagtctggcatccttggctcttggtcttcttttggattttcttcgtgggggcgagcttctttagcttcttatcgtaatccatcttcagggtttggtaggcttcacgagtgttggcctcctcgcc

SEQ ID NO: 159140 - DNA, 584 bp, Zea Mays
gtgaaaggcaaaaacacaccaaaaggtagagttaggacaagacttgcaacgcgatagaggaaaaagggaacgaacaagagcgggatagggaaaacaacactcttggattgaaatggaataagtgaagctaagaaaaataggtaaacatcatggtaaatatggagagaggtcaagggtcataggtgataataggcaaggatataaagggagaggtaaatgtgcataaaaaaaccaggaatctaggtacaaccaagaatagagttaagataagtcttgcaagtggtaaagtatagtatatatccacaggtgaggtaagtaagagaccacgcttgaactaaggtgggagattggaggttttagataacgaacatagcgtaatcgccaaggtaagattgagagatgagaagggtagaggcaataagaaacaaaagcataacgaaggatgaggttacaaactcgcgagccaaagaagaggatacgaccaagagaaagaaggtatgagacgaaagaggggcgattttaaagggcaggtatgagatgaacatcaatgcaatatatagaagtgtcaaggggtaaaggtgata

SEQ ID NO: 159141 - DNA, 567 bp, Zea Mays
gctcggacgggactccgaagtggcagacaatgttttgccagaagaatttttgggcggtcttcgatgttattatggagattgccctggcctcaatccactttgtgaaatattcaacggcgatgaaggtgaacttgagattcccttgagctgtgggcagtggtccaatgatgtccagcccccagcgttgaagtggccatgtatgggcggtgagcttggtgaattgtgaagggtggactgagcgaggagagaacttctggcatgcttcgcatgaccttgtgactcaattggcagtacaaattattgcgggccaaaaaaatccctgacgaatcaccttggcagcgagggccctgggtcctgagtgtgagccgtaggttccgctgtggacttcgcggaggatttctatgccttcggtttcagttatgcatttcagcatgggctggttgatcccctttttgtacagctgaccctcgactaatgcgaagtccctgctcctgtgctttagtcatttggcctcattgcgatcggttggatgctagtggccttgcaggtatagtgttattggggccc

SEQ ID NO: 159142 - DNA, 376 bp, Zea Mays
gggccgcggcacgccatgaacggggtcctctgctacgaaatcgtcaataataccttgcccactaagttcaccctcgtctttacctcgcgtagcatcaatggtagggtgtcgggtgttcggattcatcgggatggcgtgtcgccggtgagggcgccaccgcgacctaggcagcgccgccacggtccggtatttaggaacaggagaagggagacctcgcgtcggaaccgtggatgtcgcaatgaacggtcgagattagatggagagtagtgcaagtgtcagtcgttggatcgcgatcgtgcggtttagatcggttattgcgtaacccttcaccgggagtaatgataggcttcaatctcagatcgtgtggacgcagggt

SEQ ID NO: 159143 - DNA, 696 bp, Zea Mays
gttctgtttgggtaaagtcgcatatttgtcgctcgcccaacagacttagatagtacagtgtcatcggaaaaaagcaaactgcacacaggggaccttatgtgttcttctggcagacatcatctctattggtggacatctctaaaattagcttaaggcgatatatgttatgtccactaaagaaaccccatcctaaggcactcgcctttgcttggaactgccttatgattatcgctggaatggacaagggttacatgcttctctactcttaaaagtctttcgctacgaatcttgggacgagattcttttaagggggagggctgtaacaccataggtgttatctcccgttaaacaacgattatggatttaagcgcgggatgtcagtaaataaagtggacactaaattataatcatctcgcaaaagttcaagtttggtgccattttcatttcgataatctacgcacttaaaaagggttcatgaagcttttgaattatcgaatcttcaccgctggcgaattttgaactgatcggatcacgtgcgtaagaatgcgaaaatcagaaaacttctgattttatgtaaaatttggagcccgcgctgtccgaactgaacgatgcgccagctgattaagtgaatcgttcctctcagcatgtgatcgttggcgtcagatcaaatgatcgatcactggtgaggatcgtaaa

SEQ ID NO: 159144 - DNA, 543 bp, Zea Mays
gtgggttggatcaattaaaatccgagggatcttttgaataactcgctggccgaaggggtattgtgggatccagcgccgtccgattacaactggcggcacagattagatcagcatatttacgaatcggtatccgtttgtgaccgttcgatcccggatctaaggccaagaattaataacaacctctcagttctcacccatccgatcccgatcgaatgaccctcgcgcacatggccgaatcgttacttggtttctaatctcggccatccaacgacggatcaatggtcgagaacgtgcgcaccaacccaacggcgaagcacggcggcgtcggcaagatccgcggcggtgaccatggctggcgctcccaacccatgtattccggcccctatacctaattctgaactgcgctacacgaagaggagagtagtgcaaagagtacggaggtgattctacctcggatttgcaacgatggcggcacgtccacgaggttctgcggtccgcggatctccggtgagaaatccccaaaaccctagtggtgtctagctc

SEQ ID NO: 159145 - DNA, 437 bp, Zea Mays
tttgtaatgaaagatgtgtgatgaagttagtttgttttagaatatttgttgaaatgcttcattcatgtgatagacatgtgtggttagatcaaatcgagtcggtgtgtgtgacgatgatattcatgaattaagtagatgttctaaaattgtgtagtgaagcttaggttgagtttcaagcgatgggggaatgttttggtaaagatataggtgaattgtgaacgagtcatttaacgtattaggcatgtcgtgtagtggtcgtatgaaaaatgggttaggaatcgatcggctaaatgccaagttcggttagagttattttgttacttgggattgtgggatgaagtgatggcatgactacgtagcagtcacgtcatctattgtgtgactatgcttaagtgtgtcttgctataagttagaataagtcgagtctctagaacgcg

SEQ ID NO: 159146 - DNA, 665 bp, Zea Mays
gtgaggattattcacacctcttcttgaagatctcgcaaattctgtgaaactatgagttaactagtgtgcctttgtctctcgtgggctcccctacaggttcttctctccctttgggaggtttccaaacctagaacaaccaattcaccaattctctaaaacccttcatgccaagtgctcggtgatatgcccaaacaactcaaatttgctcaaatcgatcctagttttttagcaccgtcatgccacctctagtaacactcacgccaaatttcacgcctattcgatatcccagacaccgaatacaccactgtttcccatttatagcgatcgtttcttaggcgagtgccaaaaatttgttttcttcgtaaaatttcagaccaagctcacacttcactcatatatatctatctgtgaagtatcgactcaatcccacgacttttcatgcctcttttcaaatttcaaacctcctatggcacaattcgtcgttatcgagtcatttgacccccgtttctccaaatcgcccagtttttgtgtcttcactccatgtgtatgtatttattcacatttcatatacttatgactatatgactaatacgtgctcacctcttttgtcatttcagtgatctcgcctgcccgtgttcccgtctcctgttctgcctagatcttct

SEQ ID NO: 159147 - DNA, 548 bp, Zea Mays
tcaccaccgacgaaccggctcaggacctcatcggaggagcgaagcctgcaccggcggcaccacgatgcgacacgaaccaacaacccgacaaacgttgggagaagaggcctcatgaagaagtccacgctgccggaccacctgcctctcgcgcccgaggagcacctcgcggaggcgaacgcacattggacgacatcctcgacgcccagtgcccgtaccacaaggacatgcgccacaccctccgaaattgcagacttcaagcacttcgttgggaacggctgacccttccaacctctaccacctccccacctcgaggaggacccggagaaccgtgacagcctcaacaacaggaagggggaggaggcggagcattcccgcgcatcgacggagtagttaacgtcatctttggcggacatgggtcgcaagaaagcaagaggcaatagaagctcaacgaccgtcagatactggtggcggccaccggtcctcccgccccatatcgatggtccaaccacccgatcaccttcactcgggtggatcagaggctcaacttc

SEQ ID NO: 159148 - DNA, 1154 bp, Zea Mays
gaaaagaaaatagaaaataggaaggaaattagaagggcgcctgggcctaaactcctcctttcggcccacctcttcgtttcccagcgcacactcggcccagaactcagcccaccaccgcgcttgcctcacagacactgacttgtggggacatcgcgtcagtcgtccaaccaggtactacatcccacgcgcgctgtcgcagctaacactccgtgagactggttactgggacccacgcatcgcctcgtcgagttcgctgtcacgtgggaccgccgtgtcggaccgttcccttccgattcgttcgctcgggcgggactgggtcgcagccagctcaaatcggcggtgatctcgggcaagtagtttgcccagccggcttacataaatctccgcgcaccactatcttcgccgtaccccgtgccaccgcctcgttacaaccaccgcgataaccagcgactacagaggtctgtaagccgagcgccgcgggtggagtaccaccctacgtgcccggtgggcgcgttgagtaattcctggggtaccctgaacgcgggcgtcaccgattgtgggtgaaggcgggaccgtgcgggtggaatttctcgacggattagtcttcaccgccaagccgctcctcacaccgaccagacccctacgtcctcctccactggtaagagtcgttctagcacctcgttatcatgctagccaagtattgaatcgatgggtaggaaggattatgtcatatgggatcgggaatttctcgccgatgttaaacgccgccgcgactctgttttgccgtgggctgtgctggttgtgccacccccatgggtaccttggccgccactgtggtcgtgtagtcctggcgtctcgaatggagggacgtgtggtgggtagcaagtcggggcgtgggttggctgcgcgccggtgattcgccgtcgggtcatggcgggggaatcgccgcccggctcggccggaggatgaagacggccggggaggcgtccatcttgtgatctgcgactaggatcagattccgcgtatccggttggtgtaggttagatctatgccgctggatagaaatcgtgcgagtgaaactcgatctgaagatttgtaaatctggtgcgttagtctggcatctgagggctcatgattgcgcacgagatcgcagg

SEQ ID NO: 159149 - DNA, 453 bp, Zea Mays
aggtttttcatatgtgcttcagggagagacacttttgttagggggagtctttgagccattcaggagctctcactagttatgttgagcctttgcctctttctggaggaactggctttgattttagcttttgtgctgattttgtgctaattttgtgctctgatttggttttggctgctggctagtggtgttgagcccctttctgtctcttcttgaggactagccatttttctcgcttggttgtgttgagttgttgcccatttctttggggaccaagctttgctcactctggatgacttgaatggtttttatctggcttttggtcattcaggtgagtatctcttcttctttctttttctactaatataagctcagtggtgttgacaatgcactcatcaaaaaggagattgtgaacacaagattgccttgtcccttgtggttcgggttgatgatgag

SEQ ID NO: 159150 - DNA, 541 bp, Zea Mays
cgtcatgatttttgttgtatggcggatcgaagccttgtcgtcgtagtctcggggaatttttggaagtgtgctggtgctttactgatggggttgtatatacttgtgatgtattacaatagttgtgtgtcgtgcaagtatccacaaatggtgaaagatggtgtatgttggtaattagaaaatggtcacttcgttagccaatagccaagcttatgccgagatttaaaatatgggcaagttaaattgaaatcatgcttatctaggcgtgtggttaaataataataattttggcttgtgcagtgaggtggtgacatgccgaagtagtcatcgcttcctctatgtttctaagtcgagtcaaaatgcggggtactagtagtacgctaggcaggcggtgttccaaatagataaatcgggtgatgtggtagttgtcaagcgtgatagagattgagtcacttaggttataaatttatgctcgacatgtgaggtctcctaaaatatggtgttttaagtgactcgtgtgttgtccaatttaagttgagaaaat

SEQ ID NO: 159151 - DNA, 1160 bp, Zea Mays
cgccaggccgacacgacgaggcccgttcatgcattattttcgtcgcttctttaaggatgaagaagcgatgacgcgtgtacatgggggacgaggtgcgcgtgcgtgcggtgaggtgcggtggttagctgaatcgagatccatcttttgacagcgtcggaacgacatgtggtacgtcagaattaagagcggggcgcgaggacacggccgcaacttggcccattttgcggcaccaccggtcgctgctgctcttctttctgaaatcctgtgccgaggatggcgtcatgctttcttcttcttcgtctcgtcgtcgtcgtcgtctcctctccttcagctggtatgtacagtgcttccccgtgactgactcgtagccctcgtcggccgggctcgttccaccgcgactgaggtcaaaccatgtgccagttttcctttcccctcatccgacgaaaagctagcagcagcactgctccatggcaatgatcaccgacaccgagcaaagcaaagctgccacccatcaacactcatcaacaccccacgccgccatgagctccggtgaaaaaaaaaaatctgttctgccgtaaacgaaaccctcgggaagaagaagaagagtcacggattcagtccatcccctccatgtgtcgtggtcacgagaaagctgcggaaacacggccggtgccgccggtcatgcaagtcggccattccaaaaagtttcggcctgtgcgttttcaggcgtagtagagttttcaaaaggtagctaaataaaacaaaagaaaaagagaacgcgcgcgtgtgtgtatacagtatacacacacacgcttagtagctccgtggaaaaaaaagcatcgcattattgtctaacactaggatgaaaacaacaacacttgtcgatttagcgtgtggtcccgtctgtttgtttccttctgatgctgattgagatttcagagagagagagcagagaacggctacgggacagcagtggataatggtacaatgatgcagctcatcgtgcggtgggggggagagaaaaatcatcatcagcgctggcactttggctgcgcaactgaaaaaggtattaataaacaattaattaagccactactaaccaggagtttagtggtagtagtactagtaggcagtggtacttgcttcagatgcagaattgg

SEQ ID NO: 159152 - DNA, 517 bp, Zea Mays
ctctcaacatgtcttccaatacttgattagtcctttcagtttgtccatcagtctgagggtggtaggccgaactaaaattcaacttcgtatccatattctcatgaaaacttttccaaaatctagaggtaaattgtgatcctctatccaaaatgatcttcttcggtacagcgtgtagagactcaatccgaggcatatataactctaccaattgagatcacttacaagtagtcttgaccggaatgaaatgagccactttggtcagtctatccacaatcactcatatagaatcatatcctttcgagatgcgaggcaatccagtaatgaagtccataccaatcacttcccacttccattcgggtatctttaatgggtataatagtccagttggtctttggtgttcagccttaactctttgacacgcatcgcacataaccacatgtgcagccacatctctcttcaatccataccactagtatttctatttcaaatcctgatacatcttagtgctaccagggtg

SEQ ID NO: 159153 - DNA, 400 bp, Zea Mays
atcgactacaccagccttaataaggcttgtcccaaggacccgtatccacttccacatatagatcaaatcgtggattctacctccgggtgcgacctcttatccttcttagatgcttactctggtttccatcaaatctagatgtctagggaggataggaagcataccgcttttgtaacagtggatgggctttactgctatgtcgtaatgccttacggtctgaaaaatgccttgccgacatttgtgcgggcgatgagtaagactttcggggacctgattagggacagagtagaggtatacgtcgatgacatcatggtcaagactaagagaaggtcgaccctagtggaagacttaaccctggtcttcgacaagctgcgggcaacacgcacgaagctgaacccgg

SEQ ID NO: 159154 - DNA, 442 bp, Zea Mays
ccccgtgctcggccgtggacatgaggtgggtggtaggtcctaacagtgcgatctgatatgggcggctgtgaatagaagcgttataccctttcatccagatcgtccgcggaccgtttatctccgatcccgcggttgatattacatacccgttcggattactgcagatctaatcgtagccactgattgacgatcggacggttcaggatgcttggtaccccttcgccgtgcacttctttcgaaagaacccctcggttttcttcaaaataacccgccgtccactacgggattagcttgagtctagagaattttatacgctagcccctgtaaaactacagaatatggtgcacagtcctgagagcagaaaaataggaaaaagaatatagaaaatgagtttctagagtaaaaataattccagaacctatttaattcatagaaaattgat

SEQ ID NO: 159155 - DNA, 1300 bp, Zea Mays
gagtgcggaggcgatcccgcatgaacatccatggaagtacaagagggagaccccgctcggacaccctcgggggctgggtcatagtttgcgctacccacgtgagccggatcatctccggcagtaccctcgggggctgggcaatggcttgcacttcccacccgagccgagtcacccgcggcaacaccctcgggggctgggtaagcgtcaacaccatccttgaaggccagtttctccgcagtggccgcctctaaggctgaaagcccctcagttacttccatgggaccaagatgatccaagtcagtctcctaaccctcaagaccacgctctaaggtagatgaggcacgagatgacctcaacccagcatcaagcacatcagcacaaacctccatcacaccatcatccgctggctctgataaaaggtcctctggaaccatgtcctctagagtctgatcaaaatttgccagagataactcctgtagaccaacgagagctgacagagcaggagaaggaactccactactctccccactagcaatatactgtcgactgttcttccgagtcagagggacctcatcttcttcctccctgtcgttttcatcgacaacataagcaacacacccattgggatcagcaccgggtggggcacacccattgggatcagcagcagatagagcacacccattggggttggcgtcagtaaaatcaggcacaggaacctcctcagcagcaggaaccgaaggaccagcaccccgatccaaactatatacttgccgaagacgtctctttttctttttctgctcatcagcagaaggatcaagttgattggctcggcaagggcgtctcggacgagcactggcaggcttttgaatatccaaagtcgtactagcttctgggagaggcgccaccaccaatgtcctgacaggagcagcatcaggagagtcctcagccagcaaatcaagcatagcgtttatttccgcatcactgggatccaaaggcacctcaaagtggacttgccgttcgtcatcaggaatttccccgagcgaagcaaccaaagtgttaacctcttcggtagagggtcgcactctaaggcccaaaccgccatcagtgataggtggattcgacacaaaaagagtgaaggccttgggaggaggcaggctccatgctgaatatgccattggggcaccaatatttgataccttacctctaagaatcatctcaagtcggttcaccaagtctatagagggaattttcctattggtaacccaagttgagtcagctagacctcggtacagataagccg

SEQ ID NO: 159156 - DNA, 846 bp, Zea Mays
ccgaggctatggccgaggaatatcgcgtttacactaagcaaatatgaactaaaatatttaattcgacgtcaccttgataacggacattcgtaaaagaataaataaattaagacaaccactcacttcgattaaccccctactccggtattgtccattcactaattaattaatgaattaagtaacatgaaagattctatgtgaagcgagttaactatgcacaacaaagcgcgtgacgcgtgcgagcaacacacgaactacacacaaaatagtgctcgacaacgcgtgaaccagcacacgaaacaacacgagcgactagaacgaatgacgcgcgaatcggcacgcaaccacatgtggaacagcacgcacgacgacacacaagatatactaaatagatatctcatttatgctaaacaattatttgatcatgtatttgagtcgtcgttaattgtgttaacatgtatttataattgcacatattaaaagtatagattagttttaaactaattgctatttttattaccaatagacgaacaaataattaattaactgaataaaacacgtgtcgcaataaaataatattgctaacgcataaatgacgttattacgaagctaacgtgaaacagtatgaccgagacctagaatatagtgagttattgattggattctttggagacatttttgtgaaacttactttctcctccctctctatctacctcacgcacggagcagggtgcctagctttgaacgcgtcagggctaggctggggtcgtggctgactctgattagtagggttaccctagggcaggagtgcacgccctggcgggctcgctcggtcggcacgccctg

SEQ ID NO: 159157 - DNA, 616 bp, Zea Mays
gtgttcgccttctttttatgcacagtagagctcggggtagggcctagggcctcggatgggcattgctccagcggagcgccatcgtggggagatctcgccgtcgtgtcggccggtttggagagcaagaaggccccacagccatgcgagccgttttgaatggctaggattagaagttacataccatttcgatgtattaaatccggtgcgtcgatctaggattgggcggtctagagtctgtcgggcgatatataaatttgggctgtggattatagattgggcgaccgaggtggattacggagttatgaagtgcatgagttaatctagaaggtcgatattagatcgaagggttgagatgcgaagataccccttcggccaagcgtttatgcaaaagaacccctgcctaatttagttatcaaccaaccatcccagtacagttaggaagtgtttcaattaggttctgaattctttgattttaaaccctgggttcttcgatattcgtggccgcagtgcagacaactgtgaaattaattaaagtaaatgcagaaatcatttttagtgcaaaaataaagtcccaatcttaggaaattcataactctattaatttaactcctttttt

SEQ ID NO: 159158 - DNA, 347 bp, Zea Mays
ggaagctagaaaggtaataacattgctatagtatatgatgaatatgtgaatatgaaaactgacttaatatctttgatttgtagaaactggagtttcatatggaaggtgtgaacttagcaagaccagataaggccaagcctaagggaagaacgatcaaaagtagtgagcaacaagttcttaaattgggtgcaaaaggagctaagaagatgagcaggaagtgccaaaaatgtggcatagctgatggtcacaacagtcgtacgtgtttaactgtggaggataatagggttcgattggcttacctatctggacgtaagcgaggacagcctcctggttcaaggaacaaaatc

SEQ ID NO: 159159 - DNA, 729 bp, Zea Mays
tggcggcgcggcagaccgaattgggggaaaacggcgtcgcggtggctctgtttgaaattggggttggagattgaggctactcggccgtaagaagatgtgctttcaccgtgcgcaatcgatttgggagaaggtggagagggcagtgcgaatttgacttcgatctagtcactgtgtttgctatgatcacacctcgccgtgaacccaatggctatttatagccgtggcggtccggcgatcacctcgcggctgaggatagtatcgcaatcgcatgtcgaccacgtcggtagaaggtatagtgagggagaactacggcatgagcgccaccgcggtggaattcactgagtcacggcggccgccggtgagtaactccggctaggcctgggagatggcgccacgtacgggttatccctccccgacgttatccacaccataccgcccacaaatcaggacagcggtggcactaattttggcgcagagaggtcgccgacggtgagcaagccgcgttggcaacctgataaacccgagagcactgtaccatgggatacttcttcagtgtgcctgacagtcacagtttaggaccaaattcctctcaatttcctatggcaacatacctgaggttctgcagcaaagttgtagtcctatagatcctctttatctttgttatagcaatcctagtcgaattcctactggatttagctcaaatctgatcacaaattcgaccactaccac

SEQ ID NO: 159160 - DNA, 275 bp, Zea Mays
gtcttaggtagtgtgcatgatgtcctatggacaagcatagtgaaattgaaggaatatgaacgctaagccatcaatagttgcaagattcacactcttatatattcaattggcaggaggcaaggataaaagtttgttcatgccttcagagaatcagagtttccttttaatctgagaaacacatttatatattctccattcctccttagtttctagctgcattatactccctccgttccaatttataattcgtttgacttttttaccccaaatttgac

SEQ ID NO: 159161 - DNA, 1378 bp, Zea Mays
cagtgatgtcacaatgagactaaccctatgggcagaacgagctaaagcttttaaattagatgatgtttacaatcctctagagcaaaagccaatcgtcacactctttgtaggttgtttagccaaaaatttccaaggtacatacaaataatatcaacattttgttttcacattttcctgttaacatagcaagacaaattcaatcaaattttaaagaactaatttaattttttttaccatgaaaaaacaataggtgcatacttaaatggtggaacaacatgtagatggtatttcaatcctgatattaaggaagccgctccttattatcaaaggtatgtcctttctacaaataaataattcactacattatttcgcttttatacacccttttaagccaacatatactcactcagatattatcaatacttgcaaacatatttctgtacaggtttggatctcaaaaagtaaaactacaaataccatcagagcaggaacaacaactatctgttgcaaaagaaacacatgtagaacacaaaaccttgcatgagcttcttgcgttggatccatatgcatttccggtatgaccataaaaacatatttttaccaaccattacaattaacaattaaatatattctgctatatttatgtactgacgattttatagaaacaaggatatgaatgcacagttacaatcatagaagtacctacaacaaatcgttggtggtttccagcttgcaccaaatgcagtcgagcatgtagaccacaagatggtggttactattgctcctactgtaaatcagaagcgtacacactaaggtaaacttccctcattattctaataccctctactaacacactacctaaaattactcttttctctctcttactcttcttcttcattccttgtagaaccattagcaggttctaaattcaattatattgctactcatggtaacaaataagacctaatgtgttttaattatataataacattgcagatataaattaacattcatgggatcagatgcaacagcaacagcgcaaatgttttgctttgatactgtagcacgacatatagttggcagaccatgtgaaacggttctgaaacaagccactgaagcaacaccaatacctccagatctagcacaaatagtatccttaaagtttacatttcgtgttacagcatcaaaccaaacattcgctcaacgagagaagcaacccactgtgttacaaataaattctatagttgtacatggaagacaacactatctaccatcaggaattcaaaacaccatagatcaaggtccatcaacaccaaacaaagaagctacactcaaattattagaagaatcaccttctattgctatggaaaggttatca

SEQ ID NO: 159162 - DNA, 1373 bp, Zea Mays
ggggcctctgcgcaaagatcctaagacacagtgcgcagacgcgagggatggcgggttggttcctaggaagttcagggacgttttagtaagatgtacccgcgaaggggtatcggcccaagagcaccgttgaatgcgagatcaatggcacagattagaatcgaatcgctacgtcatattagccatcggatcaacgatcaatggctatgctttttaagatgatgcgatctactctggatcaccggatccaaatctaacggcctgagttcaatccaggtgaaggggtacgcggttctaatcttgaccgttcaatctaaatctggcgcccgcaacatcatcaaccctagatcaaatcttggtccttggtctgtgatgaacggttaggagtgcttctccaaccacggcggcgccgagcgcccccacggcggcgctccacaatgagcacccgattacagccctctggtgcccgattctaagtgacgaatgcagctacacgagaaggggaaacaatcgaacctgttagggttaatcattgggtgagccgagatgagcagacgactgtccatatcgaagggcagatccatggcgggtcatgaagtttagcaagcaattgcgggcacaaggtggtctcccgcgcgccctggatcacccgagcacccacccagagactcgacgaacaccataggccatcctccaggcacagatcgatggtgaagccaaggtacgatggtggcggcaactctcggttcgcgatggtgggtgatttctctgcgaccggcttctgtcgcgtttctggtagatggataagcgcacgacaaatttatagcgtcgcatgtgttctgcaagagctggcggctggggaggataaacttctggccctggcggatcgacgacatgccccgagcaggagggcgaaaggtgggcgccgtttgacggagagtgagatctgcggccatggacgcaggagtgcgcgcgacgtggatatttaagcgcatcactggggaaaatcgggatggaggtggtggcttaatcacgtccggcttctacgcacaccgatcgactgaatttgttacagggtgggagactcgttgacggctctggttgttgcgatttcatcacgcctagcatggagctgagtggaggaggattctaggtattggggtcccaccagtcagcagcttcaatcgtgcacgggtgaatcagtagagactagcgccagagactcgcgtgcgacgatgactttttctcccgcggcgccttggcggatgggctggcatcgaggccccacatggcagcgacaacgagagatgagagtgggctggtggagttgttattgggctgaaggcggtttgaggcccaactagcgcttaatccct

SEQ ID NO: 159163 - DNA, 859 bp, Zea Mays
ttctttcttgttcttgcttgtgtctttgattctcaggcaggaattagccctcgtggcgaggtcaatcgtgcagcgcaaggttgataaccagaggagaagtggtgctgcgattgcggggttctagtcatgttgattggaagccggatcgtctgtgtgacatcaccaaatcgatagttatcttcacctgacggaagatcgggcaccctcgttcctatcaagtggtattctaagactcaggtattaccgtcaggcttaccctagtttagtttaggttattcatcctataactccagataattgccataaaaaaattccgctgttccactgtcctataaccctgtttagccttgcaatttcgtttcagattgctttgttgaatttgtgtccgtgttcgagtcttgttgctggtttaggacgtgtcgtaatcgtagttcaaccactccatcgctgttatttgtttccgccgctatcccatccaccttacccaaattacaagtcgagacaccacattacttgatttgccctcgctagccgccttgtgtgaattttcgccacgctagccctagattaggttgcaagccgcattgcattgcagcccctccttgtttcatcatctggcgcttacctattgcttataccagggaggtttgtgcccctgtgctctatagtcgtcgctacggttcctaccaatttgtgcccttgaaaaccataacttgaggtaccttccataaaacgggcataacttttcgctcggtgctccgtttgagctcaaatttttacagcagattcctgactccattctggggtgacccaaactcgcctacggcctgtttggttcggtcaaaaaattcaaaaaaat

SEQ ID NO: 159164 - DNA, 820 bp, Zea Mays
gtgagcggcccggattagatcggtgtgagttataaacggtggtgcgttcacaagcgttggatcggcaaccagcgttctggattcaaagtgaaccagaataccccgtcgcccgcacgattcccatcctacggccctaatttaatatcgcgaatgggtaagctaccatctaatcttcgccctccatcaacagatcgacgacacgcgtccatccccaacctctggacacaggacccccgcagcgtcgtgactccccacggtggcgctccgccggagtcggccaaccggcgtaccagtgccccaactcgcaagctcaaacgcgctacacagtactgagatcaaggcgatatggtctagggtttccttacctggaatcgaagtgcagagagccccgcccacggtaagcggcggatgccgagctccggcgagcaattggacggtccctgtgcgatacccaggcctcgaagccacaccgaccgaattcccaaggctcggcgaacacccgtggcaacctcttgagctcgaatcgacaatgcagaaagattatggctgtagtgatactctcacggatcttccacacggtggcgggggagaaaacttgccgcaggagcactcggtgacggcttgataggtcaaggagcgcgcggggagacacgactttatagtccaaggcggtgctaaggcggtcgggtcggccctcacccggatttgtgggataacagggaggtggggagagtacagagagggcgaggacttgcagcggccgggccatatcgccggtcttgtgaaaatctcggcggagttggaggtcgggtcgcgggct

SEQ ID NO: 159165 - DNA, 1016 bp, Zea Mays
cttttgtatatgtttagttaagttttaagaggtttaactagaaatgggagatgcgtaattattttgaaatggagaaattacgccacttcaacgagtgaacctgggtgacagacacatgggccctacaaagggctagacctcacgtcactctatggcaagtcgggccatgcatcttcctcgtcaccctcctccctccctctccctctctagctcatgtatatattatatttcttccttccatcaactccaatgaccagcactaacctatgcctttctcgccttctttcgccatcacttcctctctccttcgtccttgtccctgtcgtttctctctcttggccagcatcgacgacgactccatcctgcacctcccatctctggcccttttcttcgcctctccgtcccactccagcgagctgctttctcctcccaaaatataatccgatccacatgaacaataagcaccaccatcagcaagcaagcaagcagcaggataaattaacttaggagtacgtacgtgagagagaaattaaaagaaaccccaagcgcagagagagagagcgcgcgcgcgcggcagcttcagccttcagctatagctgcccttttcgtctctcctccccacatcccagaaaccattctttactcccctccaagaaaacaagcaccacacaaaccctaaagaaattcagcgcacgcagcaagcgcgcctctcatcctctccttcctcgccgtctactattttcatcatcaccgccaccacttcctctctcgcgccgccaattattaatattatcggtactgttgtgtagccattatttttactttcgcttatttgctactatactccttactgacatataattagttcttctcctaccctagaaagatggcaggcctggatttgggcacaagctcctacctgcaccaccaccaccaccagtccctgcacctccaccacgaagacggcggcggccgcgcggggggctctgacgatggccaggactcgctgtcgccgg

SEQ ID NO: 159166 - DNA, 490 bp, Zea Mays
gaaaattccaagatttgaatttttgggatgctacatagctcccacccgattttcgagcttttagagcttcggtttaaaggcgtgcttcttccaaatttgaagagaagaagatgagtggggagaagaagatgactaaagagaggaaaataaccgaggagacgaagctgtatgaagagaagaaagttgcggatcctttcatcgctgggttttatgagtccatggcaaaaacgaatatagagaaaattactaaggagatcatggagggtttgtccgaagattctaatggtagtgatagttatgacgtgcagagtggggatgaagattttgaggatcggccctggcggccaagtcatactatcttcggaaagtcgactatcaaacagagtcatattgacgccatgagggggagatatttttgcaacatgtctattgtcagagttggaggagatagcactgcacctgctcctgaggaaaacgaagttgttattta

SEQ ID NO: 159167 - DNA, 704 bp, Zea Mays
agctttggactaaaccaaatccatgacctaaagagtatttcccctaacttaattgcactaatgaccaactaatgagctctggccacggtgaccgagagcatggcggacggatgaaggtgttcctggcgatctaaggctactccgtgcaaattgagggttcggtaagcatcacagagctgtgagagtgctcaaacgaggaagcagaggacaggggctgacctgtggagggctgaccacggtgaacttagtttcacggtgttcttcgactgatttgggggaaatcttaaattcgagctcactggtggacgatttctagtgattctcggtggctgggtgggtgatgaccttgcggagctggtgggggcttcaatttatagggagagcgagcggtggccgggaattttaagaaggacgcgcggcggttggaggtagaagaaggcactagcgcacgtaaattcgtggctaacgtcgtggcaacctcaccggcgacgatgggacggcggtagggagtcacggtgacgcggtagatggacagagacacgcggggggctacggcgaaggtttgacgacggtgagaaccttatccacgggcggtgagcaaaggggaagggattacggctggccggagtggcttccaggtcaccggcggcgaggatccccttaccccatgatgctatcaatccgccccgagcgtgaatcttgac

SEQ ID NO: 159168 - DNA, 490 bp, Zea Mays
tgaggttccacatgggagtcctggctaggaggggacagtttccatgttgggctcaacgaaagcagagatagcaccggacattaaaaatttcttggcccattcaaaataatccggcctcaacagtaggcccatgaagaaagcagcccacatctttggaacatgaattaattctgagttggtggggaacaagtcagcccaagaagaaaggcgttttctagccaggtaatcttcatatgtaggatcatggttgggctgctccaagtgttgcatgaggcccacattgatgttttcttcgacttgcatgttctcctccccctggtcgttgtttccctcaaaagcaaacctgctgggggaaatgctggcaaacaagaactgcatccacaggttctggggcttccacctgagggaagtgaacctcttgtgggataacgatgtcattcaagagacccacagattcatcagagggcagatcttcaaggcctaatagttg

SEQ ID NO: 159169 - DNA, 314 bp, Zea Mays
gaacggagcaagcacatccggctgagataccacttcatccgagactgcttggcagaagggagcatcaaggcgcgttacatcaacaccaaggatcagcttgcagacctgctcaccaagccccttgggaagatcaagtttgttgagctttgctccaggtccgagatggcccaactttctcacaagacgacgcccaagacttagggggagaatgatggaataagtcttgagcatctagaggacaacaaccgcttttaactgtcctctgtagtcctttagcatctagaggacagcttgactgtcctctgtagtctctt

SEQ ID NO: 159170 - DNA, 845 bp, Zea Mays
cggatcgccgccgaggaaatcgggcggctccctgctaattcgcccggccgttgctcgacgctagggactataaaatgtggctcacgtgacccggtcctccccttctctcgcccactcgcgcccacatcggctaaaccccatcacaaaccaccgccgcgttcgtctgtaaggaggttcgccgtcgtcgccagtgactcgagcctacgccaccaattagcgaccggggttgactcgggtgcgttcggcagcgtgcgcggatcgcgagggcgacaaattgagcttggggggtcaaacttgggccctggatttgctcgccgacgtcgtggaatccggggcattccgccgtgcgccgtggtcagggcacccgtgcgcataatccaaggtaagactacctcgatactaaccgccaccatgctctctccgttttgcgcataacggcgctaggtttagtgctcgccgtcgctcgctcgggtcctccgttcatggcgccgccgcgaggagtgagccggtcgtctcgcgggctcgttccgcgtcgccagggggaagagagctggtaaccgttgatatctgcggcaacggtttagattagctctgagtaaagtttcgcgttaagccgatctggatcgttgatcctgaagccaacagctgtgatcagtcgggcgcataccgaatcgcgatagggttctgtgtccactggatgtcaatcggacggttcaggatgaatctagagcattttaaatcagcaccgcagatcgcgaatccaaggggccccgtgtgtgtaccggttgggataaaattaatctaatccacaccgttcgcgtccgatccaatggccgagatctgac

SEQ ID NO: 159171 - DNA, 482 bp, Zea Mays
ggataacatctcaactttgagtgtggaaggcaaatttaatgaacaaggtcggtagaagagttatggtgcagtcttttcttacatgatcgattgtttatttggccatgtccattgaccttcctcaataggctttgaaatctattgacaagattcgaaaggcttcttgtggagaggtcgtaaggaggctaggggaggtcaccacgctgttgcctgggggagggtggtcggcccatagaacttggaggcataggtgttttttagccttaaggagatgagccactttgagaatgagatggctctcgatagaacgaactaacccaagctgtccttggtcaatgcttcatgttaaggttcctaaaaaatcatattattcttctccactttcttctatacggagattggaaatggggctacaactttgttttggaaagataactggcttcaagggaaaaatattggacagctagccccaaggatcatag

SEQ ID NO: 159172 - DNA, 471 bp, Zea Mays
caaatcacagtaccttgctaaatagaaggaaaaaaattctgcatcattatcaaacattaactaacatagagcaatatctcctgcatcagcctaagctacatcgttgggaacacgagcttccctgaatcttcaccttggacgagttgacaagcgggacaaggcattgtgtccactttgggggcagcttcccaatctacaaccacatcatagagaatgagacagagcaaattcgaacaaagaattcattcgcttgaacaatattcaagagtaaacgcgcatcataagatgatttgagtaaaacctctccggctcgtttggtggagaagggaacaatctgtgctagagctagtgccttcttcgcagtcatctttaactcgtcatagatcttctcttataaaggaaaggcgaaatggacaatctccttggcatccaacctcctcctcgcacgattggtggatagcccgggcacat

SEQ ID NO: 159173 - DNA, 493 bp, Zea Mays
caccggcacgttcgccgccgagcgcctcacgccccgtcgcctcgccattaaagcttgcatcggcctcagcgaccaccccgccactgtgcccgagccgtcccctcaccccttgcctgcccgagccgtcccaatcatcgttagctccattcccgccatcatggtgagctcgtcggcgctcgccgtcccctccatccctctccctctcccgggtgcctataaaaggagccgctcgagccccatcctctccacaccagctccggccaactcctccgcttctccccgagcaaatcaagctagcgccgccgtgcttccccgtcactccggtgagctccatttcccccttcctagtgaacatcagtccaattaaccagtgcgcaaagctccgccacacactcacggtcacagggcacccctccccacctcctattgcacccggcaacctcaccggcgacctcaccgccgtggacacccgccaccgcgccgcggaccggcc

SEQ ID NO: 159174 - DNA, 492 bp, Zea Mays
cattaaacagtttgaaaacagaccgcatgcaatagtttgtaggaatgacaatatctgttacctttgatgggaatcataatctaagaaatttgtaaatctgtgcaaaattttgcatgctaatactctgttcaagctgcaagtgagcgaatggacatttttgtaggcagctttttgtttgaggcatgctagtcctcactatatgcatcattatcatgatacacagaatgaaatttagtaacgaagtcacagtaggggagatccttgatgtatttttctcatgaagttgtgaaaggctaattgaactgtttccattgtagcattataccctttgtgtcaactgctgctatactttctgcacttaattttttcattccaagtcttgaacttaatttttttcattcgaagatttgaacttgcttcttatacccttttctgtttgttgtttccccccttttgcagcgtgctttgaaggtaccacacctcaactttttg

SEQ ID NO: 159175 - DNA, 549 bp, Zea Mays
gttggcttaggggcaacccaatcggcatcgtcgtgctcctcctccacaaagatgatctatcccatatgatctggacccgctggctcaaagacaagagatggacaaggtgtagtctcatcgaatctgacctcacaagtctccataatgcagttagtctccaggttaagaacacgatatgcacgagaatgtaatgcctaacccagaaaaaccccatcagaagaccgacactcaaatttgtccaaattacactgttttagcacaaagcatctacagccaacacaccctgaaatggctaaccttgggtgaccgtccaaatcacagctcataagaagttttgttcaaaaaatcccaaagaaagatgcgattggacacatggcaagcagtgttgatcgcttcggcccaaaaacgcctaggagtcctatgctcatcaagcatcgtcctggccatctcaacaagggtctgattcttgcattcagcaatgacagtttgctagggtacatacagagaggaaaactgatgctcgagtcccaaagaagcacaaaaggttgg

SEQ ID NO: 159176 - DNA, 690 bp, Zea Mays
ccaccagtgaacttggaagaacttggatataaaattgtgaggaattgagtgagtaactgagtaagatatttataacaaatttgtagttggtgctgtggacaacaatattgatgcaggcaagtgaccgagttgttacatgaaaaagagagaacgatgctctccaaatcgcgctgtcagaacgtttgatgaagatcgccatggtacagtgacaataaagatctccggtgccatgcgctcgacgccggtgatcctccaccacaattcgcgccggcctagttgattcgttccatgggaagagtagataacgtcagggcgaggtgaaaatatccagtgcagggtgaatccggtcgctggccagaccggccgtcgtgtcccgccgtggtcaatcacgctggcatcgccggagttcgccgttatccggctaggctacgtgcctcaaagccttaccacgtcacaatagaccactttaggtagcttgttcatcgcctaagacactgccccggtaaaagccatgataacgcttgcaccagtaacttcccctttctccggccgccagcacccttccttcaaattggacgccaccaccgtggaactctataaatttctgcccccgtgagttccgctaggtatttacgcatccaacgcaccagcccttgcctcggatcatccaccagagcctcccaatttccc

SEQ ID NO: 159177 - DNA, 728 bp, Zea Mays
caacagcatccttcttgactttgtacacccatttcaaaccaatgggtttatgcccaacaagtagttcagaccatatccaagtgttgttgttttcaatggactggagttcattgttcatagcatccctccaacactttattgaaaaattgtcagacaggcccactatattggaaatcatgtacctcctctgttgcatcccatagatcagttagagacctgtatctcaatggtggatgttgtgaactttgagtgctcggggtctgaggactattgttagtagctgcactgaaacttgacccctgtaatcccccctgtgacacttgtggtgttacggttatttgtggtgtcactggtgtgtgaggtgagggtggagaattttgtgcaccccctgaatcttcaacacttccacctgaaacacctggcggctgcaacacctgaccaggcacaatgtactgaaactggaattcacaaggaccagattctgtctcagcttgctgaacattttcatcactgtcccaattccaccccacttcttcttcaaacacaacatctctgctgatatacagtctcccagctgaaggatcatacatcttctgtagtgatgccaatgcctgatcctttgtgttgaacagatctacccacatatacatgctgtaatcatctactacaagcaggaaataggattttgcaccaactgtctttggtctgatctgcccacacaaatctgc

SEQ ID NO: 159178 - DNA, 684 bp, Zea Mays
tgttctgcccccaggtgaattcggcatcatttttaagccgaaggataggagtgaaggaatcaatcttcttggctaggttagaaataaaccttcgtaaataattttccttgccaaggaacttttgcacttcaagcttacaggtcagaggtcccacattccaaatggacttaatttgatcagggtctatctctataccatgttcatgaatgatgaattctaagaacttaccagccaacactccaaaagcacatttacgtgggtttattttcagaccataccgacacattttatcaaaggctttatgcaaaccagctatatgagagctaaactcagccgatttgactacgatatcatcaatgtagacttccacagtgtttcccaacagctcatgaaagattaaattcatagccctatgataagtagcactagcatttttcagaccaaatgtcatgacaacccactcaaataaaccaatgaagcctggacatataaaggtcgttttagacacatcttcttcagccatgaaatctgattatatccggtattaccatcaagaaagctaataattctatttcctgacgcattattgatcaacatgtcggctatgggcgtggaatattcgtctttaggagttgctctattcaaattgcgaaaattaatgcatactctaagcttacctgattc

SEQ ID NO: 159179 - DNA, 329 bp, Zea Mays
gcaacatgtaagattttaatggagaggattcctaccttgttctggactccttgtgtggcacaatgcttggaccttatgctggaggacataagaaagttgaaggattttaagaagcctattgctcgtgctagtcatgtcaccatttttatttatagacatgggaggatacttagtgaaatgagggtgcatacaaatgggatggatcttgtgagacctgctgctactagatttgctactgccgtccttaccttgaagagtttgcacaagcacaagaactcattgaaaggtctattttcaagtgatgttttcactcaatccaaggtatccaa

SEQ ID NO: 159180 - DNA, 623 bp, Zea Mays
ggagattaactttgttacaaatggattagggagttgccacataaaaatttgtgaaaaacacccctgaagatgctctatcagacaggctgatgaaggtcctgatggtacaatagcctgacaaagatcgtcagatacatcgcacctcgccgccggtgatccccactcgtggattcgcgccggctgtcacgattcgtgctcggcacaaagtggataactacaggggataaaagatctcgcggggagatggattgggtcgtggacagtagcttatcggagggcttgggggctgtgcgacgtggccaaacggtcgtggttgtcagaggtcgccagtggtcctttaccacatagtcgtaaccgtggcatgctcagaattactctccctgcgtttgtaggccgtcgagcgccacggcgtgctcgccagtgcaatgccttgtcaccaccgccctccaaatcccttccaaattcggagtaaccatggccaacctctataaattcagcacctcccttgcttcgactcatcataacgaacccaatgcaactctaacctcgcccggtcatccaccatagcccgagcaattccgttttcccccaaatcggttctccgtgccgcctttagcatctcg

SEQ ID NO: 159181 - DNA, 1032 bp, Zea Mays
gtttgtgtccatgagaaggaggggtgccttcccttttatatatcaagggtaggaccttacagttggacttgtattctactggagagagagagagatctgctcctcgggttgacatggtgggtccttcatagggtcgtgcgtagccatattcccggcatggcgtcgtcctttcccgctgctctggctcatgtagcaagtacatcgctgacatcttcataatgggttccacggatcagtctcaaagtgcgtcctacgtggcgtggcttctcctgtcgtcatgggcccttcgatacctactaacgtgcgcaggcccacgctcggtatgacacgttgtcccgtcctttcgatgtacgggtcactatagagaccccggtgcccattcagtgtactgtgcgcatatttggacatggcttgatggtaacgcatcccatcgtaactgacatggatcagtagcgctagacttagatctctgccttgctgggtgttcgatagagaattggtcggccagagctgattgtcggagagttggtcgtcggagttggtcatcggagttggtcatcggagagttggtcatcatcggagagttagtcatcatcgaagagttggtcatcatcggagagttgatcatccggtccgcccgacagagttggtcgacggagttggtccacatcgagagttggtcattggagtgtcgctcggcagagacttggttggcaggtggcctgtttttaaagaggccatggacctatttcgggtacccgtttcccgagtactcaacaattagtttctgtcacattccattgctttcccctgaggctaaattttacttaacaaattcgatcatatttgcttgcttgtattgctgctgagtggtaatggatctacataagagcatctccaacagcttatctaaaatgttgagctcggtaaaaaaaagataatcgtggtgatatcctgttccaacggactagccttctcctcgcctcttcatctagctcgccatacgcgcccctcggctcggcatgtttgctg

SEQ ID NO: 159182 - DNA, 565 bp, Zea Mays
gaattttctaccaattaaacaagttctagtaattatttttgtattaaaaatgcatttctgatttattttctctgttttttcgagttctctggactgggccttaataactggaaaacgtaggggctagcgggtaatttataccagactcagcgtaaagtactctctggatggcgggttgaatccaagaaaacccacggtctctttagataatatgcctcgcgaaggggggtactggccaaatctggccgttggatctcgactcaaccgctcggattggatcaatcatccagtgaaacgataagtgaaacgggccactggattcaaatccaacgtcccagatctaaacgcctaacccgacccccgaccgatcgatcagaatcgaacggcttccactttgatggccgagacagtatttttcttctaatcgcggccaatcctggtgcatccgatggccaggactccttcacctacgcccgcggcgaccagagcggcagtgccagctccgcacggcggagacgccataaccggttctccacccgctccccacggtgtactgatactggcc

SEQ ID NO: 159183 - DNA, 961 bp, Zea Mays
atatctctgcaagcagcactttggactcaacaagctctgaatttgtagggacttccatctagctgagcattcagacgttaggctgcctgcctgatcgggcaggaagggacttgttatggttctccattgtaaaccactcgaggcgccatcccttaatattgtctttcaaggggatgtcaagatactcaacttttctgcctcgacgaatctccaggctagcacctccaacaagttgatgctgtcctccagccatcccggggcgacagtggtaaaggtacttccaaagcccaaagtgaggaagaatcctaaggaagacctcacaaagatgaacatacatagcaatctaaagtacataattgggatttaaatgggtgagattcaaagaataaaaatcgagaaggccgcggaagaaaggagaaactgacagggccagtccccggatgagaaatgacacgaagataacagcctcatgagtatcctctatcgagatggtaactccgcatcagattcgccaggagcacaattcttttggcgaaagaacaccaatttcaacaaggtgcagaaggtcagactcggaaataacagacatgtggttaccagcgaaggggagttgactgttgaggtcgattggcgggatgactggaatagtagcactctgttttctcttcttgggcgccatcgagatctctcaagcgatgcaggcggatacaggaacttaggaagctagaaagtgacagaggaaaaaggaagaactagggttcagaacgcaagtgggatgtcagcagaaatatgggttggcgtgttaagtcgggcgcaaagtggcagactgatgactcgggaaaagttgagatcgcagaaaagcaagcatcactcgggcattacctctaaaatgctaatgaaccatcaaatgctagaacagagcgagcaacaacagaacaacagaaaactatttcttcattca

SEQ ID NO: 159184 - DNA, 841 bp, Zea Mays
cggagtgggtcccactggtctattgaagcttggtcccttgggtggaaacccaaaagatcgagttctctggtgccggtcctgttgctgagctcgaaggacttggaatttcctcttgaggtgacccttttcttcttcctttgccctttccacttgtatgactttgtttgagaggtgtgagaagctgaggaaatcttggctggctaggatggtcttgagttctggtctgagccctttcaagaagcgggccatcttcttagcttctatgctgacgtcatcaggcacgtagcgggctaattctgtgaatttgtgcacgtactcgctgacagatcttccaccctgagttagttctcgaaattcatcttccttgggctgaacgatcccttggggcacatggtgctcttggaaagcagtttcaaactttgtccaggtagcatctcttacggcagcgttgaaggtatcccaccaagctagggccatcccggaaagttgatgagcagccaattgaacacgctgattctctgggcatccgatggcttctaacttccttttaatcatgcgcagccagtcatcagcatcgaggggattgctagatccaacgaatgtgggaggcttgagcctcaggaaatctcccatcctgtcttgtggtcttccaccatttgggcattgattctccagacttctagtgaggacctcaatgagtcgggtttggtaggctagaacttgggctaaatctaatggcagctccgaaggtgtggggaggtgggtctcactcccttctccactggcttctccttcagctcctaggggagaccttgctccaatcccggaggcggtaggcatg

SEQ ID NO: 159185 - DNA, 456 bp, Zea Mays
ggaagttgttcctcctcctcgtcaacaacaagagtcacttcatgtggctcgtactgctagcatcaaaggaccaggctacagtgaccatcatccaactcagggcatgagtcgaggagaagactgggtgaaagatgggcactctccgcaccgacgatggtagtgagttcacaacacacgttcggcgactaatgtgccgagcacgtcatccattgtcacctcaccatgttgtacacgtcccaacaaaacggtgtggtagagaggcgcaatcagacgatggttggcatggccaaaagcatgttgatggacaaggggatgtcaggctagttgtggccttgtggggataggcagttgccacaatcgtcttcaaacacaatcggtcactgacgaggagtgttgaagggaaggcattatacgaagcctagtgtaatatgaagccactgattcacttcctttgta

SEQ ID NO: 159186 - DNA, 587 bp, Zea Mays
ccaccccatggaacgggctcccgttcttcagagccggccctaggctgtcgggccctcctgctttcgcatagaggtcctaagccgcaagcctggctgttcaattcagatgtcatcatgcctgataggatgggaactggtcgggtgggttagctaaaatataatccagaaactgtaggagaagaccttggggtagtaggataatactatcatagaggtacatctgagagggtagttttcttttataacttatcatgcatgggtgcggaccaacaggccgggtttatggggacagaccccatcgggttggtgtacacgtatgcgctacctagttaaaagggaaaaacttcgacccctcagacttgctctatagataaaacttacagagatattttagcactgggggaggcactccttcagttgtagctagatagttgtcctcgggtcgggggattcccattaccatgaagggtccttcccagctgggggagtgttacagagccctaatttggtctggtacttccgtaagattaggtcccaatcctgggtccccatctgcgtttgacgaaggaggccccgcctttggctat

SEQ ID NO: 159187 - DNA, 712 bp, Zea Mays
ccgagggggtccgagccgttcaatcaagatcagacggggaggggtccgaacgggtccgagcgggtccgagccgttcgatctgaattggacagagggaaatcagtccgggaaggatgagcggctgcgaatggcactgacaggcgggccagggcgttaggtgggcgtgcgcgaagcggtatcccgcagtccgagccgttcgatctaaatcggacggaggggatcagaccggggaaacaaacggctgcgggcggcgccgctcctctccgcggcggtgaggtcgccggagttgaggcaggcgtgagctagggtggctccggggtcaccgtagttgggtagaaaggtagcgggtgccacaacgaactcaatggcggggaagaggccacgaatccacgggcagagagggggaaacaacggtgagaaggtctcgggcggactggagaaactccggtgagcgattccagccacgggaggggacttaaggcgcgctaaggccttggctggcttcagtagagacaggggtgatacagggaactactccggtgaactagaccgggctaaattggccggccaccgcacgagcacagcagaccgccacggccgagcaccagcggaagacgaaattggacaaacacaaggcgcaataagggaaattgggcacagggacgggtgtctcaccttggggcggagctcggggaggcttggaccggtctcc

SEQ ID NO: 159188 - DNA, 693 bp, Zea Mays
tcatgtgacctacttactcctccccgtttagtcttcaaataaaatattcgaccgcatgcatcttgctccttttccgcccatgcgcacatgttcctcctagctcccctgctctgtgaaactctccgatctggctccagattggccagtcagtcgcagcagcggaaggttagattgatctctccagctcagctagaactcaagcgtggaatcatgaagtgatgaaggtcgcaagtcgcaagaacaagaagcgtcttggctgactgtggtgatagcggctggcacgcagtagtaggcgccgagttagaggcccaacgcaccgaacaagaaggcacatcacatgccccgataatctcccgtctttctcactgccctccttttttttctttcttcattccgaaagcaaagcaatggatggcgtggcccgtatggaagtaccagtaccttcctgcatcattcagtgggcgcgcactgtgcaggcagcaacacattgccccagctggccaactagaacacaccgcgccacatgatcgtcgccaaacgtgcggatccactagaggctccagtggcgggcgcacactgtatgaagccggctcattcccagcagtgccaaactgcaagcaaatgctaaaacaaggacttggtacaagcgtaggagcagtagcgtggtactactgctactgccatatggaatgg

SEQ ID NO: 159189 - DNA, 526 bp, Zea Mays
attaataggacatctaacacacatttgaaacatccatgggaggaaatccgacaaaataatgttaggcaacctgagattttcacccgcaagcttaatggatggttaccagacgtggcagaaaaaatcagagacgaggtggccgggatgttcagagacaaactcggtgttagtgtgtcaggtacagggcaatcgtattggaagccttatagccaccgatacgacgttgtgccatatctacaggggactaggataccggacttctctaaatttttcggtgaaggcaggaaaagcacgcacaaacatataagccaattcttagcacacttgggagaattggctgatagggaagcctaccgtgttcgtttattctcgttgtcacttaccgataccgcattcgcgtggtacgcaactctgccacctaactctattaacttttgggaagaattagagcggaaatttcagatacactttttctcaggagagcatgaattagaattagctgagttagcttcagtccgacaagggc

SEQ ID NO: 159190 - DNA, 861 bp, Zea Mays
atttctaagtgttcctacagataactacaaaaggagatttcaaggtcttcttcggcatttcagaagcagcttcggcttatcgaccctcagcgctatcattctgcagagtaacaaaagtataaggtaatcagaaatttgatgaagtaagatcaaggtaaaaagcaaaggtaaaatttcatactgtgtcaagcagctttcgggcttcgtctctagccaattcacgtccgcccttagcccaaatttgagtaataaatgtatttcctatgctttgggcttcagttggaatgtcaactagattcgatgttgaaagattaaaattcggcctgttgacagccttcccgtgattacatctggcttttataaaggcgacaactgtaccacgagaagctaccagcgcatagaagtctccgtggccggttatgacttcgtcaaggacatcaacctccttttgaatacaatcgagtgccccgggtatatcttcggctgagaggctggtttcttcggatgtagctccaactgaattaaatatacttctcaatcgggcggtgcatcggtttgcaaactcaaagcacctctctttcaaagacttcaccacctcactaagcttcgaatttttctcagatttaacctcaagtcttgctttcagagcttcgttttcctgtttgaactaattgaagttatccaaaagtgcttgagcgcttgacatgtctttactcaaattcttgttctgagttcgcgctttggcaagggacccttcggctgaacatagcattttgtccttctcctttaaagagtcttcgagctctttgatcttatcctctatgcccttgacaatgacttcgtgtttcctgtcttcgtcgt

SEQ ID NO: 159191 - DNA, 684 bp, Zea Mays
ggggcgcgagggatggagccgtggctcagcccgccgtccaccttcacgaggctggtgatcacccttccccctgaatgctggaggaagaagtgggaaggagcgtcgcctccacggacatcctgcggaggtaggcgatgatggccgcctaaaagatgaagcaggacgccacaggtagaggctggaggccaagcccctccagtagctgcacgaagaaagatgggatcggcagagccaacccgctggggagtttggaaacaaagaacacaaactcttcggcggaaaggtcgtcgagaggagagataccagcataagtcctcccagcaaataccggcgcattccatccaagcaggcagtataccatttcgagcactcactcagtctgggcgtgctcggggtgaagtcacaaggccatggtaaactatggcgacacaaagcagaaaccttgaagacaaagaggcgcagagagctcgaaggcgaaagggcaccgcgagtgggagagaagcaagacatggctgctactcgaggggtgaaccctttttaaaggcagatttccccgctcgtgccccgaagcgtcacgggcaaggtctcccccgatgcacaccagagttcccatcctatgacacgggggctaggcctcacatgtcatacaagctggcccgaagcgcgaagaaggcgaaccaccac

SEQ ID NO: 159192 - DNA, 647 bp, Zea Mays
cacgtacggcagctctctgatccactttcctacaagcttttcgctcttgtcgaatactttttcctgagtgcatccagtatcattccgttggccctttctacctggtcatttgctcttggatgtgcctctgatgcgtacttgatatggatgctcctttgctcgcagaaatcgaagaactctaagctggtgaagttggatcccaggtcaatgatgatgctattcggtattcagaacctgaacattatatcctggataaactccactgcttttgctgaggtcaaggaagcaattggcttgtactctatccattttgtaaatttgtcaatggcaaccaatacatgagtataacctccttgagctttcttgaaaggtccgatcatgtccagcccctaacatgcaaacgaccaggttacaggaatggtctgcagctgctgcgcgaacaagtgttgttgcttcgacaagaattggcatgcctcgcacttctggactaaatcggcagcgtcaatctttgcagttggccagtagaaaccggatctgaaagcctttccctctagagttcttgatgcagcttgcacaccacagtgtccagcatgaatttcatctaagaattgtctcccggtggccgagtggatgcatttcatgaagac

SEQ ID NO: 159193 - DNA, 472 bp, Zea Mays
cggctacaccggaagatgaccacctacctcgacctctcctacagcagggctgtcagcacggctggcagttgaagccaagtatgcaggcccagggaagtcaaagggctttggaggtgacaggtccaactaggggcctcaaaagcgacaaaggttggtgatccgacctttcaatcaaaaccgttcttcacctcgtccaccctcctacccctttaaacagcctgtatttattcgccctgctactgccccacctcaacaactcagccgagtgcccctggtactcgtttccccgcactcccgagttcatcaactggttgcttcaatagtgggaagtctggagattttatcaaagactgcccatatccgaggcggaacaactctaataatcagcagaaccccgagagttccagccaaggcaagggaaacacgacaaataatgcagcgggcaagaatatgaagaagactgggcgaatct

SEQ ID NO: 159194 - DNA, 1320 bp, Zea Mays
tcctgatttcccaagtctctggactgcgccttaaataacagaaaaggaaagggtctcggcgcaagaaacccgagacacagtgaatagctaaagtggatggcgcgtttatttcctataaacaaaggggttcttctgtaagttcgacatcgtgaaggggtgtggatcgagattagccgtcagatctaaattccgcggccaggattagatctagcagcgaatgaaccggtaagcgacgagaaccattggatctgaaatcaatggtgaggattttattactctaggtctatttctaaccgttcgttctcgatcaaatcttgttcgcacgatcaccgatcgacgtccacacagctcccctacgaattccaccccgttttcccccagctaccgccgcgacggcgccaccagcatacacggtggtggccatggccggaaatggccagatcgatattccggccacgaaattcacatcccgatagctccacacgatgttgcagtcacgacgaagatgggggttagttcctcgcctgagatgatgtcgagacgagccgcagccatggagcagtgcggcccgcggcgacgtcctgcgctccggtgaggaattctccggacccaagtgacctgcgcatccaaggaatggcacggacgagcaccatgaatgtcggcggacctccgagacccatcccgagcatcggtcgggcgcaaattcggaagtcgagtgcggcaatggcgagagaggtaatgaaggagctgccggtggctttgagtgcaatggagagaacgtcacgcgtataaatactcaaagacccggctaaatagtctagcgggttgcgcgcgggttggcgaactaatcccgaacaacgcggcggagcacacgatgcacatgccgttttcggttctgagcacgaagcggagctagccccgggtcagcagcgagaaaatcggggagaggttgcgcggttcatgggcgacaatccgagaaaactaccggtagtcacaaggtggcctgtgtgcccagattctccgtcgtcgtggtacggtgacggacattgcagagtccgccgtggcgcctggtccaactggtgctgtgcggggaaggagaagataccctgtcgtcccgggcccaccaaccagtgagagcacggtgtgcgccccggtgaaggcaagctgggccgcacagtgaggtaagcgctgggttaatcacaagatttcggcccaaggatttctgttttcttatattttctattttgttttcaaaactatcttttgatttcaaatatggttatatgtttccaacagtttaaatgcacaacttaaaactta

SEQ ID NO: 159195 - DNA, 738 bp, Zea Mays
gggggacgtcgaggtcgcacacgacacgactggtgacaccagggccacatgtgacgtggcggaggacgaacctgcaggggaaaaactagaggtggctatctaggggaatccacatggtcagtcgcgaaaagggaatccaaatcagaaacagaggtggagggggaggtgaagggaaaggaagacttgttgaagacgacgtggtgagagatcaaaaggcgctgggtggaaagaccgagacactgccctttgtgatcaggggagtagtcaagaaagacacaatgagtcgaatggggacaagtttatgaggagcggaggtggaaaggttggggtagcaagcacaaccgaagacgcgaagatgctcatgactaggagtggagtcaaataaggcaaagtgaggttttttattgaacgcgcaagagagatgcatatcattatattaagaagagaaaggaaaaggtccataaaggaccagtacagggagaggaaaggccccctttgcggtggccaaaagcaaagaaacaagaaagcatccatgaggcaaagtgtgaggggtgcaagcactgatcgttttattgggaagacaattaagcaggtaagtggtggtgtggagagccttagcccagaaccgaacaagaatcgaggcctaaaaaagtagggagcgcatgccgttttggggagaagtgtaggggcgggacatctggaactagatgccatgggagaggaagaagacatgaaaga

SEQ ID NO: 159196 - DNA, 943 bp, Zea Mays
cagaacgaagtgctgaccatcggatctaagtttgatggtcgaattttaataaacagagttctaatgtaccccatttgatccgtgatcaacggtccaggatctactccgaagcggtacgcctcggttctaatctggaccgtctgcttacatatcgacggccacgacgcgcagcctcatcatcctggcttgccctggcggcgccatccccggcgacaagtaaatcggccaccccggcatacaacttcactcacacaatcgctactcgaagaggaaggtcgggcgaacgacatggttggcttcttaccggctgtagagcagtagcagaccttgaccacgaaacgaagcggctccacggcgatgatgtactctggcgacgaattcccaatcactcactgatcctctatgctaccgatctccaccaatggatctgtgatggtccagcgattcccgagagctaccaatcgaggctccagtgatgcctttccgcgaggatgtggccggcggcggtcagggtccctcttttgtgcgagctcacgattcgtggtgctcgcccgacatgaagatggctaggggtgcggggctcggtatttattcgtcgggctgaggggttcgcagagtccagtagcggaaactccgctcgatctcaacaacccagagcagtggtcgcggtgatcggaggaggaagggaagcaggtgactggggcccacgcgtaagcgacagcgggcaaggaagagggagcatgcggtgaggctggcgagcgggacccatttggaagtgaggccaccacggtgcacgcacatggtgagactgcccgtaggggctcacctgtcggcgccaaggcgcagtgcaggcgcgctggagtgggctagttttgagggcgagttgggccagagtggggaaaccggcccatgttgatttcttattttcttttcgttttctttt

SEQ ID NO: 159197 - DNA, 448 bp, Zea Mays
gagatctccgagacccccctccgatatttcccacccagcaacaaaaacacccccacctggaggaaaagactccaggctctgtcaggaggaaaccccacagaagatggccccactatcgtctacatggccggatacctccacaccctcgacaaccactacgacaagctctcctcccactgcacccacctaaactcccgagtggaaagcctagagcagcaagtcaaagaacttaagcaagagaaggcatccctccaggaaagtctcaacatagcagaaggcgaggaagccaacacccgtgaagcctatcggactttgaagatggactatgacaagaagctaaagaaactcgcccccaagaagaaaatccagaagaagaccaccaaccaaggatgccagacagagaagaagaagaagaaggcccctctagccctacctccccccagaatag

SEQ ID NO: 159198 - DNA, 606 bp, Zea Mays
ggacagtaaccccatggcaaattcgtcaagagcaaagctccttaggaggaagaattctgacatcgacaaggtggagaagatccgactcggaaacaacagacgtatgattacctgcaaaagtcaactggctgttggatcgataggaggaatgaccgcagcagcagaattctagttcttccgcttaggtaccatcgcaatctcgtcggcgaattgggcggaagcgaaatgaaagggaaacagaggatgtttggaggcaaaaagtaagactagggctcacgacgcggaggcatgcgaagacgagatacaaatggggttttcccgggtgagataccgtttctaaaaaagtgcctaatcaccactcgactgttatttctaaaacaccgacgtggcccagcatgactcggctgttacctctaaaacgctgacgtcaccaatcaccacttggctgttatttctagaacaccgacatggcccaacatgactcggttgttacctctaaaaacgccgacgtcaccaagtgccactcggctgttatttatagaacaccgacgtggcccagcataactcagttgttacttctaaaacgccgacatggcccagcaccgc

SEQ ID NO: 159199 - DNA, 814 bp, Zea Mays
gctggagtgaggtctactgctagagtaacatgcgaaggagaagaggttggaggttctgagatgattcccatctccgaaatgatgaaacgttctgggttagttgttcaagaagaaaaagtgtcagttccaacagaagatattgctggtgccgaagatgaaccaactactgctgatgcagacagtgataacgaagatgatgatgacattttaagtccaagcaaacccagccatattgagtttggaaagtccacggttaaagcgaaagatctagttttagtgaagaaattaggatattttggaaagcacgatgatgagctagttcggtttgctggggaagaagtgattccggaaccaaggaacgacgaagtcgtagtttttaagagcttctttagagcaggtcttagattccctctatacgagatgattggtgaggttttaaagaaatttgagatctaccttcatcaacttaccccaaatgccatagttagactcagtgtctacatatgggctctccaaagccaagggaagagtgccaatgctgaaggatgttgccgtgtgcacgaactccactatcagacgaaggctagagttgatgggctacataagaacttcggatgctacaattttgcataccggaaagataccaaagctcatgtgattggttatcataccaagtgggcgactggatggacaaatgaatggttttatgtgaaggttgacgagaaaaagagggagaagcttatgactatggtgatgagtcccttgagaatgagcttcggcatgacacgaccattgtgcaatatgcaactcagct

SEQ ID NO: 159200 - DNA, 656 bp, Zea Mays
aactgaggggttcgtttagaaaatatccgggcgaaagggtatctagggtttctgaccgttggatcatcaatctgcgcccccgattagatcggcgcggccgtgaaacggtacgcgacgagaaccgttggatgcaaatacgacggggaggattttattattctggatttgattctatccgtccgatctagatcaacggatcaggccgaatgctacggaagggtatgcaatcatctaatctcagcccttgaattctagatctctagcccacggttcttcttctctccgccaaatccacacgacggctgagcactgctcacccacggtggagcatcgccggcgaacgcgcaatccgacgcccggacgcccctaacctaaaattggccggtgctaaacctagacggggtgatggcgagcacggaagggagattcttacccgcgattgaaggagtagcgagctcgtccacggttcggggcgggtctgcgacatgaacagagcgttgttgagggattcccgacgctctggtgacccacatcgttcaggaggacaacgcataggttcccggtgcccagaccatcatcccccacatgtcgtcgaggtcggggcggtggtccaatcggcgttcaaccgcggcggacccaagactggaccggcggcc

SEQ ID NO: 159201 - DNA, 740 bp, Zea Mays
tcttaacctccatactaactgaatcatggagacttgagatgtgacctttgatgagactttgcttagtctatctcctatctttgagcctgcaggtctagatcagatgagtgagaccatctttgtggaggaggagcacaacaccactgattggggtgattccgagccgtctccactagctgccccaatcgaccctgcttcgactacttcggctgatggaccagacatcacttcttctacgactttggtctagtcgagcctaagcctgctgagcctagaggcagtcatgctgctattgagggggaggccacttccttaagggaggctccgtggcacattcagcattgtcaccctcctcagtagatgattggggagcttcacgagcgagtaactcgctccaggccatagtagatttctcatttcgctcacctagcttttgttgcctcttttgagtcctgagatgttggacacactttgtttgatcctaactaggttaatgctatgcatgaggagcttgaaaactttgagagaaatcaggttcgggttttgataccaccttcttcaaattgcaatccattggtaccaaatgggttttcaaaaacaaacagagtgaggatgggatggtggtgagaaacaaggcgaggttggtttcccaagggtttttctagaagcggtattgaatatgaggaaacctttgccccagttgcccgtttagaagccattaggatcatttttgcttttgc

SEQ ID NO: 159202 - DNA, 593 bp, Zea Mays
tttgtccaaagcttcgggagcaggagtttcgatcttttcatatgcaatttgctctgtcgccttttcttcaagtgtggcaggctgtgtctcactgggcacggaaggcccagcctcgacttcagcttgaacttgtgcagcttcggcttgcttaatttcggttccggcctgcgatttggtttcagttggaacgactttctttgcgagagcaggactcaaggcctttgtcgtttccagcacaacatccagcatgtttgccatcctactcctcttggaagttgcgtcagaagccttttgcatcttcggcagttttatctctgttgaaggattcaaaatttctggcattctcattaattcttcaatttttggctcttcaatcttcctctcaactggctcaactgtcagtaccttcggtactatagtcagctctttagtgctcttcgcagtcgggactgtttcttttgctttggcagctggacaggtccctttgccaaattcaggtatcacgaccggttcaatgtaacgcagccgatgagtcagaaccttcatcttcttgccctttggctcagctgtgatggctgaagcagcaacctttc

SEQ ID NO: 159203 - DNA, 703 bp, Zea Mays
gaacactaagatcctccataggtagctgctctttaggtaccctgagacacttcttcaattgtgatacatggaagacatcatgtacatccgcaagatgattgggtagctttagttgatatgcaacttctcccactcgctttaagatcaagaaaggtccaatgaagcgaggggacaactttcctttaactttaaatcttcgcatgccccggattggtgacaccttcagatacacgtgatcaccctccttaaactctagtagcctcctccgggtatccgcatatcttttctgccttgactgagtagttctcaaattctccgttatcattcacacttgttcttctgcctcttgtatcatttcaggcccaaagaactgcctttcaccagtttgatcccaatacagtggagtcctgcattttctgccatatagagcctcaaacggagacatcctcaaactggcccggtagctattattgtaggagaactccgcatatggtaagctcttatcccaactaccacaatgtttaagagcacaagctcttaacatatcctccaacacttggttagtcctctcggtctgcccatcagtttgaggatggtaggccgaactaaaattcaactatgtatccaagcactcatgcaacttcttccaaaaccgagaagtaaactatgatcctcggtctgacacgatcttcttaggcacccc

SEQ ID NO: 159204 - DNA, 693 bp, Zea Mays
ggaggatattgatgtactcgaagaagaacggttgaacacaataattcaatcagcacgataccagcagactctaagacgctatcacgacaagaccgtgcgacgacgatccttttcagtgggagatctcgtcctctgccgaattctaacgggggagggacagcacaagttgtcacccttatgggaaggaccattcatagtagcagaagtcactcggctgggatcatatcgtctcactcaaatggacggcacaaaaattgggaactcctggaatatagaacacctcaggaagttttatccctagctgtatttcaaaagctatcgggacgacaatgtactctgtaaaatgggaatatgtcatcaataaaaaaggcttcaagaatactcagtttgttcatgattgacctgcattcttatttaactcggggtgaccactatgccctgctaacggagcaatcggcttaagtcggcagcgacttaagacggtgcaacatgctcgcgcttatttaactcggggtgacccctatgccctgctaacggagcaatcggcttaagtcggcaacgacttaagacggtgcaacatgctcgcgcttacttaactcggggtgaccactatgccctgctaatggagcaatcggcttaagtcggcaacgacttaagacggtgcaacatgctcgcgcttacttaactcagggt

SEQ ID NO: 159205 - DNA, 775 bp, Zea Mays
ttaccacaagtcgcactacacgcgagcgctttctaaggtacttccgaactccttttctaaggtgtcctcaaattccttgagaaggtcatcaaggcaagctagggacatatcctcgacgtcggacaaattctctatcctggagagaggtggagctggaggggctttcttcttccgctcagtctggcatccctggctcttggtcttcttttggattttcttcatgggggcaagcttcttcagcttcttatcgtaatccatcttcagggttcggtaggcttcacgagtgttggcttcttcgccttctgctatatcaagacactcttggagggatgccttctcctttttaagttccttgacatgctgctctaagttttccacccgggagtttaggtgggtgcagtgggaggaaaggtcatcatagtggttatcaagagtgtggagatatccggccatgtagacgatggtggggtcatcttcggtaggatctcttcctgacagggcctgaagtcttttcctccaggtgggggtatttttgttgctaagtgggaagtaacgaaggggggtttcaaaaacctctttgctgtagttttggcatagctgtcggagggcttttcgggcaacattttggcaagtgtctgggaagtggtgtccagtgaaggtgacttggaaaggagggtggtttgggtaacttcggctttctcccaagtagactgccatagagcacttctcaattctgttttcgcggtattccttccagacatactccggcttcttg

SEQ ID NO: 159206 - DNA, 573 bp, Zea Mays
ggcaactttccttgtaggagcaggactcaaggtttttgttgtttctaacacaacatccagcacattcgccatccttctcctcttaggagttacgacagaccccttttgtaccttcggcagagttacctctgttggagggctcaaaatctctggcatttttattatttctttaatttctggcccttcagccttatcaaccttcgtttcaactagcccgactgtaagcaccttcggcattgcagccggctcttcagtgctctgcgcagttggaacaatttcttttgtttcggtagctgaagaggccccttcgccaaattcaggtatcacggccggttcaatgtaacgcggccggtgagtcagaaccttcatcttcttgcccttcggctcagctgtgatggccaaagcggcaacctttccagaagcagcaatctttctttttaccccttgccatcacagcgggtaacaatagtcagggtatatgaagccaatagcatcaaataccctgttcaaccttttcttatttcgacccccgaaggctgcggacaaggcattgtcctcggttttggaatacgc

SEQ ID NO: 159207 - DNA, 438 bp, Zea Mays
aattgaggggttatgcaactatcggatggttaaggtagttgcatatggccaagtcggtctgtcattcttattttagtgcagggtgaactaagttaaggcatgttctataggagtagaatctaatctatttcatcagtattatctaacatgtttgataagtcactttagattagatcagatctaggttagattgttatgattagatagactagataagatctcattattttggataagatccttgtggttgccttaggatgagataaataaagtggttagaatatgatgaatccttcaagagaatataaatctattaagaaagagtctatcaagataagatgaatctatcaagataagagagagtcttttaagataagatggacctatttaaaatagatacattttaatggaggataatctaggttgtttagtcatctt

SEQ ID NO: 159208 - DNA, 1347 bp, Zea Mays
aaaataataacctccacttctcctctttgcaaaccgggtatcacactctacctcccttaaaaagaattcgacctcgaattctgacgcttctatcagaacgacaaaagggaaaaaattaatgaatcaacaacacttacccacaacaaaaagttccagatatttctgccgcatcagcttctcaagttcccacgtagcctcgcgctcagactgattagtccataagaccttgacatacttaattgatctcttcctcaaaacacgctccgaggattccaagatacgcaccggacaacactccaaggtcagatcctgctgcaccacaattggttccatctcaatccgatggtccggatcccgcaagacatgaaaaactgggtgtaccccaccatggaatccggcaattgcaagcgataagccaagctgcccacccaggccaagatagtgaacggtccaatatatctcgggctaagctttccggagacaccgaactgaataactcctttagtgggtgataccctgagaaggacttggtcacccactacaaattccaaatcccgccttctcacatcagcataactcttctaacggctctgagcggccaaaatattctgacgaatttcccgaaccttttcagaagtctgctatacccaatcatgaccaaccagggatctctctcccaaggtctcccagcacagaggggagacacaccgcctgccatacaaagcctcaaatggtgccatcttgatgctagcctggtagctgttgttataaccaaactctgccaatgcaagatgatcttcccagctacccttccaagacagaacacaagcgcgcaacatatcttccaaggtttggatcgttcgctccgactgaccatcagtctgaggatgaaaagcgacactaagtgaaagcttggtgcccaatgcactgtgaagactctcccagaatttggatacaaatttggagtctcgatcagaaacaatggacttaggtaccccgtgaagcttgattacttccttcatatataaggggaccaaatctgaagctgaatttgtggtcttcatgggaataaaatgcgtagacttagtcaagcgatccactaccacccatatagcatctctgccccgaggagaacgaggtaaacccaccacaaaatccatggtgatatgctcccatttccactctggaatttccaatggcttcagtaaacctgcaggccgcttatgctcggccttcacgtgctgacatacttcacaggcggccacatacttagaaacgtcaaccttcatccgcttccaccagaagttttgcttcagatctcggtacatcttggtttcgccagggtga

SEQ ID NO: 159209 - DNA, 349 bp, Zea Mays
gttcagtcacatgaagaggggggctacgataggatggaagagatgcttgacaatgtacgccatgagcttctgcccatcgattccgagaactctcatcaacaccccgtttatgaggatcctcctacgcctgaggtttagaagttttttgagctctttaaagctgccgaagagtcattgcacgagcacacgaaagtgaccgtccttgttttcatgactcggcttatggctattaagtccaagtttgcattatcaaacaactgctacaaggagcttctaaacttgatcagtgatgtacttccagagaatcacaagatgccaaaggacatggaccagtccaagaagttgctct

SEQ ID NO: 159210 - DNA, 674 bp, Zea Mays
agaagagcgaatctgcggctgcgcagagactccggcgagcaatcccgagagctccgattgatactctctccagcaagcactaattcaccatcgccatggtacaatgatgttcccggtacaacacccaagggttgagccgatgcctagcgtgacttccgcggcggcctctcggtttctctcccgccatggcgcacaacagtggttaatgaagacggtatggaagagcttatggcccaggttttatagccaagcggcgaagtccgatacaaaagcccggaattgctctgatcttccgaactgtgcgcgcagagatcatcatcgaagattgaggcgttcgcctggggttgttacggagtttgcgcattctgtttgaggacgaacaacctggcagacagggcccaccggcagcgaccccacgcgtcctatggcagtgtggtcgggtttcatggccagcgggccccacatggcggtggcaagcgacggtatacgcgccatgggtcggctggccgagatgggccgagggagggggaaaatcagcccaggagcagagaaccctttttgtttctttttgttttcttttgttcattcatatttctggttttcaaatttgcaatttcaaactcgaatttgagttgtggtttccaatcaagtatgcacaatccaaattccataat

SEQ ID NO: 159211 - DNA, 599 bp, Zea Mays
aaacaggagtgcaccgccgccgtcgttcgttgccgccgccaccacttggtgtctgtggaggggtcgaggtgtgccaccgatgtgtgtggatcgtggtcgggcaatacctcggtcgctagggccatcggtgtctggtgaattgctcattggagctccaaatcgccgcggcgccgctttccattgtgaccggcattccctgctacaacaccgacggtaactttccttcacctgggttaacaatcagctgctctctgtgttgtatcgtcttgcgtggggattgccgtgggtttggccggatggccatcgccggtgtgacagccgccgtgatggtcggcagcgcctctgctcggccgtcgggtatggacaaaacacagtgaccgtgggatccattcagcgactgggattggaagggggtgtccaccgatggatcttggacgaacgggttagattagaagtagtataccccttcggtgggattatcttgggtcgttcgatcaggatcctgtgacccagattcgatctcgtttcattaaaccacaaccgctgatctcggatccaagggctcgtattgcataccgtttcatttaaagcacgatcta

SEQ ID NO: 159212 - DNA, 750 bp, Zea Mays
cacatcaacatccttcagcctagtagcctcagcttctgctatgttttcaaagatcaaccttggtgccccaaacttgagatcagtaggtagcactgcctccgaaccatagaccataaagaaaggagtgtttctatgcagggctcgactaggttgagttctcaggctccaaacaacgtacgacaattctctgatccactttcctgcgaacttttcatttttgtcgaaaactttctttctcagcgcctccaatatcatcctgttggctctttctacctgcccgttggctcttgggtgtgccaccaaggcatatttgatctaaatgctcttttgctcgcagaaatcgaagaactctgagcttgtgaagttggatcctaggtcagttatgatgttgtttggtattccaaacctaaatattatgtcttgtatgaattccactgccttagctgaagttagggaagcaatgtgtttgaattctattcacttagtgaatttgtcgatggcaaccagtacatgagtgtatcctccttaagattttttgaaaggtccaatcatatccaatccccagcatgcgaacgaccaagttacgggtatggtttgtagttgttgtgccggtagatgctgctgttttgacaagtactggcaggcttcgcacttctgaactaacttggctgcatcactttttgttgttggccagtagaaacctgacctgaagactttcccgaccagggtcctggatgctgcgtgcactcc

SEQ ID NO: 159213 - DNA, 503 bp, Zea Mays
gaatttttttcctgtggggcgtgttaaacttctgctaagcctgtaaataaaattggaatatatataattcacaaagctgccactgattcttcatgatccatgacatcttccatcacagcacccaagaaattatgctatcaagagcaaggaatgtacacacagagaagggtttgcaggatacgaagcgaagagagtgtaagcgtgaagtcaacaccacagagcacatacggaaatcatcagcttccttctgttcgaggcaatgtgacataaggccaatgctacgagaaaggaccgaagtcccattaccaaaacaatgctacattgaaatcttgtgctcctattatatgagaacacggatggtactattctttgtgtggtaaaacatttggtgcgccgcaaacgtcataagacaaaatatattatcaaccaagcatcagggttcaagtctgacagcaggatcagaacatcataccaaatatccaataggtcaaaagaactcaaca

SEQ ID NO: 159214 - DNA, 641 bp, Zea Mays
aagagaacacccttctccaagagtctagtcaagggcttagcaatgatggaaaattttggtacgaaacgccgataatatccagcgagccctaagaaacttcgaatttcagagacactagagggtctcttccactccaccacagctgcaacattcttgggatcaaccgcaatgccctgctgattaatcacatgccccaggaaagccacttcggatagccaaaatgcacacttcttcaacttgccatagaactgattcttccttagggcacccagaatgagacggagatgctgctcaagctcagcctcggtcttagaataaatcagaatgtcatccaagaacacgaccacaaagtcgtccaagaactcatgcaacatcctattcattgcttccataaaagcagcaggggcattagttaatccaaaagacatgactatgcactcataatgcccatacctggtgcaaaaagtggtcttctcaatatcctcctcatgaatcctcagctgatgataaccagagttcaaatcaattttagagaacacctgggcacccctcaactattcaaagagaacctcaatacaggggagtggatatttattcttgatagtcacttgattcaaaacgcgataatccacacatagccg

SEQ ID NO: 159215 - DNA, 655 bp, Zea Mays
ggaggagtgagggcgcgtgggaaggggaggtcgcgggtgttgggccgagattcggtccaacagggagaggggaaggtttttccctttttctttttacttttcaattcctatttcccattttgcccctttatctttgaacaaaaatattttgtgaaaactctaagtgtttagaaaatagaatctaagtgaggtgctttgtgatcaaacaaaatgtatgcatatgatgaaagaaaatttagtggaggtcttagaattagaggatgaagggaggggaaaaaggtagattagggtttcaaacctggattaggatttttgggatgctacaaacctaccccacttaaagaaatctcgccctcgagattcagacggggctcgagaaaaggtaagggtattccttcctcagagagtcctcactttcccaggtggcttcctcttctccatctctgctccactgaaccttacagagtttcacttctgaattgcgggtccttctgactgctgagtcgagaatcttcactggcttttcccggtactggagatccttttgaatctgaactgtctctgcctcgatacgggtttctggtacttttaggcatttgcggagttgagacacatggaacacattgtgaatatccgacatggattctggtagctc

SEQ ID NO: 159216 - DNA, 300 bp, Zea Mays
ctggtggtgtggtcaagaacttcttcaatgcttcgagagcttcctgtgcttccgtggtccactggaacttgtccaccttcttgagcagtttgtagaacggtaagcctttttcgcctagcctcgatatgaacctgctcaaggctgccatgcatccagtaagcctttgcagtttcttctgtgatcgtggcgcttccattctcatgatggcctcgattttttctgggttggcttctattcctcggtggcttacaatgaatccgagtaacttccctgctggtactccaaagacacatttttctg

SEQ ID NO: 159217 - DNA, 490 bp, Zea Mays
ctgctggtggaatgcattgcattatccccattgtgtatccctgcaagttttagctccttcgggagggcattcccacctccaatggccgtttcaccaaaaccctagatccccgcacaccaagtgctcggtgaaatgcccaaaccagccaaacttgcaccaattgaacccaaatttttcaggcaccttcaccacacttccagtaacctacttgccaaatttcacgccaatccgagatcccaagcttaattttcaccaaaattcccgttttgcgcgatcgtttccgagccgagtgcccaaaaccctatttcttcgcctaaattcaaaccaagcacacacttcactcatattgacctatataaacctattcgtgaagtatcggctcaatcccatatcgtttcgtgcctcaattcgaattccaatcatcctatgtcactatttgtctgtcaaacgtcgttttcacgtcgtttgactttttgatcgtcctgtctcg

SEQ ID NO: 159218 - DNA, 787 bp, Zea Mays
gtcgttggatttatgtgggaatgtcaaaggcttggccggtatttctcaggactgtcgttggatttatgtgggaatgtcgaaggcttgcccggatcaggatcgttttttatatgggctactgtgtagctgccaaagcataggactaaggctcagttctagttgtggtcgttcttgctggacatgtgttctctggcatggtcaaggagactgagcttgagtctatcttcttctaactgattcgcgccgtgattgggagcgtaaatccttatctcagatcacaaggacgctgtataaatagtggtagcatcggcacggaagtcaatgcttcctgcctttgtaaacactagcccctatattacgtaggtcctaatcaacttgtgccctttagtgtccgcgtattctcctctaaccatgtcattggtttagccaagtgcacccactgcatcacccatcgaaacccccacatatcctagctatgcaggaacgaggagaaggacgctaggacattggaactagtgcactagactatgacgacaaatagtgctgccctaaacatcggcccttgaaaggaacgttgacgcttaagaggggtggattaggacttctattttactcgctctaaattagcctctaattttaccttttaaacacaacctatgcggagtatgtaacctaagttaaggtcctaccaactaacctatattctaagctaggaatggtaaagtacacaactaaagaaaacaatataagtgcgaaagcttaaataagatagagatgtaaacccccg

SEQ ID NO: 159219 - DNA, 435 bp, Zea Mays
acgtggacactgcattcagcggcgttcaccgaacgacgcgacggtgttccagataatcctgtgtggtagagttcaaacaggcaagcgcataagcttcaccatgatctatagactatggaacacgagttaaaccactatgattgaccttaggaaaggctgaccatgcagtggcgctgctcgacggcgctggtgaccaccgatggggaaaaacatgtgttcttggctatcgatggtggaacggcagaaacgaagggtggctagggtgcgtaaccgagaggcgggactgagcgcaggctcaatttaaaggcaatcaccacgatggtgggcaatttgatcgctgacacacagccgtggcgatagcccgaggagctccacgttagcctcaacggtgtccacaagccagtaacatggcggacttaccacaaaccctttacg

SEQ ID NO: 159220 - DNA, 860 bp, Zea Mays
gcaaaaccaacacgttcttttctcaattacttgcactcagatgaccagcaagattgcccaccatttgtttctcggctctagctgcctctattttccttgcctcctatgctctcttctcgtttgtcgccttcaatttcctccgctcaacacgcattaggctgccataacccattgagtcggcgaacctacgcatctcctgtctacgatctttaatgtaggaatcgatgagctgagagttacatcgcatcttctgttccatgagtctcttcgattttattgtatgcatcacctcttctttgtcggcatatctctcccaactacattttctcgtctcctacacaaaaacaataagtaagtacagatgcaacattacaactcatgcaataaaaaacaaataccaacctcatcgtaatctaccatatgtccacaaaaatagcccacactaagctcggaaggaactaatccatacttagcttcaataccacatttgcagagtacatgatcggacttcaaatcttccgcccactcattctttttcttctcctttgcctatggctcaggccaatgggacctaggaccatacaaccactccctgaatatacacttacactcaccgtatggctagaggagaaaagttagtaaatttgcgcaaacaataacaaaattttggacatttgttatgcactcacataattactattgggacacacgaagtacttcgcagactcctcacatatcacaacacgatctccgcaatctcaccgagatggagactctagtcatctttctatggctaagttcttctcatccgtcattagtggcgggtttgggggaggagggacccaaggcttaaaacgctc

SEQ ID NO: 159221 - DNA, 573 bp, Zea Mays
atccggtcaattcgagcgccaaactccaattcgcccgaccctcgcgagattcgagacgtcccgaacccaattctcccctgaatttcaatcgttacacaacgcagaccccaggtccacggtgcttcgcgacatagggcggccgacggtgctccggtgtgaaattccgggggcacacgccgaggtttccgcgcggcgctacttctactgccttctaacaactccagagaaggggtcggtgctaaccttgatgctccggctgtcgcagaggcccaatcccacggcgcggcgcggattgacggtggtgcgcccacaccggcgaggaattggcgtcgatgcagcgaagctctccccaaattgagcaccacaccccactccccactcacaggcgatgctccggtacacaatcggggaacgaaaactcaggcggaggggtgaagtcgacggtggcggcggcagagggctatggcgggcgaaactcgcgcaaggagacgaaaggagccggggaaaaagggagatgagtggaacgagtcggcgaccgaagcttttaagcaccccagcgcggtccgcgtggtc

SEQ ID NO: 159222 - DNA, 477 bp, Zea Mays
tggacggtgatcggagggtgatgtcttttgtttaatctccgagatattttttaatgtttagagttcagttttaatcgttaaccgtagcgaaccgtatgcgtcacccgttcgggaacgacgaacgtcacattggcttgtgaggttcgccgttccggaattgtcaacatattttggacagcctgagagtgtaagccgatgcttgtgatttgtgacatgtgccttacgattgacgcggaattttggttgtgtaacccagttgttctccaacacaccatgttcaggcgtgtgcttggagagcagcggggttatgctgccgaaatttcacggcaatcgtaggctacacgtcataaatcacaagcatcggtctacactcttgggcaggtttagggcctttacctaattgggagttcacctaagccacggacaatcgttgatgttctttgacttttgtttagcctttgaaatggacggtgatcg

SEQ ID NO: 159223 - DNA, 418 bp, Zea Mays
gctggagttccttccgccaggccctagctttctcgtccatccatcgatacgggaatgaggagggtgccgaccagtatatatagggacatacgagtctaatctagcgtggaactaggccggacaggtagaagattgagacggacttcagaagtttgttgcgaattcgtaggtgcgcacgcgtactagtgcgattctgttgcagccactggatcggagctcacgcttgaagcagatcctggccaaagtgccccacatgtcattgagcttggctgacatcatcgttgaggtcgtggtgacatcatgcgcgacaaggggaataaagaattcagaaaacaaacgtgggtgggtttgtgcggtgcatttgtacagcatgggctgcgtcgcagtttgagcccaataacaggtaagtttttcctat

SEQ ID NO: 159224 - DNA, 1321 bp, Zea Mays
ctaggattagtacctctaatttcataaatataaattgtaatgaggggccacaaaagtttgaattaaatttgaattccatttgaatttgaatcaagaaaggaaattagaaaggttaaaagaaaaagaaaagggattttacctatcctgggccggaatcctctcgtggcccatttcctttccctgtcgcgcggcccagcttccacttctttaccgcgccgctcgggccacgtctgcatcatgcgccgcacggccttctcaaggctgctctgcgtggtcgccgccaggtggggcccgctggtcagactcatcctcatccgatgccgtctccttcttcgcgtaacaaaccacgcggtcagtcctctcccaacagaatccaccgcctgggcactcggttgttgggatcttgcttaatctccggaccgaccaactcggccattaatctcgcccataaagcagtacgcttctcctattccgctgataaccgacgggaggagccatgaactagacgtcgtggagttgaaggagcctcctgctgtgaagggtgagtcgacagggagtcttcgggttgccattctcgtccatcgtgctctacggcggggtgctgggcgggaggtgaaggaccacacctcgacaactcaccaaagagattcgcgctccgccgcaagtccaccggtgactcatccacggtgagtcgattttcctcctgcgcggtatcttggggattagttaggacgtcgcgagagtgtggggtggaagcggaccggggatcagtgcgctgccggtggacggcggtgtcgcttactggctagtcagggccgggcagcgcgctagttgacgtctagagagagaaagagtgccgggaggtcgcgccgccgtagcgtgtgagcgtgaggttaaagaagtgcgggtgtccgtggattagggaatcgacggtcgcgattgggcatgagcgtaccatttcacggagtaatccaagccgctgatcccataacgaccgtattggattagatcctggcagatttgatgttgagcgtcggatcagttttgggcggcgaggattagttgggggatattacttcgcccggacgcgatctggagcattgatccaccatcggacggctgtgaaaaccctgatcgtggatctcaatatcaacggtcagtaatgtttaccgattcatttaatagttaatctaatctgagccctaggtcttagatccagcgacccacaatcagtcatacctcttcgccatgtacatttcttaaagagaccctcagttcttagggaattaacccgtagtcctggcgccagtcattctgggtc

SEQ ID NO: 159225 - DNA, 856 bp, Zea Mays
aaaacaaccatgtcgacaatgccgatacacatctccatctcctgccgcatatccaagtgggcagtgaacgagcgtcaccggacgtttctgtggtcgtgcacgtggcatggaaactgctacataattttgtactatagggtctctttggtagagctcccgaacgctccagcttcggctcttcgcgccactctatcgatgactagtcacctttaggcggctcttaggagggagcttgtcgaccgggatagcggaatttacggcggaatagccagagccattgcacttgtgaacgtgtcttgttaggcaacggtcggctctagagccggagcgtcctagagcactatataggcatactgaagaccactatatagtatgtgccatcatccctatagacactcttgaacgtgctagcgtacctgcaatgttataaagtatagtctgcttcactagttaccaattacatcgtacccaatggtggtgtgggctctagtacttgccactttgacagggcatatctagcgctacaacacgatagactcaacaatgtggcacatctaagatgagtcaccatgtatgactccatgtcaatgacaatataggagtagttgagaatctgttaatcaagatcctctacccaataggcatatgtcattctctcctcgcttgtgctataaaagaaaggagtagagcaacatagaagggtccacaagagagttggtttaaaaagagctctcggacctttgattgcaagtgtttaaaaagagcaacctgtgtttgcacccccatctagtacagctcgattgcaagtgtttccactatcaccgacatcttggcatcctactcaaagtcgacatcg

SEQ ID NO: 159226 - DNA, 1018 bp, Zea Mays
gccactttaagagctgtgaacggatggagcaagccaataaagtgggcatatttactgaaggtatccaccaccgctagaatacaatcagcattaccagaacgcggaagaccctcaatgaaatccaaggaaactacctgccaggcgtgttccggtactggtaagggttggagaaggccaggatacttggctctatctgacttggcctgctggcaaatggagcatgaggtcacatagtcctttactgttttcttgagaccaggccaggaaaacaactgcttgacgcggcgatatgtgaccggaaaacctgaatgaccgcctagagcactatcgtggagggcagacagggcctgctgctggagagacaaattgttgcccagccagacacgacccttgtagcggatcaatccttgatgcagcgagtagggtccctcagtcgttgggtggagtgacaattcagttagcaaagactgggccttgttgtcctgactgtaaccctgaaccaccttggacagccattgtggactagcagccgacacatggaatacttcgagaccttcttgggggcggcgagacaatgcatctgctgcaccgttatctaccccttttttgtacacaattctgtactgaagaccgagcagcttggtgaagacgcgctgctgccaaggggtatggagccgttgttcggacaggtgcgatagactgcgttggtccgagaaaataatgaattccgagtgttgaagataaggtctccactggttcactgccaatagaactgcaaggtattccttttcgtaagttgagaggccttgagtcttggtgctgagtgccttactgacgaacgcaagaggatgtccttcctgtgtaagaactgcacctatgcccttgccagaagcgtcagtctcgatagcaaactgtttggaaaaatctgggagagcgagaaccggtgccgtggacaaagcagttttcagtgcctgaaaggattgctcgtgttctcccgtccagacaaacggcgtgttct

SEQ ID NO: 159227 - DNA, 567 bp, Zea Mays
accgtcccaccgtgcggctgactgtggcagtttggtgcggtgcttccattgccgcctgcctgggcatcgggtgcgcgcgtgtccacgtcggaagaagactctgcatcacccagcgaaggtgttggtgtggcgtccagttcccaggaaggtcgtcccggagaaagttcctctctgtgatatggaaggtgtttcgcgggtcggcggtgatggtgatggaatgaagaagatgaagcgcactcgccgtggacagaggcgtcgaaggatggaccgggaggacttgggcgcacctggtcgggtctcatcattggcttcttcttccttgccttcggtggtgcacccccctcgctcgcatatccttaagcattcaaggttgatcgaccaggcggaggaggattttcagcgtgctctgatcgtcaatgttcttggccaagagggttctgactgcgccgctgtgattttggaggcgctcgcctcgaagtatggtcttgaggctgatgcgctccaaatccgacgtgctgcgtccaacttgtacctggctttcttcccctccgtggaacacgctgttcg

SEQ ID NO: 159228 - DNA, 635 bp, Zea Mays
cttgacgttgaattcggcccacctgaaggaatccctcgcgcggcccactctattccctttccctttttctttttccaccgcggcactgacgtgtgggccccctggccaagtgaccctaagcgcttgggcgagactgctccagcgtgcggacttgtctccctgtccccgctgccatgtgggtcccggtggacagcttcttcctcttcaacgatcgaccgatgtgcccgccgcgaaatgtggatggcgcaacggatttcgccgagcctgggggacgcatccgttgatcccggcgcattcggttggggaaaatgcaggtataaaacccgacagccgtcctccttgctcctccatccaaaccgaatccaaaggagtctgggctgcttggtgtggtcgttgtcccgggaggaagaaaatcgcgccgtcggtggggtctcgctggcaggccagggcgctccgcctgggtcgtgcgctgcgcgtcaggcgaattctccgttcgtgtgcgctgaccgaggaagatagagcttcttcgccgcgcgtcttggccccggcttgggacgacagccgccaagctgtgtctccgcacgaaccgggacctccacattgctggacctcggtaaggctctcctggaatctcc

SEQ ID NO: 159229 - DNA, 478 bp, Zea Mays
taacgaaacagacagctcaagtcaggaacgcctcaaagcaatataacatgcttacatatttgagggtgatcttaacaccctgctaatggaacatttggtccaagcatagcgtgatcacacgcacgtgaattccatgatacactgtctcgctaaaaatactaactcaatgaaaagtatttctcatccgaacaaatcactaagcgggagcatttttgcaaggaacttctccagaaggattaccaaagtaagaaggtttgttcacaccagcagatacacccagaactcagcaacgatgtcctcagcaccacaacaccaggtcttctcatcaggattcgcccggcacgaacagtcttgtccatcgctttgtcacacattgctttcataaacaacacggtcatcctctaagtccttaatgttgtgatgagcgacttccaactcttgtgtgacaagttttttcgaggcacgcaactccttgaag

SEQ ID NO: 159230 - DNA, 312 bp, Zea Mays
ttccaccctaaattttccaaaaaaaacaaaacaacatgaaaatctatcaaatttgtgaggtgaaatgaaacatcagtgtcaaattattgtgtttgctgttgtgatgggccttggcccggctcatgtatttccctctgtgaaatatatacaacagcacaccttgttttcgggttagggtttccaacatgttatctagccagcaatttctcttctcttagcaatcgtcggcctctctccgaccatggatggtgctccccccatcttttccgttgttgggaggtcatcgttgctagccccgtgacgtctcacgtc

SEQ ID NO: 159231 - DNA, 1178 bp, Zea Mays
ctcaatgtcttcgctcattgtcatgttttttgtctagtcattggtatctacactgaggagttttgttataccttgtttgctcatcttgtgagacgacttgctgcagtcttgcccttatttttgttggtgtcgctcttctaccatattgcattagtgatcaacatgacttgccttagctactagagttttggcttgaaaggatgtcaaatcctcactgataggattgttttccacacgaccctccacaattctcacctctctttagggaccatgagtgtcaaagtagaatgatccctcagtaggattgttccctgagtcgtgttccgtgaaggtcttcaccatctggccaatcatccagttagttgtactaaatattcatcattgtatgggttgtttctcatcgagactctaaattcttagttcgagacaaacctaagttgtcttgtgtttgatatggtgaagttcttgcatccaaatggttggttgtgattttagttggttgtcgtattggagttgtaatttgataatgaactttgctcgcaaagtatgattccacatctaatcgaatgtgtaatggacttgcttcagttctgcgaggaggattatcaggttgtcgtggtagaagagttttctcatgcctatgttattaatgatttgggaatcgctgaacttatccaccaccgaggtgactcattcaaggatgaagatatatccttgtcgaaacttgagatgttagcgaaaatcaccattgcaatattttttcctgcacccctacctaatgtggtaattattggtgtttagtactgcatagtccaccgtaaaatgatccacattgtgggtttagttcatagaggacacacgcgaaagatgagttgcaatggtgtataggataaagtacacaataaatagaaaggtttaggcagctaaatcgttgtaccatgcattctgtatggggtggttgatgctcttatatcgtgtatgtgtgagtctatttgtctgatcagagtagatcgatcatatgccctatgcatagatgctactatacttgattagacgtgatgattttcgatatcctcctatacggtgggttcctagctccctttatatatgcaggagcctaaagttataagtcatttatgaactatagacctaattggtttacaataatctgaccaaag

SEQ ID NO: 159232 - DNA, 720 bp, Zea Mays
tctcgcgtttgagggagatccgcacagggcgttcttattctctctccctcggtctctcacatcttcttaggtgctggtgttcatcctccgatcggcaatggcggtcgaagcggccatcggttcctggtttaccgtgccatcttccacacaggttgcgcggagcccagaggagagggataaggggagggaaaacccacgccatggatttatagatgggtgaagtccgctatgctcgaaggaacggagccgcgattccgtcgcggaggttgggatcgtacctgagctgtgcgatagaggaaaacagggcatcgcgagttcaacggtggcgacactccatcctcccaaggttcgctcagccagcgcgcgccgttgcaaccgttttccgactgaggtggaggcgggcccagattggtcgctccgaccaacgcggcgacctccgcgcgtttggttgacgggaggaagaggatatgcccgacagacggggcccaaatgtcagtgatacaacacaccgcgcgcattagctcccagttgggccgagaggagagattgggccgagagcggggtgaattcggcccaagcgcagatgagttttcccccttcctttataattcctattttctactatttccttacttatttcagatcaaattcgaatttagtttgaaattcacactcaaaatttgaaatgctcaggaaattaaaactccagcatgagatgcc

SEQ ID NO: 159233 - DNA, 783 bp, Zea Mays
aaagaagcgcacgccatggtacagtgactcaaacagatcagaacgccagcgcggctgccctcaccgccgacggctccctccgctgtgattcgtgtcgacggcgtcgagattagtgcctgggtgttggatagcgctgcggggtaaaagaatcttcgccgccggtaagctggactccactccggctagccgcgatacccctccccttgctcaccgcccgtggataaagcttttcaccgccgtcaagccttcgccgttgcccgcctcgtggctctgcctttacaccacgtcgtcgtgactctctagggtcgtcccatcgtcgccggtgagctcgccacgactgaggacacgcacccacggcgctagagtcctttcttatctccgcccgccgcgttgttcgatctaattgagtgccaccgacgaagctgcctataaattgagcccgtaactagcttcgcaacatcattgcgcacccccacacctagtattcctcccagccgatcaccagcaagctccaattccgtattccccccaaatcagtcgaagaacaccgtgaaaccaagttcaccatggccagcctgttctggtaaaactctgcccaattcaaaccttgtttaagtgctctcgtatgcctgtgatgcccatcgacccacttaattgcacggagtagcctttggtcgccgggaacacgactgtcttgccgtaatactctcggtcaccgtggcccgagcaaaccaatagctcatcgatgaaattgggttgggggaaatgatcgaggtagctcca

SEQ ID NO: 159234 - DNA, 718 bp, Zea Mays
gcagactcagaggcggcgataccgtcggatgcaccgtcggtggtaggtgtgggtggcgtgtctagctctgtcccactgccaagtccggaggctccggaggttatcctcaggcgaccgctccgatctagcgtcggacctgaagcaacattgacttccctccctcaggtgctgtcccacgctcaccaggctctccgggaaaccgaggtggctatccggcgagagtgggaggcgctcgagaccgagcatcagcgccttggtgactggtgcacccaactggaggagcgcaccaaggcggtgtcctgccaattcgcctcagagcgggccgaatttgagtaggagcgcgaggacttcaaggaggacatccggaaggtgtctgaccgagaggaagaggtgacccaaaaggagaaacgtttggccaggaaggaggtacgcttagaccaaagggaggaggccatcacagcgctccatgataagctgaaagcttataatacggtgctggagaaacagcgggacaagcaggctacgactgaggtaaagctgcagaagcttcagcaggaactcaccgacaaggcccgcgatattactcgcgccgaggaaaacctcaaggcgagggaagcttccctggcaaaacaggcaactgatctcacctggcaggaggaggacctcgccttcagggaggagatgtgggcaaggcggaacaagctgctggatgagcttg

SEQ ID NO: 159235 - DNA, 1052 bp, Zea Mays
ctccgttagtagggtatagtggtcaccctaagtcgagtaagcgcgagcatgttgcaccgtcttaagtcgtcgccgacttaagccgattgctccattagtaggatatagtggtcaccctaagtcgagtaagcgcgagcatgttgcaccatcttaagtcattgccgacttaagccgattgctccgttagtagggtatagtggtcaccctgagtcgagtaagtgtgttgattccaagtctaatcaaatcgaagtcaattgataaccaacaatttgtatgcctttgagaatgaaatcttttattgatgacgtattctccaattacagagtacaacattgctcctatagcttttcaggtcttgctaagggtaaaacttcctaagatgctctatattccataaattccccagttccgtgccatccatttgagtaagccgatatgatcctggccgagtgacctccgataccatgaatggcccttcccatagtggtgacaatttgtgccatccttcccttgttagaattcggtgaaggaccaagtctcccactacaaaggatcaatgtcgtatagccttatcatgatagcgcctcaaggtctgctgatatctggctgactgaattactgtgttcaatcgctcttcctctagcacatcaatatcttctagcctagtagcttcggcttcagctatgctttaaataccagccttggtgccccaaacatgaggtcggcaggtagtactgcctctgaaccatagaccatgaagaagggggtgtttccatgcagagctcgactgggttgagttcttaatctccaaaccacataagctaactctctgatccactttcatgcgaacttttcattttgtcgaacactttcttcctcagtgcttctagtatcataccattagccctttccacctgcccattagctcttgagtgtgctactgatgcatacttgatctggatacttcgttgttcacagaaatcaaagacttaagagctagtgaagttggatcccaggtcagttatgatgctatttggtatcccaaacctgaa

SEQ ID NO: 159236 - DNA, 902 bp, Zea Mays
caggggctgattctaattcctcgagagcctcctctgcctcgcttcctgcctcgtttgccaccatgtcctggtggtgcatctctaggtggtcattggcttcctcaagctcctcttgcacatcatggagctggatttccaggatatcgatagtgttatcccggatctctacctgctgctctaaggtcgtgatgcgctggcttagctgttccacttgtaggtctttttccaccaattctgaagacaagtcaaccacgaagtcctcttgactgtcgagggtgaggttagtggtctgagcaaggttagtgaggtgtgtcatggcgtcgctctgcagggcctataggcggtacagtgcgctcatacactgaacagtgatcctaccaacttggtcgggatgcatggcccacatgtccttcacgtggctcactcggttgcaccacatggggtcatccatcttctcagtggggaagagtcccagtgggtgcattaccatttccaagggatggtatccgcagaaagtcatcagggtcttcatagctgcatcctcggtggtgtcatccaccctgaatccaatagtctcggagtctagggaacgccaacccggctatagagggtgagcctccagagtcagccagactcgacaatggggcacccgatgctcctcgtacaactgcaccatgtacagagggggtgtagggtaaccggcggagctgagcacctcccacaagatggaagggaaaccctcgtgggaaaggtagtcggaactgaaacgagtgtctcctccactgatggggtgggtgaagtcatctgtgaaatagggttagatgtaaacgttatcgtagtggaaaggaatacatgtgcccgggttgttaaaaggaggtgggttagattagattctacttctt

SEQ ID NO: 159237 - DNA, 446 bp, Zea Mays
ctcgactgggtcacccttgtcctcagagagcttcgcctgcgtgtcgactggggtagagcagggcttgcagtcaatcatcctgacccgctcgtggctcagctccaccttcaggctgggagtgtccaaaacattcgcctcatggtccccgtcgtcctggagcccgagtcgccgtcctacgcacgctggcgggacctactcctcctcacccttcgccgctacgccctggatgaccacgtcctctgcgaccccaccggcgtggcgccgactgccgcgtgggtgcgcctcgacagtatcgtgctcacctggatcgtggggacgatctccgtcgacctccacagcctcctccggaaccttcctcacgcttgggctgcttggctggccatcgagggccagttcctgggcaacgccgaggccctggctctccgcctcgacgcggccttccgcac

SEQ ID NO: 159238 - DNA, 830 bp, Zea Mays
gtgatgagtaggtttgaaaatgtcagttatgtaaaggataaattgatggatgtgtgtgcgccatagtgtattgtgttagtgctgtgatagataagtgtagcatttcaaatgaagtagccgataggttttgtatgtgtcacttgcgatgaattgttactatggtgaagttttatttggattgcgagtcatgtggggtgtggcgaaattagtggtgcaaaggataagtttagtattttaaacggttagtggacaggttcggtcaatatggttaaaattgattttgcttatgtggtgaagtgatgatatgtcgtagtagtcatctcgtcatctgattattgacttggctgatggtcgtgagaaatgattattgctactgttttcctttggaattttagaaattcataatgaaagatgcgcataagtgctagtcttgggtgtacaagtttgtagtctcgtggagctctagaatatttggttagaatctactcgttggtttgaacgaaatgtgatgttttatttagttggcgtgctacacaaattaacctagaaaagtggtttagaaaagctaaataacttacttctatctatatttgaattctagcgtccaataatggtgggtttagtttgtggtcttctagtgtcgtgctttagctaccaaaatgtacgaccgcatattgtttagtgttttcttgcatattaactaaatcgtgtaagtaggaaaaatgtaactattgtgcttgctttttgctgccactctttgctcatgtccagagaacaacctttctgccttggcctccttaattaggaggaggctgtagagtacatcatcc

SEQ ID NO: 159239 - DNA, 2518 bp, Zea Mays
tctgtcttgtgaggagtgtcttccatgctgctgcttgcaccttgtgagaacatacgcgaagactggtgtgtccctgtggttgatgttgaaatgtcaatattttgattgcctagttcctttacagtagcattgacctggaagcagacgtttccagagttaattgtgtgcccagagaagctaacgttccaaatgaacgtcctttcaagcagctttgtgattgcatctggaatgaagcctgatggagtgttcgctatgagcatatcacaaggccttttgacaattctttgagccatgcgcccaaagagaatgaagtctgtatcagcggtctcgtctcctgcagtgacaagtattttatacctgaaataagaggtgtcaatgacttagtgtggttaacatagtaggcttgtaagtcccaaaggaattaatatgtaaacaggaaaacattgacgtaaagaaggtagaacatttttgtgctgttggggggggctgagtggtgatagagaatatagtatatgaacttgttgtatagattcatgtcatgtttgatgcacacaaaactggtacattgagttgacaaagggaagagtgctgctcaacccgaggacacgtcatctaacctttggacgggcatagcaatgttagcacaatcacggtttgtgcatttgtaagagtctccatgagtgacagctatgcaggcgcatttttctgcacgagttataccaccacttgctatcaattttccttatagtgactgtaaccaagaattcctttccctgcatggaaaataagaaatagaggcaatctcaaataaatgtgttatgctgaaacctaaataattgtaactccagtctgcctctaatagaaaactgcgggctcaatggcattttttggagagataaatgtttgtagcagtaagaatccaagtgggcaaataatttgcatagctgcttgaattgaaaattagagttgccttacttcaattgaaaatacttgggttataagcaattgaagagttggtgcattgctgtctttttccatctaagtgtcgtaggactgacatgattattgctcgtgtgaccaacttcttttgtacgacacataatttgcattggaccattgttttttagctggtgactggagatgtcagtcgttaattgatcctatgacttcaatccctcaagctttagatttattagatatgctctactgatatttgaagttgttgttatatgacataccatgacttcttttgggctacaagttgcgaacacgtgccacccaatgatattcagtgtcgtaggtcatagaaataaaataaggaacaacagtaaaacattatccacacaactaatttatattgactggaaatctggagcaccaagtatgaagtaatcttatgcattatgtgtatatttggaagctattgacggcagaatagaataggtactgggtatgtcgtgtaccttgttttcaaacggatggagatacttgatgtacgacaccttttgctcctcagcaataggagatataagctggctcgaagtaacagttgcattccacttcactggtttatgatcacctcgtgcgctggtttgcattgtatttgtagaagcattccgttagaaaaaaggcaagagcaggcaacatgtgcatatatttgataacaagaggatagcattatctggacataaggggttctgcctcaggaatggatggattgatgtaccacttacatggtgagcttccagtcagacaaagcccatataaaaaagggtagaaggtataaatgtatgggagtcagaaaaagactaagtgttacgtcaatatacctgcatattttttgacaagtgtgccaacaaatagcacaatctgtggggaattctgcccatcttcgtatatgcgctctcctgggaatagggtggcttgggcaccccacaacacgacattgaccgaagcacctctgttgtttccagttcgagcatggaacatgagtcacaaacaatgtatatgtaagacaacgccaaaatacataccatacatctagcagaacacaaggtaagaacaaccatgtagctcaaaccttgcactacatatggaaatgttcctcttcaagctggaagcttgttgtcctctggagcgatgtggtgaaacattcgagactgaagtaactatcccaatggcatctactttcaaacgagcagtatatacaatattagcaaagaaaaacaggcgtcataagtatataggtaacaacgtttacctgtatagtagtctttatggtcgatgcgcgaatggatctgctctatgtgagtgagggagtaggtaagtgtaggaaatgcaggaggaatctcaataacctgctctaactttgtccaattcgtgaaggtaatcatgatatcatttggaactggcttgtacaagttgttcgatgctcgaactcgaaagtatgtcatgttgtacacgctgccttcttttatgagtggcctgaatttctctatgaagggtgggtatatcgtag

SEQ ID NO: 159240 - DNA, 599 bp, Zea Mays
ggttagcaaagaggcatggtacaatcggactcaattcagtttgctgaatttcagaaaggcagtgagttcctctcaggtttaacactgtttagcttttaatccttgcgcctgtgatccgtgggtattatgggaaatctggagatctattgtaacggaatactttttatgaggaaggatcttcctgtccttacttcgaattgagcgaaaaaggttctcaaactcgctctatcagacagaggtgtgctgagttaaattcagttcgctgagttgtgcagttcggtggtgttgacccaaccttggagctccctaacctgaaatctgttgaatcttagttggtagttggtacccattaaagcaaagttggagagtgattataggagatcaactcctagtaaggagatgtatcaagccagcagcatgggaaaaggagtgaaaatctgacttgaagtttcaggtgactgaaaacctggatcagttttggagcagaaagatcacgccggagctatgttccccttgtgtcattttgaattgaggcaaaaacgaatttttccactagttttgagtctaaactataattatgttttgagagtgaatctagg

SEQ ID NO: 159241 - DNA, 327 bp, Zea Mays
tttatttctctcttctgttgcgagctctgatgaggactgtgatgaaaaacacaatcaaaacacaccatctttcgggactgattggctcgatacgagccatgctgccaactctgcaattctgacgtccccattccagcccgcagattttcttttgcatttccacgcttttattcatgcgtctgtatgctgcatcgtaaaaaaattgatctgaaatactttgacagtggcctgtgacgaaactcagcaatcaaaaacaccatctttcggggctgattggcgcgagccatgctgtcacactgcaaagaattctgaggccaaacagagtat

SEQ ID NO: 159242 - DNA, 780 bp, Zea Mays
atttgtttttcagagaaatcttgaggctacatggagtgcccaagaccatcgtatctgaccgtgatgtgaagtttgtgagctatttttggaaaacattgtgggcaaagcttgggactaaacttttgttctccaccacatgccacccccaaactgatggacaaactgaagtggtgaatcgtacattgtcaatgctgctgcgaacaatggcaaagaagaacttgaaggattgggaggaatgttttccacacgtggagtttgcttataacaaggcagtacattctacaactaatttatgacccttcgaaattgtatatgggttcaaacctattgctccgatagatttgttgccccttccattgcaggaaagaaccaatatggaagcttccaagcgtgctgcatacataaaaaagatacatgagaagaccaaggaagcaattgagctcaaagcagtgtgcaaggctgcaagcatgaacaagcataggaagaaagtgttatttgaaccgggggacttggtttggattcacttgcgcaaggagcattttcctgagcagcgcaaatccaaattgatgccacgaggggatggtccatttcgtgttcttgccaagatcaatgataatgcatacaagataggtcttccaccaagctatggcgtgagcaacacgttcaatgttgctggcctcttaccatatacaagtgaagacacttcagagtcgaggatgactccttttcaagtggagaaggatgatatgaccacgccattaagcaacacgttacaacccc

SEQ ID NO: 159243 - DNA, 648 bp, Zea Mays
gttgccaaggtaagacgtctacctctccccgctcccgcgtccgacgatcccgtgagcgatcgagaggcccaacggcaatgctctagtccctcccctctgctgcgtgtgctaggtgcgaccagtgcccttcgtcggcgtggctctcctagcccctgcgctgagaatgcccgctaccatggctgtccagccttgacctcgctctgtgggccgtggccatagccatgaacctactgcgtcgtccggcgccagcgcgaccatgctgtgtgtgcctcgaccccggcgagccgcgtgccgcctagctggtcagcctgcctcgtgtcctacagttgcctgcttgtgtcgtccgtgctgatgcgagaaggagaaggatggagagaagaactaccctatggggcccaccctcatgcaacatgcaacccccacgggtgatcttgtttttcctgttgttatcgtcatgcaacagagattataagctatgcgtgggacccacttgcatgtcttctgttgcacacataggcaccgcatgtagcaaggcctccacgatctgttgcacgtagctagccaattggaactgccccctcataatggatcctagattgtctgtggctactctctgtctggcccgccctccgtgtggttggctcagca

SEQ ID NO: 159244 - DNA, 480 bp, Zea Mays
ctgcccgccgtgagttcgatggacgatttaacggccaggggacatcatcttccccaacggatctactcgtcaacgcgcaccaaggaaaatacgtggtcaccaacgatggcggaagcgccactgtctccccactaccgatcgccttcgctaacgctctcagatcaacgccggagaatggtggcgccgcgccccgccacgacgagctagcaatcggcttcaacagcggtatgcacgctacgctaatgatgatacgccgagcaggtgcgagggagggggatcacttaccgaagagctgccctgccgtcactgcatccgataagcctacgtgcgccgcctttgaatctgccccatagccaagggcagtcgtggaggagttccaacggtggcggcggtcgacccgagccgtagttctgccagcccaatcgcgcaagtactcggtccttccggtgtggcgaagggatgtgcggttgggttagagag

SEQ ID NO: 159245 - DNA, 574 bp, Zea Mays
gggttgttgaggtggtggtgggagttatagcctttcttggtggatggggagaggttggtagttttgttgatattgctggtagggggatcatctctaggtaaaggtgtgtgtagtgtggctagaaggtgtgggttattgtttgctgcctgcctggggtgcgctcttgctggcctttcgccctccattatttctttggcctctttgatagtgtggcagtcttcggttgagtgtccgacgtcttcgtcattaaagacacattatatcttacggttgcacatggggacgcatcccttgccactaggacctttgtcgcctctggctggttactgattttgatcatagagacgaggggggtctttgagctatttctactagttgatggtgtgggttcgttgctgctaatttgggggtggaggcttctgatttctggtcatgatttgatgtttgctatatgtgagggcttgcatatttttcaaagatttgatacaacacttggagggacgttagtgggtcatgggtgcaatgattgtataggtggcccatgcgtaggccactaatggcataatggatagcg

SEQ ID NO: 159246 - DNA, 299 bp, Zea Mays
caaccatgataccttttaccatttgtccatagcatgaagttcctccaccatcatcatcaagccacttgatcaatagcccagatcaacacatggcttgataattctgtaatgatatgatccactccatgttatcacatagcctttcttggttcatcaatctcaacatagcttgctcttcaccgttgctttacgtccatcggtgctaagtccttgctcttgcttcaccgccacgtggtccctcacacatgagcctttggcttgcccttcacactagccactcggtccatcgaaaccaagcc

SEQ ID NO: 159247 - DNA, 341 bp, Zea Mays
cagccgagtggcggaatgcgcctgtctaatcctaagaacatggaacaacctagagtttgcctgatgagatggacgaacacaaaaacacaaatggatttagattgcttcgggccgacggagcgtaatacgctactccactgtgagttgtattactgagagcttgagaaagtctgggtctggatggagatgtccctaagggagtttgagtgtgcatgtccccttgcattgtactgcatgtgctctcacttttatagtccaaggggagcacgtacaagggagctggaccccaacaagtgggaccagtgttctagtattaaatatatacaacatggagccataag

SEQ ID NO: 159248 - DNA, 592 bp, Zea Mays
gccaatccatgccaagaataaggtcataattggatagtggaagaaccttcaaatctgaagaaaaagggaaaccaccaatgtaccaagtgacattcaggagttgttcagaacatgttaattgggctccatcggtgacttgtactcgcaaaggtggagacagtggcctgacctcgggtaatgtggacgccacttgagtgctgagaaaggacgccgagctgcctgaatctaataaaaccagaatttcaatatctccacccaaaaaccggatggttttaggagtatctttcctagacgtggtggccagggataatgacagcatttgtaattcttctgcaggatcagatgtgggtggctccacttcgccggggagttgaaggaattgccaaatctcatcgaccaagtgtagttgaacaatatcaacacatttgtgaccacgggtatatgctaagccacacttataacagaggccttttgctttcctgtaggcataaagggcagcaagcttgtcatctatagctggaggcttggacactggcatagttggtcggtcgtcatttggaacagctttactgaatgctcgatcggatctttt

SEQ ID NO: 159249 - DNA, 879 bp, Zea Mays
aaaagagatcgatggcccagcaggttcgggtttctgactccacgcgcatgtgcatcggttcggttcctcctctctttaattttttctatggctgaaaggagaatactctcgatcgccggtgtggtagcagaaggtggtgctccggatctccaccatgaccgacgacaggacgaagcagaaggccatggaggccgtcgcggacatctacggtaaatgaggaaccgcttgctctcgtttggtttggcatatatatatgcagtttactcaatggattttggatggggaaacatggccgtgaaacatgctggtcctctgcagctgtgtttcattattgttggccttattaacttgtgttgctgtgtgagctagccttagctagagctgctagcttagcttattagctgaaaactacgttagctagctagaatcaggaacgaccaatttgtcgtcgtgactgaactaaactattcgatccttgtgatcatcgtatcgaagctagcacggggtcacgttggatcgagagcgatcagtatatctagctatagaaaaccagcagccaaccaccgatcgtggtcgtgagtgaattgctactttgctagctttcttagctgacatgattgcgttgtatatatatagtataacctgttgatttgttcaggcatcgactcgatcgcggcggacgtgaaggagaacaagatgacggtgatcggcgacatggacacggtggccgtcgccaagaagctgaagaagctcggcaaggtcgacatcgtctcggtgggcccagccaaggaggagaagaagcccgacaagaaacccgaggagaagaagccggaggcggcggcggggaagaaggacgacaagaagtgagcgccgaggccg

SEQ ID NO: 159250 - DNA, 1475 bp, Zea Mays
taaaataatgaggataaaaataataaggtaataattatttgaagtttgattaaaccctaaatttgaaaatagggttttgaaaataagaagaagaggaatgatataaaaatataaaaatccttaaacttaatacttttaactgtacaaacatagtgtaaatgatgagccataaagtttgaatttaaacttgaattcaaattggatttgaaaatggagaaaaagaaatggaaaagaaaagaataaaacaaaactaacctaattgggccccgactttgttttcggcccatctcctctttccttctctttcgcggcccactagctgactcaatcgcgcgcgcgcctggtgacttccatgcggatcccggtcgccagccacccaggtctttccaccagcgtcgtgtagtctctgttgcgtgggccaacatgtcagctctcaccttcctccccacgcgcggaatccgaggtacggggaggttgttgcgggcgtctcctacctcttggctgcgactcgaactcgtggctggcaacggaatccgcggatctcacgcggcagagaacgctgggctcgcagggtctttgtcctcgttcgtcgctggcggagctcaacaaaccagggagtaaaatccgcgcggggatctcgctgctgctccgctcggacttccttgccccctataaggcccgcctgaactgccatggggctcgaccacggaggtggtccgtcttctatcacgagccgggcagggcgccgttgcagggtgaagctcgtgtgcgttcgggattcggaaatcactgccgccgtggctgattttccgtccacgctaatgccagggccttgattttggtcgggtagcttcgcagcgtcgcttggttgatgtgtgcgcgccctcacctggcggaacctgtggctggggcaagcgaatttcctcgccgtcgtcaacactccgccacggtcggcacttcaccgtggccagcccgcttggacctcgacgccggtaagtacattgatccaatgggtttgctcgatgctctacaccgtctagtgattgtcattctaagttgagggcctcgatgtgggccacgcgcttcgcgccggcgacgtcgccgccatgggtatcaggctcaccaccggctggagtgaacaggggagagaggaaagcgtgtaggtacgccctgatcgtcgattgggtattcaatggctaggattagacgactccataaccctttgtgctttggatctggaccaatggatcgtgatccggtgactctgatgcggtcgctggtgtagtccttcagtcgttgcttctgcgccctcagatcatgatcgtgcggccctagatggagaataccccttcggccagaccaattcacacaagagaccctgtgaaagataagaatcaacccgcagtccacaacagaggagttatgagtcataggcattcttgcgtagaagaccctgtactatctgctaattgtgc

SEQ ID NO: 159251 - DNA, 901 bp, Zea Mays
ctggccgaaacgctgcgctgctgggctgcatgctgccgccgctcgtgcacgacgcctcacctcaccgtggcctcctcgcctcctcccgccagcccacgccatgagtggagcagccgtcgtgcctgactatttcctccactgccgccacgatctatcacctccatgtcgcctcccccagcgccgcccattcttcacctgtgaagcatcaatacggcgggcgtttctgccgtttccacagcctccattaatggttgccgtttcctactctcgtttgttcctccgcgaaatcaagcggcgcatcatccgtcctatatcagtactcctcagtccttctcctatcctataaaaacgcagcatccgtcctcccctcgttgttcctagtcgtgtctgcttgagtcactcaccggagtcatccctgttcgccaacttcgtggctctgctctcctcgagtccacgccctcctcgtccaatcgccggagaccctgctctatccgtcgtcgacaccgaatgctaccgtgctgaagccgctgtagagctgcgcatccctacgtcgagcctctcgcacagctatagcttgcctgtgcttgcggattatcgtcgtgctgtcatcggcgggacgaccgacggtcctgtgttgatgtcctcgtcgttttctgctgtttgccggccctgcaacgtcgttagagaccacaacaacgccgagttctctgtttgttctccactgcgcgtgtgctgctgccacgcctatcgcaattctcattgcctgctgctgccgtgaagctacgccgaggtctctgcagcgcgcacgatcacgcctacgacatttcccacgtcgcgacgtcgtctgtgctgttcagctcaccatcgtcgtcgtgccgtgctgctcaccattagcgcatcg

SEQ ID NO: 159252 - DNA, 681 bp, Zea Mays
cagcatatagcccgagcgtcaacacccagcggctctacggcggactcccatgtctggcgagaaatcattacttaaccatagcttccctcacaaaatctctcaccgtagaatgttcctcgaggtggtgctccgtcctctggcccgatcctaggtttcagacgacgtcgaggttgaagtttcgcgttggcggcacgattttccccacccatggtggccctctctctacttctcttggtccagcggtgctctctctctctctctctcgcctatggctagagggggtcagggggttatctatatataccaagctgagtgggaggggaggaggcctaacagcacccgggatcgttggtggttgtgttacggcgacaacgcgtgtgatgtctctagtggaggacggctgacttcttggtctcactggtcagcgatccgggcacgcgcgcgtgtggatgaggccagtcgagcggatgcagaagcggagtcctgattatgatggaggggatagctctgaaacaggggcacatggcatcggcttagacctaggggcgtccgctcgtctagtcttaagaggaagacgatgtggccccagatgtcaaggatagagcacggaaataacagaaaaagggaaaggggaagaatgggtcagctagtgagtggctgacgtgtgggctcccatgtcag

SEQ ID NO: 159253 - DNA, 539 bp, Zea Mays
agttcaggcatttcttggtagagacctgcctgctgatgatggtgcagaccgtactgccggggtacagattagttggttgagacagtccttcagagtgtgtccacaatatgctgacgaggacaccgttcagcactactgtcgagcatggatcctccacttgtttggctgcgtcctattcccatacgcaacaggggactgcgcattgtggatgcacattccttgtctcaccgactgggacacaataggtcaatttagttggggctccgcggtgctttcttttctctaccgccagctttgtgaggcgtgtcgacggacctcctcctcgtcctctattggaggttgtgtgtacctactccaactctagatgtggttttggataccggtcggacgtccacaggcgttccctcctcggccttggttccatggtgttcctcctcgtcgactccctacgtacacatacatttgggaccaggtagccatcccatatggcagagcaaagcgggcatacttggagtacatcaacgagccggacacactct

SEQ ID NO: 159254 - DNA, 1044 bp, Zea Mays
atcgcactggacgccttggatggtgacaccaagttgcgtgtgaacgtaggcaagaaattgctgagggtagtgagggtgtcagatttgaggcgcaagggaaacgtccacaaataatgggaacaatcatccaaaataacgaggtaaaatttgtggccagaaacactggttataggtgatgtctagagatcacaatgaatcaactgaaaattatgagtggcacgagaggaggatgtatgaaacggtaggcgaacatgacgacctagctaacagacatgacaaagatgaatgctagtatttttattacaatggatagtgaaagactatgctaggtgagacaggatggcttgatcgaggtgtcgaattcgttgatgccacagagttggtgtgaaatgtgatgcaagaagggctgaagctagaagccgtagagggtagagtggtccggggctgttacatttgatgatctcgcgccgagtgggaagatccttcacagaacaaccaaaatgatcaaattcgacacaacaattgttatcagtggtaaattggcgaacataaatcaaatctttcatgagggatggagaaactagaacattatgaagagaaagattataagggagatgagtagtgccggtggaggtgacatgtatgagattaccgttgccaacgataatgtgagtggggagatgctgggaggaggtatgagagattataccagcatcagacgtcatgtgactggaggcaccggtgtcgaagtgccactcatgttgaggtggctgttgaagagtgacagtttggaaattggcagcgagggtttgttgatcccagacaggagttgttggaggtgagtcgatgtaggcaggtggcggcccataggcagcaggaggtgctgcccattgtccaggagtgccagcgacgaaggcatgcggtggctgtgccggagcagcaggtggacgttggccaggccacatgtagatggcccccgactaagggttgtagtagttgtagccgacggagttggacgagggcgcatgacccatgatgccgctg

SEQ ID NO: 159255 - DNA, 477 bp, Zea Mays
tgggatacgacggtgccatttccggtgcatgccaaccggtccaaacagggccctaaactctagtacgacaaaccctaaacaaagcggaggcgactgttgattcatgtagggggtttcttaccgaggattggcgttcgggtgaggttggcgcggtgtcaggcggaaccgcgacaggttagtggatccggcgagcgattctgatcaaggttggtcgagactccggtcaatacactacgtgtaggtcacacatgcggtgacggagctttcgcaccaccctccacgatcgccccaacgacgtgaaccgggatcccttcacggcggtggtgcactctgcctggtgatggctctcggtcgcacgacaattgattgggcactatgcggtttgagttagggatgaggtggcgcaaaccccgggcgccagctatttgaggggagccccagctagaagggcggacccgtccagccgtgggggttgca

SEQ ID NO: 159256 - DNA, 1166 bp, Zea Mays
tcttctgcgattacgcgctgatggctctactccttggctccaggtgttcccggagccacaagcatgctgtcccccgacacagagaagaagaggaagggcatgtggatccagatcgatggcgtgcacgaggtcaatcggttgttgcaccttggagaacggcgagctcgtcggcgtgcataaggtcaatccattgccatgccttgttgtctgaccagcggcagtgggcatagggcacgccgtaggcatagatccccttcaacaaccggtcacctcggcagcaaacttcggcggccacatcggtatgtctctgctcaaccttctgtaagttcgttaggctacctatgcgcaagtggttcattcccttagtcactatacgaggattgtgaaatggcttttgtcacacttacgaatgaaagggaggctcaacagacatttacgggaggagtctgatgtgagctaggtagcagagtgctcctagtctgttgacccacacttacgaaatactgagaacattgtagttgcatgattaaattttttttgctctgctttgcagtttgcaagcacaactcgatcgccccccttcgcttctccgagttcttaataatggtgcgcggagtgcagtaccaccagacggccgtggtgccccgggagtccatccttaagaccgaggcggagtggctcaactctatcaaggccgaccttgtggtaccaatactatgatcactgatcgttaccggtttatgttgtcactcttctgtctgaacatctctacacaccgagtagagcttaactgaacccacttgagcaaacactggcaggtttcagatgttgtacccgtcgtgtgtagggcagctacagatgctggcattcgatccgtgtgcgtcacgaatttcaggtaagcggcggtcttgttgcttctttgtttccgcgtgtcgttaagagcatggaggaatgctgataaacactagaatacgctatagtctagtatatttaattttgattcgtcaggtaagtgtctgggcgatctgcctgtagttactacaggcaacatgtaaatttggggatcggatcccctgacgtcgaagtcacctgacgcacctatattttctgcagctgggacttcacttatgcagagtacgttgtagctactggacatcatcatcgct

SEQ ID NO: 159257 - DNA, 440 bp, Zea Mays
ctaattctatgttgtgctcctatatgcctccttgccaaaattattttattctggtatggtttatacttctctcaatctattagatctgatctcactcttgtgcttgcgacatctttgtagatgccccctgaccaaaaccctcttgtcttttggggttctttcctctttcgtcattaaattgctaccatctggcaaactcttgtcctctgtattgacatacttgtatccctgaattcttcaatacccttgtttcaaatacttgcctctaaatttctactgcctacttaaacattttagtttatagtccatgaccttcttatcttttgagaccctttcctcttccgttgttaagtcgctatctttcggcaatttcttgtctcttggtattggcatgctcgtaccattggaatcttgcatactcttatttttatgtatgctta

SEQ ID NO: 159258 - DNA, 340 bp, Zea Mays
ctctttgatgctcatttcagaaagtaaaaaaaagaaaaaaatcagtttgcttgatattagttagtagcggataaatagttcattgatatattgtaatctttattttctatgtttttgccgacgagcggcacaagtggggttcctaattcctattctaccatgatgtccccgtccgtttgtatttctatttcagtttgtggtgctctcttcctatttgaaccaaaaggttccaggtccagttttgcaatcaattgattattgatgattaaactgctagagttagtagttctataaatgtattcggtttctagcattagaaaaacaacgataaacttatctg

SEQ ID NO: 159259 - DNA, 692 bp, Zea Mays
agtgaatctgtgagcttgccttgtaacgctgtgtgccctcccttttatagctcaagggggcacatacaatgatgctgagccccgacatgtgggcccaggaacataacagaaggaatacactataggagcaactatcgcctgtgcaatctcctggcgccataatatctgtagttcatacaatattaatatgtcacggctgcttcctcggtaacacgcgagtcatgatgagtgtagcgcatgcggcagtatgggcgtgccgcctgccgatggaatggacaggcacgccgcccgcgggatggtctggtcgccgtctgccagcggagtgacagggctcattaaatgctgaggcgtcacatcgcctgccagtggaatggacagggctcattaaatgccgaggcggcacatcacctaccagtggaatagacaggaggcgcgccttatccgcaataaatgcagaggccgcgcggcccagaggccttacgtcaggctccgcccgctggcttacgtcacgtgcgtcgtgccacgtggcagcatcggggctccgcctgagcggggagcagaagtgtgcacggtatggctcggacacgtgtcggctccagacccctgcctgtccttgatcaaggcctgggtattctttgtcccagaatcccgagacactgctgtgagtggcctggaccccacgcagaggggtc

SEQ ID NO: 159260 - DNA, 866 bp, Zea Mays
atataaataatgaagaagaaccggatgataaggctgcagcagagcacatcgcaagacagtcggcccactacaccctcatagggggcgcactgtacagaaggggcgcaacaggagtcctcgtgaaatgcatttcctcggttactaggagacaactattagatgagattcacgccggacagtgtggaatacacgcaacatccagaactctggttgggaaagtctttaggtctggtttctattggccagcagcaaagagtgatgcaaccgagttagtctagagatgtgaagcttgccaattcttgttgaagcaacaacatttaccagcacagcagctgcagaccatacctgtaacatggccatttgcgtgctggggattggacatgattggacccttcaagaaagctcagggaggctatactcacgtgttggttgccatcgataaattcaccaaatggatagagtacaaacccattgcttctctaacttcagccaaggtagtggaattcatacaagatataatattcaggtttgggataccgagtagcatcataactgacttgggatccaacttcactagctctgaattctttgatttctgcgaacaacagggcatctagatcaaatatgcatcagtagcacacccaagagctaatggtcaagtggaaagggctaatggaatgatactggaagcactcaggaagaaagtcttcgacaagaatgaaaagttcacagtgaagtggatcatagagttatcttatatggtttggagcctaagaactcaacccagtcgagctctgcatggaaacacccccttcttcatggtctatggttcggaggcagtgctacctgccgaccttaagtttggg

SEQ ID NO: 159261 - DNA, 1516 bp, Zea Mays
ttgtataaagtgagttatgcttgaaattgagtatccctcataatattttgagcatcagtgatttgagtatccctcgtaatttgatacagcatattagggtatgttttgttcagttgtagattcttgaaaatcaatgtttcaatgtgtgcataatcattctcaaactcatagatcgataacaatcacctcttcagttcaaccataatcaaataccgttcaaccataattaaataccacactgcggtactaggcaccaaagagcagttgcgattggaacgggccctagttaaccgttctttactgatctgctctgatttatccactcggttctttactgatattaactcgttctttaatgatgagcagtaattcatctgttaaaactgccgcttcaaagccaatgtcatgcgacacgtaatgtttagtatagttcatcatgtttgattttaactaggatggaaaaaagaccaaaaaccaaattggatcacagataagagaccatgtagcagattgttcgaggccgtcacaaaacagagaaatctgagcggcacggagaactgcagttcgttgtggccaaccttcaatgcaaagatcgccacttatctggcccctttgctctgcaaattggctttaccgtctgtttctttactgacactatctgtctttcatctgtggcatgtagtgttcggttgtcatgcgatatgcgctacatactgtacatatgtattatgtagttcatgttagtttccgtagcttttaactggagacacgatacgaagaagataaaaaccaaaacaaaatggataacatataagatatgataatgtggcagcttgttcgaggccgtcacaaaacagagaaatctgagcggcacggagaactgcagtttcgttgtggccaaccttcaatgcaaagattgccacttatctggcccctttgctctgcaaattggcttcatcacctgtttctttgagctttctaaccaacaaaccaattgaaagcaagagatcaaaaacaaagccgcactaattttcgctccatgacccattcgagggaagaaagaaatatgccaatgtcagaagggagataaactcgagaaccatcagaatccattacatttgacctcaaataaaattcagtccgcatcatggttggatcggcagacccacatcatctagttctccgagatcactccacagctccattaatcaaacgcaataagatcagtgtcacagtaagcagcaagaaaaaagaaaagccagggagacaataaagaaatcggatgtaatcacaaggctcagacgaaaaatgggtagaagtccgtttgtcagcccaaagagaggataatcccctcattcagagtggtgcatgactttgcatcatcatttgcccttacagaggaagaaagcgggataacagaggaaatcaagcgataaacacaggacgacggcaaaaggagagattgaaggcacgagacgagacgtcgtttcctagcggcggcggcggcggcggcgga

SEQ ID NO: 159262 - DNA, 607 bp, Zea Mays
cgcgaatttgggcatgatcactgcgcaagatttgctcccccaacagagctttgtcgtttgtgtgtggaagtcgagcggtttggggcagtgtacagagagttgtcgtgtcacaaaggtggcagtgtcacaaggttaagtcccgaggtaaaaccatgtcaagagtgtgtcaaacggtggagagaggtttccaaactttgccacggcgtgttcaagggaatttggcgccactttgatatttggacttgtttgatttgagttttgaaaaatagagaacgcgattgatctttggaaaggggctgaaattcagatttctgaatttctgaatttcccccaagtgcattagtttaggggctgttttggggattttgaaaagttcaaatggcaaaacttcctgactatgctttgttggttaattagtgaactaaaactttgtaatttggtttttaccaaaatttttatttttctcccaagatttctcccaaataccctttatgcttaaatggtttacttaggattaattagggtttgagagttttccttccataagattcatgacaagattaaggagagtttgagaagactcattataaatctttgttctcatttt

SEQ ID NO: 159263 - DNA, 946 bp, Zea Mays
gagactgaaccatttggaggttgaagcagttcaggaaacaccaggcatgatagtaggtatgtttccagtcgactcccatattgcagaagtattatttgatactggagcgacgcattcgtttattactacatcatgggtagaagagcataatcttccaataactaccatgtcaacacccatttaaattgattcagccggtggtaaagttcgagccgatagtgtttgcttgaatgtaagtgtggaaataagggggacagagtttcccgctaacctcatagtaatgggtaccaaggaatagatgtcatcctagtgatgaattggctagataagtaccaagcagttatcagctgtgataagaggacaattgagttggtgtccccactaggagaagcattagtggctgagttagtctcacctgagccaaagaaaggaggttgtcatcagatggctattgatagtagtgaggcagatccactcgagactatcaaagttgtgtgtcagagtttccggatgtgtccctgaaagatttaccaggtatgccacctgagcggaaagttgagtttgccatagagcttcttcctggaaccgcccccatttctaaaagagcttacagggtatctggacctgagttggttgaactcaagaagcaaatagatgagctgtcagagaaaggttacatcagaccaagcacctcaccttgggccgcccctatcctattcatggaaaataaagatggcactaggaggatgtgcttcgattatcgagctctgaatgaggtcacaatcaagaacaagtaccccttgcctaggatagaagatctgttcgaccagctgagaggagccagcgtgttctcaaagatagatctgaggtcaggttatcaccagctcaggattcgaccttcagacattccgaagacgacatttattaccaagtatgggctatatga

SEQ ID NO: 159264 - DNA, 924 bp, Zea Mays
cctgcttgtccccaagcaggcgcgcgaggaaaggcttgccgcagagcagtagcatcctcccatgttgctagagatgccggcaaaccggaccactgaaccaacacttgagtttgaccattagatgtcaggcgacgtcgcaacacacactggggtatctgaaaactgtccaaggaatcaggtaaccgagcaacggaagtagcatccggcaccgcgcgcttcagctgggacacgtgaaagacaagatgaatagtggaggacaccggcaattccaatttgtaggccacagatcccactgttgacaacaccttgaagggcccaaagaaacggaaggccagcttctggttagcacgatgggcgagcgaagactgaacataaggttgaagccgaacatagaccatatcaccaatttgaaaggaacgctcggacctcttcttatcagcttgcaccttcatgcgaagttgggcacgagccaaatgctgtttgactaaatccatcatgactttcttctcctctatccatttctgcagtgagggaatcgggcagacagcagaagactctactccaaagtgacgaggagcgtaaccatacaatacctcaaagggagaaaaacccaaggctgagtgccaactggaattataccaaaactcagctaaatagagccaatccacccatttgctggggcaagcattcacaaagcacctcaaatatgtttccatgcactgattcacacgttcagtctgcccgtctgattgtggatggtacgcagaactcatgttgagagaaacccctgccaatgcaaagagtgtcttccacaactgactggtgaaaatacgatcccggtcagatataattgccgtaggcaaaccatgcaacttgtaaatgttctgcatgaagacatgagcaactgaagctgctgtgaatgga

SEQ ID NO: 159265 - DNA, 2002 bp, Zea Mays
ctgccctggtactgggtcctgctctgctgactgttggaggggggtgccttggaggcaggtgccgagggaatcttggggccattcaccgagttggagtaggtaggtccaggtgcctttaattgggggcagttattcttgaagtgactggggtctccacagtgccaacaggcatttgctggcggttggttgcttgcaaccgagggggcctgaaaggagctctgactctgctgactgtaacgtgatggagtgggtccagctggtctattgaagcttggtcccttgggtggaagcccaaaggatcgagctctctggtgacggtcttgctgctgagctcagagaacctggaatttcctcttaaggtgccctttttcttcctcttttgccctttccacttggatggctttgttggagaggtgcgagaagttgaggaaatcttggctggcgaggatggtcttaagctctggtcttagccctttcagaaaacgggccaccttcctggtctcggtgctgacatcgtcaggcgcgtaacgagccaattctgtgaacttgtgcacgtactcactgacagatcttccaccttgagttagttctcggaattcatcttccttgagttgaacgatcccctggggtacatggtgctcgcagaaagcagtttcgaattctacccaggtagcatccctgacggcctcgctgaaggtatcccaccatgctagggccatcccagaaagctgatgagcagccaattgaacacgctgattttcggggcatccgatggcttccagtttcctcttgatcatgcgcagccagtcatctgcatcgaggggattgctagaccccgcgaacgtgggaggcttgagtctcagaaattctcccatcctgtcctgtggtctcccaccacctgggtgctggttttccagacttctagtgaggatttcaatgagttgggactgattggctagaacttgggccaaatctagtggtagtttcggaggtgtggggaggtgggtctcactctcttctccgccagcttctccttctgctcttaggggaaaacctgctccaatcccggaggcggtaggcatggttttatccgaagccatctgccaggggaaaagagttactactatgcacatgccaaaattttttttcaaccagttactttattcattacacaagttcattacagcatacaactaccataagttcattacacgcgagtgctatctagggtactcccgaactccttctctaaagtgtccccaaattccttgagaaggtcatcaaggctggctagggacatttcctcggtgtcggacgagtttcttattctggtagggggtagggctggaggggcttcttccttctgctcagtctgacatccttggcttttggtcttcttgcggatttttcttgcgggggcgagcttcttcagcttcttgtcgtaatccatcttcagagtgcggtaggcctcacgggtgtcggtttcctcgccttctgctatctcgaggctctcttgaagggacaccttttcccttgtaagttccctgacttgttgctccaggctttccacccgggagtttaggtgagtgcagtgggaggcaaggtcatcatattggttatcaagggtgtggaggtatccagccatgtagacaatggtggggtcatcctcgatagggtctccccctgacagggcctgaagtcttttcctccaggcgggggtatttttgttgctgggtgggaagtagcggaggggggtttcaaagattactctgctgtagctttggcatagttgtcggagggctttttgggcaacattctggcaagtatctaggaagcggtatccggtgaaagtgacttggaaagaaggatggttcgggtagtttcggctttctcccaggtaaactgccatagagcacttctccattccattctcgagatactccttccagtcatattctggcttcttgcggattcccatgcgaagcgcacaacttcgcaatag

SEQ ID NO: 159266 - DNA, 848 bp, Zea Mays
gtgaaggatgagcgttgggtcttgactaaggactcgtgaagccgggtgactagttgtggtgactaacacttgaggttgggacattgaaagtcgcctgaagtaggatgaatatgcgaagcctaaaaattacaaactttgaacacgaacgtcacccgaggttagagttagaacaaatataaatgtaatcagagtgcggaagagtagttcttcttgcaatgaatatcggcacagggtacctcacatcaaaacggtgcacaaagctgtaacaaccgaagttgttatgatactgctccttcccaattgccttcgtttggtaggataattcatgaatgttgcaaaaacacttggcatctggctccagcccttggcttctcacggcccaaataaaaactccgactttaatcaaggcttcaggattaagctgatgaagttatatctcaaatgtctttagtacttcgaccagcatcttgtgcaacggaaaacgaagtccagccttcataaaacttttaaatactaccacctcatctgcctcaggaagaggaacaatgttttctcccccagccctcactatagatatatcatggaaatatttgcccttcatcgcttcaatttgcccttgtttgaaggtggactcccgaaaacaacatggcttggcctccacggccgatcttcggtatcttcgttctcactttcaacattgaagctctcgctatcgctggaatctccagatatcctagctagcatttcatcagtgatttttcaatattggtcctctccacggctttgtagaaaccagcgagcgcgaggtccacacttttcttatcttcagccatttcagtgataatcgc

SEQ ID NO: 159267 - DNA, 362 bp, Zea Mays
ggcattataagggctcgatactttgaccgaaccgtgaaacgaccatgctgatgtagagaccactcgaatgtgtctctctgatcagttagttgagtattcataactgtggatgtgcattgcagccaagccactaagttattactaaccaaagatcttcgaaaagccacatttagcggtgtagttctgaaaacatccaaaacaatcactttcttctttctgacaatggcgtaaaggttaggagataagtatttgaaagctacattgccacaccatctatcttcccaaaatctaatttgggtcccatccccgagcttgaaacaccctagacccaaaaacatgtgtttaaccttcattagacctac

SEQ ID NO: 159268 - DNA, 451 bp, Zea Mays
cttctttgaaaaacaattcagcaatatgtgaagcgtcatcactcttgtggcatggaataaaatgtgccattttgctaaatcgatcaaccacaacaaaaatggaatcccttccatgctttgttcgtggtaaaccaagaacaaaatccatggatatgtcttcccaaggcacactaggaataggtagttgagtgtacaagccatgagggtttaaacgagacttagctttatgacatgatttgcatcgaaggacatgtcgctccacatcccttatcattttaggccaaaagaaatgatcggcaagtacttgctctgtcttcttggcaccaaaatgacccataagtcctcctgcatgagcttcctacaaaagtaaaattcgaacagaacactctggaatgcagagtttgttagctcggaacaaaaaaccatcattaacatgaaattttacccatcc

SEQ ID NO: 159269 - DNA, 509 bp, Zea Mays
gcgtgtaccgcaatgaaccaaaaaaccaaagcaacataacaaagcgaggaccggtggaacgattacctcaaatcgctgaagaagggaagactggacgatttcaggacctgtgcttgttcgccagttctccaatgcggcagatctacacgagcgacatgaacgatgagccaatgcacatgaatccggtgccgaaacggaaagcaatcgaaacaaaagaaatagggatcccaagaagaggaacggacgacagcgacggagtcgacgagaagaaaggagcgcttgccagtcagggggaaaaggaagacaacacagcagagggggcttcatataagggattgggagaaagcagtggcatgggcgctgcggtggaaggacatgacacagtgagctgacgctgttacggagacggaggacactcagaggcacggaaaggcgcggatttatcggattttggaatccggtgaatagctatcacatggcggtatgggcacgcgcaccggatcgcaacg

SEQ ID NO: 159270 - DNA, 353 bp, Zea Mays
gtcgacaagaagtttctttagaagaaaggatgtatgacacattaggattgagggaggaggatgaaagggaaggtagagaaaggcaagaagcatgtatgggaaggtcctccggtgttgatggttatgaatgcattgatgttatagttgcgtttgctgtgaagaccacctaccagatgagtgttttaatatgtgatataacaaatcctataatgaagatagggagcttgtatgaaggaatttatacttgctatgaggcatcatgaaataaacaatgaattcgagttaggcattgaatccagtgcgccttttcgatatagaggatactgtaaaggtggtgactgtccatggaaact

SEQ ID NO: 159271 - DNA, 687 bp, Zea Mays
ccgccttaaaccattgccgacttaagtcgattgctccgttagtagggcatagtggtcaccccgagttagataagcgtgccaattgacagtgaacaatctgagtgcctttgaaacctttttattgatgatatttttctcgatttacagaatacatcgtcgttccgagagcctttgtgatgtagctacgggtagaacttcctgagatgttctatgttccatgagttcccaatttctgttccgtccatctgagtgaggcgatatgatcccggccgagtgacttctgctactatgaatggtccttcccatagaggtgacaatttatgccgcccctcccccgttagaattcggcggaggacgagatctcccactacgaaggatcgatgcggtatggccttatcatgatagcgtctcagagtttgctggtatcgcgctgattgaatcaccgtattcagtcgctcttcttcgagtacatcaacgtcctccggcctagtagcttcagcttctgcaatgttatcaaagattaaccttggtgccccgaacttgagatcggcaggtagcactgcctccgaaccataaaccataaagaagggggtatttccatgcagagctcggctgggttgagttcttaggctccaaactacatatggcaattctctgatccactttcctgcaaacttctcattcttg

SEQ ID NO: 159272 - DNA, 435 bp, Zea Mays
caataccaacactaaaaatgaaaattaaaccttctgaacttgctaggcggtgcagacacagacaacagaacaacatttcatatatgctaaacacataccttctatagcgaggagggtgggcttcttcagtgggcgatctgcttggagttggcaaacagcagcagaaaatagggcttcttcataggctccgttgctacactaaaataaacaaacaacagtagaaagcaatggcaatgagttggcaaaatgaagaaaatcatctgtctagcgctaggaggcagaaaattcacataacttccgacgcagagcaggacgaccaatccgttctaggccctgtcatcgcctccgccacatcatcgcgccagaaaagtagcaaaactatgaactccaggaccacatactataattggctgattacctgaaaaccaaacaaaa

SEQ ID NO: 159273 - DNA, 703 bp, Zea Mays
cagcgcaacaacatgaaacaaatagatatagaggggcaacaacatgaaacaaatagatatagaggggcaacacttcattgttgttaacttgctagtggtgtatatataactatgtcggtgctgtttgagcctttaggctacttgtctttgaggagagccggtggctagaaagatctcttgtgctaaaatttgccacatagagatatggggctttagctaatgcactgatacctagagccatgttgtgtgcacatagtttagtatatgccactacttcctgacaagaaatctcacttgtccgaggattgggagaatccttgtttctagtggtacacaagatcatgcttgtaataaaaggtacaaggagacattaatatgttaagggaagaacgacatgattacatcaatgcatgcctactttgagagacacaacacaatccagtgacaaactggcaagacatggacaattggctctatgacaagcaggggcacatgaagtatatacatgtaatactatcacacttttgaactataaaaaggggtgttagagcaacgttcaattcaggttcacaaggtcgaaaacattcaactcccactagaatcccaagcaaaatccaccaaacccaagccaagagccttgaaagttatccggctaagacgacaataagagacgttaatctagcttgtcttagcctacccctct

SEQ ID NO: 159274 - DNA, 298 bp, Zea Mays
ctcgcctctgtatctgaaggtatactttagatagaccaggccaccctggctagacccggcagcagcttccttcggcatctcccactcattcacgagcggccatactctgtaggcgatgtgctcttgaaccaagtctcttatgccaataaaagtacacatagtgttgaagcttctctggcatgcttctatatcattcccaagagcagtggctggcctcctgatgccgaagtgagaccaaatggggcgctgaataatcccttttatatcttccctctcaactaagttattcttcacataa

SEQ ID NO: 159275 - DNA, 493 bp, Zea Mays
catttatccgcgtacccgcggataaaaaacccgttgggcacggttttgggtacgagtctgtacccatggatacggatacggatagcaattaatatccgcggatatttttaaaatggatacgaaaaatcaatatccatacccgaatacccgaatatccgttaaaattacacccgtcccacaggcccacgggccacatcgccacagcccacaacgccacaagcgttctccaggcttccagcaatccagcgaagccctcgctcggccagtcggcctccatctctcattctctccccctctgtcgtctcccactcggccactcctaccgccgccgcccactcctaccgccgccacccactccatctcacctctaccagactcccgctgccgctgccgctgcccgctaccggtccgggtccctggctccttgcgcggctcccgggcacagagcgcagatctccagctcgtcctcagcccctgcatcgctgactccctg

SEQ ID NO: 159276 - DNA, 549 bp, Zea Mays
gttgaaaccttgatcgtagatctctaatccgacggctagatctgtgtactagtttggtttatagagtgctctaatcggggccattgaagcagattgaacggctcctggcgcgtgccgcttcatgaaactcgggatcgaatcgggatcgaatcctaatcgtggaaccttgattagacggtcaggatttcccgatactcgttcggcatggtggttttacataagagcacctacaattttgacttatcaacccgcagtccactcttgttgtagaataattatagccaggtcctatttttgatactttagcccctgaaccatcttgtaatcatggccacagtccataaatatcaggataatgaaattaaaagtccataaatatcaggataatgaaattaatttttaatgccaaaataattcaaaaaacatagaaaatgcataactcattcattttaactcatttttgtctcgttccagttgcgttagcttcgtaaaagaattatttacgtgttaacagtactcattgtagcatctcacatacttttataaata

SEQ ID NO: 159277 - DNA, 730 bp, Zea Mays
attaaataatgggaaggagaataaataataatattgaaaatagtaggatttatattcacatttggattatatttgagatttgacatctaaattcaaaatagaaatttgaaatagaaaagaaaatggaaaaagaacagacaaaagccactgtttgggccgaatcctcgctcgcgccccagtaccactccacccccggccgacccaaacttcccttggtgccgacagggggaacccactggtcagccttcccataccatgcgctccaacttgctctctgtcgtagaatggtgggaccacctgtcagcctctcgtgaccacagctcgtgcatccgcacctccttccatgtgggcccgccttgttggacctggttcttttgggatgaacaaaccgtgcgtcgttcctggcaaaattgacacaaaatctgtggatgtcgtagatatgatcgctggcttgtcctatataagtccctggcctgcgcccatagctttgtcaaccaattggccagcaaaccttgggctccgccatcgagacaccaccgcggaggggggtcggagctaggtgccaacatcgtggttgggtgttccccggacgtcggcgctcagtggcattgccaggactcaggagagcttccaccgccatcaatttagcgaaataccgcccagggtgcggagaattgatcgacgaagtttgcttctgccaccgtgccaccatcctccattgccaagtcgc

SEQ ID NO: 159278 - DNA, 368 bp, Zea Mays
gggacggccgacttcgaggacggcgaccgccgcggcagctctatagatctaggcgtcggtataggacgaagggaggatgagagagctgtgtacctggtaactactgctcgcgagatccggattcagggaagaagttcgtatctgtgtagagggaaggagtcgtatataaatagaggtggggtgtggcgaagcgaggaggaggttgcacgcacgagcgttgcgcgacgagatgaagcgaggtgagattgatggaagggatagacttagacgaagggtagaccgggggaatagacgaagggtcgacgaggtagtcgaggatggcagatgcaagcgacttgcttttcgcgaggagaagcggttcggtgatc

SEQ ID NO: 159279 - DNA, 821 bp, Zea Mays
gaccttcacatccacattgatagcaagcttttcttgaagttatttcttgacttttttcatgtttccctttttgtttcttggacctgatgcgacgacgaggctgaaactgtgtgcaagtaatagtccatccatcaatgtaacactcatgtgtttcttcatggggctgggcatccttgtgatgtttcctttttggaatactttgcaattcatcgaatgacagtgcattaggtatgagagactctgctattagttgttcagggggagacatctgtcttttaatgccagaaaataaaatctggttcttctgttttgtagtttcactttcgtttgtactgatctggcgacaaggaattccatagtactcacaacaacatgttccaaggtcacttgtcggttggtttggttgtgcattcttttgtgtcttgaatgtctgttcatcaactgttttatttatagtgttgttttgacttgccaacacaccacattctttgcatttagtgacatcacttgtagttgacattccaaggtctgacatctgtatgggtgtggaagaatggaagagacaaaagggttgagcacagacagattatagagagcagagaaaacccatctatctaaggttttacctagctaactgatgtcattgtggacaaaagtcacacaatacaccaacaatcatttcaaagaagcaaatcaaacatgaacacaaaggataatgaactcaagcataccagcacaacacaatccaattctactcattcaaccaaaacaaacggtgagacaaggtttggaataagaaagatattataacatcaaggagt

SEQ ID NO: 159280 - DNA, 1031 bp, Zea Mays
cttggatgaaatctggtgtggaatagtgactaaacaggcgagggaagcgtgcaaaagaaacaccaccatgtgttcgacgccgtgctcaagtgaccgatcgcgcactggtcattctccgcacgtgccccaagcgccagtcagccccatcgcgcgcttgcgcctagccacgctcgagcgtgcctataaagcctttccccatgtgcacggtcaccccgcctcactacctcggacaagcccacaactccggtgaactccacgccgcccgccaaagccgcccaagcctcattccccgtggccagctcgccacaaccaccccatcgcccaaccaagcttgcaagaggctcccctgcaccttcccgaagcttgtagcctcgctcaattgaactatgtcgaggccccgccaccgctcgacactcactacctgccgctggagcacgaggaccgacactatagcctctaccgcccaatccgagcccagggacagcttcaccaaggccccgccaagctcctcgagtgttgccatgaagctctactgcaccaggcccccggattgaagctcgccaacaacctacacccgcatgcgcctgttgactggcttgctcctctcgccaccggccgatcaccgccgccatcgagtttgcctgaccaacccgaagctccatgaccagcccccgacacgctaccgcgccaggtgagccacaatttctcgccgtactctaaacattgttccggcaagggtaggagggagcgcgggttgagaaccttagaaacccgagggccttttgcactgttagagaccaaggtgaataggagcccaagggcatagtgaaagagagaacagtggaaaaagctagggggccaagagcaaaacaacgtttctttttcctttttaattggaaatacgttttaatcctgcagcaagcttcaaaaatatgtaacttaatgaatactgacccaaaattcatgaaaccatttttgttaaactttgtgtactgcaagctttcaaccaaaaatataaaatcacctttgta

SEQ ID NO: 159281 - DNA, 768 bp, Zea Mays
ccagggggcagcatcagctggtggggggtgcgagtttagagatgcgccgtgggaggaagactgactaccttggaatcccactcaaggatagtatcaaaggatggcgcttggagtggtttattgttgagaaccacggaaaatctctccccccacggtcagggagacagccggatgttcgtgctccgagttggaccgagtcccccacggaccaggaggtggctgaggcaggggctttgctggctgaagttggattgttgaaggagaggggtctgactgcagaggctgtggttgctgattttgtcttcaagaacattcaacctttgaaggatagggcatacccggcctatctgtatcgaggtctagctgactcaacccgtgtcaccaacagaagaattcatgttgtagacttggtgaaccggcttgaaatgatacttagaggcaaggtatcaaatgttggcgcccctattgcatactcggtctggaacctacctccttccaaggcctttactcattttgtgtcgaatcctcctgctgctgatggcggtttgggccttagagtgcgaccctctgccgaagaagttagtgctttggttgcttcgcttggagaaattcctgatgatgaacggcaggtccactttgaggtgcctttggatcctagtgatgcagagataagtgctatgcttgatatgttggccgaggactcttctgatgctgctcctgctgggacattggtggtggtgcctctcccgaaagctggtacaaccttgg

SEQ ID NO: 159282 - DNA, 653 bp, Zea Mays
cgagcatgttgcaccgtcttaagtcgttgctgacttaagtcgattgctccgtaagcagggcatagtggtcaccccgagttaagtaagagtgcaggtcgaccatgaacaatatgggtattcttgaggtctctttattgatgatatatttccagtttacagagtacattgtcatcccgatagcttttgaaatacagctaggggtaaaacttcctgaggtgttctatgttccatgagtttccaatttccgtgccatccatctgagtgagacgatatgatcctggccgagtgacttctgctactatgaatggtccttcccatagaggtgacaacttatgtcatccctcccccgttagaattcggcggaggacgagatctcccactgcaaaggatcaacgtcgcatggccttatcgtggtaacgcctcaaagtttgctggtaccgtgctgattgaattactgtgtttagccgttcttcttcgagtatatcaacatcctccagcctagtagcttcggcttctgctatgctttcaaagaccaaccttggcgccccaaactttaggtcagcaggtagtactgcctctgacccgtagaccatgaagaaaggggtatttccatgcagagctcgactaggttgagttcttaggctccaaacgac

SEQ ID NO: 159283 - DNA, 719 bp, Zea Mays
cagcagttggctccgacagcataccttcaggaatgacatcctcgagagcctgatcaaaatctgttatggataattcttgaaggctaacaagagcagacaaagcgggagaaggaatatcactatcccccctactacctctataacgctagttattcttacgaattagcggaacttcttcttcctcttcttcgtcctcataaaaaatacggacaatagctggtgcacggtcacacccattgggatcagtttctgcacggttacacccattggggtcagcttcaataaggtcacacccattgggttcagctggtgcaaggttacacccattggggtcagcttcaataaggttacacacattggggtcagctggcgcgcggtcacacccattggggtcagcttcaacaggtacaccaccattgggatcaacctcagtaaggatctctgctggtacttcttcacaaacaggagtagaagggccggtgtcttgatccaagcatgacagtcgtcgaagttgcctctttttcttctttttctcctcaacaggcgcagttgggcgactaactgggcgaggacactttgggcaaataccctcaggctttcgggtgtccactgttttgttaagctcttgtacaaccgcaacagccattggttcaacccgagccgagtcagaagattctccagccaacatattgagtacaacatctatttcttcatcatcc

SEQ ID NO: 159284 - DNA, 1014 bp, Zea Mays
gtcagtcctaggggaaaatgacgacgattttctgtcacgagacgcatgcatttcagatgagattcgatacgacgccgacctagaagtccttggcgcctcagactttcttcaggatgcttggcgatgcaggtgcctgtacgaagcccgactgaatgccctgctcgatcaatacgatgtgcgcagtgaggctgagctcgtgacaggggagatatggtcacttgctggatgtagcaagaagtatctgcatcaattaaaagagaggatcaactatgcgtactccaaactccaccaagagttccggagcatctttgagagcattgatgcctctactgacaacaaaaacctggcgtatatatgagatgaaggcgtccgcgtggtaccaagtaacgtatcaccctgaaatcatccgatcaagggagcctggtgatgaggatgcacctacgagacttagctttgcatggattgcagttgattacttggcacaaataaagatgaagcgccacttggaaatggaagttgaagagggaaggtcatcctacattttctaggagaacctagcaagcagcaatgcattggcttgatacgtacgactgtatatttaaagcacaaccactaccattttgatttttagaatgtataatttatctagtgtaattattagaacctgtatggtgcacgtgtgttcacaagcctagatgtgagctgacatcttccgctgtgatgtcaccaagtaatgtatcaccctgaaatcatccgattaagggagcctcgtgatgaggatgcaccggcgagacttagcttttcatggatcgcagttgattacttggcacaaataaagaagaagcgccacgtagaaatggaagttgaagagggaagaccatcctacattttctaggagaacctggcaagaagtaatgcattagcttgatacagcttctatgatctagaagctagatatgaaacctaaacaaatcggtcctaaagttccaagcaccttaataaacaaaccttcca

SEQ ID NO: 159285 - DNA, 336 bp, Zea Mays
gagaaagttcagctgcataaaattgtaagtttttgtcagacacgaagctaaagcacttacgaagctaaaatattacaaacatacttatacgcctttcacgctctgaggcttcttcagcttttcttgcttcctctgaagcaagatgagattcttctccactctgcttgatagcttcgtctgctatctctctcccatcgttcatccacacttcataaaaaaatttctcgccaagggcggtagcttcggctgaaggttctctaatgtcattcactaaaactgagaatttcggctgaattacagccttcacatgatcacagccagctttttcgagtaacg

SEQ ID NO: 159286 - DNA, 481 bp, Zea Mays
tccatgtcaaaaataaatttttttagaaccttacatgtctcatatttacccacatgtaataataaaaaaagggaatccgttcatacgatgggacaaatctaaataaaagaagagaaagcaatgatgacattgaccgggaatccgttcatacgatgggacaaatctaaataaatgaagagaaagcaaagatgacattgaccgggaatccgttcatacgatgggacaaatctaaataaaagaagagaaagcaatgatgacattgaccgcaaatttcaagcggatgttcttcaaaaccccttaataacttgctagtataataactccatacacgaatctaatgttgtagtaaaatctggtgcttgattgtccaataaaaaaaagtgagatcaaaatacctttcgtgtagccaactctctgctgagaacccttgcaccgaagaaatgctaattgattctccagccaactctctgctgagaaccct

SEQ ID NO: 159287 - DNA, 725 bp, Zea Mays
agtcagcgtccacaaccctgccttcgatgcccgcgcaccttcaccttcgacgcccacccgcctcgctcgccttcacccgtgcaccgctcggagcacccccgtgaaaacatcccgctcatgatgcacccacgtctatcaccgcccgtgctcctctcccctatgccacctccaccggatctaggagcaggatcgctcgcctgcatcagatctaggagcaagaccaccgctgcttccatggctgaagccttgacttgctacctctccctcgcccccgcgatgatcagcttgattcgtttgcctctgtcgcctccaccagatttgggagtagggcatcatatggaaaccctctgacggacaacatgaaaagcagggaggaagggaagaactgtggcatgctctgatctaatgtaggaggcttctcacgtccatgacactctcatggccctcactagtccgcctcgccatcaccgatgtcgccgtcatgctcttcactctccatgtcgagaaggtttaggtttctctcctctcaatcgatactcccaacctcggacgggagacatagtcacaaatcacccgagggcaacctccgatgggagacgcagtcatgactcgcccaaggccatccccggccaggagacgcaatcacgactcgtccgaggccagcctcgggcaggagacatagtcaccactcgccctagggtaggagacatgttaatgactcgccc

SEQ ID NO: 159288 - DNA, 669 bp, Zea Mays
cgggtgctgtttaccacgcggctagaggtagccgcatgggcaccgcgccttcatactgtagtaaggggtacccctgtttatgggtactgacagtggcccccgagcccacctcaggggagggtgcgagcgtgcaggtggggccaaaacttgtactttgcgtcaacgtggaatgactggtgactggggcacctcttctgcgagcgccgcattaactcagtgcatctggtgacgtatgcgctgttagttcgcccttggtcacgtcgactgctacatctgtccttgcggctggctgacccacgcccccacgtctggcggttccatcgggtcatgcgtggggtgcctcgttaccgctgtctcggttagaaaaatatcttcctgtagtagccccaaagcggcgtgcggtcgtgcggcggtttgttccctgcgtggaggttctccttcaccgcactcggagactagtaccccaggagtatgacatgcggacccaggcccgcatgtcggggactgggtcgctgcgggcactaggtgtgcgttggacaggatttcctagggcgtgagcaggagagccttccttgaaaagggattcaccccgcggttagtagtcacgcttctgcattctttccaactgctacgctctttcgcctccgaaccctctgcgctcctttgcac

SEQ ID NO: 159289 - DNA, 407 bp, Zea Mays
cttgccgatgggtatgaactactgtagccccgctgtcttcaccttttacgccggcgacgtggcttcgtggccatcgccggagttgccgttctgcgccgcgatggtgccacgtttacacccgttaaacacgtcgtcacttgccgccctagctcgacgatgatcgccgtagcttctcaaccggtaagtgccactggcagccgcgccgatgactcaccctgtcattccggccgccgcgcgtcctcctcaaattcgtggccaccgctttgcccttctataaattgagggccaggccagttgcgccatgtaatccgcaagctatcgcacccactctcatctcttttcgttcaccgtagcgctgcaatttaggttttcccccaaattgaaactccacgccgccgtgatagccc

SEQ ID NO: 159290 - DNA, 342 bp, Zea Mays
cggatgacggcgacagagtcaacgagaaggagcgcttgcagtcagggggaaaaggaacacaacacaacagagggcctcatataagggattgggagaaatcagcggcatgggcgctgcggtggaaggacaggacacagtgagctgacgctgttacggagagggaggacgctcagaggcacgacaaggcgcggattcatcggattttggaatccggtgaacagccatcacatggcggtatgggcaggcgcaccggaccgcaacggggagaaccgaggagagcggtactgaccggacaaacagcgacgcgccggacgccacggacgcgctggccgccaccgacgc

SEQ ID NO: 159291 - DNA, 577 bp, Zea Mays
tgaaggacagggcatacccggcttatctgtaccgaggcctagctgactcaacccgggttaccagcagaagaattccctctgtagacttggtgaaccgtcttgagatgattattataggtaaggtatcaaatgttggtgccccagtggcatactcggcctagaacctgcctccttccaaagccttcactcattttgcttcgaatccacctgttgctgatggcggtttgggccttagagttcgaccctctgctgaagaagttaacgccttagttgcctcgctcgagggaattcctgatgatgaacgacaggttcactttgaggtgcctttggatcctagtgacgcggagataagtgctatgcttgatttgctggctgaggattcttctgacgctgctcctgctgggacattggtggtggcgcctctcccagaaactcatacagccttggatattcagagacctgtcagtgttcacccaaaacgcccttgccgagccaatcaacttgatccttctgctgatgagcagaagaagaaaaagagacgccttcggcgagtatctagtttggatcgggacgttgg

SEQ ID NO: 159292 - DNA, 1350 bp, Zea Mays
tttgcagctctcctcgcttcctctgagactcggtgtgtttcttctttattttgtttgattgcttcgtctgctatctcccttccaccattcatccacacttcagagtaaaatttcccaccatgtgcagtagcttcagctgaaggttccttaatatcattcgctgaaattaaaaattctggctgaattatagccttagcgtgttcacagccagctttttcaagtattgacgcgaccccttgggcaccgacacaggcacaaaaatctcctcttccggtaaggatttcatcaaaggcttcgacttcaccttcgatccatttaattacaccttcgggatcaccgtggataaaattttggtccattgaaaatgcgccaattttagcgaaagtactcttcaacttgttagagcattgcatagcaacagaaaaacattcttcctttcattgacgaagctcttcaacattcttttgccctctggatcgttctgtattagatatttcacgcttcgcctgttcaacattaaaattctcagtaacttcgtcaagtttcttatctagccttatcacttcagatttgtggagctctacttgagcagaaaaggcatattccaaatctgctatgcgtttttcgtcagctttcttctctttctcaagtcttgaaattttttggtctgcttagaatgcagccaagtcaccctggctttcttcagtttttaattaaagcaagaagaattttgtctttctcgatggcctggtgccgaaggtcaatgacctcagatcgcatattgctgaaggctatctgggtgctttcatcttcaacacctttttggactttcaaagccttgctaagaataagattctaataataataaccttaaaaataaaaaataataatgagtactatagaaaagcattctaaaaaaattatgagtctaaaaggaaactttttacaaaagttacatatgcaaaccttcaagttgttataggtcagggaatctgcaaggtgatccttcggcattgcagatagaccaagttcaagattcggataacccatctggcaggtagtataggtaatcatcttcatcattgcctccttaaaccagagagccctgagggtacttcaagtctttcgcataatattgcacttcgacaatttgttcttccgtcaatttttttcccgaagcatggcgaacaatgtatccaagatcaccaagagacacggcttcgagtgttggcagtgatattttctctggtaggctttcacttacctattctattggcctgcattccgaaggtccagccttagcgcaatcaggagcaatactttcgttaatagccatttccaattcttcag

SEQ ID NO: 159293 - DNA, 555 bp, Zea Mays
ggaggtttggaattcgaattgaggcacgaaatgacgtggaattgagccgatacttcacgaataggtttatatgggtgaatatgagtgaagtgtgtgcttggtttgaatttaggcgaagaaaatgaaatttgggcactcggctcggaaacgatcgctcgaaacggggaatttggtgaaattaaagcctgaaataacggatgggcgtgaaatttggcgaatatgttactggaggtattgtgaaggtgcctgaaaaatttgggttcaattggagcatttttggctggtttgggcatttcaccgaacacctggtgtgcggagttttagggtttcggtgaaaggattatgtggggtgggaaaaccctcccgaaggatctagtaacctgcaaggatactcaagaagcacataggaacactttgcatcacttggattcactggaattcatagaatttgaattgggcacaaaagggtggagaggggagcactgtccagagaaatggagagagagggaagacaatggagggaggtgctcaccagagaaggaagggaagcacgag

SEQ ID NO: 159294 - DNA, 615 bp, Zea Mays
atcaactgcaagggtgtctcgtgagggagaagaaaccgaggtcactgggacagcaccaatttcagaagtcatggaaagatcaggtctagttgtgacagagggaaccattgacgaaggtactcctgatgccgaagctgaatagactgttgttgaagaagaaaatgttgatgaagatggagaagattacagtattttgatccccacaaagcccagtcatttagattttgagaaatctactgtgtccgaagacgacatgcccatgatgatgaaattgggctattttggagaagatgaaagcaaacttattcgattcgctagagaagaaactaccccagtgccgaagaaggatgaagttgtggttttcaagagcttcttcagagcggggttgcgatttcccctgaatgagatgatagaggaagtcctaaaaaatttcgaaatacaccttcatcagctaagtcctaacgctatcgttaggttcaacgtcttcatctgggccctccgaagccaagggatgagcccagataccgaagcgttctgtcgagtgcacgagctacactatcagacaaaggccagggcagatggtcttcacggaaattttggttgttacaattttgc

SEQ ID NO: 159295 - DNA, 615 bp, Zea Mays
aaaaatatactttataataaaaggtatacagcaagtggagtctattttatttgtaaaaatatcaagaacacaaatgcgaaatcggtttttaattagatacattgattaagagatatagttaaacaaagtgcttataaacagtatataatttgttcacaatagacaacttacagcagtttaaaccaaacgactttcagtttttcatagcagacaactgagagcagctttttcatagctaacaactgaaccaaacgcaccctatgtgggtccccgttgtcccaacaagaaactatattcccattggatgatttcttcaaaatgatttttcatccaatcccaattcttctccatcctatcctcattgtatccccccttatccctttcttggttcttgtgccgacctggtctcttgcatcagaatccaggcaaaattttggacaagataaaacatttgtgtttcttgttagttgggtttatttccttgtggacataatcaacatatcagataataatagattagattaagggggtatttggttcctctaactaaagtttagtatgtgtcatatcggatgtttgaatgtcaatcaccaacattaaatatagtccaattga

SEQ ID NO: 159296 - DNA, 527 bp, Zea Mays
cccgaccacgatgacgcatggttccgcggtggccatggagctgcggcgagcaatcctgggctcccccgccatttatttcgctgattgaggtaacgagcaagctccaggcgacccaaggaggagttcaggtcggttgttgaggccagggagacgacaaatcgcacggctgacgacgacggcatccaccgttctctctcctccccatttttccccgctcgggtctactctctatggtcggcgcccggtggctctcggttcgtcaatggcggccaagaatttatagaagattgggaacgagtccgtgcagcgatgtttgtggatctgcgaacgaaaccctggaatttcggcgagctacaagcgaagctgttacggctgggtaggcgacgaatctgacagaagcgacccacacgccagaggcagtgcaggttggtgcgtgaggtgaggccgccaagtggggcccgcggcgcagtggcaatgcgccagaggaggcactggccgtgcggatgctgttatctgggccgccaggc

SEQ ID NO: 159297 - DNA, 837 bp, Zea Mays
cgctcccctcgcccccgcgcgcctataaaaagctcgccccgagccccttcttcctcgcaccagcctcgaccactaccctcctccctcgcccgagcccaattcgtgaagcgccgccgtcttccccctctccggtgagtccctccccctcttctctctccctctctgttagcccagcaagcgattgagttagcctagcagcttcctcacctggccgcaacgcaatacaccactcccccaccccgattgctcgcccagagctcaccgacggcaaccccgccgcgaagctccgccacctccccgcgggcagccccctcccgacctcctctgaccaaattgagcccacctctaggtccgccatcccctccccacgctaaggcgcctacacattgcccaagaaccgggccaccggcggcaaaccgccgccgagcccaccggcggccgagtcctccccgcggacggccggttcacccccccccccgtcaaccgtaacgccgttccttctccccccctctcgctggcaagtgggccctgtgcgacgccgtcacccccccccacggccgcgccgttctccccgctcgtgggccgccgctgggccgatagcgcctcagcgcgcgctcgcgcccggggtgggccaaaattcatgcccccggcctagataagagggattccctttctctttttcttttccacccctctttttccatttaattagtattcttcaatattttatgcaccaaaaattatccaaataatttctaaagatctcatacaacaatgatgttagaaaatgacacactataatttgtaaatccctgttgatgtattgttttattgcct

SEQ ID NO: 159298 - DNA, 548 bp, Zea Mays
cgcaaacggaaagtgagtctcatcaaatacaacgtggcgagagatgatgatcttgcgagtggatagatcgagacaccggtagcccttctgagaaggaggataaccgagaaagacgcatgccatggatcgaggggacaatttgtggggggtcatggcactgaggtttggatagcacaggcaaccaaaaactcgaaggagtgagtaatctggcatcttgcgataaaggagatggtagggaatatcattatgtatggacgacgaaggccgccggtttgtgagaaacacggcggtggagagagcctcggcccaatagggaggaggcatagccgcatggatcagaagcgtccgaacgacattgttcagagtgcgaagcatccactcagctttgctgttttgggcggatgtgtaggggcacgaggtgcaaagaaggatgtcgcgggcagccaggaaggtcgtggtggcactgttaatgaactcagtgccattatcggtctgaaaacagcgcacagaagagctgaattgtgtgttagtgtaagcagtgaactgaa

SEQ ID NO: 159299 - DNA, 504 bp, Zea Mays
gcattgagccctgctccttcaaagaaaattgctcaatctgaagccaaatcgcaggccggagccgaaactgggcaagcagaagccgaagctacgcaagttcaagctgaaaccaaagctgggccttcagtgcccaccgagacaaagcctgccacgcctgaagaaaaagtggcagagcagattgctcctgaaaagatcgagactcctgctcccgaagctttgatcgaaaatattgactacatcatttgacacgcttcggggaagaagctgtccgaagaagaaactctggaagccaggcactatgcgcgaaagttgaaatatccgaagggagccttggtttttaacgggagtaatgaagatgatttcttatactgtctcccgaacaacaaagaaatatccgtttgccgggagataggtagaagcatgggattcccgaagctggaagacgacctttcaattttgtcgaaggatgatcttgctgacagcctagcatacaacagtataaag

SEQ ID NO: 159300 - DNA, 898 bp, Zea Mays
tcctgagtcctggtactgaatagagctgccgctgcggggtgcctctgagccggcaaccaggactccatgggtacgtgtctgaactgacgtacccaggctgcaatggcacgtgaaggtaagcagtcgaggatcagcagcaaggggtcacaccttagtctcgtctcgctccctgaagcgaggcggtggaatgggcggagcggaaatgggagcgagaggtggaacagtggaagctggagtggtggaggttgtgggtatggcggaagtggtggatgactctggagcgatgggaggtggagtagaagctgtggcagagggggtggagggagcagaagagcgaggccgagatgcgaggcgacgaactctataggcaatctggtctgaggaaatctgcaactggccaccgctacttcttttggccttcctgctgctctaggtacactgtcttgcccttgacctgcctgaaggggcgaggagggtcctcgtcgtctcctccccctagcgctgagacattcttcgtctgcaccatcctgacctgagtgctgcataggagagtgaaaagctaagcacaagtagatagcagctgataagattagtaatgaaagaatggctacctggaaaccatacgagaaagagagaatccaggcaggacaagagacaggcacacaggtaggcgagatcactgaaatgacagaagaggtgagcacgtattagtcacatagtcataagtatatgaaatgtgaataaatacatacacagagagttatgacacagaaacagagtaatctagagaaacagaggtcaaacgacgcgagaatgacgtttgaacgaggaattgtgccataggaagtttgaaattcgaaatggggcatgaaatgacttggaattgagccgatacttc

SEQ ID NO: 159301 - DNA, 644 bp, Zea Mays
gttgccatggaaaattgggagaaaatctaccataaacatcgactgtcaggctgactaaagaagatggcgatggtacaatgactgaaatagattgcagatgcatcccccttgccgccggtgatctttacaccgtgatttgcgccatcgccgcgattcatgctcactggtgataggataaccacgacgaagtaaaaatcttggcaccggatcagctcgggcgcggatgagattcaccgtacccacttgctcgtcgtgcggccgggatagacttcgccgccgttgatcgctcaccgttttgcgccacgtgcttaagcgctagcccacgtcacggtaaatcatggtatgcatgtccggtgatcaccggaggactgccacggtgaaagccactcatcccgagcgctagtaccccttttcccctccggccgccagcacatcctcgtgaaattggacgccaccaccgttggaggctataaattgccgcccccgtccgctccgctaggtaattgcgcaaccagtgaagcaacccgtgcctcaaatcctcccctagaactccccaatttgggatttcccccaaatccctcaagaacaacgagcagtttgacctcgatgtggccagcacgtctcaggtccgctcataccttctg

SEQ ID NO: 159302 - DNA, 735 bp, Zea Mays
ccaattttcaactatggaataaagcttatttaaaattattgattgctatgttagcttaatccaaactatgcaaaccaaggcctttatcggttgttcctcgatattattctaaattatagcctaagcttgtctttcaccatggtaaattcttgaaaacgtctgatgcccgcccgccataaggcacgctagacagagggagcccacaaccacctgtggcaaaacacatgcataaagaaatcgtaagcctgcctctagctgccttggcgtttgtgcatcctggcaagccccacctacaccctctgccctaagatagcctagtcgtgcacgccgagctgctatattaaagtgttgggttgtagaccttgaagtgatacctcagtgcagaaatccactccggcaagacctcgtgcacttgcctgagcacacgtcagtcacttgtcacaatcacaactaaatgaatgcccccaccataagccaagttaccctgccaacctcaggatgttgcgactacactgtggcaacgttgccactcacagtacgccggtcaagactccctccattataaatcgtcgttcctctgcctataaatattgatgcccttgccgtggaacctcatagtccagccaccatctcacactcacccccacatccgaacaatgtgtgccttactcttcaaaccaaagaacaagccatcaccgtcaatttgagtcgtaggtgagcacgccatgatcttcg

SEQ ID NO: 159303 - DNA, 698 bp, Zea Mays
gggctctcaatatcagattttgatcaagtactggaggaggtcgtccccaaagacatgctatcagagcctcatgaagatgatatcacggtcgtctgttcagaggtccaagacggtgggctttccttgctcgattctgttgggcaagaggtaacccgagcggtgtctcgtgcatcgtcgactttggagggcaaccttccatgctgagacgctgatctgagtcatccgactcccatggaggtggctgaggggccttcatccttagaggtggctactgcagaagactcagcccccaagggtggtgccggcagctacccacccccgagggtgttgctggtaatgatccagctcttgtgggtagtgcaagctacaacccagcccccgagggtgttcaggtgtgctctctttctcatgcctccatggatgtccacgttgggtcgttcccacctcggtccgatggagcgacggcggtacatgcttccatagttttaactggacaagtcgccttagaggtcggcgagctaaatgcaaggagcctggtgtctgccggtggggctgaggtcaccccagatagtgctcttcagatcgttcttgctgaccttccctcgtcgagccatacctcagttcctcctaccctgggtctaccacttttcctctccaatcttcaggtgagttagcctcttgttctatgttgttcatat

SEQ ID NO: 159304 - DNA, 1202 bp, Zea Mays
acctgggatctaacttcactagctcagagttctttgatttctgtgagcaaaggagcatccagatcaagtacgcatcaatggcacacccaagactaatgggcaggtggaaagagccaatggaatgatacttgatgcactcaggaaaaaggtgttcgacaagagcgaaaagcttgcaggaaaatggatcagaaaactaccgtatgtggtctggagcctgcgaacccagccaagctgggccttgcatggaaacaccccattcttcatggtatatggatcggaggcagtattatcaacggatttgatctttggagcacccaggctaacatttaaaagcatagctgaggcagaagcaaccaggctagaagatgttgatatattagaggaagaacatctgaatgtggtgatttagtcggccagataccaacaaaccatgaggcgctaccacgacaaagcagtgcgacatcgatccttcgcagtaggagacctagtcctccaccgagtactgacgggagaaggacgacacaaactgtcaccccatgggaaggaccattcaccattctagaagttacccggccaggatcctaccgacttacccaaatggatagaaccgaagtggggaattcgtggaatattgaacacctcaggaaattctatctgtagcagtacctcgaaactttggtggggaagctatactttgtaagcaaaatgtttcattatcaataaagcttctatgttgtaccgcatacaaactctcgatcaacaattggcttaagtcgaaaatgacttgaaaccggcacaacataccttcacacttacatgacttagggtgattactataccctactaatggagcgatcagcttaagtcgggaatgccttaagtcggcgcgacatgctcacgcttacatgacatagggtgattactataccctactaatggagcaatcagcttaagtcgaaaacgccttaagtcgatggggcacgctcacacttgcatagcttaaggtgattattataccctactaacggagcaatcagcttaatccggaaacgccttaagtcggtgcgacatgctcacgcttacatgacatagggtgattactataccctactaatggagcaatcagcttaagtcgaaaacgccttaagtcgatggggcacgctcacacttgcatagcttaaggtgattattataccctacta

SEQ ID NO: 159305 - DNA, 543 bp, Zea Mays
ctgcaagggacgatggcaaccaacgacaaacgggagaatgggagatatcgcgtaagggctaagtgacggctttcggggacggacgggagggagagagcaacgtccatcagactagtaagtggatggtgacaactagcaagtagcaactcgaaacagcatagcagcaggaatggtttttgcgaagcttttttttttggaaacaagagcatgcttcgtagtactactgacatgggcggccatcagtattcagtaactgcgtgattggttgactgagcgtctagcgcctgtctcgagctagcccggaccgctggctacgcaggataggtgtgtttccgtgcatgcaggcaatcaagcgaaaaaaatgcctaggttgtatgtgtgggtgcaggctgccaccctcctctccggttaaccaaatagacgctgcgcaaagttaatgggacactgcgggcttgtaggcagccagccaaccaaccaatcacacattaaatgatacacaggccatgaagagcacctggtcctcctatccggaacagagcccag

SEQ ID NO: 159306 - DNA, 408 bp, Zea Mays
agatcttccccacccaaatcgactccgccatcgtccggatccacgcagagccgtcgcggatcgacgtgctgccgccacagattgcgcgctgtcgtacggatcgagagacacccaccgcaagccttccgcgctggcgccgttcgggaagtaaggaggctacggagagggcacaagctggggggtgtcgaactccgtggagaacgcgcgggcggtggatgcctagctctggtagtctggtgggagggtgaggaaaatctaggtatggcaaacacccccgtttttttttatctaggtgctttccaaaggaagtcgcaaaaaagcattaagtatagataataaactgcactgcttcacgcatgttcatccactcgccgctcctcctcgaaagcagtggctgacccacgggca

SEQ ID NO: 159307 - DNA, 884 bp, Zea Mays
gttaatatggcacgatcttttagatattgaaggtccatgtaattagtttgcaggtcttcatatacctttttaactatacatgcagttttgtcaccttgaggcattagaaggaattcttcgggtatttgtatccatgttggctcatcttcgccttctcgtgatgtagcatgtatcttgccttctccaatgtcgagcatccatttgctaaactgagatagttcttatcgattttcttgtgacaatgatggtgacgaaagcctcatattatgtgtaagacgtaggatatggacatgaggccaaagagaagagttgattattgctgaatttacaatttgtgaacggttacccccctcaattactggcaaaatctgtcgtacatctcctccaagaacaacaacttttccaccaaagggtaaattggtagccattggagacgaagatgctaagatatcccgtaaagatctatcgaatgcttcaaatgcaaatttatgtgtcatcaaagcttcatcccatattattaaagatgtagtttgaatcagttcacacaacattgttccacgtttaatgtcacatattgttccttcatctaattcacatggtattttgaaacgagaatgtgctgttcggccgcctggtaggagtaaagaagccacacctgaagaagcgacagataacactatgtgtttgcagctacgtaagaatgttatgatggagttccatagatacgttttgcctgtatcaccgtaaccagagacaaagtagaagcctggtctctttgttagaacaatttctgtaatagttttgaaagcatgtagctgatcatcgtttagccttgagataagcatttctgactcagattgcatagcatcaatatcatatgtaag

SEQ ID NO: 159308 - DNA, 454 bp, Zea Mays
gataacttaaccgtcggcacgctcctttatttacagcatccttgttgcaccggacatgtaacatggcagagttgaccttgagatatgatggggtaaaccaaaagatatttgagctccttgcttgacctgatgcatatgcatgcttcgcacggaactatatatatagggtttttcatgcagcaactgctggtcgatcgagatccctctggaattgtctgggttttggctcggttaaattaaatctgctaattgtagcataacactaactttttttaaaaaaggagagagaatcacacttcctccaacacacctgttaacaagtaaagacctatttggatctatattaattagcagcatggattcaacacatatgctatacgacggcgccatgcattgtttaggataaactccctgcttcaaacttttgtacaaccatccatatcagttagttgca

SEQ ID NO: 159309 - DNA, 864 bp, Zea Mays
gtgatggaacagaggtacattgcaatgattttattaacaacttttgattggccatctgtttgtggatggaaggttgtactcatccgaagtttgacacctgatagtttgaacagttctcgccaaacgttcccagtgaagacggggtcgcggtcactgacaatagactggggaaaactgtgaaggcgaatcaccccttcaaagaaagctcgggctacacttgttgttgtataggggtggcttaaggcaatgaagtgtgagtatttggaaaatcgatctactattgtcaagataactgacttgccatgcacctttggaagcccttctatgaagtccatggatatgtctgaccaaatctgggagggtacctcaagaggttgcagcagcccagctaggtggagagcttcagttttgttttgttggcagactgaacatgccctaacccaatcccttaccaaggatctatctttgggaacaaaaaaatcggcccgtagtcggtgtaatgttttctggattccaccatgaccagctgagtgggctttatcgagtatggctggcagcagggatgaattaggcggcacaaagatttgtcggccatgcagaatgagcccatcgaccatccgccatggttcagtgagggtgccatctttgatctgagtacaaatgcattgatagtcttggttagaggtgctttcctgacacaactcttcatacaaatggaaggtggggctagacaacatggcgatcatgtcgtcggtagtctaccgtcgtgacaaggcatctgccactgtgttgaatcggcctgctctgtattccatggtaaagtcaaacccaaatagtttgttgatccactgatgccgaggcact

SEQ ID NO: 159310 - DNA, 500 bp, Zea Mays
aaaaattctgccatcttccttgcgttttcccactatctcatcaggatgaccaaaaccatcccttccttcagataggtccataacatacctcatgtcttcgtctgctaattttgtgaacaccttctcatacacaattgcagatttaagcataatatatgtggagttccgtctagttgggacatcagcctttagatatggattgttggttagcttctcttcctctataatttccttaaatttgaacattcttgaaccaccatttctaatgtacttcacagctgccctaacacgcttcactgataggttcacttcttttaggccatcatgcacaattagattaacaatgtgagctacacatctcatgtgcaagtacttgccactagctagattagtggtactcaattgcctcctcaaataactaatacaggtatgattggcacttgcattatcaaaagttattgtcatcactctctccaaaccccattcaaccatgcattgcg

SEQ ID NO: 159311 - DNA, 356 bp, Zea Mays
ggccaggcgagctcggctggtagtagcgcggcggccaacgccatgaacaggtgtgcggcgctgaggctgtgcggcagaacgagcgcgcaagggagctgggagactgccgcgcggggaagaagcaggattgcgcgcgcgcgttaaataggagcaggggcggtgacggtaaagaaatatcaagaggaggaggaacggagacgagataaggctgagcgctgaaaaatctccactcgaagagcggcgggagagaacctggacatcgacgagggaacgacggccgactgaagggggctggtcgctggaggcgacggtgtgaggagcaaggaaaaatgaagatgtgcactcctggtgaagac

SEQ ID NO: 159312 - DNA, 860 bp, Zea Mays
ggatgccttagtaatccatcttgtatacgctcctcatcatgccacctcatgtcacttgctatcttagatgacagaaataacctctgaagccttctttttataggaaaataacgaagaactttgcatggaaccttgtgtacacgttttccatttaaacttatccttttttatttccagcgtgacctttcacatgtgggacatgcatcatacttagcatactccttcctaaacaaaatacaatcattttcacatgcatcaattttgatatacccgagtcctagacacttaattactttctttgcttcattgaatttttttggcaatgctaagccaccagggaaagtctccattagtagatctagtagcatatcaaaacttttatctgtccaccctccaagcaatttcaagtgaagaattcttattaagaaatgcaactttgagaacttcttacaccctgggtatagctcttgggtattatctatcgctaactaattgatggcttctaaatctacatcagtttcatctaaaccatcagatacttcaaaatcccctttatcatctagaccaccagctaagtcatgaaccaaattggctatgtcatcttcatctaaattgtttacagcctctatatcagtgtagtcatgactattaataggcacaaagtctctttccccatgataagtccaccttttgtatccctctttaaagccatcacatatcaagtgcgcacgaacttcattttcatctttccatagagaattaacacattttctacatggacatagaattttgtttccacctatagaattgctaaatgcaaactcaataaatccagctaccccatctatgttgaccttcgt

SEQ ID NO: 159313 - DNA, 541 bp, Zea Mays
cgaagcatgacggataatatattcaatattttctttcaaagcttagggagtaggagcggtagctttttcaggtaaaatctgttctatagcttcttcctccgctgccttttctccaatttccgaggatttctctttggtgggctctgaaggcccagcttcggcgtcggcccggctcattgtagcttcggcttcggtcagctttgtctcggtttcagtctgtgttttcgaagccttggcaatttttcctggagtagagcttgaagtttttatcatctccagcacatctaatacactagccatcctttttctcttgggggttgctgctagatctttttgtgtcttcggcgcctccactcctgccgaagggcagaacttctgatgttttcgtcccttcggttctcggttcttcaattttgccagccttcggcattgcagccggctcttcaatcctctgcataagagcaggtcctttggcttcagtagccgaagaggtctcaccgccaaattcaggcactatggccggttcaatgtagcgcggtcg

SEQ ID NO: 159314 - DNA, 1010 bp, Zea Mays
caaataaaccctcgcgcttctatttcttcacaacccgaggtccacgacgtcacacggcgaagaaccgagctccggcgaactcgtaccggccacaacactcaatgagcggtgctctaacttggctgagacataattcaacacctaacaagcgtttcccctcgatcaattacatagctcgagctctaaatcaccatattcatggagacagtgcgaacaacggatgaacagaagtgttcccggtgatctagggcagtctagctcaattgaatgggtcgaggagcatcaggagaacctaaggatactgaaacggaagagcagagagcatgaacagacctaaaacgagttagccacggtgaggtcactatgcgcggtgtttcggaccgatttgggggaaatcccaaattggggctatctggtgagtaattggaggcacgagcgggtggattggatgcttgaatacctaacagagccgagggtgtgctcaatttattggacccttgagcggtggctcatgaatttgaaggagacgcgcggcggccggagagggggaagagcactggtgcaagcgattggtggcatttaccgtggtgggctcaccggcgatgaccggatgttctagagcgagtcactacgacgaagtactgcatctaggcacgtgtcattcgagcggcgggtggctaactctggtgaacttatctgaattcggtcgtgagccaagcggacacggcggccgggcggaacagtgccttaagctcaatagcggtgaagatctttccaccccgaggagttatccgggcaccagtgagcacgaatcacctcggtggcgtgaatccacgcgcgggggtcgccggcggcaagttcactgaaccagccgatctttttggttactgtaccatcaagaacttcttcagtcagcctgacagagcgaatggcagggagatttgctccaaatttcatgcagtgactcgatcatctcactatatcaaagttgtagcctaacaaaccagctt

SEQ ID NO: 159315 - DNA, 540 bp, Zea Mays
catcgcaatccgcataatcagaatacgtaccaatggagaaatgcactcataccatgtgtgttaccttaaccttgcctgaatcattgatccgctgaatgtggtatggatgtggccgtggacgtgtggtcaagccaagcttcttgaccaaatctgaactcaccaaattattgcagcttccaccatcaataataacacgtgcacgccgattctcgatggcgaagaaagtctggaacaaattatggcgttgctgcttctctgatgattcaggctgagcactaagaacacgctgcaccatgatgcttcgaaggttcaccgtagcatcagcaccaagcatagcatcatcattagcagcaacatcactggtgtcatcatcgtcatcctcaccgtcggaagcactaatgtagccatcatccgtagaaatgtatgttcgctgactcgggcaatccttcttcatgtgaccaatcccatgacagcggtggcaaataatacccgaagaacgaccactggaaggtgctgcaggtgctggtgaattctgtttct

SEQ ID NO: 159316 - DNA, 924 bp, Zea Mays
ccgggtccagtgaaggtggattaattcgtttgaaatataccttcagatacagagaccggtttgacgaaccaaatgacgatgggctaaaatgtattgaggctactagcgacgagttacttggggcatataccagagccgaagatgatgctttatcctcagccttcggggtcggggcaagaaaagattgaatagggttttcgatgcaattggtttcatataccctgattactgctacccctcgcgaaggcagggaaaaaagaggaaaactgccgcttcggccatctctgctgcgctgaagggcaaaaagatcaaggttctgacgcatcggacgaggtacattgagacgaccacagtgccaaaatttggtgaagagacatcttccgctgccgaagcggaacaagctgctcccaccgctcagagcgctgaggaatcaactatagtgccgaaggtgcctatagttgagctagtcgaagccgaagatggggcggccaagaagccagagttagaaaaaacaatagtgctaccagaaattctgagcctgccggtagaagcagaattgctgaaggttgcgaaagctcccgccacaactcccaagaggagaagaatggccagcgtgttagacgctgtcatggagacaagagcattgactcctgctcctataaaaaaggttgtcgaagctgctatgactcgtactgaaaccgaagctgggccttcggtgcctgatgagacgaagcccgctgtaactgaggaaagggctgaacaagaatctccagatattggcatagctatggagaaggaagtagccgaagaagctaaatctcctgctcccgaagcagtgcccgaaaatcttgattttattattcgacatgcttcgggaaaaaggctatctgaagaagagattgcagaagccaaacactatgcccg

SEQ ID NO: 159317 - DNA, 929 bp, Zea Mays
aatgagcagccgcccgccccttgccctcgcttagccgccgtcgtgaacctagcagttcaaaacacgacgcttcctccctatacgtgtggatacctcggaggtgctacatctggagcactaggacgaaccgcacgaggacatgaaggtcgccagtgactgcacaacacagctcgacacattcttctacatcgagacgtcttccactgccctgcgcgtctagtggtaattccatgatctataactgcagtagttcttggttttatggggtccaaaattttgttttgcgctagtgtagcctccccataatccttcactaaggtgttgagatagtgagagagctctcctacacttcgaaacattctgaagaacacatacttctgctccacttcggaccagtctaaaggcacgcagatggtccaaccttcgaacaacatagccacttttcaaccacacttctgaaaagattttctttcgcaaatttggaagcgttgttagtcctcatgcacatgcaacatctctatgctctatgaggcactaagtttcttatcaagtaaacatcattgaccccttttgatagtacaactatcttgcctactaatcaccttttgataggcaaaagcaaaaacctatcatttacttttaccttgaacattcaattccatctcctcaaattatgaacaatggtcatccataagtgtagccaaccatgctaccttttacactttgttcatagcatgaagtttctccatcatcttcatcaagacacttgatcaatatcctagatcaacacttggcttgatatctcaataactatatgatccactccatgtcatcacatggccttcttggttcatcaatctcaacatagcttgttcttcactgttgcatttggtccatcggtgccaagtccttgctcttgcttcactgcc

SEQ ID NO: 159318 - DNA, 622 bp, Zea Mays
gacggagacggggaactggctgcaccttcacagccagtcaaacctcaaacggacacgcgacgggcgcggccgtgatcgtcatcgcgcaggcggcactttcggagccaccaagggaaggaaagagacgatccgctgatcgccggacgactctcatccgttctccaacaaagcgggctgattggcactcctgctcccaagttccccactcccttccccgaattccggaccgagtcgatggcggcgacggcggagagcccctcgaccggcggcttcgtgctgtggctgcacggctccggcgggtcgggcgacgagagccgcgcgcaggtcgcgccctacttctccgacccgggcgtcgcctcctccgtccggctgtccttccccaccgcgcccacgtccttcatcccttgctacggtgagcgccgccgccgcacctgccatcccatccagcctataatgtttacttatttttcctggcgatgaactgatggtccgtgggcctcgccgcaccgtatgtttctacgcgcttcaaaggatgcgatctgctctgttgcttcgcgctatggctgctttgcaaggctcgtaagtggatgaaaggaaaggaaatccgcgggctctcctttct

SEQ ID NO: 159319 - DNA, 631 bp, Zea Mays
gggccacagtgggtcaagtgatccggccttgtaatcgaatggtagcccaagtaagaacgagaggaagcagtcgacgtatataaacacctggatacggtgcctggaaaacctaagaagaaattaaacaaacaccttacctgtcgtatctctgttcttcctcttccattcgccactctctgcttcttccccatgccagctgctaacaacttggtatcagacagatcgacatcttggacggtctaccgcctattccgggtcgcaggccacgttcgacaaccacatcgaccatggacgcggccatgcagcgcgtcctcgatgagatggcgaacatggaggcgcgcctcaccagcacgttgtcgcggcgttgtgaggcgatcgaacagcgcatcgacgcctcggatcagcgtttccaagcatccgagcaaaaggccgaagcgcgattcatctcgcccgagatggatcacgcagagatcgacaattggaaaccggcgatcgagaagcgtctcggcaatctgtccctggagatgtcgcgcgcgaacaagttcatggaacacgaatccatggcgcaggactgcttcaagccgggcctccttcctacggacatgtcgtcgttcggacgcgcaactgctcc

SEQ ID NO: 159320 - DNA, 536 bp, Zea Mays
gttatcaaggaaatgatcaagcagaaagcagaaaaatacaaatgcttccgtcaggactgcaaaggaattctctggtttggagatcgattggttgttcccaaggaccctgagctcagaaagaagatattggacgaagctcacctttcaaaattctccatgcaccccgacagcaacaagatgtatcatgatctcagatccttatactggtggaccataatgaagagggagattgccaagtacatatccgaatgtgacacctgccagagaatcaaggccagtcatttgaaggtagcaggccctttgcaaccccttcccataccatcttggaaatgggaggacatttgtatggattttatcgtgggattgcccaataccttccggcaccatgattccatttgggtcattgtggacagattgaccaagacagctcacttcttgctagtgcacaccacccacagaacggagaagtatgcagaaatctacatcgaccagatagttcgtttgcatggaataccaagaactatagtatcggacag

SEQ ID NO: 159321 - DNA, 593 bp, Zea Mays
ataacaagtggttgtttattccttatcaaggaacttcaatatgtttacagggattgttgtctgcctttctggttggagctctggtggagttacgccttcttttagaacaccaggcacatgaacatgaaggggtgccagaggacctcaacatcgacccatgagtgcagtcaatgttgtcccggttctctgaagtttttgctgcaccaatcggtttaccaaccaatgagtaattgtgtcatatctcatagtgcacacccactcgagctcaagaggtactgcagggttatcaacatgatgaacaagctaagcagctcctgactcagctagccgtggcatcagaggttgacacctctccatttacactaactcaaggtctggtccaacacaagggtagggtgtggcttggaaacaatgtcaagtcacaaaccaaggtcatctcagctacttgcgctgcaacctacttgcgttgtttcgtgcatgcgtgccccagcaagtggttgcagtgacttctagttaccgaattttggtacaacaccgatttctattcagcactggccatatccccttccgaggaacgtgaggtggtgttcagg

SEQ ID NO: 159322 - DNA, 462 bp, Zea Mays
cggacttgttgcatctgtgatcacagtctcgtgactgacagggcaggtgaggacgataaacaggacctggcacaaacgtagcacagtgtatctggaggacgcgagtacggtatctgcatatgaatgtgcgtgagaaacagcgagagtgggggactgattcgttattattagttattatcttctgcaataaagacacgatggctcgacctagctggatctgattaccgatacggattactctcgctctcaggctctctgcggcgaatctgcggtaccagagccttttcattcaaggcaatttacggaccgtcgatctaggctggctgattcgttagttatctcactgtcagtttgagtggagacggcaccatcgtcaatccactgtctccctttcaaattaagccaccatgaaccgatgaaccgaaaccatcatgctcaagctcaacagcacttccgcgccag

SEQ ID NO: 159323 - DNA, 596 bp, Zea Mays
agtggccttgcagttgattgctgatctggactgtttggggatcgccttgtgctatgtcggcaccgctagtgaggagactcgtatgcttattcaatcttccttcatggagagagtgcgtgcggctcaacagcaggatcgtttattgcaggaagctcgaaagagggttggcgatggtaaaccccgggagttctccatcgatgagaatgatttggttcatttcaggggtcgcctttgtgtgccttagaaatcagaggtgaagatggatatattgagagaagctcataaaacgccttacaccgttcaccctggtgaaaccaagatgtaccgagatctgaagcaaaacttctggtggaagcagatgaaggttgacgtttctaagtatgtggccgcctgtgaagtatgtcagcacgtgaaggccgagcataagcggcctgcaggtttactgaagccattggaaattccagagtggaaatgggagcatatcagcatggattttgtggtgggtttacctcgttctcctcggggcagagatgctatatgggtggtagtggatcgcttgactaagtctgcgcattttattcccatgaagaccacaa

SEQ ID NO: 159324 - DNA, 785 bp, Zea Mays
gatctatttagccgagctctcatccacctcgcgcaggcgtgatagccatgagggaagacacgaccgtgtgagttgcgccatagcccctatgtgttcaacgttgtcgcgccctttttgtcaagtcgagaagctccgccagttcgcaagtgagacggtggcgacctcgccgcgtagaacaagcgaccaagggcatagggattttttgccggaggaaaaccgtcgccgtggcttcactgctcgcgtggccaggggcactccttctccgatccgcggtaattagctcctcccaaagttcgttgcatccttaggatcgttttgcaccaagtcatatggtcaatcgtgcaccagggtttggaatggttgggtgccggcgtgcagtccaccgcagggccggatcgctaccgtgaccgagcaccgaagcagggggaaggttcccggtcgttgatcggaccacgagcggtttagattagggcacacttacctcttcgcgcaatcgggtttggaccgtggatatagtatcgagtgaacgagtatcaatcatggttatttgtaatccatatcatatatctccaatccaacggagctccgtgcgtaccggttcggattgaagatcaaatggctgatatgcagatcaaacgaccgatatgtgtcgataccccttcggtcaggggattttgcataagagacctctaacttccttaaaataaacccgccatccagttacacctagaaataattagatacaggtccttttatttatgtctgagcccctagaatttctagta

SEQ ID NO: 159325 - DNA, 1035 bp, Zea Mays
cagatatccatttgagggcttcaagggtgtcatcctccttgaaatccatttgcttcaatcgtgccacaaccaaagatagctcgccatgcatttagtgggcatagcgcaaggcgaaggtgtaatatgagcataatgtacacttcatggtggccaagttctcctaaatatgtatggttttttatctctcttcgactagcttgtttgaaatatattgtctctactttctttcattggcaagatgttgtcgaagctcaaagacttccaaactatattcttcttcctttttcttcgcttcttcttctttcttcgtctctttggcctcaacattagtaatcttttctccctggcctctaaggctagctgagctatagtttttcctttgctaaaacttggattgtcttatggctttcaataaaatcagcagccaaacatggattgtctatatccatggatccttctcctcctcccaatgactatcctaccaccaatgttcctcttcctactactcaagctccaagcactaatgctcctccactagcatctttccctcaatcataccctcctacatacttgtatggatagccatatggttctcctgtacatggaacatatggtgctctactttcatcccctcccccatttggtgcttctctcacatatggtggtcatcctccattgtgtcctcctacaagcaagacagtgcccccgagctaccgtagtgataccattttgaactacctcgcttactctagtgctccttaattgcagtggcgaagggactaaacaaagatggagtatgaaaggctagtaactacacatatatttttttgaattccacataaattttaggtccatgatagtttttgagttcatattttcatccatgcttgactactgcaattactggaccccattaatggcatcaataagaagggatcgaccttctagggccaaatagccaacacctacaactccaccatagaagctcatcgccatcgtaccctcaagcagttgaaggatcagtgttctacaagc

SEQ ID NO: 159326 - DNA, 572 bp, Zea Mays
aagtcaatgttgtggcagatgctttaagcaggaaggcccagtgcaattgtatgaacatggatgcaagagtcaccaccctatgtgatgagttgtgcaagctaaacctagaggttgtttcgtctggtgccttgagttatatctcagtggagcccaccttacaagagcaaatagtcatggcacagattggtgacaagggtgttcaggtcattaaggaaatgatcaagcagaaggcagaaaaatacaaatgcttccatcaggacagcaaggggatcctatgatttggagaccgattggttgttcccaagaactccgagctcagaaagaagatattggatgaagctcacctttcaaaattctccatgcaccccggcagcaataaaatgtatcatgacctcatatctttatactggtggaccagaatgaagagggaaattgctaagtatatatttgaatgtgacacctgccagagagtcaaggccagtcacttgaaggtagcaggcactctacggccccttcccatcccatcttggaaatgggaggacatttgcatggattttatcgtgggattgccc

SEQ ID NO: 159327 - DNA, 810 bp, Zea Mays
aaaaaagaaaaagaaaaagaaggaaaaggaaaactggtgttgggcccaattccttgcctggcccacctaaccacttctctgtacagcccagctaaccaagtggcaccgacacgtagggcccaccggtcagccgctctctcgcgctcgctccccaccctctcactggtttgcgggcccacacgatcgcgtgcatcttctgtgcgcgcactacctgggcgtctcaccgactgtgggccatcgcggtcagcggaacctcctctctccctcacaacagaaacaccgcgcatgcggaggtgcgacgtggacgcgggagtcccttgctccatcacagatcgtgctattcctataaggtgtaacgggggttccgggtctcctcctctcccatcttcgctatcttcgctgcgcaatcgcgaccgtgtggggagctgatcgggagtgagcgggccgacggcgtagggaggttgtggacgtcgacttcggtcgtacctactgagtccgcatgtggccgtggagaagtcgtcgtcaatcggggaaggcgcgagcaccgtctgcgggcggagttctgactgaattctcgggcgaattcctcgccggagtgccgtcaccgctgcgggatccgcatcgtcgtggacaccgcttccgaagtcgcatccgcctccggtatgtcgttgatcgtgtccacctaactcttataatcgtgtagcctcgttcgggtaggggattagagtactggtttgcgtagtctgttgtcaccggcggggtttcgccgtcacggcgccaccgtccactgtgctggtgggctaccggggg

SEQ ID NO: 159328 - DNA, 450 bp, Zea Mays
atgtaacgccggctgttcttccgaatcagagggatttcgtcctcttcttcatcatcctcatcaacaacacggacaacacaccccattggggtcagcgtcaaacgggtcacacccattgggatcagcttcagtaaattcaggcacgggcacttcctcagcaacaggagtagaaggaccggcaccctgatctaagctagacacccgacgaagacgtctcttcttctttttctccccctcagcaggaaaagaggcttgattgactcggcaagggcgcttcgggtaaacattgacagacttctgagcgtccaaagctttgtcagcctcagggatgggtaccaccaccaatgtttcagcaggagcggcatcagaagaatcctcagctaacatatcaagcatgacacttatctctgcatcactgggatccaaaggcacctcaaagtgaacctgctg

SEQ ID NO: 159329 - DNA, 782 bp, Zea Mays
gccttagagtgcgaccctctcccgaagaggttgaagctttgattgtttctcttggtgaaatccccaatgacgagaggcaggttcattttgagatgcctataaacctgagcgacgcagaaataagtgctatgctggacatgtcggctgaggattcctcagatttggtccctgctgaaacactagctgtagcacctatcccagagcctggaaagaccttgaacattcaaagatctgatagcactcattcgaagcgtcttcgcccgaccagtcatccagcttcttctgctgaggggaagaaaaagaaaaagagacggcttcagcgagtgtcatgcttgaatcaggatgccggcccttctgctcctgctgccgaggaagtgccggtggagatttttactgttgatgatcccaatgggtgtgacctggctgttgctgaccccaatgggtgtaaccttgatgacgctgaacctaatgggtgcaatccggccagagctgaacccaatgggtgtgttgttcgtattattgacgaggatgaggaagaggaggaggaaatccccttaattcggaagaacagtcgtcgttacatagctagtggggagagtagtggtgttccttctccagctttgtctgctctcgttggtctgcaagaattgtctctggcaaattttgatcagactctcgaagatatggtccctgaggatctgctgtccaagccgttagatggtggaatgatggaagtttgctctgatatgcctgatgtcgggttagagttaacccgagcagcg

SEQ ID NO: 159330 - DNA, 465 bp, Zea Mays
ttctccacgataatcacccaacaatttgcgttttaaattagacatcacataagcactactactttttacccgcgatcataaccatgcgcaattgggctacaacatcccaaacgggtgcaagaacgctagtttctagttttaaccccatgattattccattaatcattttaactacttaatcgacatcgaccgacttaacattcatctcgacggtccgagcaccacaattcacgaaaatctatctagatatctagcgtcacatagagagcctactacttcacattgcaattcatacagaaccgcaaggtgacagtaataacacacaggtaatcgacccttctctacgaccttcagttaggtcaccaaccgacgacatgtcaaccgcaaggtgactacgaaggcatgtcaccatttcatcacacccattcatcgcctatatgcgcactaattcatttcgtacgacac

SEQ ID NO: 159331 - DNA, 850 bp, Zea Mays
cggccgcatcatctttggtttcggctggcccgactgtagacaccttcggcactacaatcgattcttcaacactctgcacgatgggagcagcttgttttgcttcagtagttgaagaggtcccttcaccaaattcaggcactacggccggttcaatatatcgcggccggtgggtcagaaccttcattttcttgcccttcggcatagcagtggtggctgaagtggcagtttttctcttctttccttgccttcgcaatgggtagtgataatcagggtatacgaagccaattgcatcaaacaccctgttcaatctttttttgccccgacccccaaaggctgcggacaaggcatcatcttcggccttcgagtatgtcccaagcagctcgtcgctggtagcttcaatgcatttcaaccagtcatcgtttggttcatcaaacttctctctatatctgaaggtatatttcaatcgaactagaccaccttcactggattcagcagtagtctccttcggcatttcccagtaatccacaagtggccacaccctataggctatgtgctcttggattatatctcttgtgccaatgaaggcacaaacattgctaaaggccttttggcatgcttcgacgtcaccttcaatagccaccttcggccttcggaggccgaagcgagaccagatggtgcgctggatgatttccttgatatccttcctttcaatcaaaccatttttaacataaaaccactcctccatccaggccccaggccatcttttccggtatgttggcactgggtagcttgcattagagcgagcaatgaatccgtaacaaccgaagttattgtggtattgttccttgcc

SEQ ID NO: 159332 - DNA, 579 bp, Zea Mays
tggatgcacaaggcgcgagcgagtgacggcggttgcacgtggcgtcagcggccgaatgttgacaacaccatctgcacggtgacctcgctgacgaggcacacataggcatgctgcaccagtagcagctcacacaacatgacaacgaggcacgcgagggtaggcatgtcacaatctccatgtgttatgtgtagtgtttgtcacctccaagaactcctcgagctccgatgagccaaacgtcgccgcggcagcgtggtggtccacgaaggagttcgccgtctacaccacgggtcgtgtgacatcctctgacctggcgcagcttaggcaccttccggcgacgacctcctccgatccggtggcctcggggcatcctccggcgatgactttctctgatccgtgtttatgccttccacgattgtgttttattcctaccactagactatttatgcattccattgaggattttatgatgatgaatactgtgtctctcatgtggcttggtttttatggtaaccacctgcattcgcgcacatctgttatgggatgccacacgtgacatcgcactaaccattgtaacaatat

SEQ ID NO: 159333 - DNA, 437 bp, Zea Mays
ggtggacacgattagatctagaacccattcagccgcgaccgttggatcttggatttatggctccgatcggatctggcgatggttgatcggtggtcgttgatttgcagatgaacgcgcgggattagatcgcatcttcataaaaccctagccgtaggatcttaatctgatgccccacgctgcgtaccagttcgggattaaaccgatctaatctacactgtccgcttacaatccaacggccgtaaaaaccccgtaccccttcgtgggtacattttactaaagagccctcggagtcttggttatttaacccgccgtccaccctagggctaggatgagtctgtggattacttctgattttgcccctgtgctttcctgtatttgaggcgcagtccaggaattaaataaaacaggaaaaatagatttagaaattgaattttgag

SEQ ID NO: 159334 - DNA, 703 bp, Zea Mays
ccgctgctcgtggtcggcttccattactccacggtagccggtaagaaaccccgcaaaccactcgtctagcttgtccctttaattatccgcgtctagttattagtttgagcattgggaaggagtttggttggtgctctccggcgagcgccgccgtgggggctgggtttttcttcgtgccacgactcggaggaagacgatggcctgttggccgttggatccgacgctgacgatcgagatcagatgataggataccctttgcgtgattagatcgtggtcataggattcatggcggacggccgtgattagatcacgatgtactgattcgctctgtgggatctggagcgttgatgcggtaacggacgatttaggttagatcagggcgggatcacccttcatccgttgattccggatcggacggtgggggcgagttacccgttttataacacggcgatctaatctggtgcgtcggttttagatccaacgacactgaatgactgataccccttcagccggttgagttagcgattaggcccctctcgttgtaggaaataaacccgccgtccaccgtgactgttgactgagtctcgaaatacttacgaggaagcccttgtactctctggttattaggcgcccagtccaggaaactagaaaaccagggaaaagtaaatagaaaatgatttttaaggtaaaaataatggttaga

SEQ ID NO: 159335 - DNA, 499 bp, Zea Mays
gaaagcccattggttcttggatagtgggccccgatcacgcctttacaaggcctgccaaagtgagcccaaaattgtcggggccgatcaaatcaaacccatcgcattaccacacaaggcctttctaagttcgacttaataataataatcacatacagtaaatcattcgatctccaccggcctcctccaatgaccgtagccggagccatccgccgccggcgagcaccgcggccccatctccctctcttcgtcctcgtcctacttttctctactctaaccccacgcacttcggcgctccgcgtcccgctccgccaggcagcaaccctcgtctccctctcccattcgctcctctcccgcgtcgccatcacacgtgctgctcgtggggacgccgcggcggccgcacgcgtacggcgaatcgcttccctgctgtcgtcccgtggtgcgtggggactcggctgggactacctccgccactacgccttctcctcagccaccggatgcg

SEQ ID NO: 159336 - DNA, 679 bp, Zea Mays
cggcaattggccagtgaggatggactgccaaaggccagcacggggcagcgccgcgacagcacaccaacgcccataggtcggggcttctaacacggctgatggaagttatgttaacttccatgggtgtctgacaccagtggcggatctagaaattatcgaagcctggggccacaatcttattataagaaaaggaattaccatacatttctctttctcgttttgttcttcttcaacattctgcggaattgatgccttctggttgcctggtcgtttgctcttcactggttcagtgacgctagggactcgataattgaccagtggggatggaccgccaattggcggcactgggcagcgccgcaacgtcacaccaacgcccataggccggggcatctaacacggctgatggaagttatgttaacttccatcaatgtctgacaccagtggcggatcaagaaattatcgaaacctggggccacaatcttaatatgagaaaaggaattaccacacctttctctttctctatttgttcttcttcaacactctgcagaactgatgcctgctggttgcctactccttcgctcttcactggttcggtgacgcggggactcagcaattgtctagtggggaaggaccgccaatggccagtactaggcagcactgcgacgacacaccaacgccc

SEQ ID NO: 159337 - DNA, 437 bp, Zea Mays
tataactatcctatgttgaatatatcagtacttttacatttacattgtcagactttaaaaactcggtaacttcaaactgtctcccacaggtagtgtaaaatagaggacatgagactgttgataatattgtttgacactgtttctaaagtgaatttgaaatagatgatgagatatgagatcggttggagataatctcagacatttggacctaaaaaaggaaactcaacatctaaattgcagtcatcacctgaaccctaaccagattcggcctcgcggtcccccaacccaaacccttggaatatcgccgcctctgtctcctgttcgccaccgctaccacaacgaggatggcgacaagcatgggcccctccaccgcctatgcctcgctgcgtgcggcctttgcgccgccccaatgtcgtcccctccatcctccccctcgc

SEQ ID NO: 159338 - DNA, 618 bp, Zea Mays
aacagtcgtctcggacaatgtcataaacaggatgtttggctatctagaattgaatcggtttccatatctcagcctgtttggctcccctaagaattcaattgtccatttcaacccatttctcatccctgaaaatttggtcaatgctcattttacaccctgacgcgttggaaagggtcagaaaggtggctagggtttgccgctcacgcctgtgctgctcatcgccactcgcgcctgtgctactcgtcgccgctcgttgatcccctccaccatagcaagagtctccctctaaggaaaagggtaactaccacgcacctcccttcttcggtcattgctctcgtgcacgggtttgctctccatggcgtttgtatgtacgtggtccttgagttggtgtgcctgtttcccgcgtgtttggatccgtgaaatatgggcttaattgtatagatctatgagagtggcggtggattgaggcagcgctagcggaggatcaagatcgggacgtttgtgtgattcaaagccaagttattgtgcatgtgcttgggaagcggagcgagcgatacacatgagctaatctaagaatgctagtaaaggcttggttgtgcttgtgcgtagataactaag

SEQ ID NO: 159339 - DNA, 908 bp, Zea Mays
ctgatggcggagtccttggtggacaacaactgtccaagtcgcgaaacttcatcctgagatgcctgcagctcgtggcggtgatggtctaggtcagacatgctgaagcggtggctcctctccaggatgttcaaggagttactagcatcttgatatagcctgtctagattatcgcgggaagcaacaagtgcccgtttttcttcctacaagcagagaacaacatttagcattgaagcaaggatcgcaaggcagggtcagccaaaaaagtttacctcatgtcccatcctcttggaatcaagctgagcattcagagaggaatttagggaacatgcactatccagaaaggcagaagtctgaactaagtcggtctgactctgagagtacttctcctcaaagttagagcaccgccgagccatatctgataaagcagctgaaagagaatgcacgattaaggataagccaagcaattaaagaaactagagaaaccgtgagttcactaaccagcattagacgccttcaaatcgtccatctgtttcaggagcagcagagggttccactgcatcagagataaagcttgatcgggaacagtagcgccgcaagatttcaattgggcagatacaccgtcaacaaaatcctgtggtcatgaacagataagcaaaaaagataatatgccagtatgaacaatgaaagagcaaaaaattgactcatctgaatgttggaaaggaatagtggaagacccaatgcaggaagagtcggtgcatggcttgaggagggaagatcagcaggaacaatctcaagagcacatctcggggtaacttcaaccccaccagcacgcaacaagctcctgacgtcttgctagttgacctctaaagcgacttgaccagcgagagtcgtagaaacatgcgtcaccg

SEQ ID NO: 159340 - DNA, 1056 bp, Zea Mays
caacctactaacatgaataaaatgctaagatgtacctaaatgcttgttacgttcaggggagggcccaggaactggtcgtcgatgccgctgttgcatgaaccttcgatttcgctgttccaaggggggagagaggggcatgccgttgttgcaaggggggagagggagtgatgtgcgacaccttctgcttgacgctgggttgcgctgagatttattcgcttaatcaagaaaatgagctcaccatagaaattctcgtgacccaagtaacatactgatgctagtcaaaatgttagcaaaaatacaatgaaccagcaggtatatcttgtgttcttgcatcctgaaacttgtgaggtatatcctgaaactgctgcataccaagcagttgttacttaagagctcctcagttttagtcaaaacgcgtacactttacattttaggcttcagttgtgtatcaagcacaacacttacggggtttggagatgtaggaccgtgagcgatacaaacctgggccacaataaaaaatggtgtttcacaatgcattcagccacaaaaaatagaaccgtgctatagaaagcttgctattcaattaacaggcttataacaaatttaagaatataccttaagatggattggtgcaggcaaaactgcttcctccgtgatctagaattctggatagcatttcttgctgaattgaaacctggattcttgatgggggcaacaataaacaaatgcatccacctacactttagtgaacgcaagccctccaaaagtacaacagcaacaacgaattattgttcatagcaagactactcaaagatcactcaccaagtggagacgcgctgacagcaaggtttcttccatggacagcacggacacggatcgagaggactccccttccatggaggctggggcggtgatccggggcgtctgattctccttccatggacaaccttcaacaaccaacaaacacacggagtttctttgatctgaaaataaagaccaacaaacgcagaagttgtcagccctgcacccaagagcagtggtacttctgtagaggca

SEQ ID NO: 159341 - DNA, 662 bp, Zea Mays
gttcatctcacgggattccactatgcctttcgttcagcacattgccatttcatctgtttttcagggacaattcatgaaaggctacaacattttcctgcttctggattgaaccttcgttttaatggtgtggtgggagggggaggtggtggtggcgaaggtacggtgtgagcggagagggctaaagaaggtgccccaatagaggcgctagggagggagggagatgacacgggctcaaccgctagggaggcgatcgcagcacatggaaagacaagcggtccaggcacgtgacggcccgcctgagggtggatctcgatgcagtcccagagaatagggttccaggctggatcgaaggtcacgaacatgccccggatgagctggccgtcgtggaggagggcacacacagtcacgagagcagcgggtgaggtaaagctcatgtatggtgggggtgacatcatggaaccggtgagggtgaaggcaacactggtgggagaagcggaacagcgcgagtagcgaggagggatggtgaggggacgaccgctaggggagaccgtcaagaaagggcagcgctgctgctgggaggggaccggtggtagagggcacggcagatggggccggtgacctggcggggacggcgcggccctagcgcgccttctccaagcgaa

SEQ ID NO: 159342 - DNA, 903 bp, Zea Mays
cagcgcaaagagaggtcgtgttcaagcgcggattggctccaaatctttgagattatggccatgatcccattgagagatctcttcccctgacattcctttgtcgtttgtgtgtggaggcttgcaggtttcgctgactggatcaagagatatggaggggtgaagttgggtttgtctcactgtcgagcatagagagaagatcccaggtttgacgtgtccagagcacgcgtcccaatgccatcttctggtatgaggtagaggggttagctagacacattttggtcaatgggatcttagagttttgagatagagatcaaggtgaacgcgctcggttttggttcaagggctgaaattcagaaatctgaatttcagatttccccattaaacctccacttgaatggcttgtttggagtttttaacaaactattttggccaaacttttataatctttattgtagattatttagtgtatttcaatttttataattcgcctaagccatgatttcatgtttttcatggtctttcatccatgttcttcttttctacttaaataacttaattagggttggtattagggtttcaacatttttccctttttgaaaacctcatttgttttagacatgattctttagatataaacttagtggatcttttattcttacattgatttggtgcttcatgctcactttggcttacatgaaatgatgattcttgagttagtactaggaagaaaccctaggtgacactagggtgtcacagccttccccccttaaaggaatctcgtcccgagattcgggtcggagtcctctcggggtgaagcaaagggtgatacttacttgaagtgggtgctttatttattaaggcggctgctcttcgaatatcattctctttgcaacttcagaagga

SEQ ID NO: 159343 - DNA, 590 bp, Zea Mays
tttagaacctagcaaaattaatttgaccaaatttggctggataaaattggagttatgaattttgtaagctctgtatgcatttaaaagaataatgtttaaaagggtttaaggaaaatcagtttgcgccgaggcccctggggtttcccttaactaatcctttaaaccgtaccccaacggaactattcctctgagtcactgactgcgcaaaaaccccctggcctttccttctttttacttgggctccttcccccttgtaacagtaaccgcggagaggaaaaagggtggcactggttaccggcggcgatggaggtccggtgaagggctaggtgagatctaggaggtcctggcggtcacgtcgaggtgcgggtcattgacggtgatggccgggacaagtctgaccgtgtgcgcaggcggtcgggctcatcggcggcgtgtgatccggcctgctcacggcggtagtgctcaatcaagtggcacagggagcttcacgggatgctaaaaatgctacaggtgcaaggaatcgacgaatggcttaccgtggagctcggtctacgtgcgacggcggtcggttgaagtccggcgacgtcgat

SEQ ID NO: 159344 - DNA, 491 bp, Zea Mays
cctcttctcacatctacttattctcctcattctgcatcgtcgttgcatgactaaaactgagttcagtggtgtccgccaacctcctccgctgcctatggtagcaacagtgctcgtggcatgtcttcatcggtttactctaccaacgctacagtgcaaccattttcaatagtacaaatgccagatttgttgctacgccttccagtattttgtagttgagaaaaaattggtaataaatgttgaatagtatgagaaatgatatttttaagattgtagtggggtataggggatagtatagagggaaccgttgtagaggataaagatatagggagagagagaggttgctggcgtggcacgataataagatatagagggagaaaaatagagtaaactgttgaaccacgcctcgacaacgtcaactttccaccgctcgtgctcgctgccccgtccatggctcaacccggcgaccctgctgtccgcccggagcattcctg

SEQ ID NO: 159345 - DNA, 842 bp, Zea Mays
cgcagacataggacacagcgcaagaggatggcgggtttatttcctagtttgtcgggggctcttatgcaaatgatgcggacaaaggggtacggatcgagattagccgtcagatctaaattccgcggccaggattagacttcattaaaaatgaaccggtacgccacggggaccaccggattaaagatcgtcggtccaaattaagaatgactatgatcaaaacctgatcgcttgatctcacatctactgcccaaattctatcgagcgaaggggtatgcggggttagatcggggtcgtccgtgtatgatccaagaacccaagcccttcatctttctccccccaatcctctctctctcaccacggcgcccgaccggcgacacaacgagaaggcacggcggggcgccattgctggaaggcacgcaccagcccacggttcccgattcgcacggttgatcgatgctacctgatgcataggacagagcgatcgaccagaaggtgcattcaccgaccactattccccgtaatccccgaccgcagcggagggcggctcggtggggagttcccaaatccagcggcgattattggctcccccatggagggagtttaacacgagaaggctcttcacatatagggtaattgggcgaattagtgagggccccaaccatacctagaatcaatctgacggaggcgatgtccaggcagtggtggaatcacacggcggcggatgagatccacgcggaatttcgcctagtcctcactgcaacgaacgctcctgcaccacacaaaacctccacccacgcaaattgaaccgtgaccgagagttccatggcccgaatcgaagtctc

SEQ ID NO: 159346 - DNA, 861 bp, Zea Mays
cgatgcccacgattaaatctcgaaccgataagcaactgagaccacacgatcccaatcctatgttcaagattttatgaaatgagaccaaacctaacccgtccgattagcagatcaacgatcaagatctcgtccgaaagggtacgctagagatcaaatcaagatcgttaaataacaatccaacggttcccacgctctcttcctcaccaggacacacacccggcggcgccacgaaatctggcggccggacctcgccggtgaacagcgatttggcgcactgatagagtattccccagcccaaatcattcatgcagactagtgcagaatgtcacacagactagtgcagaacatggcagaggacaaggcaaaactagaggagtactactcacctgctatggtgcagtggagaactcggcccacggtaaacagtgacagtgcggtgtatggacgactccagtgaggaacccccgtcgttccggtgaccttcaatgctcgagaggaccatgaccaggttcctggtgccctgaccatcatcccccacaagatttcgaggtcggggcggcggtgtaacacctcaagtgttaccatgactagggcacacctatgcactaatgactatgatcacatgtggaagaaacttaaggagcaaaagtgtaagggccttggaagctaggttttaaccaagagatgtggatgaccaaaagcattacccaagttgtgtgcacttatcactttggacaaggggggagtaaaccctaaacctctcttgaatcctatcttctaagcaccttggttaaaggggagagtttaagcaaaggtgcaagtcatgaccaaacctttggcacaaagttaagtaacttatta

SEQ ID NO: 159347 - DNA, 686 bp, Zea Mays
tttctatttcttctccaaaaacacccctcacgtcgaacggcgttgcgcagagctctagcgagctcgcatactggccgatccacgcaacgactggcgtccaggtttggccgaagtcaaattcaagacctaaggactgtttcacccaaactaatttcataaacggtgatctaccctgctctgtccacggtgacagtggttaacgcggacactcgatcgcgttccaggtgactaatggagttctagcttaattggacgggtcagtgattatcaagagcaaacaagagtgccgaaacaagaacgcagagggcgagattggacctgatttgggctggccacggcgagcttggttctacggtggcggaaacagttttgggaagaattccaaattcgtggattctagtgaatgaccgaggctgattcgtggtggctgggcagcttactactccaaggagctggtggcacacgcaatttataggcgcatcgagggtcggtgacgaattcggccgaggggtgctggcggtcggagaggggaggcaagctcagtgcgggggaaaaaggtagctttcaccgtggcagtgactccggtgatcgccggacatgcaaccagtgagtcaccgcgaggaagtcccgcgctgagacacgtggtgcgcaacggcggtagcttatcggcgacgaggctatccaac

SEQ ID NO: 159348 - DNA, 780 bp, Zea Mays
tcgagtgtttgctatttcatcaaaaagttgtctgattattacaataagggagtatatatattactctccacctggaccggctgctacgcctatctggcccaaacgatcctgctcacttggcccacattggcccgctcacttggacatttggccggcgcgcgcgtttggcacgttgctgtttcccgccatcgcttgcttcgtcctccatgcctggcaccgtgcccgtgttgctgacatccgccgggccttcagagcctgcttgtcccaaagcaggggctcgagggaagcggtcgcggagagcaacgacatcctcccatgtagccaatgctacatcaagcccggaccagacgactttgacttgaggcaccatcgctcctcgttgcaccaggcggcgctgcagaatgtgaatgggaacctgcaagtaatcagcgtcatcgggtaatgatggtatagcaatctgattaggactgagtgctgccttgagttgtgaaacatggaacaccggctggattgcagaattggctggtaactgaagtttgtaagccacaagactgatttgttccactatctgatagggtccgaagaacttgaagaagagtttgtgatgtgcacgggtggccactgatgtctgcatataaggttgtagtttcaagaatacccaatcattgacagcaaaagtgtcgtaccagaattctgcgacagatagccagtgggaccatttcttagggcaagcgtgaatgaaacatctgagcaatgtttctaagcactggttcacgcgcg

SEQ ID NO: 159349 - DNA, 388 bp, Zea Mays
aaaagttatgggttaaacaagttttaggttatttttaatatttattttgcacttaaataagactccaggggtattatcgcaatttctagggacctatctgtaactgtttcaaactgcacggggatggcgggtttattagtaagaagtgcagaggcttatatgcaaaagagtcgatcgaaggggatattcaagtgccctgaccgttaaattgccaacctacgatctggattagatctgatccacaaccgaaccggtatggattataacccgccggatcgagatctaatggctacaacttaatggatcgtgatctgattcgagccataggatgtcgatccgacggcacagatccaaatgccccaagcggtatgccagaactaatctaggt

SEQ ID NO: 159350 - DNA, 725 bp, Zea Mays
gaataagcctataaaaattagctaatttctctaggccaaaagccatccaatgaaaacgaactagttaattttcatcggcttctataagacggacaatgaaaattagtgatttttatccgtcgtctaagcagaggcagacccagaataaaataagagcgagaacacacttgcaacaataagcatcaaaatattagagcgagtgtatctaagttggtatgagcaggggacctaatagtaacactctagactctacaacttgcaacagagaaatgagcggaggcatgttccctcactcggctatacgtatatccacccatacgtctgacagtagtcgacaagaattaataattttttgccagtcatctaacaaaaggtgacaaaaattaactagtttacactagctttctcatttctaactttccctctcccacacacaccttacccacacatgtgctatcgaccgctgctgctcctcaccaccacctcgtggaagcccatgtgaaattgggtgtggctccataaaaggctttgattgggataccatacacaccacatagtagacaagaaaagcatcactatagtagatggaggtctaaagagtgataatcggtctggttggatcaagtgctaaaactcggttgtgagaacttcacatgggagggtgtgacttgcatgtcatcaatagaaagaggttcgacgaaaacattgaaattgcctgaacaaag

SEQ ID NO: 159351 - DNA, 687 bp, Zea Mays
caagaataaaaataaccagttccaacagaagatgttgctattgccgaagccgttccaactgtcgaagctgacagtgataacgaggatgatgatggcactttaggtcctagcaaaccctgccatattgagtttggaaaatctacggttaaagcggaagatctggttttaatgaagaaattaggatatgttggaaagcatgatgacgatctagttcagtttgctggggaagaagtgattctgaaaccaaggaatgacgaagtcgtagtttttaagagcaggtcttcgatcccctctatatgagatgattggtgatgttttaaagaaatttgagatctgtcttcatcaacttaccccaaatgccatagttagacttagtgtgtatatatgggctctccgaagccaagtgaagagtgccaatgctgaaggattttgccgggtgcacgaactccactaccagacgaaggctagagctaatgggttacataagaacttcggatgctacaattttgcgtaccgaaaagataccaaagatcctgtgattggttatcgtaccaattgaccgactggcaggacaaatgaatggttttacgtgaaagctggcgagaaaagagggagaagcttatgactatggtgatgagtcccttgagaatgagcttcggcatgacacggccacggtgcaatatgcag

SEQ ID NO: 159352 - DNA, 489 bp, Zea Mays
gaaaaatacaaatgcttctgttaggacaacaaaggaatcctatggtttggagaccgattggttgttcccaagaaccctgagctcaggaagaagatattggatgaagctcacctttcaaaattctccatgcaccccgacagtaacaagatgtatcatgatctcagatctttatactggtggaccagaatgaagagggaaattgcgaagtatatatcggaatgtgacacctgccagagaatcaaggccagtcatttgaaggtagcaggcactttgcaaccccttcccataccatcttggaaatgggaggatatttgcatggattttatcgtgggattgcccaatacctcccgccaccatgattccatttgggtcaatgtggacagattgaccaagacagctcatttcttgccggtacacaccacccataggacggaaaagtatgccgaaatttacattgaccagataatttgcttgcatggaataccaagg

SEQ ID NO: 159353 - DNA, 692 bp, Zea Mays
catgagtagaacaaggtgagctggcaggggtaggtattaccatagtttaccaggaagaatctccaatccacgctagggtggatgccgcggtggagtcgctcgccagtggggatttcggtggcacaagctgccgcggccccaaccgtaacccgatcaccaccccgtagtcaagtggctacgatctccggcacaccagaagggcgattcaatgacgagcgcgcccatttcccccttctctctctcggtccgtgtttccccaaacaagcaaaatgcccaacgacggcacccgattatctattggagggttggggcgacgtggagggtatgggtcttatacccggcgaagtgggcgagggtggttgagggctggctgttagcgttggcggggtccgcagtgagagctctgggttgttagcgaggaagaaggcgatcctgacggtgcggggcccacatgcagaggcagcggcagccccgcgtgcgagagcgcgtaatcttcaactaacgcgcggacagaggctgacgccatggcccactcggcagaggatggagggggaacgcgcagcgcgcgatgcgaggggttggccagtgggcccgtagagccagtgggcgtgcggccgtggagtccggttaggccgtgcgcgagaaaggagatggcttgttgggccgagtgatcaaaagctggcccaggcgta

SEQ ID NO: 159354 - DNA, 576 bp, Zea Mays
caggaacaccattgatctgtgcacctctatggttcgtcttatttccatcttgtttccttgctatacctagatccttgttaccttctttgtgtcttcctccaactgttctaatacatactctagcctagcaactaggacgagtactttggacacttattcaacattgctatctgttactgagttgtgtaccacaaatatatatttagtgagccttcccaaaactccacctttctcttgagcaaaacagatactcctttgcagtcacacccacgctctttgggttatcacaccggccaccatttgccacctgcagtgctggtaagaaccttgtaagagcgaggcaagacgcttcataacttgtgttccaccaccatccttgagagtagttgtatgattcacaccttttgcgtgttgctttgtttctgttttgtactaacaatgacatgagagtagggaattccaccagctttaccaagagcatccatgatcaaaattcaaggttttcttagaggattttgaaaggaaatagactgagttcatcacaacaacttactcatttgtgtagatccctcttaa

SEQ ID NO: 159355 - DNA, 299 bp, Zea Mays
taggatgtccatgtcgacacgacggaacgccactgtgtacggtctcaagcgtatccccactgccttgtggggtcagtcaatcccattcttggggaacctcagcgacggagtctccacaatgacctgcacacctagaaatgatgggacgatacactatatcgggtgtatgtctacgcacacaggatggtgacacaagtctcatgacaaaagacaaatccacaccacgcacgactttgaagcatactgtaaatccaccctgcgagacatgccatgcgctactatgtcaacatcggacttgc

SEQ ID NO: 159356 - DNA, 1127 bp, Zea Mays
atctcggaggtgatctgtagtgaactcttctcaggacagttacgaaagtaatgaccttcacgtccacattgatagcaagcttttcttgaagttatttcttgactttttccatgtttctctttttgtttcttggacctgatgcgaacacaaggctgaaactgtgtgcaagtaatagtccatccatcaatgtaacactcatgtgtttcttcttggggctgggcatccttgtgatgtttcctttttggaatacctgacaattcatcgtctgacagtgcattaggtattcgagaatctgctactagttgttcttggggagacatttgtctttttaatgccagaaaacaaaatccggttcttttgttttgtagtttcactttcgtttgtactgatctggcgacaaggaattccatagtactcgcatcaacaacatgttccaaggtcacttgtcggttggtttggttgtgcatccttttgtgtcttgaatgtctgttcatcagctgctttatttatagtgttgttttgacttgccaacacaccacattctttgcacttagtgacatcacttgtagttgacattccaaggtctgacatctgtatgggtatggaagaatggaagggacgaaagggttgagcaaacacagattatagagagcagagaaaacccatctatctaaggtttttcctagctaattgatgccattgtggacaaaagtcacaccatacaccaacaatcatatcaaagaagcaaatcgaacaagggcacaaaacaactaacatgaactcaagcataccagcacaacacaatccaattctactcattcaaccaaacaaaaggtgagacaaggtttggaataagaaagatattataaaatcaaggagtcgggaaagaaatagcaaggagttagacaagacatatttgttggtggccaagagagaaataagataactgtgaactattaaagtgaggataaatgatacaaccaaggatatgaagtgagttagggagaaagcattatatgggagacaaaatagagaggcattatcaagtaggagtagggagacaaagaattcagtatatcaaggtagatattgcgaaaggatggcaatataatggcaagaaaacaaaa

SEQ ID NO: 159357 - DNA, 441 bp, Zea Mays
atgcattggaagggaagcaactgcttgaggatgaccccatagttgtgtacctcactgcatacctgctcaccctggatgcacagtatgatttcttggctcgggaccaccatcagatgattgcccgagcagaagatgcagagaagcgcaactgtaagctccatgtggatctcaccacaactcaagccccgtgtagctgccttggaaagtcgtgaagtcattgcggttgaagccctgaagcaagccaaggatgagcacgtccagaagctgatagaggcctacttggtaacccacaaccaacgtaaagccctgcggatccaagagcccgcttcatccaacccagttcaacccaggagagctgaagatccccagattcttgaaggtcgcccagtctctatcaaaggagagaagaagacttgggaactcccggaaggagccatagtc

SEQ ID NO: 159358 - DNA, 590 bp, Zea Mays
caacggacaacacgacgtggtcccggcgatctaagaggtgctagcctaattggcggggtcagggagcatctgggacacataagaacactgaaacgaaagagcagagggcatgagaggacctgagacgagctagccacggcgaggcctctttcacggtggcggaaagcagatttgagggaaatcagaaattgacgagctctagtgagcaattggaggcacgacttggtggcttggtgcttgactaccctacggacccattggtgtgctcaatttatagtgtgcttgagcagtggcctccaattttggattggcgcgctggcggtcggagaggaagaggggtactggcgcacacgattggtggccacacccgtggcaacctcaccggcgatcactagataagctattacgagtcacggcggcgtggttaaagtgctgaggcacgtggcacaagaccgcaaggtgtctaactccggcgagggtagatttcaagcaatcggggcagagcggacacgacggcgggacgaacagtgccttaagctcatccggagggggaagatcttttcaccgtgacacgttatctgggcaccgat

SEQ ID NO: 159359 - DNA, 330 bp, Zea Mays
tgagcgagccaacgggatgctattggaggcactcaggaaaaaggtctttgataagaatgtaaaattcgcaggaaagtggataagggaattgccttatgtcgtttggagcttaagaactcaacctagccgagccctgcatggaaacactcctttcttcatggtctatggttcggaggcagtgctacccgctgatctcaagttcggggcgccaaggttgatcttcgaaaacatagcagaagccgaggccaccaagctggaggacattgatgtgcttgaagaagaacggctaaatgcggtaatccaatcagcacggtaccagcagactttaag

SEQ ID NO: 159360 - DNA, 1098 bp, Zea Mays
gcaatgtataatcagaatggtactcttgctcgtggtgcttttaatacgggagccgaaaacaagtatttttaatgagatcaaatgctttctgctgctctgccccccaagagaattcggcatcattcttaagccgaagggtaggggtgaaggcatcaatcttcccggctaggttagaaataaaccttcgtaaataattcaccttgccgagaaacttctgcacttcaaccttataggtcgaaggtcccacattccaaatagacttaattcggtcagggtctatctctatgccatgttcatggatgataaatcctaaaaacataccagccgacaccccaaaagcacatttatatgggttcattttcaatccataccgacgcattttatcaaaggctttgcgcaaatcagcaatatgagaactaaactcagccgatttgactacaatatcatcaatgtagacttccacagtgtttcctaacaactcatggaaaatcaaattcatagccctctgataagtagcatcagcatttttaagaccaaatgtcatgacaacctattcaaataaaccaatgaagcctggacatatgaaggccgttttagacgcatcctcttcggccataaaaatctgattatatccggcattaccatcaaaaaagctaataattctatttcctgatgcattattgattaatgtgtcggctatgggcacgggatactcatctttaggagttgctctatttaaattgcaaaaatcaatgcatactctaagcttacctgactccttctccaccggcacaatattggagacccattctgcgtatctgcaaggtctaataaaatcagcttctagcagccggtggatttcgtccttgatccgtgggagaaggtctggacgaaatattctagctttctgcttgaaaggtctgaaactggacttaataggcagccaatgctctacgatctctcggcttaatccaggcatctcagtgtaattccaagcaaagcaatctgaatattccttcaatagaccaatcatctcatttctaggaccggtctacagggtcttgtttacaaaagtcagccttggagttataccatctc

SEQ ID NO: 159361 - DNA, 313 bp, Zea Mays
cggcaatcgaacacacttcttcagctgagatacatggaatacgctgtgaatggcagacatccttgaaggtaacttcagcttgtatgccacgggtccacatgcttctatgatagtacttcgggttgcctgttattgtgcaacaagttgcgcactagcattgtgctcgttcaaaatatcatagaacatgcctataagccacccacacttcaggtttgtgatctagacagttttaagttagcaattgacagctttgttttaagtgaagcaaattcagctgacttttatataaaacctcaaagtaacattaaccaaa

SEQ ID NO: 159362 - DNA, 637 bp, Zea Mays
caccgacagcgtgcacgatgctaaatgtggaccctctctcctcccacaaccctctcacccatacttgcctgcgctgtcccaaattcctcactgagagtcgccttggcggatactcgtcgacggtgggattcaggtgccagtagggctatgtgggtgttgggctagcctcataggaaatgggtgagagactaattgggagggcgcctgcagtagccggagaaattccttgccgtcgtggattgccaccgcgaatccgctcttcgtcgtgtgccgccgccctttggaccggagtgaccagcttgggtgccccaccaccggttgtggagaccttccgattcaggctcgcgtgggatcttcgtcgtgtgtggtcgtaattgctcgctgcacctccatcgtccgccacccgccgacgtggaccatcctcggcgctccatctacggtacgagagcttactccgcgtgtgccatgtccctttctatgtgtaggaacctcgggtattcgatttggggcacccgggcctcagttcaccgaactcgccggtgccctccaccgtggtgtgtgaccggcggcaccaccgggcatggtcgcgaggttggggatcaatttgcgcctttcaatcctgaacgggcgcatgaga

SEQ ID NO: 159363 - DNA, 651 bp, Zea Mays
gtcgtaatagtggagtgggccatggacgaagcagtgaggaggcatggctaggccatgcttgaggaagggaaagaaggagatgacataactatctagaggcctcgagacatcctcatcaccagataccatctactccatcgcctctatcctttcgctgatgaggtcatgtgacgccaggaacgcgatgcgagcgtcagtgacgtcggagcggtacctgaacaccatcaacggtcctaaaggttttctcgctagaaagactagaattttttatgagaccaagggcccgggcagtcaaggaaaggaagacagaagtgtggggccaaagatggatggagaaaccccttattaggaggaatgggagggatcgagcaagcataggaatggttgcctcaaacaaatcaaaatgctctagtaagaatgcactattcccactctggcattcaccaaatgaatcgaccacttcaataaaacacgaccattacctccactgggcaaatcgaccacctcgataagtgcgagataccactaacgttgtaggaaccagagatgacacgaaaaacagtttctcgaacagtaaacaacacgcttccgagagtcaatcactgtttctaggaaagaaagcatacaaggttttatacgcccctacaaccc

SEQ ID NO: 159364 - DNA, 553 bp, Zea Mays
catgtaccaatcatgcaaccttttattattagccaggaccttctttagtttctcaaaagtgagtagtggtctgcccgacacatattttttaggcacgtttttataatctgccttagttggcttctttatctttgcggccattgcctcagccttttttgcggactcctcgagatcggccaaatcaacattgtctgacgtgaggctccgtccaatccctttcaaaaaacgaacagtgccagcagtggatttactcttctttttcttataaggggacactacttttggtatagaaactttagatggtcgtggagatggctgtggagaaggtggatccctgaagggcgatgtatgtggcggagacggtgggccaccatgaggatgaggagaaggagggtcagaaagaggatgaggagcagcatgtgaagtttgaggaggtgatgatggatgtgcaataggaacagaaatttgagaaggcggagacggttgggcctgcgacgaattcgaccaatcaagcaattcgacatcccttcgaggccaaaggataaaattcttg

SEQ ID NO: 159365 - DNA, 795 bp, Zea Mays
tgagatttgctcgaccattttgaggggaagtgtaagggcgcaagcagcttaacaccgtgagaaaggaaggagcaggagtggttgaactcgagaccattgtcgcactggagagcacgaatagggtgaccaaactgtgtgaagacccaaacaaagaaatgtgatagggtggtgaaagtgttggatttcaaccgcaatggaaaagtccgaagaaaatgagtgaaatcatccagaatcaacaagtaatatttataccccgagaggctaaaaataggtgatgtccatagatcacaatgtacaagatcaaaagcttaagcaacccgagaggaggaattggagaaagggagacgagcatggcggcctaactgacaagcatgacacaaactatcaaaatggctactgctacaagatatgatagagctactagacaaattggtcataatatcggaccctagatggccgagacgatgatgtcaggtggtggcgaagtggtcgcagccaaagcatgcggggaggacgtggcggtggaggatggggggaaccgaagagtgtacaatggcccgagatatcacatcgggtaataagggtcctggtagccaaattctttacggataaaccaaagaggtcatactccataaaacaagagttgtcagtggtaaaacaatgaacaaaaagatcctggatgatgttgggagcaacaagaacgtttttgaggtggaacggtcctaggagaactaagtcaactactgagataaccaggagactggaaccgttccccacaacgatagaggaaggaag

SEQ ID NO: 159366 - DNA, 327 bp, Zea Mays
tatcaacgaggccaagcgcctcaaacaccaaagccgggacttcgcactcatcgaaggccagctttacaagaagggggttagccaacccatgcttaaatgtgtcaccgagaccgaaggcgtccaaatcctgcgcgaagtccacagcgggacttgcggctctcacgcagggcctagggccctagctgcaaaggtgatccgtcaaggcttctactggcccgccatgatctgcgtcgcaaatcgggtcacaaggtcatgagaaggctgccagaagttttctccacgctcgggaagcccttcgcaattcacaaagctaatcgcccacacgtg

SEQ ID NO: 159367 - DNA, 867 bp, Zea Mays
cacaacgcttcatccgaagcggtatcctgactctgatcttggacgcaccctttgagatcaacggtctaaaaggtcgttctcctacctcccgtgcacatgcagtggtgtgggctggcaacggcggcgccatggccgcaaccacccagacccgagcaggggaccgccaactatgcttattgtcgagctacacgtggggaagacgaaggcgagcacaatagtatgcttcttacctaggtttggcgtgccagggtatgcagtcgtcggagagaagcggccaggtggtggatttcaaggccggcgaggaatcgccccagcattgacgccgtacttctcaaattgatggtcgctgtgtcttacatgcgctctagcgaggctacccgaccacaattgaagccctggcgctagcgtggatgggaaatcagcccacggcggtagtcccttttctctcccctccgcctatggttcaattggtgactgggtactcggcgagatggataggggagctggagcggccgggttatataggggcggggcgagtccgagctcaagaatcccgaggatccgcaacaactcccgccagcgtagggcacggagcggtagctgcgggattgacgaagttcgtttcggcgtttggtggcgatatgcggaaggtgacgtgcctgacacccgaccccacatggcggtgattgagggggaaagcgagcgtgggcgcagagtggctggccaacaggcccggcttgacaggggcagcgagggcaagcatgcgggccgcgcatgcgaaatgaggttgggccagatgaagttagtgggccgaatcagggaactcagcccaaacgcagggatttattctttttctttttttctatt

SEQ ID NO: 159368 - DNA, 322 bp, Zea Mays
ccaccgcgcggtgtgtgcgcgccgccgcccggggaaacggaggtaggtgatggctcctggtccgtcgatcgggattcatacggctaggattagtttcgtggtattccttcgctgcgtggatgtgagccgttgattccgtattgtgcgcatcagattagatcgggtctcattaaaccggggtcgtggatctcggatccggcggctagtatcgtgtaccgcttcagtgaagttagatctaatctgcgccctagaattctaatcgaatggccgacgtttgtccataccccttcgcgggtcagttttattaaagagcccctgagat

SEQ ID NO: 159369 - DNA, 721 bp, Zea Mays
cgaaatcataagtgttccccagactcagcccaaccctagggtggacggcaagttagtttccaatttctaggagggctccactgtaaaaagagcactacgaaggggtaccaagcctcctgaactgtccgatcatgacacaagggttcagattagaaccccacgctcccgaaccggtatacgattgtgatcattgatcaacaaatctatggcgcagattaggtttaaaacaactcgcaactcatccctccatttcccgatcaacggtcgcgaatcccccagccgaacggatacacatggcctgatccgagccgttagcggctggatcaacgacacagacatgttctcccctaactacggtgaaccaggcagcagcgccgctcacctgacgatgacaaacactccggagcggtgtgcccctacccccatctatttcatatacgaaagatgctacacgaacgggtaacaacggtgaatccggagaggagaatcacactagtgatcgtgcagcaccacagtctggccacgatcgcactgagttccacggcggcgccacaagtccggcgataaattctcgatccacgggcgctctaatgaatacaatgttcagttctaagctacgaggggacagaggtgaaggcgcagagggaatctcacccgaggaaggctgcgcaagactccggtccacgcgatggcgcattctccgccacggttccaggaatcc

SEQ ID NO: 159370 - DNA, 591 bp, Zea Mays
gtggatacctaggcgaagaagtgtgtgagggtggtgaacatgtcggacttcaaccgaagaggaaaagtccaaagaaaatgggaaaaatcatccaaaatcaccaagtagtatctgtaaccagaaagactgagtacaggggaggtccagagatcacaatgaaccagatcaaaagcctgctcagcccgagaagaagtagtaaatgggagacgagtatgtcggcttaactgacaagcatgacagaggccctcaaaatgtcccctactacatgaaggatctaagctattggtaagtttgctcatgacgttaggtcctgggtagccgagacgacgatgccaagtgatggcggaggtggtggagactaggacgggaggtggagacacgtcggtggtggaaggctggagcgtgtagaggggcctgacgctgtcacatcgggcgagaggggtccaagtggccagatccttcacagaaaaaccagaggggtcaaactcaatggaacaagaattgtcggaagaatccacattcaagtcctacggcgactgttcgcaggcctgtgcacgcgcgcctcgggcctagtgcccgtgccggctccgc

SEQ ID NO: 159371 - DNA, 596 bp, Zea Mays
tgaagttggacgagagctggtgaggcgaacaacctaggagctcatggtggaggaggacatggcatttggcgatctgcgaactcatggttgaggaaggcagagaagctgcggtcgagcttgcgatagaggatgcggtgtccaacatcgggtgggagggatgggtttgagaggtgcgggctgtttaggtggctctgatatcgtgaagattggcacaaataacacaccatcctattcatatgataacctatatgcgtaggcgggagagttacaatgagcggatgcatgaggagagtgcagatagtgtgagcaggactaaatctacaatagcatgtaacggtacataaggtgcacaaataatcttaatgaggtgataccttactgtgcactaactatatttaggtcatgcatgtttcgatcgaacgaggaccaactgttggatgagctaaaaatgagctagctaataactagtaaccactgcatgtttcaataatggcggttaatagatgcatatatatgatcatactttgtaataaaaactattagtcctttttagctagttatacttgactaactagttaatgccttggctaattttt

SEQ ID NO: 159372 - DNA, 419 bp, Zea Mays
gagattgagtggataaaagggggtcagttcaggcgaactctgaagatccagtgcactaaaatatctgaagaacaccgggaaaagatctgcggcactgttgaatcagatgagttcgagtgattcagtgggggggtcgatccggggaaggataactttggacgtggcatcaccccgcgagctcagtcgcgcgtggccggagatattcaccggcggtcgctgtgaatcagtgctttctgtcgtggtgtcatccatgccttgctcctcccttactgtacctcttctatacgtggttaccatgcgtaagcaaagccttccgcgatcgctgatcattagcaggaccaccgtggctataaagggcgccatgaaccacggcgaggtgttcacatctccaccagtgagtttgattgaagcccaaaatt

SEQ ID NO: 159373 - DNA, 300 bp, Zea Mays
ttgtgtacgcgtctcgaattgggttatggggcaccgggggcaagctgtgggtgttctggcgggcgctccaccgtgtggtttatgcgtcgctgtgcgcgggcagtaggattggggaagacgaccacggaccgttggatcaggcgcgtgtggatcagattagatcgggataccggttcgaccatgtccacccatgaccgtcgattggcgatccgatggtggggatcggatctggactacattaaacctaggccgttgatctattgttgaacgactctgattagataggagataccctttcgc

SEQ ID NO: 159374 - DNA, 533 bp, Zea Mays
ggcatgcttaacgaaattaaattaaaagcaagtggttagtagaatttgtggaggttttgtacaaatccattaaggctccacacattcaagaaaccaaagcacaatgaaattgagagctagtaatatagattgaataaaaagcggaacaaagttgagagctagtaattttgattgaacccaatatcaactttcttgggaggtgtagaaacatgtactaacaaagggttgcacctagagtttgaaggatgagtgatcgattgcaaatcctagaatatcacctcaagcacaagtgagaccaacccaaggacaatacaagagataagacacgagagttaccttgtggctcagctcaccaccaaagcttacctatacccatgttgttaagaaaatcacaaaagctttgggtctcatcgaaccctattatcatctcaagtcaaacaccaaggttgagctaagggttccacagatgttccatgcaatacaaagttcccagagcactccacaaaacttggatgcgttatggatgacctcta

SEQ ID NO: 159375 - DNA, 422 bp, Zea Mays
gctgctgcgaagggccatggtcagcaacatgtgccggcactgggagtattgactatatgcactggcaatgggaaggatgtcctgttggatggaagggtcaattcacttgaggtgatcaaaaagtaccaactctgattcttgaagttgtggcctcacatgatctttggacttggcatgcattcttcggtgttgctggttctaataatgatatcaatgtcctgcaacaatcatcattgttcatccaagaactcaaagggcaagctcctcgagtgcaatatatggttaatgggaatcaatacgaccagggttactatctagctgatggaatatatccggaatgggctatttttgttaagtcaatatccatgcctatcaatgacaaagatcaggagtttgctaatcatcaagaaggcgaaagggag

SEQ ID NO: 159376 - DNA, 494 bp, Zea Mays
gcactctgaagtaagcaacccagaaagagatcctcccaatccgcagaaccgaacatcctatccagacgtaccaaggtggggttactctgcccgtttgaccaagtgtatttgcgaccagtcaagggaatttcaagaagagccaaatcatccttccatcttctgaatctccccatcatagcccgatcaaggttggaattgtttttatcttcgttgcttaggatcatgttgaaatcaccaaccactagccacggacccaggcaatgagctctaacagtcgtgagctcatgcaggaattgtattttttcagaattaccttggggagcatacacacaagacaaccaccatgacacgccatcctccagccgaaaattcaccgaaacacagtgatcatcaatcctcgacccaagagaagtaacatgactcctccaagcaaccagaatacctccacttgcgccattcgagggagagaaaacgaaattgccaaagtctgaacc

SEQ ID NO: 159377 - DNA, 443 bp, Zea Mays
aacagaaagagtgctgcgagatttcctcgcgcacgacgcatgaccgctccacgttcgtgagctccgtgccatcccacggcgaacgtgacgcatggatcatccttgaccacgtccatgatgctaacagactccctaattacaagcttagtcactgactaactacgactcaaccaagctgactagatattgaagaaacctgacgaaactgaaacaaagaacgattaaagactctgaaactgaaactctgaatgcagcatactggcgtctgcatctcactgtcaattctccccctgagatcagtcgccgtcatgcctgaccactcctatcttctttcgaaattcttggaactttgttttccccaacgccttggtaaggatgtctgcacactgctcctctgatcttacaaactgaagctgcacttctccattttcagcacactcccg

SEQ ID NO: 159378 - DNA, 656 bp, Zea Mays
gtcgacgaggggagtgtccgtgacggcgttccacggtggcgacacgacgttccggggatcctgctacggtagagttcaacaggacgggtcaatgagcattgtgacacgtaagagaactcaaaacactctcaagctcaactgtagttacctccgagagctctggccacagcgaaatgtctcgcggtggcgtggatgaccgatttgggggatttccgaattcctgggctacggtggatggcacgatgtggttggggttgcgttgggttcgtaacaagggggcggagcagggagagtcttcaatttaaaggaatcggctcagctactcacggatttgaacgaagttaggatcatggcgatgacaggacatttttactaaggcaagttcactgtggcacgcgatggggcaaagtcctatggcaatcactggttactctccacgaatcacgacgacgtggtaagatggcctatggcatggtacgattgaggccaccggcatcccacgacgacatcggccgctcggccacgtcctagagcaatagagcatggcagatgagctcacgccagagaccatttccacctcccttccgatctttttgcctctagcagttatccacgcgccaccgagcacgaatcataacactagcgtggatcacgac

SEQ ID NO: 159379 - DNA, 439 bp, Zea Mays
acagagttcgccggactttgccttgagcacgacgcgccaccgcccgccaagccacccgagcttcggctaccatggccagctcaccccagacacccccagtctacgccaatagttcaattagcttcgccagagacccgtgaagctccccaagccctcagacccagcagagcctcaccggagaccccgaatcaccctcgccggacttcttccgctcaccggcgaacgtggaccgagtaagtctctgcgccattctcaaattccttctgtgtaccacctctatgtcacctggtcaagcctcccaagctaaccaattggactatcacgctgtgagcaggccagaatactcgccaccgacaaactcccccacctgcgcacgtggaccggcctactccgaccatccccggagacgatccgcacatcaacgtgaccgtcacgacct

SEQ ID NO: 159380 - DNA, 568 bp, Zea Mays
gggctctgatatgcacattttttactatctatttagcgcaggggttgtgaagtttcagcctctttttcatcctatagcatagatctgggtacgattgcattgccattcaggcaattatagtctaccatcatcagtccatgattatcaggcatgcacccaaccaacccaagtagccgcgccgtcgtggatggagagacaagggtgcggttcatgaatcatgagtcctgctcctgtagtcctgtcctgtccaattccttggctcggctccttcatacggccgccgagctgacatttttctttttctttgtgccacagcccacatgggcctcacagggtggcctgtctctctattgggctaagcccgattggagcccacgaagatgaaaagccaagagaaaaacgaacaagagtacaaggagaaagtccattctactatatctaaagttctaaaccatggtcgtaatttgattttctttgccgaatcctaaaatcaggcatcttcacaaccattcaagttacctccccgttgtggtttagagtggcttttgaaggcggctgtatctttttt

SEQ ID NO: 159381 - DNA, 995 bp, Zea Mays
gcaccagctgtcgccggatctcattctgttgagccattagttcctgcattgttggagctgggggaggtggtaggggaacttgctcattttgtccgcgacgaggtctagctgccatctgaaaacagaaatcatgtcgttgttaccttgacccaataatttaagtagtgacctcatatcatgaggagaatagtgacacaacattatactgaaccaaacgaaaataatcattcattcattgcattattcatacaagtttttctggttacaacatagatccaccctacagcctagttcaaaagtcagtgccaaaagctaagcttacatggtctttcccttctcctaacatgtttaattctaacccatctaaccctgagtggcagaggcaacactggccctaggtgtagggggtactcctgagtaggtcgtgtccagactggaagctggctcaatctcctcggggtcctcctactcttcactgcatgcctccattgcgttcatgtcttggtgatgcatttctatgtgagtgttggcctcctcaagttcctcttgcacatcatggagctgattttccaggacctcaatggtgttgtcccggatttccacctggtgctccaatgcttggatgcggttgctcatctgttcaacttgtagatccttctccaccaattctgaagacaggtcgaccacgaagtcctccctatcgtcgagggtggtcttttccgtttgagcgagcccagtgaggtgcgtcatggcatcgctttgtagggcctgcaagcggtacagtgcactcatgcactggatggtgattctcccaacctggtcaggatgcatggcccacacatccttgacgtggctcactctgttgcaccacatcggatcatccctcttttcagcggggaagagtccaagtgggtgcatcatcatctccagtgggtggtatccgcagaaggtcgtcaaagcctttagtgtcgcggtctcagtggtgtcgtccgccc

SEQ ID NO: 159382 - DNA, 970 bp, Zea Mays
tgctccaatcctggaggcgataggcgtggttttatccgaagccatctgccaggggaaaagagttactaccatgcacgtgccaaatttttttcaacaagttactttattcattacacaagttcattacagcatacaactaccataagttcattacacacgagtgctatctagggtactcccaaactccttctctaaagtgtccccaaattccttgagaaggtcatcaaggctagctagggacatttccttggtgtcggacgagttccctatcctggtaggaggtagggctggaggggcttcttccttctgctcagtctggcatccttggcttctggtcttcttgcagatttttcttgcgggggcgagcttctttagcttcttgtcgtaatccatcttcagagtttggtaggcctcacaggtgttggtttcctcgccttccgctatctcgagactctcttgaagggacgccttttcccttgtaagttccctgacttgttgctccaggctttccacccgggagtttaggtgagtgcagtgggaggcaaggtcatcatattggttatcgagagtgtggaggtatccagcaatgtagaagatggtggggtcatcctcggtagggtctctccctgacagggcctgaagtcttttcctccaggcaggggtatttttgttgctgggtggaaagtagcgaaggggggtttcaaagattactctgttgtagttctgacatagttgttggagggcttttcgggcaacattttggcaagtatctgggaagcggtgtctggtgaaagtgacttggaaagaaggatggttcgggtagtttcggctttctcccaggtagactgccatagagcacttctccattccattctcgagatactccttccagacatattctggcttcttgcggatccccatgcgaagcgcacaacttcgcaacaggtgtgggaatccctccacctctgag

SEQ ID NO: 159383 - DNA, 1036 bp, Zea Mays
gggctgaaactatgtgcaggtgatagtccatccatcaatgtaacactcatgtgcttctttttggagctaggcatccttgtgatgtttcctttttggaatacttggcaattcatcgactgacagtgcattaggtattcgagaatctgctattagttgttcttggggagaccattgactttttatgccagaaaataaaatccggttcttctgttttgtagtttcactttcgtttgtactgatctggcgacaaggaattccatagtactcacaacaataacatgttccagggtcacttgtctgttggtttggttgtgcatccttttgtgtcttcaatgtctgttcatcaactattttatttagagtgttgttttgacttaccaacacaccacattctttgcatttagtgacatcacttgtatttgacattccaaggtctaacatctgtatgagtatggaagaatggaaggacgaaagggttgagcaaagatagattatagagagcagagaaaacccatctatctaaggttttacctagctaactgatgtcattgtggacaaaagtcacacaatacaccaacaattatttcaaagaagcaaatcaaacatgaccacaaaggacaatgaactcaagcataccagcacaacataatccaattctactcattcaacaaaaggtgagacaaggtttgaaataagaaagattttataatatcaaggagtcgggtaagaattatcaaggagttagacaagacatatttatcggtggccaatagtgaaataagataaccatgaactattaaagtgaggataaatgatacaaccaaggatatgaagtgagttagggagaaagcattatcaaggagtagagagccaaaggtttcatacatcaaggtagatattgcgcaagggtggcaatacaatggcaagaaaacaaaagtataagtcaagggttttatagcaatattatggattagaaaaccactataatataatgtcgtctttaccgatctagtcgaaaatcttaatactaaagaac

SEQ ID NO: 159384 - DNA, 491 bp, Zea Mays
ccggccgagatacattgagacagccacagtgccgaagcttggtgaagggacatctttcactgccgaagcagagcaacctgctcccaccatccctggggaagacctgactaaattgctgaaggttcctatagccggtctagccgaaacaccaaaacacgatgccgaaaccaaagagaaggcggccaaagagccagagccagagctgccaaaattcttgagcccgccagcagaggcagaattgccgaaggttgcaaaggctcccgcaacaactcccaagaggagaagaatggctagcgtgctagacgctgtcatggagacgacaagggcattgactcctgctcctgcgaaaaaggttgtcgaaactgttacggctcgtgctgaaaccgaagttgggccctcagtgccgccgaggcagagcctggtgcaactgagcagagagctgagcaagaatctctagatactggcatggctctggagaagaaggatgcgcc

SEQ ID NO: 159385 - DNA, 420 bp, Zea Mays
tgcttgcatctaatacctgcttgcatattagtcgttgcccaaactaaacggggtctaagccagccttaattaatggcacattgtgcctacacgtgcatacgtagcgagaaatcctgtagcatagctatgtccgcctccattgctggccagtgcgcagtggccagcgccacctctcgatctccgccttcggatcttctctgtttggcaccgattgccgctaccgctccttggacttgacgttgtcgtatctccgtctccatttcctctacctcccttctctccatgcgaacacatctcctgcaccagtgggagtgtgacattcacttacagtggggggagggtgtggcattcacttatgcttatttgttctttcacaatgttagaccgtctccaacaatatgctttaaaatagtgtcgtaa

SEQ ID NO: 159386 - DNA, 569 bp, Zea Mays
ggggtctgtcccaaactacagttctgtattgaagaacactttgatcacacctgttatgtactgccatcaacaggctttgatattgtattgggagtccaatggttgcgttctcttgggcccattctatggaattttggcctcactatgaccatctggcggaatggctatacggtgatttggcatggtattggtacaacatcagcttcctgtgtagaacagtcccgggatcatgaactcttgccgctctatttacttcctttgatgatatcttttaagatccacaaaggttgccccccctcccccctcggcgacatgatcatcacatcaggctgctacccggatcaacacctataccagtaagaccttaccgctaccctcaacttttgaaggatgagattgagtgtcaatgcgaagatatgttgaagcaggccattatctgggagtgtacttcgaccttctcctccccagtgttttacttgtgaagaaatcagatggctcatgtcgcttttgcgtcgactatcgggagttaaatgccctcacaatcaaggacaaatttccgattcccgttg

SEQ ID NO: 159387 - DNA, 645 bp, Zea Mays
ggaattttctatggatcccggactgctgacgctattattagagaatccagggtccaatacgtaaagaaaaggactaaactgcaattacttttatactgttgtggagcgcgggtcgatttagtaaaatcgtaggggttctttagctaaacggcaacggcgaagaggtaccgaggacctagagccgtccgatcgcccatcaaccgacgggattagatcccccctaaagtgaacaggaatcacccacaacccttggatgcggcatccacggttccagacgatctcaaaccccatccactcgatcaggcgccaaaggcttggattcaatacgcgaaggggtaaatgttacttttaatcccagccatccatctcaatcctacggccagggacctgtcttcccccgactggactcgagccgaggcagcgcggaagtgcccagggcggcggcgccatggccgcacaccttgatctggcgtcacgaggctctgctactgttaatccggggtgcaacacaaaggaaaaggcaaagtaaacctcgtgaaggtaatctcaccgcagatcatcatctgtaggttcaagtcatggtggcgcagcttcatggtgattttcgaatttcagcgatcgattctggtggcttcgatcaaatcc

SEQ ID NO: 159388 - DNA, 489 bp, Zea Mays
ggcaatctaactgacactactaatgttcatcgagaatcagtggcagacccaatagcgcaccccttacacgcacctagtctttttttatcgaaaaggcaggaggtctgccaagatatattgataagaagaataacaagaggtttaagtcaatacagtgaccgaagcactaggcaaaggtccaatctgaagagaagtaaacagaaataaaaaacagaccccactaaatagttgttaaagggtaactaggtgcttggcccctgccaaattccaggctgctgcctcactcttgattttggcaatgatttgttggcagctcgagaatctgcgatcaaagattctcgcatttcgttctcgccaaatctcccagtttacaaggatcaatagtgatctgatgccttttctattacatcccggcagaaaagccagcttttcccaccaatgccccatcgaggggggtcgcccccagttagacggcttcaagccctcaac

SEQ ID NO: 159389 - DNA, 790 bp, Zea Mays
ctttgtggtttccataacagcgtctagcacgctggccattctcctcctcttgggagttgtggcgggagcctttgtcaccttcggcagttctgcctctaccggtgggctcagaatttctggcgacgttactgttttttccaactctagccctttgacagtaccatctttggcttcagctgacccggctataggcaccttcggcactacagtcgatccttcagcgctctgaacggcgggagcaacttgtttcgcttcggcagcggaagaggtcccttcaccaaattcaggcactatagacgtttcaatatatcatggccggtgggtcaaaaactacattttcttgtccttcgacacaacagtgatggccgaagcggcacttttcctcttttttccttgccttcgcgaggggtagcaataatcagggtatatgaaaccaattgcatcgaaaaccctgttcaatcttttcttaccccgacctctagaggctgaggataaaacatcatctttggctttgctatatgccccaagtaactcgtcgctcgtagcctcaatacattttagccagtcgtcatttggttcgtcaaaccagtctctgtatctgaaggtatatttcaaacgaattaatcgaccttcactggacccggcagcggtctccttcggcgtctcccagttatccacaagtggccataccctataggctatgtgctcttggatcaggtctcttgtgccaatgaaagcacagacattgctgaaagccttttggcatgcttcggcatcattttcaatcgcc

SEQ ID NO: 159390 - DNA, 453 bp, Zea Mays
caaatgcgtcttcccgaggcttctgcacgtttggcatccttttcagcaagaataaaagatgaagcctctcatactcaactaaactcttccaaagaagtgtcagtaatagcagaatgggtggccactacagctgtaaaagctgcagatgctgtcctttcaaactgttcatcaatttatgagaagaggtgtctactgcagcttctttcagcagtggattttgctgatggtggcacttcatcatcttactttagccgaagatattggaagattaatctgtctgaaccatctttgtgtaaagatactgatgtgtacaactggaatgatttgatggatgatgcttctcttttaacatcattagaaaaggacggtcaatgggagcaagctcgaacttgggcaagacatctggagtcaagtggcatagcttgggaatctactcttgatcatgtcactgaa

SEQ ID NO: 159391 - DNA, 367 bp, Zea Mays
taacatctcagtagaggcaatgatgccgcccatgaggattaattcggttggtggcaaagtgcaagaagataaattatgctcaaatataagggtggaaataagggggatagggttccccggcgacctaatagtaatagacacccctgggttagatgtcatcctagggatgaattggttaatgaaatatgaagcgaatgtcagctgtgacaagaggaccgtaacattgaagtccccgtccggagaggaggtagtggctgagctaaagatgcctaaatcagcggagggagtttgtcaccagatttcagttgatagtaaggaggccaacccgctcgaggctatcaaggttgtgtcggactttctggatgtg

SEQ ID NO: 159392 - DNA, 383 bp, Zea Mays
aaaaaatggatactgctgcttgcgtgctctgactcgtcgtcgactgtgtccatggatactagccggggaacctgccgggcggatctcggagacctcctgtaccacgcggaggaaggattcggcctggcgtcaccgcgtgctgtcatcgaactgctcactccctcaacgacgtcgtcggccaagtccactccatcgacgggagactggggtcccgcacggtgctgtgtgctcggttctctgctgctcgaccaccggtaaatttccgtccatgttgttcttgcttctcctctcattgtagtgcgtgcactggggttgttgcttgtcagcgcgtattccagagatcgtagcagccatctttgcatctctccgcggctggggccagg

SEQ ID NO: 159393 - DNA, 796 bp, Zea Mays
catggatgtcgggttagttctttctaaacgcaggggttcttttgcaatttggcgctgcccaaggggtaagctttaatcctggccgtttgatggctagtcaagcacctagattatattaggttgacaccaaaccagtacgccaccctggacacccgatctaacatcaacgttcatgatttaaaatgctgagatggaatcccatacgcccaatctcgatccaacagcatagcctcaatctaatctcgtccatccaacgacgaatggatggctcccatctctcttcttcccctggctgccagacgcggcggcgccatgtgccacacggcggagcacgccacaaccacactcccagatgcccccggtgccccaaatcctttggccaataggtgatacaccatcagaaggacaagacggaggatatggaggtgatcttaccgatccccgggggggcaatggtcctgcccacgacgtgatgtggcatggcggtagtgactaagctctggtgagcaattgccatggattcatgccctctttcttcagattggtagtcgttgctacttcaacacgcccaagcaacaaaccctagtcatctgctgagggtctatcgacggaggaagcgcgttcccccaacgacggccctccatcctacgcccagaaatgatgccacccacctcagcttcaccaatcatacgatttgttcacggctatggaaagaggggggggcaggacaccatttattggcacaagaactcccagtcaacacccgcgctcgatttctgcggattctgttgctcag

SEQ ID NO: 159394 - DNA, 885 bp, Zea Mays
cacaatccttgctttaaaacactgtacttttaaccttatgtttaacaaggccgttgagcctcgtagggggcatgctgatttagtgtttaccaaaaagatcttatgataagtatgttgacaaataagttcaaaggtaatacctcgacaatagccaacccatgatatcgatctgcctttccatgatgggtcgctaagtctagcttggcccgcccttccactgctccactacttagtcacaaacaaatggtctgcactggtttcctgatatgtttcctatagccttcaaaaggttttcagaaataatgttgaaagactatgactaagtataaagcaaggatggcctctgagaaggagacattttaccacttcctaagatcgtgtgtagaaaaatctatgccaccacaatgaactatgctctttggtccgagggtttttagcgtcgagggccgaggggactcctttcggtcccttttggtactaagagccctagagcattgcggatctcgcacttcagccctaggaattttggtgcctaggggccaaggggtcactccttcacggcccttgtgtttctaaaggacctagatacacaatagactgtgtaccttagcctcagagctttgggcacccagggatcataggggccttcttctgggacatactcctaggaagcctaactctatttgcacaccatcagatcttccaacacatgatctataaaccaatgtgtcagagttggctcatgtgtcagactgtcggcactagccattgtcgacccttggggcacgtctatgtagcgtatagtcctatgctagttgtcagactagtccaacaccttgttttcctctctagaacctttttgatgaccgccaaactccatcttcg

SEQ ID NO: 159395 - DNA, 584 bp, Zea Mays
aggggaacacaattcaactcaaaattctggatgagccttcagcaagctatgggcaccaagctagacttcagcaccgcttatcaccctcagtcagatggtcagacagaaagggtcaacaaagtcctcgaggatttgttgagagcctgtgtgttaacttttgataggaattgggagtccagtttaccgtatgcagagttctcgtatatcaatagctaccaggccagtatcaagatgtcaccgttcgaagccttgtatggacgaaagtgccagacccctctgatgtggtccaacgtaggggaaaagacactggaagggcctgccttcgttaaggaggcagaagagaaagtttccctgatcaacaaaagattacttgaagctcagagtcggcaaaagagttacacagacaacaggcggagaggactcaggttcgaggaaggagacttcgtctatctcaaggtctccccaatgtgcggagtcaaaagatttcaagtgaaagggaaactagctccgcgattcatcggcccctatcttatcattggcagaataggacccgcagcctaccaccttgaattgccagaatccat

SEQ ID NO: 159396 - DNA, 622 bp, Zea Mays
ctaggataaagtgggctactttagttagcctgtccacaatcacccatataggcactgattggtttggtgcacagactgaagctggctcacgcaagtctggcccgttaaatacagcaaacctgagcttctccacgcatgcagctaaagggtcttttttaagcctgttctgcacccgcggatgcaatccacgccctccgtattcacgctaccaaacacaagctggtgcttggtcaaatgcgcatagacaacctagctaagcacccgcggacaaccaaacatgccaagatgtgtggggtagacccacaatgaagtctatgccaatctcttcccacttccactcaggtatcttaagcgggtgcagcaaaccagtaggtctctgatgttcagcttttaacctctggcaaacatcacatagttccacatgcgaagcaacatcattctttagtccataccaccaatacttctgcttcaggtccaggtacatcttggtgctaccagggtgaatagagtaatcagagtcatgggcttcctttaatatagtatcacagaggctgtcaatctcaagaacacatatctggttcttgaaccatatcgtacattgctcatcctccgtgaaatctgg

SEQ ID NO: 159397 - DNA, 340 bp, Zea Mays
cgggggtgggggcgggcggagggatcatgagctagagggggagatcgtggagggagtgggcagtttggagggagatcgtgggggattcctttgcgcgagcgtctgggagtgagcgggtgctcctgagatggcctagatcaacgatgaacaggagagcatgggacggagacggcgctagcaggaagagctagaggccaagggctcgctgggcagagaaaccaagagagactgaccctaaagccaagctgggtcagggtaagaagcgtgcggcctcctggtagctacttgggctgcaccaaagaaacacagcccacgtgacctatgtcgtcgtcacggcttg

SEQ ID NO: 159398 - DNA, 847 bp, Zea Mays
ataccctgtgctgcctgtataagccacacctattagtacaatctgcacatgctgcccaaatgcaagctgctcctctttccgcgtcctttgatctcactttccctttttttttttgcttgcttaacaaaggcaaaggcgaaagcagatgcagcaaaagccattttatggcacgtaatggatggcatcatagctagcactagcagcaacctccacagtcattactccccagtccccacagccagtcatcagtccccccctggtcctgtgcttgtgctgttgcttcactactccctggccggccggctgtcgtctgggctgctctcaaagttcctgcactgtagtacgtagtgtaccctctacaagggccataactcccatgtctcactactcccacaacacagccaatgcaagagatcgacctgcagcggcagcgccatggcctactacaacgtcctacgataacggatcctccttgatgggtctcatcgtcgtctactcccagtgcctgtgcctctgaaaaactgcgaacctgcaatgcaacgacagagagagagagatagagagagaggctcagagggcaggtgttgtttatgacttatgagcgaagaagcaggcagctggtcgggtcagggcaggcccactgctgcaagcctgcaactggctagtgcagtgtagtcgtgtagagcgagcgccgtagccatgcataggcagagtcaagctcttgcctcttgttgaattcttcggcatgcactctccatcaggctccagcgcccttcatcaagttgctgcatgcattgcataggccggggcacagggtgtgggggaaagagtaagatatgtgtctcag

SEQ ID NO: 159399 - DNA, 425 bp, Zea Mays
ctggaattggctagtatttaatagttaaagaaaaaaataataatagatgatgaataaggttgaataataatattttactaggtaggtgtctgtccgttgcgacggcacataaattgttgagggagatctacggctactcgtctaggtcgatgacagactatcattgttgctaggcaccatcatccggataaggataaaagtatccaggatatgaatgagcgtgaagtactacacaaaaccgaacaggtgcttggtggctctcgtcttgcgaaacacaatggagatcctcttgcatggatgacaaagataacattaaaaaaactacaagattgattaagctaaagtaaatgcttaacatccaaaaacaggtattgtagtgtggtgcactttaacacgcaaacgctcccactgctcacctccgcctg

SEQ ID NO: 159400 - DNA, 493 bp, Zea Mays
atactgatgtgggtgagctggtgcgtgcagccaaagcatcatacgtcggtacgaaagggcaatgatagggttcaggcttgcaaatgctgcaactgcttgcaagcggataataatctctcgattcattcacatccagatagatgatccaaggcaacactttccagtaccaatactttaggcctggcctgaacatgcaccaccatgcatctgacgagcagcaagctagctagctagtggcagctagtagtactcccgcgcgcgcgcataattaattaaggcaccaaacccttttagtttgtctctaattgcatgcgtctgttctgtgacatctttaaaccaagttgctgtttgctttaacgtacgtgtctgcaccttttccccccttgataaagagagcaagcaagcaagcaggcaggcatgcatgccagcattattcttccgtcgtgcaggtactctggccaaacaaagtgctctttcaaagcaagtacgtacg

SEQ ID NO: 159401 - DNA, 849 bp, Zea Mays
tatgttggcaccgctagagaggagactcagatgctcattccatcctcccttctggatagagtgtgtgtggcacaacagcaggatcgtttgttgcaggaagctcgaaagagggttggcaatggtaaacctcgagagttcaccattgatgagaatgatttggttcgtttcagaggtcgtctctgtgtgccacagaaatcagaggtgaagatggatatattgagagaagctcataaaacgccttacaccgttcaccttggtgaaaccaagatgtacagggatttgaaggaaaattgtggtggaagaggatgaaggttgatgtttctaagtatgtggcatcctgtgggttgtgccagcgcgtgaaggctgagcataagaggcctgcgggtttattaaagccatttgaaattccagaatggaagtgggagcatatcaccatggatttcgtggttggcttaccccgttctcctcgaggcagggatgctatatgggttgtagtggatcgcctaactaagtctgagcactttattccaatgaagaccacaaattcagcttcagagttggtccccttgtatatgaaagaggtaataaggctgcttggtgtgcctaagtccactgtttcatatcgggactccaaatttatatccaaattttgggagagtcttcacagtgctttgggtaccaagctttctcttagtgttgcttttcaccctcagactgatggtcagtcagagaagactatccaaactttggaagacatgctgcgtgcttgtgttctttcatggaagggtagctgggaggatcatctcgccttggctgagttcgcttataacaacaactatcaggctagta

SEQ ID NO: 159402 - DNA, 418 bp, Zea Mays
gttcttcatagcctcctcgtggaattgcactggttcaatgtctcggttggacaccatggtgcccagccccgacgggctcgctggagtaatcgggcggcgccgccttgggtcttagcgtgggcgatgcgaagaagaacgcgtcgttaccgttgatctcaggatgatcggtccggattaggttagaataccacttgattggtggccgttgatctccctgcgatcggctcggatcacatggccgaggtaacgtttcactcggtctcatcctatgcgtaggatctggatcgtgtggttaatcgtgtgcgccggtttataaagcgcccaaatccattatgcaccgttggatctaatctgtgcggttcgcattcacctctaccccattggtcgggaccttttgctaaagagcccctaatcttcg

SEQ ID NO: 159403 - DNA, 386 bp, Zea Mays
ggtggcgaagcatagtgttggtgagaggtcgcgaagtggcaggcgccgtcagatagggttggagcgaactcgtcttcgtgtagatcggagtaatcaacgcgacttgttgtcttcgtcgtttgggacgagtattggtgagggggacctatggaatttgtttgagggtgaggaattgaaaatgatgttgtttaattatcgggaggcgggcattattccgaaggttgagccgatgtagaatgtgtggtgccctcgcttgtcgtgcggtagtagagggcgcaattgtatgtctttgtgcggtgggtctggtgacccttcgctgtgtgtatgtaatctgtgacttgtattgtaatgtggcatgttgccattcgcttggcagtgtgatgttg

SEQ ID NO: 159404 - DNA, 786 bp, Zea Mays
ttttaatttgagcataagttcacagcactatttaaattcaaaattgaattttaaataaagagaaagggaataaagaaagaaagaaaagaaaagaaaaggaaccacttgcactcacgttggaccgaaactcagcccaagccacttgatcctgtgcgcctctccatctctgctgggccaaaatgaccccagacggcctggtagcactccctcagtctctccacattgctgacggctgggacccgcttgtcaggagtcgtcttccccaacgaactctccgcattttggggcgacagacggcgccagcgctgctcccaccgcgatttcctccgatctggtagccccgtccgaggtataaacgccccagcgcgccgccatccttggggtctatccatccgcctagtcaaccagggttcatccgctgtaaagataagtcgggagagagagagagagcagaagcaccgccgccggggattctcgacctgggcatcgctctggtctcggcttgcggttgcggatgctcgcttgtgtcgtccacacgtctccatgtaccttcccggagaggatgtcctctgtgggtggactaattgcttgccggagcaatactcggccgcggatttgcagctcgctgtggaccgttcccaccactacacccttgctggtaagaccatctccgcatcctctgcgtcgtccttctcgttgcgatcgcattcgtgggttagtgttttaggcggcgggccatcggccgaggcctcgccggcggccagcgccatcgtgggacgcctgcgc

SEQ ID NO: 159405 - DNA, 299 bp, Zea Mays
gcaagaggaagaggttcataagctttctctgaatgcaattagtggggatgatactactgaatgtatcaggataagggccttgattcagaactaggtgatgcttttattggttgatttagagagttctactagttttattagctaagctatggtgtgataatatgggtctaaagattgaggagtgtagtcaagttctagtgaagatagctaatggggaagtgatgagaagtggaagcataattagagaagttaggtggtgggcaggaggccacacttttgtctcttcgatgagagtgttg

SEQ ID NO: 159406 - DNA, 604 bp, Zea Mays
tgggattcgtgctcgtcggcagttgccttatgctcactacttgtgccacatctttgcgcagctgattcagccccctcgatttcagagcacccttgaggcctcacgccttgtttttggatcctaccgtcctgcgcctgagattccggtgccagcttctacttctgtgtttgactctcaggccgaggatgcagctcttcgacagtttgacactcagggtacagcagatgatgatgatgatgatgatgattttggggttcctcctccgcctccgcctcctatgcctccacgctcacatgatcatgaggctgggagttctagtgctgcccctgctcctcctcagactatggaccctgctcttgcttcgattctggccaacctggcggccgagcaggcccggttatccgagaggatgctctcgatgtttcagaacatgcaggacaggcaggatgcccttcagcagcagctccttcaggatcgggctgagactagggcattcatggctcttatgcttcagcattctagtatctcagtacctccggttcagtctgctccacctcctccgcttcacgctccagtggtgccatcgattttgtcaggaccccct

SEQ ID NO: 159407 - DNA, 638 bp, Zea Mays
gaaagttgagagtagatgcaccttagagagcgttttatttttattttagtagtagaggatagttcctgtgagttagagtgagtcctaattttgccttcggagttccagatttctctttggagtcttggatatatctcttctatatcatcgactatcaagtgaagtccagttatcttatgttctactacaagtactacctttggttctactttaagttttacacttaagtattacttaactttacctttacttattggttattgtcgcggtagtctaggatcactttaactcaaggcttaggattatgttagtatttgtttatcaagtctgatttgccttgccggtgttataagccactcctagttctggtcactaggcaggttagctctaaccatcttatccaggagaagctttagtgttcaagctttgcttgatcattgttataacatgccatcctattcacatagctattgttggtagcctcgcttggtgacagctagagagtggcctatgtatcccgaccttattgtctggtaggcatgtagatgatggttggcttcatctttcccaaaaatttgcttgactcaagttatttcttatatttgataagcaattgattaaccacaaataatcctttg

SEQ ID NO: 159408 - DNA, 966 bp, Zea Mays
ctctactgaccacaagtcttctggtgcttggatcaaatagtctatacccttttgtacctgacttgtacccaatgaacaccattcgcttggatctgtctgataatttgtttatgcctggaccgagttgtttcacatgtgctagatagccaaacacccttagatgattcaccttgggttttttccatgccaagcctcaaaaggagttctactttcgagagcttttgttggtgatctattcaatagatacactgcagttctgactgcctcgccccagaaaatcatgggaaccttcattgctttcagtaaacacctggacatctcaaccacagattgattcctcctctccactactccattctgctatggtgagtaaggagtggtagtgtagtgctttatgccattttggttacagaaaactgtgaagaggtttgaagtgaactcacctcctctatctgtccttagccctttcagccgcttaattaccagactcagtttcttctctcagctttatgtttttgaagaacccaagcacctgatcttttgtctgaagcatttccacccacatatatctgctatagtcatctaccacaagtagaaaataagatgccccctatgcttttcggagtgatctgcccacataaatctgcatgtactaattctagacacctttcagctctgaaatttgaagcttgaggaaaaggttttctgtgttgttttccaaggacacaaccatcacacaccttttctagtctcttcactgttggcattccctctaccaaacttctaccacttaaatcatgtaaagccctgaaatttaggtgaccaaatctggcatgccattaccagcctacttcttcagagttagtcagcagacagattggtgatgtcaggccaaatctagcaatgtataaccagttaccagccctttcagcaacgattaatagtttccattcttgatcataaaca

SEQ ID NO: 159409 - DNA, 353 bp, Zea Mays
aatcagttctctggttgctgttcttctggggtgtccgttgattgcgccttgggcagttgttagcatagtggccaagttcgccacacttgaaatagccattaggttggactggggtgtttgtgttgttgtttttggccgatgtgttcacgacgcttccttgatgattctgttgttgaccactagacctttgaccggtctgagtgttgttcctctgttgggtctgatattggttgcttctctgaccttgttgtccaaagcgttgcatttgatagttgttcccactctgattccgagagcgaaactgagaaccttgagttatcctcgcgagtaatcctgctagacagtccttggaa

SEQ ID NO: 159410 - DNA, 672 bp, Zea Mays
gtcagattaaagctttttttagtaaggcaatcattaggaggtctgatgcttgacaatggtggagctgcggtgcatgtcttgtcggcccgtgcgagagagaaaactgaaggcgtcttctttcatgtcgctggaggttctgaatgatggatggatggatacctctgcaatagaagagatttagcacaaattacgaaacaaatatgagacggagcaaacgtggacagaaaacgaaaaaaaaaggagagagatggattgatgtcggagatggtgtgtctttgtaccaaagtgccttcattttatatacatggcgaagatatgtctacgtatgacaacttcatccattgtccatcagatgactacactcctgctgaatggacaaccagcgcacaagatcaaagcattgtcgcgaaccgcaacagggaggccttccactctctcgtctcgtatataacattgggcattaccaaggcgaatagcgggagcctgctgctgccgctcgccgcgcgcccagaaccaagtgtcgatgttgtcctctgcatccggctgggctgaccccagaagacataccaaccatccagcgcctgtttgaggaagcttaggggcagacctgaaaaatgagtgcctgctgctgctgccgctcgaattctaatcagcgattccaactccactcga

SEQ ID NO: 159411 - DNA, 489 bp, Zea Mays
tgaaaattaaaataaaaataaataaaagaaacactcctgctggtgcctgggccgaatctggcctcggcccaccgaccatcccgcgcttggtcagcccaactgctttccccgcgcctgcctcacgcgctgactggtgggccccaacgggtggtctcctgtccccgcgccgcgctcgcatcacgtgctgacaaacctcgccccacctagcagcctccctgcccattctccttgttgcgcgtattgccttggtggtcaccggccggtgggccctcgtggtcagatccttccccaactcaccgcatatcctgctcggtctcacagaagcagcagtcaccgcctccagctcgccacggatctcgcgggtcgttgcaaccgaaccgcgcaatgacctctccgaaccaccgtgattatgtgccaacctcctaccgacaactgtggcacggactcgtcccctccgacacaacgaacacacccgagatccgtgcttga

SEQ ID NO: 159412 - DNA, 819 bp, Zea Mays
tgataacctgacctcagatctatctttgaaaacacgatggctcctctcaactggtcgaacagatcctctattctgggtaaggggtacttgttcttgattgtgacctcattcagagctcgataatcgatacacatccttctggtgccatctttcttctccacaaataggacaggggcggcccaaggtgaggtgcttggccggatgtatcctttctctgatagctcatcaatctgcttcttgagctcaaccaactctggtctagatactctataagctctcttaaagatgggggcagttcaaggaagaagctctatggcaaactcaactttccgctctggtggcatacctggtaagtcctttgggaacatgtctgggaactcagacaccaccttgataatctcaagtgggtctgcctcactgctatcaacagccatctgataacaacttcctttctttggctcaggcgggactaactcggtcaccacttcctctcctagtggggacatcaacttgattgtcctcttatcacaactgataactgcccgatacttgtctagccaattcatccctaggatgacatctattcgctgagtacccattactatgaggttagcaagaaacgctatcccccttatttccacacttacattcaagcaaatgctatcggctcgaattctaccaccgactgagtcaatttgaatgggggttgacatggtagttattggaagattatgtgcttctacccatgatgcagtaatgaatgaatgtgttgctccagtatcaaataacacttctgcaatatgggagtcgactggaaac

SEQ ID NO: 159413 - DNA, 639 bp, Zea Mays
ccaattgctcaccggagcaacgatgaccgtggaggacagcacatcattggaataccggtatgagtctcacccaaacattcgtaattgcttcctcgtcgtgtagacctaagccgagcgatgttcgagcgcgtacacttgaggtttgcgtggcgccggcgatcgtccgccgcggggagaaaatcgcgccgccgtcgggtcaccagaggtgggggatcaggcacgctgccgtggatctggccacggacggccccgatctaaccgcgcataccccttcgctcgatagaatttgggccgtagatatgagatcaagcgaacaggatttgatcatagtcattttttaatctggaccgacgatctttaatccggtggtcctcatggcgtaccggttcatttttaatgaagtctaatcctggccgcggaatttagatctgacggctaatctcgatccataccccttcgtggcgaccattttgctaaagaggcctccgagaattagctaatcaacccgcggtcctctctggtaggaatctgagtctgctaaagttttatagttttgcccctgtcttttatagaaatggtggcgcagtccagggaataaagaaattagggaaaaggagtttagaaattgattttgggtgt

SEQ ID NO: 159414 - DNA, 690 bp, Zea Mays
cagggttctgcttgccgaggttggcttgttgaaggagaaaggtctgactcctgaagttgtggtcgccgattttgtttttaagaatattcagccactgaaggacagagcgtacccagcttatctgtatcgtggtatcactgattcaacccgggttaccaacagaaggattcctgctgtggatctggtaagccggtttgagatgattcttagaggcaaggtgtcgaatatcggtgctcctgttgcgtattctgcctggaatctgcctccttccaagaatttcatcagtttcgtgtcaaatcctcctgctggtgacagtggtttgggttttagagtactaccctcacccgaagaggttgaggctttggttgtttcgcttggtgatatccccaatgatgagaggtaggttcattttgagatgcctataaacccgagcgacgcagaaataagtgctatgctggatatgttggctgaggattcctctgattcggtccctgctgaaacactagctgttgcaactatcccagagcctggaaagactttggacattcaaagatctgatagcactcgcccgaaacatcctcgccaagccagtcatccaacttctcttgctgaggggaagaaaaagaaaaagagacggcttcggcgagtgtcatgcttgaatcaggatgccggcccttctgctcctgctgc

SEQ ID NO: 159415 - DNA, 692 bp, Zea Mays
gcaacacttaagttgacataaccacaattagaggtatttattgcatgcacagatagaattaacacttagttctgattgatttactactcggttaatcatcgtttagttacgtggattaattaacgtgagcgattctagacgaaatagtttattgccgcgcgacatggcacgcaacacactaaacaaggtgcgcggaacggcgtacgcgacagcgcgcgtcgacacgtgtggacgacacgcacgatgtgtgcgaacggcacgcgctgacttaaacgtgccacgcgaacagtacaggcgggtagtgtgcggacaacacgcgacatgagtgagcgacgcgtgatgcgtgaagcagaatgcgaacatgcgagaatcactaactaaatgttgtttttatactaaaaataaattagttaaaatatgtgaaacaatgaaacaatattattaacacgtcgttacaaatctaaaacaactggaacgcgacgaaatggatctacgacgtaaaatatattcaatatttactagttcacgtatttaagatgaggtagcgtattttagttggctaagccgaaaccacaaggagtaccacaaaatcgtggctgcaaccaatcctgcacaacactttttctacgtgagtggtgagccaattttattaaagcgcgcgaatcgcgtctcgctcgaacggcgaggcgaga

SEQ ID NO: 159416 - DNA, 702 bp, Zea Mays
ggtcagatgaacatgcttgatgggctgatcggtcggcccaagccagaggataaggacgaggagtccggagatgcaggagtggctattccttaactgattctcgcgtatgcagaggagataaactaacagagtcgcctgcgcgcatatgcgtcagagtcggttccgtgaatctaggcaaggcaatagtaatctattcaacctcatacaattatataaccctaacctcgtcggatatataagtcgggttagggacccctacaaacgattggatccccggttatgcataggtagacctcggatatcaaatctgaaagcacaaactagatcattcccatctcagcagcgcataggacgtagtgtgttacgcatctgagcggcccaaacctgtataaatcttcatgtttcatcgcgctttgcgtggaccatcgagctaatcgttgatcttgccaaccacaaaagcattatgtggtatatctcgtagtgtgttgtcgatgctaaatactgacatgggcgcctcgccatcacttgggagccttcgtacgagagcgaggggaactacgagcgagggagaatctgacggggaaacctgagagggaggggttacgaagaggttatggttacggaggacgtaggagttacgtggtttctcctcgcggggacacgagggcgaaatgctacgaatgaggttattctttcccaccg

SEQ ID NO: 159417 - DNA, 934 bp, Zea Mays
acgaggtgttggtaaacctccattcttcgatgggacaaactatccatattggaagattcacatgtctgcgtatctttagagcatcagctacagagtatgggagatttgccttgatcctacttttgaggtccagggtgctcgaatcatgcctcttaagatagagtttcatgattcaaacaacaaggctcgaaacgctttgttctcatgtctcccacttgctgagtttgagcgacttggacatttaggtatgacccacgagatctagtccacccttgagaaattccatgagggcaatgatcatgtaaagaccagactctttgagacgtattagtgagggtacgagaagtttgtctagttggctggagagacgatcgacaccatgttctcccaattctagtcaattgtgaaccagatgcgtgcaaacaaggtgcagctaccctatgatgatcatgagagagtgctcaagctaattcatgctttggattggagggtttgggaggtgaatgtctcggtgactatcgagtcaccaactatgagactctcaccgtgggcgagctgttcaacaagctcaagtccaccaagattgaccactagacctgggccaagattgagaaccctagtgcacccaccttggtcttggtctctagagttggttatttctctaacccctcacttgctatgttttctttgtcttctttgttgaccatcatagaggagcagatggagagcctcgaggatgaggagctagcacgtgtagctagccagttcacatagtttcacaacaactaccagaacatgtagcgtggtgggtctagggatggatgctacaactactgcaatctcgaccacttcatcgctagtttccccaagaagggcaagcaggagtacacctctgacaagcacaagtccagggggaggctcgacagggaggcgc

SEQ ID NO: 159418 - DNA, 311 bp, Zea Mays
aagggagatagcagagtatgttgtcagatgcgataattgtcgaaggatcaaggcagagcatcccacaggtttgttgtagccgttgcagattcctcaattgaaatgggatgagattgggatggactttatagttggtctgccccgcactcgagctggttatgactccatctgggtagtagtggaccgtttaacaaaggtggcccatttcataccagtcaagaccacctataacagtgcggtgttcacagaactgtacatgtctcagattgtgtgcttgcatggcgttctaaagaagatagtgtcagacagag

SEQ ID NO: 159419 - DNA, 591 bp, Zea Mays
tgagtgagacgatatgatcccggccgagtgacttctgctactatgaatggtccttcccataagggtgacaacttgtgccatccctcccccgttagaattcggcggaggacgagatctcccactgaaaaggatcgtcgtcgtacgaccttgtcgtgatagcgtctcagagtctgctggtatcgtgctgattgaattactgcgctcaaccgttcttcttcgagtacatcaatgtcctccagcctagtagcttcggcttccgctatgctttcgaagaccaaccttggtgccccaaacttgagattagcgggtaatactgcctctgacccatagaccatgaagaaaggagtgtttccatgcagagctcggctaggttgggttcttaggctccaaacgacgtagggcaattcccttatccactttcctgcgaacttttcatttttatcgaagacctttttcctgagtgcctccaatatcatcccgttagctcgttcaacctgcccgttggctctcgggtgtgctatcgaagcatacttgatctgaatgcttttttgctcacagaaatcgaagaattctgaacttgtgaagttggat

SEQ ID NO: 159420 - DNA, 494 bp, Zea Mays
gccaatccacggttcccacagacccagccctttgtctaatcctgactgcccatcgaatcggatggccgaaggcgcgtcttcaacctccaaccagaccccggtcccagttccctcatcaccgcacggagtcgccgaccacagaggggaaaacaggtaacgcgctatgaagagcatctcaccaagattggaggcagtgggacagcttgtcttcgttgccgagcgattttacggcgtcggtggtgagaacgtccccagaaccacgcccgcgattggcttccgtgcacacggtgtgccgagaacacgaagtaggcgctacagtaatccccgcgacaatactcccgcctacgcttcttttcttctctatttctctatctgctacctgcgacaagcacccggtgcttcattggcgcggcttagggttggctttcgttgtgggcaagggatgcgaggtgcacacataaatacccaatggtcagggaagatttggtccctac

SEQ ID NO: 159421 - DNA, 554 bp, Zea Mays
gctttttcaagacctcgagaagaaaggcccacgataccgagtcaaaagcctttgaaatgtcaagcttgagaaggatacgagcctgcttctgacaatgtaagaatctggtcgtctgctggactagcatgaagttgtcaagaataaaccgttttttaataaaagcggtttgattgggggaaaccatattttgcagccggtctgctaacctgttagccaacaatttagttaccactttcgcgaaactatgaaccagacttattgggcgaaagtctctcacactagtggccccctccaccttgggcagaagagtgatgaatgctgaattcagcgaacccaagtttctgaaatttctggcccaaatgcagtgaatggccgccataaaatcagccatgattaccgaccaacaactcttgtaaaatctaccagtgaacccgtcaggacccggggatttgtccgaagggagagccttaattgtatcccagacctcctcctccgagacaggcgcatccagggcaacgaggtcaaaagatggcatccctagagcatccagatca

SEQ ID NO: 159422 - DNA, 451 bp, Zea Mays
taccgcccacggcggcgctcaccagcccgtggtggtgacccccggcgagaagtgagccgcccctaggtgatctatcccgagcgtgaacccacacaaaatacggagaaggaattgacgaactcagtcgtagttgttttaccgggagtagagcgacgtagagtgttgaccatgatgccagacggatacgtggcggcgctttcaccacggcgagagcttgccgccgcgtcgagagtctctcccgcaagccgacaccacgaatatcttctacatgtacatgcaatcatccccgagcaaccaccgtggccaggtcgtctcgtagacggaaattaccgacaacggccttttcttagcggtggcatataatgctagctttctgcgggccatggagagatgagaggagaacgtggcggctagtcttatagccgaggatgatcttgtgcctggcgaccac

SEQ ID NO: 159423 - DNA, 672 bp, Zea Mays
cggcaggacgagatgcgacggccaaggcctgtctcttcatggcggtgggggcaggcagcgtttaaaacgaaccccccacttcaatggatgcggcggggtgtggtacttaacttggctgcacgcggtgcgcttgtgcagatcctcaagcaagcaaggatattatgttatgatgatggtgatgacgaccacgatgttaatagtgatgatggtggaagcgaacccgttggtctttccagaaacagaaacaataatggtctgtatacaagtgtatttactggatataatcaaatgtgctcaaagtgaacactgtctgcactgaaaggaagacaccaaactgaagagagactgtagggcagaataatgtaactggaacaacaccattatcatctccccctccgatttcctcagccattaaactcacggcttacgcctgcagccgtcggcaacgggctgtgactgtgacaaacacacaccttgaacctgcatcacagagtacacgggccatgcagaatgcaactcagttcattgttcataataccatgggtcgatcagagtagcagagaaaatcagtcacaggtttgtcctcctggaccctggtgcggcgcaaatgacagcaggacatttcaatatcaagatgcttacagggaggaacatgggttcgatcgaacagtg

SEQ ID NO: 159424 - DNA, 395 bp, Zea Mays
ccttgcgccagaagcgccttcttcctcgcgcgcatccggcagggagatatcgacaggttggtgggatcctgcgcaagcgcaacagaatccgcgggcgccggggcattgagctacctccgtcgttcgcacgccctcggtaaaccgctcattaacctccgccgctcacgttgatttggcgcgagcagttccaatccatcgcggatctcgcggcgtgctccaactcggaatttgggggtcgtcaggggaaggcttgtgccgcggatcacgggaagagtccgagtcctcgaaacctccgcgtctctttcccctgcatataagtatcggagccatcttgccttctcatgccgcgactacactccgtgctcccatcgctggcatagggaggaaatcggacc

SEQ ID NO: 159425 - DNA, 695 bp, Zea Mays
cagatttccttacagactagtcctcgggtcactattcaaatgtgccactgatagttcagaaaacccctagggtttttgatacccccagtccaggtggggttgaccgaggcccaacaatttagggttgcccggagcccaacagttcattaagcacacccaactcagtgaaaggcccaatcgctccaaaagactagtccaatggggaagggtggctctcccttttaaagtggcttcctcctcccaagttaagcgaggtgggataaatctgaggctcacacggtcaccgtccgactacaattgggccaactgggccaattgcgtctttgccaacgggtaatagtggaggatgtcctcatcattcccaccttcttaaaatgggccctagctctgataccagatgatacacccagcccaggtggggttggccgaggcccaacaaattagggttgccctgagcccaacagttcattaagcacacccaactcagggaaaaggcccaatcaccccaaaagactagtccaatggggaagggtggctctcccttctaaagtggcttcctcctcccaagttaagcgaggtgggataaatctgaggctcacacggtcaccgtccgactacaattgggccaactgggccaattgcgtctttgccaacgggtaatagtggaggatgtcctcatcagttttgctaaacct

SEQ ID NO: 159426 - DNA, 717 bp, Zea Mays
tacctatagggcttggagttgacaggtactgaaccaggtcttaggggtatgcaatgatcaaattgcctcattggtggtagatgggtaggaacattaaacaattcagcaaactcttgcagaagcaactggatatcagtttcattaacttgactgccagaatcagcagtggattccactagcaccatggcccaaatatcatgtccagccagccatttctgcacttggagtgctgatacctcctgaatggttgaacccgagtgaacatcatccccatataaggtcacctcctgtccagcatctcgaaactgtagcaccttgtgtacccaatcacattccatagggctatgctgcatcaaccaatcataacccaagatagcatcaaaagcttctaaaggaagtactctcatgtcagtatggtagaaatgcccatgagaccaccattcaacatttctaaccatagagttgcaaatcattttgtgtccactggccaccttcacttgtacaggtgggcactcttccacctgcaactttaattgtttagacatgtgttcactgatgaaagtggaggaactgcctgaatccactagcattagcatcacttgttttcccacaatagatctcactctcatactgtaaatactgtcagaacctgatatggcctgaaaggacagatggcagcacacctctctttgttcatcttcttgttccaacttctgt

SEQ ID NO: 159427 - DNA, 1068 bp, Zea Mays
ttttcaaagtcaattttaaacacaacaccactcagttttttcctatgtagctcatgaatggtctcgtggagtaccactatcccttccatgatattgcgtcctggaagaaacgctgtttgggttggactaatgactttatgagctatatttaacagtctattcatggcagtcttcgtgaagattttgaagctcgcgttcaacaagcatataggtctgtactgttctatccttattgcctcagccaactttgggattagaatgatcgtcccaaaattgaggatgtgcaacggtagagagcccctattgaagtcctcgaacagagccatcaaatcctccttgatcgtttcccagaatacctgataaaattctgctggaaagccgtcgggaccaggtgctttgttatgttccatctggaatatcgcatacttaacttcgtcaatggtaaagtctgcggtaagactagtattttcctcctcagtgatttgtggtatatcctctatccctctatcatccaagtggacattggattcatctgcaggaccaaagagggatttatagtaagatgtgatatgctttttaagctcatcatctccactaattatccgaactccatcctgtagtttataaatcctagtcttcctatgtttaccattcgcgaccagatggaaatatttagtgttcgcatccccttccagcaaacctttagtttttgctctctagtaccacttaacctcctcttctcgtaacatggccgcgagcctattacgaagaaaactgcgcatgtctacttcttgtgtagaaagaagacatgtttcagctttcttatcaagggtgtcaagtttttggagaatttctttcttttccttcttatttgatccactcgtgtttttgcccatcctctcaagtattgtcttaacttccttatttttcgctgccatctctcaatggcagtatctccaccatactcctttgaccaaatttgagtgaccatctcccagaatccctcccgcaacagccatccaagttcgaacttgaattcaggctgtacggaggaagcaaggttatcgc

SEQ ID NO: 159428 - DNA, 398 bp, Zea Mays
tcttcactagagactcccactccgatggtgactaggcgaaccaccggcgggaccccatgtccctcgtcctactgagctgaagcctgccttcctccggaaaccattctgggtcccccacgggtccagacttctgacaggtttatccaggagtgaccaaggccaaggacgggggctccttcgtcaaacgcagatggaaacccggggtcagaacctaaacttacggaagtaccaaaccaaatcagggctccgcaacactccccagctgggaaggacccttcaaggtaacgagaatactccgacccgagggcgactgtctagctacgcccgaaggagtacctcccccggtgctagaacatctatgtaagttctatctataaagcaagtctgaggggtcgagt

SEQ ID NO: 159429 - DNA, 314 bp, Zea Mays
tgtttctttctagttgattgtgatataggagtttcatagacattgatgcctaggtcctatttaacttacgttgtcttggggtgcttgtgtgattgatagaagaactaaggaaaagccgtagcaagttaaataaatgtttatacttgtgatgtcctgttgtgttggttaattaaaagcagtaatcgtcgtccttccagtggtgttgatgttgtgcgctcgatgaagtgtagatatctaattctaacatgtggttgttttacggagtcttccaatttaatgtttagttcgtcaatgtgtctttgtatatcttgtgc

SEQ ID NO: 159430 - DNA, 693 bp, Zea Mays
acgaggacctgctgagccggattgacttgatgttaaggggcaaggtttcgaatgctggtgctcccctatcttattatgcctccacagagtcccttttctgaattcatttccaatcctcatgttcaagatggtagtctgggtcatagagtgcgaccctcattgggtgacatcgaggctttcatcgcttcattccggaatcttcctgaagcagagaggtagactcatttccagatgccgatcagtgctgatgaggtcgaggtgaacgtagttcttagtatgctggatggagaatcgtctgaccctgcccgtactgagtcgatagctgttgcgattgggtagaatcttggtgaggacgaagaagttcagaatcctgaaggtgtttgtcgcaaccgatcgcgccggacaaactacccaactgcgcctgatgaggggaaaaagagaaagaaaagacttcggcgaatatcatgcttagaacaagatgctggtccctcgacatcactcctcggtggtggctcggcgagcaccaccctcgaggacgatatcagaggttgtggtgatgatagagttggcggttgtgtgcttgatgaggacgaagaggaggaagaagaagaaattcccttgattcgtaagaacacccgtagcagcaggagtagtgacattccgacacaggccttatcaggacttgttagcctc

SEQ ID NO: 159431 - DNA, 2019 bp, Zea Mays
gggcgtacacacagctagcatacatacacacaaagcccagcagcaggtagtctagccaatcaaacaagcgtcgtttcgtaccgggaggccggccggccgcgcgcggagaagatgctgtcctgcatcgcgtgcgtcaataaggaagaagacggcggccgggaccgcgaggagcatggcggcgacaccccgagctgcagagaccccgtgaagtcactcacctcccaggtgcgtagtacgtactacgtccagctccagagctcctcctccttggcacccaccatagctgatagctcgctctcatctctccggttgtgggttacggacttacggttacgacgtgcgctgcgctgatgcgtcctagctagctactatacgatccgtaccgtacgtcgctgcaggtagacagtaccgagtaggacattcattccatgcatggcagcaacagtgcccccgaaacaggcgacatggatccatcgtccggcggcgttggcccctaggcaagctccccccggacagcacagccacagccaccaccagccatggacgagacgagatccatctatccaccattccacccaccatactatacagtacagcgtgatcggtcatgatcggtgggcgcggcgaccgaggagaggacagccatggccatgggggatgggaatgaggatgatgatgggatgagcgccgcgcgcgcgtgtcggcacacagaatcatgcccagttggcccaccttacactcgcatggattggatactggtggtatgcattgacgatactgttgctttgttctttaatcggaggagggggagaagaagcagacgcagacagcgtagtagtacggagtagcagtctagcacctttcgctttgtgtcattattcccttccccttcccttgggggaagagaacgaaggacgcacttcaattaattaatataaagaagcttttgtttttcagctcaaaccctcattgcattgccttgtactaatacaagtatctttgctgtttgtttgttttttcttctagcatttgcatttccccttttcttttcctttttctttttgttttttttggggtcagtaaagcatgcatgttatatgtccacaggtgagatttgatactatagttctgttctgtacatgggattctttcttgcgctgctttccttctcgaaagcagagtagaccgatttctcttttattttttcctttctctttctctttctcttttttgagaccgatttgcatgcacccggaagcaaggcaagaatcctgccagcggcattgggatcaccatccaccagtttttttattttaatttttaaaccctggggtgaaaaaagatgagtgcatggtagggttggactggaggatcaccaaaggggaaatccctcaactgtaggtgaaagacacaaaacaagcccagtgtgtgtgtgtgtgtgtgtgtgtgtctgaagctgaagctgaaacgagggcaaaggtaaagcgaaagcgttgccatgccacagcagagaatccatccttgttttgggtgcccagcctgctagtgctaggccctaaccgtaccttcaaacaaacctgtgtttttttttaccctatccctatggtagaacaaacacttttttaccccctatacatggagcgtgagcacacagcatgactgatgacattctgataagctctgaactgaacatcagagattattgttactgatagttacctattattaggtgctggtcaaatggcggtaggccgagaactcgactgaattctgaaacctgatcctgagatggtgtagctcttgtgatcataccattctactctgaaatctgaatgtggctgctgaccatattacttattaattctactatgagatctgaatcgtagctggtgaccacacagcacaagctgcaatcttaatccaccaggcagcggctgatggacgtagtgcatgttgttgttggtgtgcaccgtgcagctcaaggacatggtgctgaagctgtcgggcacccaccaccgc

SEQ ID NO: 159432 - DNA, 1088 bp, Zea Mays
gggaatgcacgattaagaacaagttgatcaatcaaagcagctagggaagctgtaagctcactaaccagcatttgacgcctttaaatcattgatctgtttatggagcagcaatggattccactatatcagagatagagcttgttcaggaacagcggcgccgcatgacttcaactaggcagataccccatcaacaaaatcctatgatcatagacagatgagcagaagaaagataattcgccagtatgtacaacatagagcaaaagactgactcacctagagattggaaaggaacaacggtagacccagggcaggaggagctggggcatggcttgacgagggaaggtcagcaggaacaatctgaagagcactatctagggtgacctcaaccccactagcagacagcaggctccttgcatctagcttgccgacctctaaggcgacttgtccagttaaagctgtagaagcacgtgctgccgtcgctccatcggaccgaggtggggatgaaccgatgtggacatccatggagtcattggaaagagagcacacctgaacaccctcgggggctgggtgtagtttgcactacccacaagagctggatcgccaccagcaacacactcgggggctgggtagctgccagcgccaccctcagaggctgggtcttctgtagtagacacctctaaggctgaaggcccctcagccacctccatgggagtcgggtgactcagatcaacgtctctggatggaagcctgccctccaaggtcgacgatgcacgagacaccactcgggttacctcttgcccggcggaatcaagcaacgaaagcccaccatctgggacctctgaacagacggctaggatatcatcttcaagaggctcttatagcatgtctttggggatgacctcctctagtgcttgatcaaaatctgatattgaaagcccctgaagactgacaagtgccgacacagctagggagggaatatcgctaccccccttgctgcctttatagtgtcggttgttcttgcagatcagcgagacttcttcttcttcctcttcgtcctcgtcaaacatacagccagcagcatgtgcacg

SEQ ID NO: 159433 - DNA, 1038 bp, Zea Mays
cggcgctccgcacgggaagcccaactccggcgagctagaccggccggagaagtccaagaccggtgctcagcttcggactaaaccaaatccatgacctagagattgtttcccctagcttaattgcacgaatggtgacctattctattctgcccacgagaacagcgaaggttatgagcatttggtcgtgttcccggtgattggtgatcccctagtccaaattggtggttcggcaagcatcatagacatatgagaaagcttaaacgagggagaggggaggatgaactgaccggaatggggctggccgcggtgaggttggtttcggggtggcggaagcttgatttgggggaaaccgaaattcaagctcactgatgcacgattgctagcgattcttggtggttgggtggctgataccttgtggggctggtggagggctcaatttataggaagcaagagcggcgaccgggaattttaacgacgacgcgcggcggccggaagggcagggagttactggcgtgcatgaattcgtgtccaccgtcgtggagacctcaccggcgacgattggacagccgtagcgagtcacggcgtcgcgttggaaaggcaaagccacacggcacaaggccgagaggcggcggttcacgggcgaagttatccacagtggccgtggcaacttggtatggtggtcggacttgtttatggccggagttatccacggcggtcatatttgtgtgaccccgagcgctatccaaaccatccgaacaccgatcacggtgacgacgacacgaatcgcggcggagggtcgtcggcggtgaagattccctgcgctggcgatctgatccatatggggtactgtaccatggcgaatggggttcagtcagtctgacataccgtttttgagcttgattttctcccaaacttatatggcaacatgatcaacactttgtagcaaaattgtagagcaatataccatctacaacattgctatattgtgctgccacaaaaagtcaatggatcttgcttgaaattaagcctgaagttcat

SEQ ID NO: 159434 - DNA, 537 bp, Zea Mays
cagtgctagggtgagatttgtctcagcaggtgaagttggcgacatgtttgtggcaagggatcgaccctctgataccaatttgttagctacatatggaagggaggaagaattctagagaaggagattctggagaaggaggaggtagatgaggaacaacagttccatagaatttcagatagtgttcattacaagcatgccatctgaagacagacatcatctcctacatatactcgatacacacgaggtcccactaggcagactcacagatagatagacctaccatatagagactgcatcaagcccactccggaccactcgtacggacattaggacgacgcttgcgaactcctcggtgagaggtttcctgtgtgtgcatcggcaacggaggtgtaacattgcgaccctttttctttcccttggaattggatgccatggatgcaaatggtagggtgcctccctccgtttcgctatgctagagctgctggtatgtgcaaactctatgcgtgcgcgcgagcagaaaaggagcgcgcgaacaag

SEQ ID NO: 159435 - DNA, 721 bp, Zea Mays
gtaggcgaagatggccgcctgagggatgaagcggggcgtgaagtgctgaggttggaggccgagctcctccagcagcagcacgaagaaagatgagatcggcagcgccaacccgcaggggaggttggagacgaagagaatgaactccccggcggtgagatcgccggggggagagatgccgacatagatccttccggcgaacgccagcacaccccatccaagcaggttgcgcaccaagttgagtgccacctcggactggaagcactcgggagggtctagcaaggccatggcggctatggcagcagaagagcgcggagtactcgagggcgaaatggcgttgcgagtgatgagaatgactaccgcactcgagggaacccctttttaagaaagattccccctctgacgccccgagacaccgcagaagatctcgcccgacgcgcaccaaggtgacccagcctttgacacgggggcccgggcccatgagtcatactccttgggcgtcggtctccgtgtgcaaagaaggcgaaccgccacgcgaaggcgaaccgccacgcgaggagcgaaccgccgcgcctcttcatctccgccaaaagcagcggaccagcctctgacacgggggcccgggcccacgagtcatactccttgggcgtcggtctccgtgtgcgaagaaggcgaaccgccacgcgaaggcgaaccgccacgcgagaagcgaaccgctgcgcct

SEQ ID NO: 159436 - DNA, 471 bp, Zea Mays
gtgacactctaatctactgagctattgtgaccaaaagatcgtgacctaaaagtcgggtgcttcgtagttattcatcttatctgcaaatctatcttaccctatgtctctaacctagatggttaataccaggaaagggaggaggtgtcgatctacctacatgtattcatcaaaggagggcagtagctaatccagcatcagggatgaatcctcccccaaatccctcgcatgctggactgatgcagtggtcgccgctcaaatataactgctgcaacaaatgtgcaacaccatggcagagatgcaagctcagctccaccaacaataccagcaaccaccaacaccaacaccaccagcaccacccagggataagcatcgtgaattcatgagccacaagccaccaactttttctagctcctcagacccattgcaagacgataactggctaaagtccatagaaaagatgttcaacatttc

SEQ ID NO: 159437 - DNA, 734 bp, Zea Mays
gaaaatgaaaattgtaactcaccgaccgaagtcatatttttggagagggctactttactgcctgctgcagagagttcgaagacagagattgttgagtctgccaaagatatcctcccaactttggaggtaatacccaatgcaggagccgaagttcctaccattcagctagagaattcaaaatcagagagtttgaaaactgatcagcagccgaaggtgatgagttctctagtggtacaatggttctcaagagtaacaaccacttcagccttggcacctactcctaggaaggggagaataatggccagcgttctagacactgttctaaggctgtcgaagatggctagtcctgctcctactaagatggccaaagatgaaactggagatctagaagaagttatcgacgtaggcgctgctcctgggccttcgaaaattaagtcatctgaacaagtaaaggagagtttgtcaaaaataattacattgccaactcccgaagcagcattgattggggatcttgaatttatcattcgtcacgcttcaggaaaacaactaacacaacatcaaattgccgaagcacatcactatgctaaggacttgaagtatcctcaagggtccctagtgtacggaggtgatgaagaacatgatttcctatactgtctacctgatagcaagaaaattgatgtctgccgagagatgatcgataacatgggctatctaaaccttgagctcgggttgtc

SEQ ID NO: 159438 - DNA, 446 bp, Zea Mays
catcatcgagaaacaagggtggtcaatggcatgttaactgaaacgtcttaaacagacattggggtatggagataagcatacataacaaatataagggtatgcaaggctccaaggatacgagcataccaagtccaagggaatagaaattgccaagacataatgatctaacaatggaataggaagggatctcaaaagacaaggaggttaagaacatataaactggaatgtttaaataggcaacatagtttttcagaggtaagtactagaaacaagagtattgaagaatctaggggtacaagcatgtcaatatcaagggagtagagatttgtccaatggtagcaaggtaatgacgaaagaggaaagaatcccaaaagacaagaaggttatggtcaggggcatctacaaagatgtcgcaagcacaagagtgagatcagatctaatagatt

SEQ ID NO: 159439 - DNA, 2108 bp, Zea Mays
ggaggagggtgccttgggggcgggtgtcgaggtattcttggggccattcaccgagttggagtaggcgggtcctggtggcttcagctgcggacagctgttcttgaagtgactgggatcaccgcagtgccaacatgcattcgccgggggttggttgcttgccaccaagggggagtggaaagagctctgactctgctggctgaaccgtgacggggtggatccagctggttactgaagtttggccccttgggtggaagtccgaatgatcgagtcttctggtgccggtcctgctgctgtgcccggagaacctggaactttcttttgaggtgccctttttcttccttctttgccctttcaacttgcatggctttgttggaaaggtgagagaaattaaggaagtcttggctagccagaattgtcttgagttctggcctaagtcccttcaggaaacgggccatcttcttgccctcggtactgacatcatctggcgcgtagcgggctaactctgtgaacttgtgcacatattcgctgatcgatcttccgtcttgagtcagttctcggaactcgtcctccttaagctatacaagtccttggggcacgtggtgctcccggaatgctgcttcaaattctgcccaggtagcatctctgatggtgatgttgaaggtgtcccaccaggctaaggccatctcggaaagttggtgggcagccagttgaacacgctgattttctgggcaaccaatggcttccagcttccttttgatcgtgcgcatccaatcgtctgcatcgagggggttgcttgatccggcgaacgtgggaggtttgagtctcagaaaatcccccattctgtcttgcggtctcccaccatttggccgttgattttccagacttcgagtgaggacctcgatgagtcgggtttgattggctagaccttgggctaggtctaagggtagtggtggaggtgcggggaggtgggtttcactttcctctctaacggcttccccttcagctctcaggggaaaccctgctccaatcccggaggcggtaggcgtggttttatccgaagccatctgccagggaagagagtcactattatgcacatgcaaattgttttcaaccaagttattttattcattacaccagcacattacaagcataagactactacatgtggagctacacgagagcgttcccgaggtgctaccgaactctttctctaaggtatccccaaattccttgagaagatcatcaaggcttgctagggatatatcctcgacgtcggaccaatcatctattctggggggaggtggggctggagtggtcttcttcttcttcttctctgtttggcatccttggttggtggtcttcttctggattttcttcttgggagcgagcttccttagcttcttgtcatagtccatctttaaggttcgataggcctcacgggtgttgccttcctcaccttctgctatgtcgagactctcctggagagatgccttctcttgcttaagcgctttgacctactgctctaggctttccactcgggagtttaggtgggtgcagtgggaggagaactcatcatagtggttgtctagggtgtggaggtatccggccatgtagacaatggtggggtcatcttctgtggggtttcctcctgacagagcctggagtcttttcctccaggtgggggtatttttgttgctgggtggaaaatatcgaagggggtctcagagatttcccggttgtagttttggcatatctgtttaagggctttccgggcaacaccctggcaagtgtctgggaagcggtgcccgatgaaggtgatttggaagggagggtggtttgggtagtttcggctttctcccaggtatacggccatagagcacttttctattccattttcgcggtactccttctagacatattcgggcttcttgtggatccccatgcgtagcgcgcaactccgaagaaggtgaggaaagccttcctcctctgagcaataggatgtcctaataacccaggggccttccatctggtagaagaaaagaggggtctgttaatatcggggaaaggggaaagagtgtttcttggggggtaagaggtgttttcttgtt

SEQ ID NO: 159440 - DNA, 704 bp, Zea Mays
gctgatatcgagtagctcatacctgtagaaatgaggctagggctccgcttgaaggcgaatgtaataacttttgtttttgtaagatacttttgggaactatcaattaaacaactcttatctgtatggtgcttgttcttgttgtgtgtggttttatcaactcctctcctggtacttggccccctaggatgtaggctcgtcatgtcgaggctagataccagcatacctaagaaagagttggtgtcccagcccccaggaggtagcctcaactaggacctggacctgcacatagcttcggctaggaagtgttagtagcacacccattaggacccatcgtttggtatcagccaccctttgattcatgcaacaggacctgcaggatttggcctgggaagcccagtcgtgtgcccagaccccctgaatcacagttccagatactaggacacccatcgcatagtggtggagcatgtaggcttacagtacgagactaggctaagcagctacacggcttcggaccaccccaggggacgtgcatccattctctagaaccggaccctaggttcccggacccacagggctatagttccaaatactaggatacccatcacagagtggtggagcgtgcaggcttagggtgcggaaccaagctaagcggctacacagctctggaccaccccaagagacgagtacccattctctagaactgg

SEQ ID NO: 159441 - DNA, 524 bp, Zea Mays
ggagttttatgttgcagttttggaggcagatgggccagaagtcgtcaacaacgaggacatcatgctttttcaggaagagggctatgtaagacctattgatgctgtcaagattgatgtttccagcatggaagcacgaagaacacacataagtgaagccatcaaggcaatggctttctagcaaggcatggcaaggatggcgtcaaggttttttttttgcagtgaatggggtgtgaggctgacaggtgggatagagggtgggtacaactcttggaagtcaaaagaagggcatgggatgggagcagtacccatagaggaagcatagtacttagtgaaagcttgggctttttcctcttaactagagtagataaccgagtcaacctgaactctagcgatggagcaccttttcttcctagtacaagcgtgagcatggtggaaagtagtgttcttgtccccttctttgatggccttctgcttgctttgctgcttccagtaggcgacgcactcacaaagagactacgccaggc

SEQ ID NO: 159442 - DNA, 846 bp, Zea Mays
gaaaaataagctcaaagttgtgctgtcagtcactctactgactgaattttggtcaccagtgacattggccagacttttgggtcaaattagagtaagatctattgcttgattgagggtagttgctatagcagaattgtagctggtatgaagggctacaagtttgctacagatgtattggcaagttgttgcacaaaaaatcaagatctagacattgcaattcggtctgtcaggcgctcttaatcgggtttcaatggtacagtgaccagattagaacgccagctcagagaactcaccatcgacgaccgtgtgcccatattcgcacccgccgtggtgattcgtgctcggtgtagttggataacgcagaggggtaaggaaatatcgcgccatggattaactccggccactattctactccggccgccatacccgcctgagtcacagccgctgtggataggttcgccagagttagccaccttgcgaccttgcgccatgtgccctggcatcttaccacgtcgctgtagctcacgttatgcatatcaggtgatcgccggtgagctcgccacggtgaaagccactaatcgcttacgccagtgcatccccttccctccgatcgccaccgcgcaatcacaaattcatgggccaccgctcaagggccctataaattgagcacaccctcgactccgctatgtaattgcacactcaacacacccactcgtgcctccaattactcaccagagcccccgaatcgcttagttcccccaaatcagttttctgccaccgtgaacaagctctcaccgtggtcagtgcacttcaggtccaatcttgccctctgctctcttgttttag

SEQ ID NO: 159443 - DNA, 563 bp, Zea Mays
gagagtgcgtgcggctcagtagcaggatcgtttattgcaggaagctcgaaagagggttggcgatggtaaaccccaggagttcactattgatgagaatgatttggttcgtttcaggggccatctttatgtgcctcagaaatcaaaggtgaagatggatatcttgagagaagctcataaaacgccttacaccgttcaccctggcgaaaccaaaatgtaccgagatttgaagcaaaacttctggtggaagcggatgaaggttgacgtttctaagtatgtggccgcctgtgaagtatgtcagcgcgtgaaggccgagcataagaggcctgcaggtttactgaagccattggaaatttaggagtggaagtgggagcatatcaccatggattttgtggtgggcttacatcattctcctcgaggcagggatgctatatgggtggtagtggatcgcttgactaagtctgcacactttattcccatgaagactacaaattctgtttcagagttggttccctttacatgaaagaagtaatcaggcttcacggggtgcccaagtccattgtttc

SEQ ID NO: 159444 - DNA, 410 bp, Zea Mays
aaatatgcaatctccttagtgattccttgctaatagtgcaacatgtggctagagaacttcgatgtttagaggggtcactcaatatttatcttgattcatgccttagagcatctccaagaaacaacataaaggctccccaaaaccttgtttacaggagaaatctggattttattaatccaacaaaaccccattcgtcacccgcaattattcgcgtcccagaaacgaggccagacgtccctcagatttgcgggagtagatttctccccccatctgagtcctgttgtaaccagagacatgtaatccaaaaaatgctagcgacttgcattagaggggccaacgatttagacaaaatgggcctaggatttttaaaagctagcccagtttcgttttcagtttttattttgagggaa

SEQ ID NO: 159445 - DNA, 324 bp, Zea Mays
tggtgtcccacactaacgctaccatcttagagaggagtggggttgacggtgacggcacgagtgaggaggatgaggggagaggctgagggcagcagtgtcatataggagtgggaagtacgagagatgagacaggatggagttgatgattggagccccgccgaactacgcatcccagttcacaacaagtggctggactggatgcgagctcttaaaacccccgcgagtgccaggtgagaacagcctgcagctccgggcactttcctggatacccacaccaccacattaccatccagccggcagaaaagaggctcatgcacattgacc

SEQ ID NO: 159446 - DNA, 473 bp, Zea Mays
gcatcacattcatttataactgagtcattcgtggaaaaacataacataccaaagcaccctcttaagaagatgttacacattagttcaccgggaggtgacatgaaggccacacattcatgcctccatgttaatctcaagattcaaggaatagattttccagtcaacctagtggtcttaggatccaacggtattgatgtgattcttggatgcgactagttgaaaagttgtgatggagtgatacaatgtgtcaaaggaacaattatgttgacaagtccacaaggtgaaagaatccaagttagtacagacaagccaacaaatgcaaaaggagagacaatggtaaatcacatggaagaaaagcccttggaaaatatcaaggtagtgtgtgaatacccagatgtatttccggagaaattatcaggtatgccacctgaccgtgatattgagttttctattgaattattacctggaactgc

SEQ ID NO: 159447 - DNA, 756 bp, Zea Mays
ctagtcccagggtaccgattttccatatctctcatcctaccaagatgttctccagtcaggtgatggtggatccgacctaggtttgcctcctcttggtcgtggtagatcagcgcgcacactatttcaatccaccagatccatttcagctcctatttctcatgcccgaggtgcaattcgaggttaccgtggagttagggggagaggcactagtagtcatggtggaggtcgatctgctatttatgcacctattgaccctgtcctcattgaagattttggagatgaaccaaccaatgaaatggattctcgagctccagtggtaagaaaaattttcatgtcttcattacaatgttttactgtgtttgctataatgaattgtatgtgcctcaagtggtgattaaacaagatctgtatgtaccatcatctattgtccagtgcatcaatgaattcagttggccacttatattattttattttaagcatcaatgaatttagtttctgtttttatttgatgaatcagatatcttcttaactaaatcatgttaatgtatacatttctaaattcatcatctgttagttcatcacacatgagttaatctatgcatttgtaaatctatgcataccattgccataatgattgtttttaacttttgttcatattccgtggttgttactgtgggggacagatatcccccgggtccactagaaggctggaaggcccgcgaaagactctgggcccattatttcgcaaggccaccc

SEQ ID NO: 159448 - DNA, 288 bp, Zea Mays
gttgatccagataaggtgcaagaggtgatgaattggaagccgccaacagttgttcatcagattcagagttttctgggattggccgggtattactgacgattcattctagatttctctcgaatcgctaagcccatggcagaattgttgaagaagggagcaagatttgaatggggccagaaatgtgaagatgccttctacactttaaggcaacatctgaccacagcacctgtgttagtgcagcctgacaacaacaagccatttgatgtgtattgtgatgtctctggcact

SEQ ID NO: 159449 - DNA, 1339 bp, Zea Mays
accgtcggatctaaaaccaacggctgagattagatctgcagccgagggcgcgcatgcgtgggcaggcaagcactgataggcgggccaggggcgtcaacgacagagggggagggcgcactgaccgagcgggcccagcgccagggggcttgggcgctgacaggcgggccagggcatcaggcgcgcgtgcgcgaaacgttatccgtgatctgggccgtgcgatgaagatcagacggaggggttcagaccgaggaggggcgaacggctgcgggcggcgctgctcctctccgcggcggtgagttagccggagttggggcaggcgtgagctagggttgctctagggtcgccagagttgggcagagagggagatagcgccacgacgaactcaatggtggggaggaggccacgaatccgagggcagagaggggagaacggtggagagaaggtcttgggcgtgtcggagtaacttcggtgaggaatctcggccgctagagggggcaatcggccgtgatagggctcgagctagttccagtggaggtgggggaacaccctgggccaaagcccaggcactggacgaggtcgggatggccagacaccgtgcgggcgcggcgagcaggcgcggccgcacgccggtgaagccaaattggctaaaagcagacgcgaataaggtaaaataagcacgggggcgggagtctcacctcgggacgcagctcggggaggtctggcgcggtctccggcgagctggatggccgggaatgcgggcgcgggtctccggcggctgctggcggcgtgggcagagcacgaaagagggcggagctacgtgaaatgaggcagggggagtgcggggcactggcggggctctaagaagggagctgggcgcgtgggcgggtgtcgtggccgagaaatccggtgacatgcgcgagtgcgcacttgccggtccacgacaagcgcagggagggcggaactgacagggagggtccacaacgcagagagagaaaaggggacgcgcggggcaatggctcagcaactggcaaaccgagcccgcgaggcagagagaggaggggctcgcgggtgaagaaaccggcgccgacaggtcagccccactaagcagtgagcgagagagaggtagagcgcgcgggagagatggctgccactgacaggcggggtccgcgtgtcaggcggcgcgggagcgcggcctggctgggctgcatttttcttttctatagggttttcaattccaaattcaaattaggtttcaaattcaaataaattcaaacatgtgcaacacttcaaagaatattttaagctcagcatgatgcaacatgtcatgactcataaatgt

SEQ ID NO: 159450 - DNA, 960 bp, Zea Mays
cacatattttccaacaattttaatggcctcgggctccacctctcgcacgaaggcggccgcatcccgtccccacaaattagtactgaaggctgggctccgcactatctgatcccctaacgtcggcattgggcgaggcctaacatcgcccatatcccacccgtgcgccagtggccacactccacaggcaacaaactcttccactagatctcggccgctgctcagctgggccgtgtagcgaagggtctcctcattccgaccccccttcttcactttaaattgtggaaaggccacataggaatgcgagcacaaaatagccgggggcaaggcaggcaattttttgacatccccaggcgccacataaaaccaaaagtcccacaagttgccccacttactctttgcacaaggaacaatttcaatcacctcagtcgaagtcttcctagtcctcggcgtgaacgtgcaggacccaaattgtgcaatcaaaccacctatctttatttcatgtcaatgcaagcaataattcttggcgaagacctcagcagatggttctccgccatacgatgacacaacccagacatacttcgttaatgcaaccataacatttggcgtcaattgatgaatttgaatttcaaacttccgcagaacttccactatgaagcgatgtgccggtaagagaaggccagcagtgaaaaacgcctcaaacacaaccaactccccctccggctccgagacatcttgagcccccgacgccctcccgactccgttctcaaaataacctagacactgcatctcgagcacgtggcccgactaaattctcgatgtaccaaactcaaccgtatgcccatgttgtaactccacaaccgtcactggatcactaatcgtcttctccgacgacgacgtgttcgaggacgcagtcgcggtagacgatgacgagtaagaagacggcatgatcacgtaccatcg

SEQ ID NO: 159451 - DNA, 1137 bp, Zea Mays
accgactcaagacgtcggcaagcattccttattagctccgctgcatcctcacttctttgaagctgcgccgagagtctgagtcagtgagtgtctctgaatagaacctatagataagtcatccatggggatttatcaaaaactaaatcattcctacttataatctaaataacccaacacattgctgagacatgtaataacaagatgctcaatttttaagtccacccgcaacaaccaactcctaaagatatgtctaacagatctaggagtcaccaaaccaaaacaaatagatagcaaacgccatatattatgagcaaagtggcattcgataaataaatgttgaatgatttcgtcagcatcacagaaaacacatgttttattaccctgtcagttatgttttgctaaattgtcttttgtcagcaccactactttcagcaaaaaccacttaaaatttttattcttaagcggcaattttagtttccaaaggtgcttatgatgagatatattcccattatttattagagacctatacatggattgaactgtaaactttctagaagagttcaaactccatataaaaatatccttttctgcattcaactggacatgaataagccgcgccactagattatgccacaagctaagattggaaccgactaaggctctacggaatgaaacgtttaaaagtattgtaccaaaggtagtagcaaccgtggcattttctgtgccacaatatggtatagtgtcggatattgagccataaaagattgatttcctaaccatttatcttcccaaaacctaatttattccccattttttaggatgaaacttcctaggttcagaacagtatccttcaccttcagtagctccgaccgaaaatgagaatccccgggcctatgtgtcaactttgccaaagggtatctctttagatacttattacgcaacagccactgccacatatcgtcctcattaatcatgtaaaaagccatttgcttagcaagcatttttgaacatctatgctctaaattcctaaccccccccttgatccttcggttggcataggacgtcccatctagcaagtctatacttcttcttatgattctctccttgccagaagaacctagaacagaaatagtctat

SEQ ID NO: 159452 - DNA, 681 bp, Zea Mays
agagaccaagctagggttctgtggccatgggaacatggtggagccatggaggtacggatgtcgtgccgaggcgatgaccggcgactgcagatgtgcctagggcatggcgcagtgtgcagtaggagaataaatgggcgctggtgtacagagggacagggtggcagccatggctaggagagagggcgccatgggtggctgcatcgggttccagcaatggggaaaacctcccagcaccatggacccgagggggatgaaggcgctactgctcaaaagcttggggagggagtttggggaggccaagggtgtccatttgtaggcgagggagcataagagcttggacatgtggcggtaatggaggtagcaagctctgtgcattggtgggcatgggtggctgctaggcaatgttgttttccttttggacgaagcaacgaacacacattgggcgcccatttttgtcattttctcttgggaatcggatctggattactgtaggagattgtaacaccccaggtgttactgtacgctttacgacaaatatggtcgactgcccaaaatatttcacgaagctcggactttagtgaccttcaaaaatgccaagtccggtgctgtttagattggttatgagcgtaaatgcgacttcggaagaatagctcgagtttggtgtcgtattcatttccataa

SEQ ID NO: 159453 - DNA, 716 bp, Zea Mays
gggcagccaagatattggcggtaggctcgaagctgtatcccagccccaccaaccactgtgggttgatccttgttgggatgaggacgcaagaaaaagaggtgatgaaataaagaaaaaaggaaggaggaatgccaaggtaggcttcacacaagtgggcaaaaatgacaatatgcaagatggaattagggttcaagtggaccaactcaatctagtaaaattgagaggaaggaagatcaattccatgctctaagaacagagcgaagactatgatcttctcttggttcgacattagataaagatctttgccaggaatttgccattgtatcaccatcttctcttgcaacaattccttagcatggagggcctatagatctttgcgcactatttacagactcaaactcgtgtcgatgagtagtggctatttgaacaacaaatttggagtagatcgaagaaataatggcgacccaagcaaagctctagggcagaagtactctaaagaaaaatgaatgatcaactgcgaaggatcgtttagatgcaaggaatgaaagttgttggcctgagaaagctgaagcgccatggggttttgtttttgtagaggaccaaagaaggtgaagcaatacatgatcgtggaatttgaagcattggattactaaatgaacccagtcttgaggtctaagccgagtctatggacccgtaggcttataggaatgagcaag

SEQ ID NO: 159454 - DNA, 599 bp, Zea Mays
gccgctcatctctcatcctcctaaagcaaaaagaagctagatgcccattcctctcacaatattcacaatggtacctcacctctctcttgggtggattttgtttgtaggagggggctttctttttggatggctgaggagctctaggaagggaatcactagagatgttgggaaaggtgtcaagtgtgttcctaagatggttaggttttggaagccacacttgtttctgtggaggagctctcataggttcatcaatcacactatctctcacaggggtgacaggcttagcagaggtggttttgataagcttgggagtgggtgaaggtttctctgaaggtgtcaaaccactgcactcaccaaccttgccaaagcgagcgacactcccatccttagtagcaaagcctaaccccggtccgccagttcccctcttgaactgactgaccatcatgcccaattggggatcactgcacgacacccaactcaagatagatcgaaggtatgtgttttcttcctcgattcttgtcttgtcgtgtctgcaggactcaagggcagattgcaaaccctcacaaagtgcacactgcgtaggtgcaggggcactcact

SEQ ID NO: 159455 - DNA, 590 bp, Zea Mays
gaacatcggtgctcctgttgcatactcagcctggaatctgcctccttccaaggcttttaccagttttgtgtcgaatcctcctgctggtgatagcggtttgggccttagagtgcgaccctctcccgaagaggttagtgctttggttgcctcacttggtgaagtccctgacgacgagaggcaggttcatttcgaggtgcctttgaatctaagtgatgcagagataagtgccatgctggatatgttggctgaagattcctcttatgcagcccctgctgaaacaccggttgtagcacccatcccagaggctgacaaagctttggatactcagaggtctgatagtgttcgcctgaagcgtcctcgctgagccactcaaccaacttctcctgctgaggggaagaaaaagaaaaagagacgtcttcaccgagtgtcatgcttggatcaggatgctggtccttctgctcctgctgctgaggaagtgccagtaacagttttgctgaagctgaccccaatgggtgtgacttagatgatgctgaccccaatgggtgtaacttagatgatgctgaccccaatgggtgtgatccggccaaaac

SEQ ID NO: 159456 - DNA, 464 bp, Zea Mays
ggcgctttaggaaatctccggccacatgcatagaggttaggccactgatcaccaaggtcttgatcctgtccagcatgggcaggagctctagcgatagcgatggctgggtcctacaaagcttgcggtcgagggttggaccgttgctcggcagggcgaggcggtcgttagcgtcggcgctgacgatcaccaagttggcgcgccagttctcccaccttgcgccatcgagggtggagatgtaggacacggtcgaatccggcctcgtctaaaaatagtaggcaccaagatggtccctagccttcccagatttgaccagcacgaagaaatggcggaagagggaagtgcagggggccacccccacgaacatctcgcagaggtgggcaaagatggccgcctggaggatggaatgggggtgaggtgctgaagctggagcccgaactcctccaacagcagcaagaagaagggcg

SEQ ID NO: 159457 - DNA, 424 bp, Zea Mays
cacagtatgtggcccggtgtgacacctgccaacgaacaaaggccgaacaccagaaacctgcaggcctactgcaacccctcccagtgcctgaatggaagtgggaggaaataggcatggattttgtaaccggactgccccggacacaaaaggggaatgactctatctgggtaatactagaccgtctcaccaaagtggcccacttcattccagtgaaaaccacttttggaggagccacccttgcccggatatatcttaaagagatagtcaggctccatggtattcctcggaagatagtgtcagatagagggacgcaattcacttcaaaattttggaaaagccttcagcaagctatgggcaccaagttagatttcagcaccgcctatcacccccagtcagatggtcaaacggaaagggtcaacaaggt

SEQ ID NO: 159458 - DNA, 678 bp, Zea Mays
aggaaatgcagttggggaagatacgtcgataaagaagaggtgatgcatacaataaagtccacgagactaatgggacagaagatgcattgtggatctcagctcgttgattcgtaaattaaagatcatagacaagacatgcgtaggttcataaaatcaatgtggtttgacaccccgatgcgtgtagagttgaggagattgaaggcagcaaatgagatgagagcatatgatgcaagggaatgggaggcggctagagccgagaaacagatgttggggaatcttgctggtcgtctgagtggaagtgagtgagaaaaaggacatgttggtttcgcttgtacattttatttagcctatctttgcaaacttatttgtctcattatatttgcagagattggatgtgccatgaactatctcacagatgaggctcatgtaagatacgttcaggaaaaaatggtgacgatggagctgatggaggaggacatatcaaggttgagtgagcttatagcgctcgctgaggcaggattacatggggaagaggacgacgacatagaggatgagtgagctcatcgcactagctgaggtaggattatatgctcaagaggaggaggacgagtttatgtcttaggccgcgaagaagaggctgcttattataagcagaagtgtgatgaggctgaggtcgag

SEQ ID NO: 159459 - DNA, 745 bp, Zea Mays
cccttcttcatggtttatggtttggaggcagtgctacctgctgatctcaggtttggggcaccaaggctgatcttcgaaaacatagctgaggcagaagctactagactagaggatattgatatattggaagaagaacgattgaatacagtaattcaatcagctaggtaccagcaatccctgaggtgctacctgctgatctcaggtttggggcaccaaggctgatcttcgaaaacatagctgaggcagaagctactagactagaggatattgatatattggaagaagaacgattgaatatagtaattcaatcagctaggtaccagcaatccctgaggtgctatcatgataaggccatacgacatcgatccttcacagtgggagacttggtccttcgccgaattctaacgggggaaggacggcacaaattgtcaccactatgggaagggtcatttatggtagcagaagtcactcgtccaggatcatatcgacttactcaaatggatggcacggaaatagcgaattcatggaatatagagcatctcaggaagttttacccctagctagatttcaaaagctatcggggcagcattgtattctgtaattggaaaatacatcatcaataaaaagacttcattctcaaaggcactcgaactatttattatcaatctgcatgcttactcggcttagggtgaccactataccctactaacggagcaatcggcttaagtcggcagtgacttaggac

SEQ ID NO: 159460 - DNA, 1006 bp, Zea Mays
agagactgaacactaaaatggcccgactaaggtcgactgctagggtgacacgcgagggggataaggctggaaccactgagacagctcccatctcagaagtgatgaggcattctgggttggttgtgcagaaagaaactattaccgaaggtattgctaatgccaaagctgaacaggccatggctgaagttgttagtgaaaacgaagatgaagatgatgacaacattctatgtccgaataagcccagccacattgaattcgggagatccacatttaaggcagaggatttagttttaatgaagaaactaggaaacttttgagagaatgatgatggacttgtttgtttcactagagaggactcgattccagagccgaatgagaatgaagttgtagtcttcaagagtttctttagggttggacttcggttccccctttatgagatgattggtgaggttttgaagaagttgaaatcttcgtacaccagttgaccccaatgccattgttaggctcagcgtgtatatttgggctcttcaaagtcaaggaaagagcgccaatgccgacgggttctgtcgagtgcacgagcttcattatcagaagaaggcaagaccgatggtctgcacaagaacttcggtgctataacttttcataccgaaaggataccaaggcccccgtgattggctaccgcactaaatggccgaccgggtggacaaacgagtggttttatgtgaaggccgatgagaagaaaagggaaaagctcatgagcatggtaatgagtcccttgataatgaacttcagtatgacgcgacccttgtgcaacatgcagatggggtctccttgccaactggccaaagtggagtttagggtcgtggttgagcacatcagcactagagacttggtgcaagaatacttggcaaacacgacatttccgacctctggtggttggggaatgccgaagaaaaaggaggaaggaaagaagtatgaacttgttcgacttccttactggttaagt

SEQ ID NO: 159461 - DNA, 450 bp, Zea Mays
aacccacggcatcaagccactggcctttgggtttttcctagtgtgcccggcaactagatcaataattttttttcccatcttacaccgctcatcatcgtctgcctcccgtagatcatgcatagaacacccctggacggcagcctttaaaatttccagggtatcaggtacgtgaatctcctcatcgacatctaactcagaatccgcgccgtcgctcgaaattgcccagaatctattcccgtggagatcttccaaaccatgaacatgaggccgagatccgttggacgatgcggccacgagttcgttaactcgatggaaccgctcgtaatccacgatttgatccacctcatgctccaactcactattctcatgaacaagcttagaagcggagcgcggagccagagtcaaccgcctcacacgaaacttatttggcataaagcaatagaaaaaaaa

SEQ ID NO: 159462 - DNA, 854 bp, Zea Mays
cacgatcgggattccctggcctggattgaatctagactttaatgaaccggtacgtgccgaggatcgttgatcacaaaatcgacggtcacgattaaatgcgcgaaggggtatgctaactcctaatctgcaccggttgcttcaaaatcaacgacgcacaataattctgtgtccagcctcgatcctagccgttgcttgatagatcaacggattacgatctatcccctacctctgagcacccgagacggcggcgccgctccacgcttcactcccagccgagccccggtgaggacaccaaatcggagtttgcccaggcgctaagcacccaattgaaccgaacgacccaatgcggatgacaagatgaacactagcgacaggattcttaccgagggaacgcagcacaggggtccgaccactgtgacacgcggctccacggcggtacaatgaatccggtgagaaatcgccggccacccggtggtcttctccctctgcgaaggtcgctgacagctccacggaggcgcggcgaagctcctagccccaagcgcaccaatcctggcacggcgtctacaccgatttggtagcggcggcggagaatctcgtctgcaacacgccggtggcagtggaggtcgagcgggtgtgggtagctgcgcgctggcgacgaagagaaagggagtgaaggctgcggcctcgccctatttatggccgcccggggtcggttcgtgggggcttcaacggacttccgaggagcgcgccatggttgcgagcgcacctccgaagagtacggcgaaggaaagggaagactgacgactcggtccctttgtcagccacggaaggaaggatgcgcgatcccgatccac

SEQ ID NO: 159463 - DNA, 742 bp, Zea Mays
taaaaagttgattctcggatttaatctggatttaaataaaagtcttggactgtaactcctatttcacaagtctgtggggaccaaaccgagaaaaactgggcgagtttgtgatgatctatatataggccgagactgcgggttattttcaagattttagagggactcttttgttagtctgcaccgaccgaagggtatgagggttttctactcgtaagatatatatccgaccgccaagattagattagacactatatgaatcggtgtgcactactgaccactggatcatggatctacggtccccgttcgaccgccatccagctgaccctgagccatgagatcatgatctgaggccccagactcaatacacagaaacggtatgactgatcctattttcgctcgtccgtttgagatccaaccgcccccattgaatcaggccacagcagtacgctttggccaatccagcccgcatatcctgagatggacgatcaacgccccgtcttctccacggccccgagcacgacgacgggaagaacggctcccgccgcggcgccgcggccctcgtatgtcgcagatggcccaggtgccctgatttcctatatattaagttctaggcgcagcagtgcggcttgcgaaattaaaacggctgcttaccggcgactggagacgtcggcgcgcaccgatcacagctgatggaggcttgacgctttgctcgaatccggtgaggaatagcctcgtgatgaga

SEQ ID NO: 159464 - DNA, 325 bp, Zea Mays
ggaggagcaattgtagccattaatggagatagaagaaactgtcgcggaggaggggaaacggtctgcgacgcgagcgcactggggaagaaaggggagaggacgtgtcgtggacggaggttggcgagctccactttagggaagatgaggaggcgggcatagggagccgaaaaaccgatcggcagcgaggtcgcgtcctagtggccggtcatttttcctcagagctagaaacgattggaagcagacttggctaggtacgtgagggactgctggtgggccccacacacaagtaactaggaagtagaataaagaatggaagagagacgtg

SEQ ID NO: 159465 - DNA, 1055 bp, Zea Mays
tagtagggtatagtggtcaccccgagttaagtaagtgcgagcatgtcacaccgccttaagtcattgccgacttaagtcgattgctccgttagtagggtatagtggtcaccctaagttaagtaagcgcgagcatgttacaccgccttaagtcgtcgccgactcaagtcgattgctccgttagtagggtttagtggtcaccctgagttaagtaagcgcgagcatgtcatatagccttaagtcgtcgccgacttaagtcgattgctccgttagtagggtatagtggtcaccctgagtcgagtaagcatgcagattgacaataaatagctcgagtgcctttgagaatgaagtctttttattgatgacatatttcccaatttacagaatacaatgccatcccaatagcttttgaaatctagctaggggtaaaacttcctgagatgctctatattccatgagttccctatttccgtgccgtccatttgagtaagacgatatgatctaggccgagtgacttctgctactatgaatggcccttcccacagtggcgacaatttgtgccgtccttcccccgttagaattcggcggaagacgagatctcccactatgaaggatcgatgtcgtatggccatatcatggtagcgccttagagtttgctaataccgggctgactgcatcaccgtattcaatcgttcttcttctagcatatcaacatcctctagtctggtagtctcagcttctgctatgttctcgaagattaatcttggtgccccaaacttgagatcagcaggtagcactgcctccgaaccgtagaccataaagaaaggagtgtttccatgcaaagctcggctgggttgagttctcaggctctagacaacatacgacaactctctgatccactttcctgcgaacttttcattcttatcgaagaccttctttctgagtgcttccaatatcattccgttggctctttctacttgcccgttggctctcgggtgcgccaccgaggcatacttgatctgaatgcttttttgttcacagaaatcgaagaacactga

SEQ ID NO: 159466 - DNA, 560 bp, Zea Mays
agaaaacccaactcgagaaaagtgatcgaaatgagtgagttggtgactctgaagtagcaccagatgcgtctagtgcaccactcgatagaagagtgccctgtagtatttgagagtaacaccagtgtgttcaatgtgcactagacatgacactcaaagagcttgcaggagtggcctagaaaacatgtactcatgagatagggtacatggagagcatgtaaagtgtgtttgagaggtcgagtactcacctaacatatttggtgtgctaccagacatggcactagagaaggttcttatagagctctacaactgtgtatctcgagattgtactcaccagacatgtttgatgtggcaccatgtgtacactgaatgccacacacattaattgctagtttcacaaactagtcgttcgtaaggtatcgacgtgtccggtgcaataggtttgtgagcaccatgtatgtttagtgccctccactaagctgagtggtggtgtaacagctaatttcaccccttagagctatttatactcccaaatcaaccatttgagagtcctaccccttcca

SEQ ID NO: 159467 - DNA, 461 bp, Zea Mays
tgtgaatcaaaggataagaaataccagctagcggaccctatgggtgcgctactaaaaattcctacccaagactgtgtgcaggtcgggtcccagttaagattgccccttatgggccatgacaccaatttctccctaagaatcctggcatccagcctcgacatgtcgaggccatatcccagggggccaagtaccagggaagaagttggtaacaatgcacacaacaaaggaaaagtggcgtgcagataagttgtaatatcgcctgataagtagtgtctaaagagtatcttacaaaatcaaagatatattacaacccgctccccagcggaaccctcattttctccacgcaggcctggctactcatcgtcagtaggatcccgctggaagcgcccgaccaccatgtccacaacaccctgcacgcccacccgggcagcgtcttcagtatcgaccaccggacctgcaac

SEQ ID NO: 159468 - DNA, 836 bp, Zea Mays
ccggatcatatttaccatctaaagagggaatcttaaattttatcttattgaaagcaatgtcattgttatgtacctcatgtggacgctgtccacccataccttgacggttacgacgtagacgtcgctggcctcgatcctcaacttcggtgtcagcagcataatcagcacctgtattttctacgccgtcctcatccccttcgcctcgtcctctatgctgatcatttgtcttcgcgtggagctcatcaaagcgccttagaagagcagcgagactcttgtccacgtgagcaacattcgtctccaaacctgcaagcttggtgttgttggaaatctgtgcggcctccatttgcccaatcttctcatttctcgcctacaaatcattatcaattccaaaggtgtactccctcacttgcctttgaaaatgttgtacgatgcctttggtgcgaggtgtaagcagacctccaccatcctcatcctcactccctgtacctgtcatggttagcttgcagcaaacaaagtcacaagaagtttcgtaccaactaaaggaaataggtggtggcacactatatgtttactcacacttgtccattcaagttcttacatgttcttaccaagcaatgcaggaggtgtcggtagccagcaagaacaacacaaatggttacacaagcacaaccccgtgatgtagtagataatttgtggagctataggtggctgtaaacaaaacaaatcaaggtacatctagaatcacattagtcaaagcaagttgaatagacattcattgatggtcctatgctggtcctagtgccaaatcaagctagagacgtgagcctgaacacaaa

SEQ ID NO: 159469 - DNA, 427 bp, Zea Mays
taatgataattctgtatcattagcttatcggataagtctcaagtacaatacatctaaagccctaacttcgtattcgcctccttcacctcatgtgcccaccagtgtcggaacacccattatggccaactatatcttgagccatacctaaaaatcatgtttagtgtagtggcaagttcatactgcttgtgatcaataggttctaggtttgagtcctatgtgttgcatcatatttttctctttttttgtctttcttcagccatacctcattattattttgtcctccaccactggtgcctacccttaccgaatcctatgtgttgcattgtatttttctcttttttgtctttcttcagccatacctcattattattttgtcctatgcctaccctcgccgtctagcaccctcgccgtctagcttgcccgacat

SEQ ID NO: 159470 - DNA, 2258 bp, Zea Mays
tgtatatttattataacaactacctacagccagtggctcaatggcatgtatgaatcctatgttgaagtgaaaatacatgctgcattttgtatatttactataacaactacctacagtcagcggctcaatggcctgtatgattcctatgtctaattacatttaagtttgagcatggattagcagcaaggcaggaacaagatcttttattagtaaaatattatcactctattcaagaaagttgctatcattaggttgaagaaataattaaggtgcatagaacatcaaacaatctctttgtactttttaaattccacctgtgtgttgttatctgggtgcatggggtgacatagatctggtctgggaacatagccttcctctcttagttcttgaagcagggtcttcaaggacgtgtagatatcttcagactcagggtggcttttatctgatgcaacaaataaatggctgctgttattaacatctacccagctgtacccaggtatcttcaggatcttattatccttcatcaatcttctaacttttgatacaccatcccatcgcccagcaactgcattgatattggacatgagcacataataaccagaattagcagggtccaacttgaacagttcttgggaagcgatgtccgcaagttcaacattgcgatgcacacggcaagcatggagaagagcaccccaaatgccagcatctggcttgaaaggcatatcagcaataaattgtatagccttatctaacttcccagaacgactgtataggtcgaccatgcaagcaaagtgctccattcgtggtgcaatcagatatttcttcgtcatgcattgaaaaagttggacaccttcttcaaccagcccagcatgagcacaagcagatatcaaagcaagaaatgttacatgatctggcttatatccttcctcctgcataccatgtaacaagctcactgactctttaacaagaccatgagccccataggctgaaattatactgttccatgatacttcattcttatcaggcatgaattcaaaaacacgaagagccaactccaagttcccacatttcgcatacatatctatcagagcgctctcagcaaatatgtctgcctttataggaccctttatggtaacaccatgaatctccttcccataatatatagctggtaaacttgcgcatgcggatagggcagcagatatggttatattattgtactttattccttccatacacatctgacggaaaagatctagagcttcttgtggttttccattctgtgaaaagcttgaaatcatcgagttccatgtcacctcatccttctgagacatttttaagaagatataatggctcaggtcaagtctgccacactttgcgtacatgtccatcagtgcactctccacataacattttctttcatatgcgtttcttagaacataaccatggatctgctgaccaagaggcaaagccgccatgctagcacaccctggcaagacgctagctatagtaacagcatttggtttgatgcactgttctaacaaatatcggaacatttgcagtgcctcttcactcatcccattaagaacataacctgatatcatcgtactgccaataaccacatcgatagccctagccgcatcatataaattctgtgccatcctcacatccctgcacttgaaatagatgtctaccaaagcactcaccaaaaagacatccatgttcacacaattcctgacaatataaccgtgtacctccttaccctgcttgagaccattcaagtcggtcaaagccggcagcaaactcactagcgtaatcgaatctggtcgagcgccactcctctgcatatcatagaacaatccaaaagcttcaacgaaaaggccattttgaacacatcctgaaatcattccattccaggttaccaagtcatcctgtggcatcagttcaaacaatctccatgcatcatccaagcactggcacttggcatacatcgccagcaatgtgttagccactgccacctccggctctaaaccacatttcaccgccagagagtgaagttgcgccccagacagcaagtcagcgtcagtggcacacacagacagaaagcacgccagagtcgcgaaattgggctcacaaccagatgccctcatgttccggaataaacgcaccgcgccatccacgtcacctgcctttatgcacccgtccatcatcacgttccacaaaacgcaatccctctctggtattccgtcgaacgcgtcgcg

SEQ ID NO: 159471 - DNA, 738 bp, Zea Mays
cttcctcgaagttgcggttgcagtagctgatagctttggcaacgatgtcactaacacctttggctgctctgctgcgttctctgattctgactctttggtcgggtctgcaatagcttcaatccgcatcgcaggagccatctctgtagctaggggcagtatctgtcctttcaattaacttcggtacatcggccgtcttgatgggcttcggtctacgtgtcaagaccttgactttctttgccttcggcgcaccagaagatgtcgaagcaacgattttcctttttctcccttgtgtttggacgagaaagcagtaatctgggtaaacaaacccaataacatcgaacaccctattcaacctctttttccggcaagtgccgaaggcggctatcatagatttgtcttctgccctcgagtacgctccaagtagttcatcgctcattgcctctatagcgtctagccaatcatcatttggctcatcaatatggcttctgtaccgaatggtatacttgagataaaccaagccactctggctagaaccagcggtggcttccttcggcatttcccatttgtttgcaagaggccatactttataagcaatgtgctcttgaactaaatctcttgtgccaatgtaggtgcatatggtgttgaaagcaatttggcacgcctgcacttcattcccaagtgcgatggatggccttctaatgctgaagcgtgaccatataggacgttggataatgcctc

SEQ ID NO: 159472 - DNA, 620 bp, Zea Mays
gcccttcaacacttcctgtaaggccatgactacatttggtggtcattacctccgtgtgtcgacacccgatgatatcacgcgactactccaagtcggtgagtcacgtgggtttaatgggatgtttggaagcataaattgcatgcattgtgagtggtgaaactaccccaccgcatggaagagtatgttcactaggcaagggaaacaccctaccatgatctaagaagcagttgcatcgcacgacctatggatacgacatgcatacttcgacatgcccggtagcaataacgacatcaacgttttgcatcgatcccccatattatctaggcatctcagtgcagagcatcttcccattacgtttactattaacggtaactcgtacaacatggggtattacctcgtggatggtacttaccctgattggctagctttaatcaaaacaacacgccacccttccgacctttgcactaagcgctttgcaacaaagtaggagtttgctagaaaatatatagaaagagcttttggtgtgctttagtcaaggtgggtagtgatatgtgaccctgtatacggttggtccacatcccacattcatgacataatggcagcatgcatcatacttcaca

SEQ ID NO: 159473 - DNA, 500 bp, Zea Mays
gccgccgagcccctctcgccccgtcgcctcgccattaaggcgtgcaccggccccagcaacccctgccactgtgcccgagtcgtcccctcaccccccccccctccgcctgcccgagccatctcaatcggcgttagcgccattcccgccatcatggcaagctcgccggtgctcaccgtctcctccatccctctccctcccccgggcgcctataaaaggacccgcccgagccccgccttcaccacaccagctccggccatctccactgctttcccctgagccgatcgagctagcgtcgtcgtgcctccctcgtcgctctgatgagctcctctccccctttctggtgatcctctatacaattaaactagcgcttgagctccgccacacgatcacggtcacgaggcacacctccccgccccctattgcacccaattgccgcaccagcgaccacgccgccgcggacactcgccaccgcaccgcggaccggccgccataggcccccg

SEQ ID NO: 159474 - DNA, 471 bp, Zea Mays
gcacaatacatgctagagcacacatgtttttaattagcaacttttaattagcaactatacttatgtttttaattacgcacaccgtatagcaatgggattaaaccaactaaattcaattgcatgactgaagcagtaatacatgtgggtaatagttgaggtagatgccaggtttagtacctgtcgttgtgagttcgaaggatgcagggagggcatcgatggatctagagaggggcgttgcaaggggatcggcttcgactcccgtaggacattgtatgtcgaggtgctcctccaccccagaatgtacctcacaggtccactacacctccaggtgcatggtctacaacacctcccatttgccatgggaggatcctcccgccgtcggccacccactagtagaaaagcgctcaaagcttgtggtataatatattttttttacagacggtttcggttatcaaccgttcgtgctattcg

SEQ ID NO: 159475 - DNA, 430 bp, Zea Mays
ttaaagtagcgctaagtgttgttgattgttttgtcctactttttgtgcggtgagtgtactacgaagagtagtaaccggccaagtgtccagctgatgacagccgtccgattcagatccaacgcctggaccattcgacaaagttttttttagggggagttaggggttgggggttggtgtggtgttgagacatgcaagctggagaccaacaagaagcaggaacagagaagagctttgtttttcgagtaaaataaaacggatgacatggcttctgttgcgtgtttgtctgctctgtttccagcaagctttgcttctgttatatggttaccggctgtacactgtatctgtgccaacaaaaaacgaatctaaaacgaagaaattcccttttgatgtcgcccctgtgaagatatcaggctacgttgatcgatcaatg

SEQ ID NO: 159476 - DNA, 467 bp, Zea Mays
tcattgataaatgcaatcgaggctgaaccaataatcgcaaaatgaaagtcgtgagcttgaagttcggacatttatgggcactattgaaataatgtgtggtgaatacgatggttcaagtggtcttgtgagagacccatcccacatatgtgttgaataaacactgttctgctatgtaatatatctggcaaatggcatgaattaaaatatgcagttaataggattctgaagatccatcatgagatcctatgaggattcgtatctttgatttataaatatgcaacatataaatctcatatcggataatgcattcctgaggaatgaccactctccagtgtagagagaatatctcatagttgagattatatttcccaactggaaccttccaagaggaaacaaagtctgtgttcaacaccaaagtttgataaccccaataaagggataaagacccatacagacccaaaaaagaa

SEQ ID NO: 159477 - DNA, 521 bp, Zea Mays
cggggatttatctgtacatgttcacaactcagccaaaattgatgtctgagatgaacacaactgtggccaaaactgtctcacatccaatcatttctcgggttccaagttgagatgtgtactctcgatttcatcataagcaacggcatgttgaagtgtaacttgaaaaaacaatagtatcacctcaccgaggctctacgtcaataggtttcattgtatctaggaagtatggaccatcttgggagacaaatcccctgcagcttcgttgcagtccttatctttcgtgcttctagaagttttttcgtgcttctagaagtttccggggcacaggacctgaagtttccggggcacgttgttgattctaagagcctcggcttccatccccttcgccactgccatcagaatttttcgtgcttctagaaggcgagggggggccctccttatctttcgaacaaccatcagcattttcaggctttctgtgaggtggatcgaatatttatcatcgccatcagcaacatcacaat

SEQ ID NO: 159478 - DNA, 630 bp, Zea Mays
ggtgcaccagaacagcacaagtacgtcaatctacactccgcgcaaaagacacccacgggtgtagccggattagcacaggcgtgcggatacggccaacagggcacattacaatacaaattacagttacatacacacggcgagggcatcatatattacattggctcaaccttcgagatgatacccatctccctgtaattgaacagcattatcctcaattcctcaccctcaaaaagatttcgcagatccccctcacctatgctcgccccaatcggcgaagacaacaattctcgtttaccaacccggtctacccgaagacggccacgctccatccccatatgacggcgcctaccacttcgcgaaaactcacccacactgtgtttcgacaccacccttcgccgcctatactcagtactcgcactaggaagatccccgacaccctccacacgcggcgaagactccgctgcggccacatctaacatagcaaaataatccaagccttcatccgaggactcctccgtctaggaaaacaaactcccagactcaccatcagactcaaaacactcagatccagagccaaataaattatcattggcaggcactatggtcgaggccgccacaaaatcagtattg

SEQ ID NO: 159479 - DNA, 841 bp, Zea Mays
gcacatttaatgtgtgtgccaaaccacgttgcggcaacggagcacagtgactgacaagacagcgatcacgtcgggcgcaacagcatgattacgtctacgccatagtgtgtgcacgccgctgccaccctccgataggacgcctaatacgacaagctgagcagactggccttcgggcgcaatctctccgcctcgtccgaccccgggtccaaccttcgggcgatttctccgcctcgcccaacgtcaagttcggccctcgagtgaattctccgcctcacccgagctcggcctcggccaccaactacgccatgaatcccgcagacaaccactccacccaattgtggcacgcgtcaagggacggctcggctagcgcctcgggaagacttccgcctcaaccaagtaggggctctgatcttggtaagcccagcagggaatctcgacgtcatcacgtgccaggacgctgacgcaccccgtaagcagcctttggtccataccccggcgttgttacaacaactacggcatgggcggcctctccctcggggggctcgggcgtacggacaacccctcggtctctgcctcggctctctacgggaaatcagcatgcgtgaatcaacagcacagtctgtcgtcaccatcggcttgcagacggtagggcctctctccttcggatacaacacccggcttcactaagaacaccccccttggtgtataaatagggcaatggtccctccacgaacaagggacaacacacgcagacgaacactcactcatccactttgtcttcgatattggcacttgtcccaatcatctctagggacttggggacttccactctcccgccgtg

SEQ ID NO: 159480 - DNA, 273 bp, Zea Mays
ctttactactatgttgttatgccttacggtctgaaaaacgccttgccaacatttgtgcgggcgatgagtaagactttcggggacctaattagggacaaagtggaagtctacgtcgatgacatcatgatcaagactaagagagggtcgaccctagtggaagacttaaccctggtcttcgacaagctgcgggcaacccgcacaaaactgaacctcgacaaatgcgtctttggtgtctccgctgggaagttgctggggttcctggtttcgtaccgg

SEQ ID NO: 159481 - DNA, 534 bp, Zea Mays
atgtcacattgacatgtaccagaccgcaaccctatgagctcatatccgtcttcccacttgtcgatgtttgacgccacaccgcaaaaacatgtatatgtttcatctttgttttctccattgtaatctcaattatcgattaaatttaattgacacatgaatgaggctttaaacatagtatcattgtttttttgggtcagggaggtgacattgatgcatctcatgacactccaacttacacgggccccctttttttatcagacacctagtggtcaatgtaagtactccagttatacatttattgcatgcttgcttctcataactcattcataaattactatactctctacctgcattgtgtttcaggttgcatatggtgaggaaacacatagcttgcacactacacacgaccactctctgccacgtttaacagaattggactgtgctcggtcgctacgtgattttttgtgctcctcaaaacccgacccaaacaggtttgtctttaactattaagtaaaaataacatgtaggttgttg

SEQ ID NO: 159482 - DNA, 848 bp, Zea Mays
ctcggcggcgtcgccagaaacgcttcgccgtcgattcgcatggatccataaaaggcttggctctcccatccgtcgtcgccccatcgcgttgtccctagagaggaagcaaggcacatgaccgccgtctccgggtgggacgacgagtctgtcctcctcgatgtgatggtcgctgaggccaccctcgcctgtgagtcccatcgcaagaggcaggcctccacctgctccaacgatgacggcaccggatccaacaccaaatacggagatacagttgacaggtgcgtatgttagctgttgtggcatgctggtctgattttaggccaccgtctgcgcctggtttcaactttcaagtcatagatcggtgcttattctgacgcctctcctacagcagggctcctctcttccacgatgcgaaggtgacttgtaggtcctcttctctcccttagattgcactcaaaactagactctaattcctatgtaccggaaatagtataatttcaaatttcataattactgaagtttttttatcacactttaatatttgtcaacaggtgtacttagcaatggtgcaaatcatgcccatccacgagatcttggcctcatcgccgattgagaagatgacgttgcaaatatttcagacttgtagagccctcgagcacctccatctcttgttcagttgcttatattagtcatatgttccctatgtttaaatttgatagtagattgaggcaacatataaacttcaggtcaaaataagaagagataaaggaagaacaatcaaatgagaaaccttttcagtcagtatagaatgacatcttttttctttcagttcaggttcagcgacacatgca

SEQ ID NO: 159483 - DNA, 566 bp, Zea Mays
gtgtagttgattccacggacctgtttgcactgtatgctgataccatgtgcacttcgggcctatttgtttgtgttccatgcagacttgtcctgcaaggatgcaagcaaacatccctttcaaaatttgtgctagaaatttctagcagtttctagcagcagtgcattaaaaaatacgtaaagtttaccaagatatctgtgaaaatccagtatattaaggctaacttacctgaatgtctagaacaatgcagcccagcttgctctgtcatttgctccgtgtgcaatgtgtgaggtacataatcatcttacgttgtggtagtggaatctctagaacaggaagcaggttagaacgaagttagctacgaacagagctttccagaccccaatctcgcaaaaagcagtatctatgaaccactgctccatcgatctcacctggagggacttcgccttctaccctgcatcgcctgcttaaacttcaccggcggcggccaccgccagcaacttaccaaacaatgctaggcataaccattagtaaactgaaagtgatacaccaaagttgcaatgaatacc

SEQ ID NO: 159484 - DNA, 416 bp, Zea Mays
gttctgtgcaaattctaggacctaaccgtaatgcttctaatataattctggacggcgggttgtttttgaaataagtcagggtctctttagcaagattaccaggccgaagaggtatctcttgttgtgagccgttcgatcaagatttggtggataaaatataacaacgaagggcaagtaactgtaacccctgatccatgtatcagcggtccagatccaaggcaggcgtgatccactgtgcaccgcaggatcatgatcaaacgatcatggtttaacacctgaaccgttttccagggatcaaatcaaagtcgtccgtccatagatcgatggccaggtggtcgtcttcaaccccccggcactcactcctttcttccggccgactcaagacggcgccagcagcgcacggtggtttaaccctg

SEQ ID NO: 159485 - DNA, 692 bp, Zea Mays
gaagaacgtctgaatgttgccatccaattggctaggtaccagcaaactttgaggcgctaccacgacaaggcagtgcgacaccgatccttcgcaatagggtacctagtgctctgtggggtgctaacgggagatagcgacacaaattgtcacctccataggaagtaccattcatcattgcagaggtcactcggccaggatcctaccgacttacccagatggacggaaacgaagtgggaaactcgtggaatattgagcacctcaggaaattctacccgttgcattacatcaaaactctagttagcaagccgcactttgtaaacaaaaggttacattatcaataaaccttctgtgttcgtccgcatacaaactctcaactagcaagcagtttaagtcggaaacgacttaaaccaacacaacatacttgcatacacataacttggggtgattactataccctgctaacggagcaattggcttaagtcggaaatgtcttaagtcggtgcgacatgctcatgcttacataacttagcgtgattactataccctgctaacggagcaatcagcttaagtcaaaaacgtcttaagtcagtgcgacatgcacacacttacataacttagggtgatcgctataccctgctaacggagcaatcgacttaagtcggaaacaccataagtcggtgcgacatgctcac

SEQ ID NO: 159486 - DNA, 658 bp, Zea Mays
aatcttgcccaaacaaatttatataaactctaccacaaaagtaattaatggtaggactaggcaaaataaactgaaccgaaataactagaaccaaaacgatctaactgaaaccggattaatcaatagccaattcgacttaatcaaacactgtctataataacatagcccaatcgagatttaggcctgacccaatttgatttttctccaaactctagaaccctatataagctaacaaatgaaaaaagagaggagaacccttctctcccaagccggtctcctctcctccctcatgctcgtctcccacctcatctctaccgacgcgtgcctccactagtacccaacctcgcatcctccaaaacggcaaacaaaagaatgatgcataatcccatgaacttcttgtctcgtttgtttatatatcatcacaattgtgtgaggtggttcatgcatttaattcccccacatcatacaacacattaaatagcactcactacacaattatactgaaaccaatttcatagtttcatgagattggccccagcgtgcatcgtctctcccaaccacctcgctcacgatcccccacgctcgcgatctgcccgcccccgctcgtgtccccctcgcatctaccccactcgtatcaattgtgtacttttcgagattg

SEQ ID NO: 159487 - DNA, 686 bp, Zea Mays
gaattggatggttaggattagatctggtttaattgaagtcgggtcgtcagatcagaattaggcggttaggatgggcaccagggacttcaccttcaccggtcagcctagggcgatgctccccgcggacacgacggcgaggcagactagggcttctagggcgctaggggttggtctgggtatccagagaggttggggatgactcgacaaacattatggcgaggtcggggttgcattgtaacacccctggtgttactgccactaaaacctgagcatgacatcataagcattggcatatcatgtgtttgtcacacctagaatgcatttactaggcaaaaagttcaaacaagttgtattgatgtgacatttcatgggtaaaaccctaggatacagtgcttaaccttagactgggcttaagagaataaacaaaacttaactaagagaaaacttcaaaacttagtagaaatgatcataaaatatcatcatggatggacttaagtagcatccaaaccttagaagcaccaaaaaccctaaatggacccttgagaaaccctggactgaaaccctaggggggtcatatgcaaaatgtgcacatttttggacctaagtgcaaaaaccatggaattagggtaccttaactcatagggttcacatgtatgtggatttgcaaatgaaaccctaagttttgg

SEQ ID NO: 159488 - DNA, 840 bp, Zea Mays
gtgtgattgtctcgcccattagtgagggcaatcgcaggctgaatagcatggtcaacctggtcaccatgctcaacaccgagctggaccacgcccttgacgagttgggcaaggttcaggcagaggttgtggaaatgtgtgttgagcacgcagcgcgccactattaggatggtggttcccccgctcctgtcgggattcatcacccttaccgctcgccgccccgtggtcgctttaattacgacacctctgactgcaggacccagatagatttggagtcatagatcgactgagtcggagtctgtaataatgcttaattcagtgtcttagtctcaatcagtcttagttagtgttagtttgcttatcatgtttttctatgtatgtcgtgatgaacttgtaatgaagttggatctttgtaatgattgtcaccaatgtgtgggcatcccctgccacttggtgtagttattaataaattcagttatttagttggaaacccatttgtttccactttcctcataatctgagttctgtttggctattttgggagtcagttaagatgataaattattcaatgtcatgaagatttccatatatattttcttatgctgaaagactgcagagtcagatttgatgtgtgtatgctttctacagatgtctgaaaacaggcgcagcggtagaaggtgtgcttagcaggagcagcaggcaccctaggaggaggcacctcagcagcagttgtcgccgccaccccgataaccattgagcagatgttcttgatgcaaacccaagcagtccaaacaattggccagacgttagcagcaatgcagcaggtgcagcagtagcaacccc

SEQ ID NO: 159489 - DNA, 631 bp, Zea Mays
agaagaggcctacccacaacccctggttcacggcatcataaacgtgatcagcgaaggctcaagcatatactttgatactaagaatagaggagagaatattaccgaggtgtaaatcatgttgtaaacaatggatggtcgtctagacaaagttgtcgcacatcccactgaccttcgaccaaaacgacatcaatctctgcaatgcccctcacatcgacgccatggttatcagctgcaatgtagcaggctgagagattcgcaaggaactcgtggacaatgatggccaggccaacatcatctttctccatgtctttgaaagaatgggcataaatctgaagcagctccagccggcggacaaccccttatccgggttcgaaggaaaaacaaccctacccctcgggaaaatcatcctaccactgtccttcggtaccggtgcaaatgcacggacagagcacatcacattcgatgtcatcgacatggtacccatacaacgcaatcctaggcagggggccatagacgcctttgaagtagcaattcacgggttatacctatgtatcaaaatcctaggatctagcagagtcattacggtcttcagcaatcagcagatttctcggaacatagagcgggacttcat

SEQ ID NO: 159490 - DNA, 576 bp, Zea Mays
atttattaacatcactttatttcgtcctccactcacatttgtgcccccactcaatatttaggctggatccacccctgattttaagagtatatgtcctagtgccatagtctatggcaccaaaatattgcgccaaccaccattatggatgatgatatggcaggaccttgtgccgtgggccatggcgtcgacctcaacactatgaatcttagcactgaagtcctaccactcgggtcgagccttctcctttccctgttcagtgttgctcactcgctcaacctttatttgtttctcatctctcttctggtatccctcgtccttgttcgagtgtggcaacaagaatgaataagtgtatctgtcgggtacccaggaacctggtgcccaatataggcccaagactcttgatggcccatttgttgccctagtctctaccgagcaaccttgcaaggtggagcggccgaccaagtccctgtcgagcaaccctgtgaggcggagcgaacaaccaaccctctgtcgagcaaccctgcgaggcggagcggccaaccaaccctctgtcgagcaaccatgtgaggtggcgtg

SEQ ID NO: 159491 - DNA, 668 bp, Zea Mays
gccagattatgcctgatagagggtttcaggccctgatggaactggctcgtcttttcccatttgttgtaggccacatgaggaacaaagcggaccatcttgttaaagcccacttcatacttttgtaactaactttttctcctgcttgtatgattgcaagtctatcttcatcttctccaggaaagtcactaggtaaaatctcctttcaaattgtcagataaaaataacccaggtcaggtaactcggtgaagacgagtgagcgcctacatgcctctccaccaaatttgagcctcccctccaatagttgcgtgccaaagcgaacacgatccccaaacgctatctcaaatacatccatcttatcttccacacaagttagccaatttgtcgccataccggagtaccactgccatcaaaagtgtccagcttcatgcccatccacttcatcagagaaagaccacagataggaagaggcacctcagccccaccacctggagcagcacccgcagagacagcacccccgagaacacctccaataccggcaccctaagcacccgcgaccggagcagcaccagtaggtgcaactggaatggcttgcctcagaatggccaactcctgctgcatggcctgcatcgcggctaacattgccgccggactcatagaatccccactat

SEQ ID NO: 159492 - DNA, 1651 bp, Zea Mays
ccttaagtcattgccgacttaagccgattgcaccgttagcagggtataatggtcaccccgagttaagtaagcgtgagcatgtcgcaccgccttaagtcattgtcgacttaagccgattgctccgttagtaaagtatagtggtcaccctgagttaaataagcatgcaggttgacagtgaacaatttgagtgcctttgaagtctttttattgatgatatattttccagtttatagagtacattgtcgtcccaatagcttttgaggtatagctaggggtaaaacttcctgagatgttctatgttccatgagttcccagtttccgtgccgtccatctgagtgagacgatatgatcccggccgagtaacttctgctactatgaatggtccttcccatagtggcgacagtttatgccgtccttcccccgttagaatttggcggaggacgaggttttcccactgcaaaggatcgatgccatatggccctatcatgatagcgcctcagagtttgctgatactgggctgactgaatcaccgtattcaatcgttcttcttctagtacatcgacatcttccagcctagtagcctcagcttttgctatgttttcaaagattaaccttggtgccccaaacttgagatcagcaggtagcactgctttcgaaccatagaccataaagaaaggtgtgtttccatgcaaagctcgactaggttgagttctcaggctccaaacaacatacggcagctctctgatccactttcctgcgaacttttcattcttatcgaagactttctttctgagtgcttccaatatcatcccgttggctctttctacctgcccgttggctcttgggtgtgccaccgaggcatatttgatctgaatgctcttttgctcgcagaaatcgaagaactctgagcttgtgaaattggatcccaggtcggttatgatgctattcggtattccaaacctgaatattatgtcttgtatgaattccactgccttagctaaggttagagaagcaatgggtttgaactctatccatttagtgaatttatcgatagcaaccagtacatgagtgtatcctccttgagccttcttgaaaggtccaatcatatccaatccccagcatgcgaacggccaagttatgggtatggtttgcaattgctacactggtagatgttgttgttttgacaagtactagcaagcttcgcacctctgaactaactcggctgcatcactctttgctgttggccagtagaaacacgacctgaagaccttcccaaccagggtcctggatgctgcgtgtatcccgcattgcccagcatgaacctcttctagcagttgctttccggtggctgagagaatgcatttcatgaggactcctgatgcgccccttctgtatagcgtttccccaatgagagtataatgagctgattgccttgcaattctttctgctgcatttttgtcgcctggttcctcctcattttttatgtacctgatgatcgactccatccagtcatcagaatttgactctagttggcttagagcgttgcattcctccacccgatctagtgagatgctcgggtgcagtatttcctgtacaaaaactctaggtgggacctgagtccgactggacccgagcttggacaatgtgtcag

SEQ ID NO: 159493 - DNA, 844 bp, Zea Mays
ctcccttgttgcagcttcagttaacccaaccacttgaataggcttactatgtctacaaaactcaagctcagttgcagaatccttggcttcaagctcatcgtcaccaatgatctcggcactctcatactcatagttccacagttcaggttcgtgttgtggtaatccgaaccttgcgcttccgaaaagcgtgacaggtggctcgactctgacctcgaaatcaaccactgctgcttctgcaccctcctccggtgcttggctgatatcatcagagggagcacaagcgctgaacacttcctcgcgcttctcgacggcttctactgtcagcagcactgcctgggccgagctggtaacggtagacattccatcagatatcccgagcaacttccagatgggatcgtcaggtccgaaccgggacagggagcagtgcttcctcacatagctgaggtccaccgccatgcacggcggcgtggtggagacgacccatttgggcttgaggatccccagcgcctgctccaactcctcccgggaggagtgcatcgacaagcagacgtgccagaccccgaactcgtcgcgcatcgcctccgtcagcaccggtttctgctgctgctgcgtcgacgcctcctccggtggcggtgggtcgtagtacgcgtaccactgcgaggagggcctgatgatgaggggctccggctggcgcgcggcgcgcgcctgcgcgaggatctccgtggcccgctccgacagccgcgggaacggcaggacgtggaagcgggtggagggcgcggcgtcgtcggcggcgaggatctccggcgcgacgtgcgccagcctctggtggcaatcggagttcttc

SEQ ID NO: 159494 - DNA, 599 bp, Zea Mays
ttgatacgagattaattaagaaataaattttaataccattttcatgttaaaacagagacaccgggtgataaacaacattattacaaaattatagagactgaaatgggtcgatttggactaagtatgcattttctatacattaaacaagttctggcatttattttcacattaaaaatccttttctaataaattttctctgattttctagtttcctggactgagcaccaaattctggaaagatcaggggctaacacagaaaatcccccagacacagtcaactggcgcatggatggcgggttggttttctaaaaacccagggcctctttagaaaattgttgaggccgaaggggtatcttggagtctcagccgctagatctgaatcgacggccatgattatatcatcataaatctaaagggggtacgcactcacggtcgttggatcgagattggatggcccagatcgtaagctacgaaggggtaggcgatccactaatcctagccgctggcgatcgatccaacggcaaggcgcttatcttctttctcagcccgagctgggcggtgccttgcccaaccgcggcggcgcccaggttgacggcggc

SEQ ID NO: 159495 - DNA, 548 bp, Zea Mays
cgcgcgaaattttagttggcgttggcgcggttatggcaggcccgccgtcgggcgtgttggcagtgtgcgcgggtgtcgcgctggggaagaaaacggggctaccggcgagcagacaacttgaagagagagaaagggggggatggtagagcgcggggaggaagaaggccggtggtccgttgggtgaggattagacggtggagattcgacggtgtccaggtcgcaggatcataatctggcggtcggcggacgaaacagatctcgagtgcgttaggccattgatcgggctgtgtacggataagattagacggataggtaaggggctttcgaccgtggattggtgatcttacggctggaatccaattaaacgtaccgtttcgatgaaatgctaggaaccgctcgatttaaatctaatgtgtgggagtcaatcggctttggtaaaatcttgtacgttcatcacggatcctatggacctcatcgcataccggttcacttaatggctgggggtgatctgggccgttcatttctaatcggacggctatagactcgcg

SEQ ID NO: 159496 - DNA, 517 bp, Zea Mays
gtcgcggggatatttgcgctttctcaggtgccagaggaatcgtggctattttggagaaatcaggctgcgaccatgtgaaaactttggctcaagccgaagctactttaagtattgaagatacaaaagacccttcggccgaagccagcttagtgggcggaaaattatttactaacatctgggagaatggcggccgaaagatggcgcatgagataataaaaaagagtgaaaaagattctcatgatgcaaaagaagcgatgaaggcagctgaaaaaactgcggaagtagaaaggaggataggtattgcttaataacttctaactttatgttttatttttgcgactccgaacttatttacgttttctatcgcagctgagctatctccttccccagagcccttcgagccaacggacgacccagaaccaaagagagaggaagaaatcactaaaatggccgaagctattttagatgaagctgtttctcgactgttgaacgaagctgcggaagcagttttgaaaga

SEQ ID NO: 159497 - DNA, 809 bp, Zea Mays
ttcattgaggatgcatgcattcttatgttgttatgttaaatcgtttaaatgggtcattcttggtacaggggttggagacaagcacaaccaaagaagggtggaagtactttgaagatattaccgatcaaaaaaaggattttgtctaggtagatgaccaagatggcagtcatactgagttagcatttagcaagaaacgaattgctgataggaaatagtggcttacaaatttctaggttaactctcactttctccgtcccaaattataaggcattttgtcatttatggattcatgatgtttactatgtatctaggcataacatatatacatggcaaaatcaatgaatctaggaaaactaaaatatcttataatttagaatggagggagtacatcttttcccaatttgtcatggtttgtttatgtgggatcaacactaaatatgcaaattgatattcagcatggaacatacatggaccaacgtgagaagcaagtcaagtatagtgatcttatcaacacagagttgatgctcttctcaatggcagtccagcatcgagcaataccttgaatgcttgatggccttaaaccaggctagaggaagattctgttttgttcattcaaaaggaattttttaaggaagctaaggtgtgtctttttacctatctttacattacagattatctggggtctatttatttattttttctgttgattttttgacaacaggtggctcacttctcttgttatgtgttagaacactcagcataccactaggtgcgataacagtgcaaacttatgagatgcttgttatgat

SEQ ID NO: 159498 - DNA, 484 bp, Zea Mays
agcttctcgcttttatcaaacacctttttcctgagtgcatcgagtatcatctcgttggctctttccacctgcccattagctcttgggtgtgccactgatgcatacttgatctgaatgcttctctgctcgcagaagtcaaagaactccgaattggtgaagttagatcctaggtcggtgatgatgctgttaggtattccaaaccggaacattatttcctgaatgatctccactctctttgctgaggtcaaagaggcgatgggcttgtattctatccactttgtgaatttgtcgatggcaactagtatgtgggtataccccccttgagctttcttgaaggacccgatcatgtccagcccccagcatgcaaacgaccaggtcacaggaatagtctgcaactgttgtgcgggtagatgctgctggtttgataggaattggcatgcctcgcacttctggactaacttggctgcatcattcttcactgtcg

SEQ ID NO: 159499 - DNA, 352 bp, Zea Mays
cctccgtcatcgcctggggtagcctgcgcgacctcttgctgctcaagtgctccttctcgatgagcttctttgtggggcatgccacgatttaaggtgtgcttcttcagcactttctggttcatgtttttgtgtatgcatgcggatgcaagttctgaaattgaactatacaagtaacggtctggagtttgggctattgctttcaagccatagtgattgacaagtccaagcattctttaacccaagtttgaatttagatcgttgaagctggagatggcggtttgtccgtacactctatatccttgcctagcacctgtctacgtgggatgtgttcacttggaggtgagagatttgt

SEQ ID NO: 159500 - DNA, 510 bp, Zea Mays
tggaggagtgcctgggggcgctgtccctgcgagtgctgctcaaggtggcggggccgaggtgcctcttccagtcaatggtctttctctgatgcagtggatgggcatgaagttggattcttttgagggcagtggtactccggtcgaggctgcatattggctaacttaagtggaggataagatgaatgtcttcaagattgtgtatggagatcgggttcgctttggcacacagctgctaaagggagaggctcaaatttggtggagaggcgtgcaggaagcgcactcctcctcaccaggagtcctgtcttgggatgtcttcatcatgcagtttgaaaggagattctacccggtcaccttcctagagaaaatgaagattgatttgcagtcctacaagcaggagaagaagtctgtcacatagtatgaagtgggcttcaacaagatggtctgctttgtccctcatgtggcttataatgagatagagaaggcgagccagttccgtcaaggcctgaaacc

SEQ ID NO: 159501 - DNA, 505 bp, Zea Mays
gcacctatctaaaggttagaattgattaacccagatcattaatactagtaagatagactggttagctaatttgaactctacacctaaaaaactcttttctcacctaatttacttaatcctaaattagtgcgttataccaactcggccatatacaattatctgaccataagcagctaccttacccatcagatagttgcataacccttccgttttaacctaacaacaaaacaaagattctgacctacctacaccatgtaatccatcctaagcacaaatatcttaacaatatgtccctaacttgaatggaagcaccaagaccggagaagggataaatcaaccttgtcaaggaaggataggagtcaaacatatccccagatgagtcaagatccaccatcccagatggggtctttccttgccgtaatttgtccctaaccctttctgaccccgacctatcctcgctctaacaagaccttgacctaaaagatgaaatgctttcctaaatcac

SEQ ID NO: 159502 - DNA, 526 bp, Zea Mays
atgaataaaacaatacatagataaaataaaatcttacatgttatgctgggatttttgtttttgccttaggattgaagtggaattccagcttagattaaaaagagatttggattttgaaataaaatctaaaaaaactgaaattagaaatgaaaatagcaataagaaaaacaataaaaaaaagaaggaaagaagattacctggccggcccatcaacacttgaagccgaagcccatgcctcccacgtcctcttcttatctttttcctttattttatttctctagccgctaatgccatggtcatgacgagacatcgtcgtttatttctcatgtgatattgccgcctagaacccactgctcagcatcaccatcgcgcgcacatcaccgactttgcgggctcctgcggcgacggacttcatccttgcatatgtagcttttcccgtgtatgacgggtgggccacagtgtagctgtgtttttcccttcggacaatcggatctcaacgaaatcgcgtgcactacgcctattgttg

SEQ ID NO: 159503 - DNA, 342 bp, Zea Mays
acccaactaaggcaaattactcaacaccctcgtgtgtaggtcaatgtcctccttggctctacaggccacctgccgtgcatctagcaagctgctttcaaagatcctcctatttcttgctttctaaatgttgcaaactgtgtatatcaccaccccgttgaaatgtcgccgccgttgccttggtatattggtggctgcctcttcacaccaagcagcgatttctcttggttgggcctatggtctaactatatcggcatcaaagtaggcatatgctcttcggaatttgtccaggtcagacaccccaagtcctccaagctcctttggcttggacactattggccactt

SEQ ID NO: 159504 - DNA, 477 bp, Zea Mays
ccccaacgaagctggtaaaaacagaagtctagctcaacttacctgacttaatgcctccttcagccggcgggacacagcgcccgcctcgtccctgacggcagtgagtgccggaatctcaccaccggcactaagagcactacccttcgccctaggcaccacggcagccgccgcggtcgccacggcgggctgaacaacaacaagttggccttcgcccgaccctgcaacgtataaacagataaaaaaacacataaacgagctaacgacttaccaacaaaataatcatccacgctaatatcggtggcgaagtcggcgacgcgcttgcccggtggaggcaactctcgggccttcacggctcccgccgggacagacttggtaccgccggtggcggccgccttcgcagcctccggcaccctgctggacccaggggcggccgacttcgccgccagcgtcggctggcttccgccgggggcagcagcc

SEQ ID NO: 159505 - DNA, 571 bp, Zea Mays
aagcttctcgctcttgtcgaataccttttttctgagtgcatccagtatcattccgttggctctttccacctgcccattagctcttgggtgtgccactaatgcgtatttgatctggatgctcctttgttcacagaaatcgaagaactctgagctggtgaagttggacctcaggtcggtgatgatgctattcggtattctgatcctgaacattatctcctggataaattccactgcccttgctgaggtcaaggaagaaatgggcttgtattctatccacttcgtaaatttgtcaattgcaaccagtatatgagtataacctccttgagccttcctaaaaggtccaatcatctccagcccccagcatgcaaatggtcaagttataggaattgtctacagctgctgcgcaggcaagtaatactattttcacaagaattggcacgcctcacacttctagactaactcagcagcatcacttttggtggttggccagtaaaagccggatctggaagcttttcccactaaagtcctcgatgcagcatgcacaccacactgccctgcatggatttcatct

SEQ ID NO: 159506 - DNA, 351 bp, Zea Mays
tgcatatggtaacacacgtactgtccacttcccgtctctttcagcatgctacaacacacgtactgtcaggatcttgtctacattctccacctcgtacggtaggtagtactgtgtactagcatgatataaataaactaatccagagtccaccagcctccctttccagttctagagatcaataatatatgcaagcaaactactatttagttgtgaatgacattagatatctacctgggcgcatttgtagaaacattatcccgattaagagtaaagatgttactaactgccctgatcacagatacaatatcaaatatctattcgacttgttcttcgcgctatatatgtgtagtt

SEQ ID NO: 159507 - DNA, 319 bp, Zea Mays
gctcgggttggggaggagggcgcggatcgtcgatcccacgatcgacggattggttcagcccacgcgtacccgttcggtaggttgtatcatgcgtgtcgatctacgatcgtagggctgttacgccatcagtgttatttagagtctggaccgttggattgtgatcgaacgatctagggcgcttgctggtttataatgggcgagatctgatcctggccattgcttctgatcgtgcggtctggagcgcgcgataccccttcgtctctgtaaacttgctaaagagcccctactgaattatgaaatagaacccgcagtcctgcgc

SEQ ID NO: 159508 - DNA, 438 bp, Zea Mays
tggagatgagttgtcaaagactgagaagacaaagaggtcgacagtaggtactcgggtatccccctccaaatgcaaggtgaatagagtaaagagggctggttgttggaagtattttaaggtggtcaatgttgcatctagaaaggaacttggagttatggagacaaaagccaagtgcaagttatgttataggtcttatctataccatcaagggggagtactacaacactgaaccgacatctaggcaagtgcacacagtatttgaacaacctggcacgggctaagaaaaaacttgctcaaagtactatcccctttactttcaatggtggagttgttgttgttaatcccactgaatatgatcatgagcacactagacttttgattgccaagatggtaattgtccattattatgcatttagaatggtcgagcataaatggttc

SEQ ID NO: 159509 - DNA, 729 bp, Zea Mays
ccgttgtggcatcccggccacgtccgcgcccttataggtagcaggaccgggcttacctctccctcttgccttcctactcttgcgaccgccaccgtagtggagatagagtcgagagcgaaacagagagtgggggagattgcccctcgcggccgccggcggtggaacccttacctcgcccacgccgcgtccctggtttgcttcctgagtgcatcgctgagacattgggaagacgctcgtgtccccgggaaagagaagatggtcgtggggtgtgggaaattgctcaccagagtccgagggttaccgccgagccgcctgaacgtgtgggcagggccgtcaccgcttcataccgaggtaatgcgcccaccaactgattcgccttgacctcctctacgcgtagctcgatccaatttaggtttggcgctcgggaacgggcgattggcagcctcgccggcgtgctccgttgggggaaagacgaaatcatcgccgtccgatcctctatggacggtaccgattagatcaagcataccccttcactcgatcgaactgagacagtagatgcgagatccaatggcgcggagttgattcgcaactcattaaatccgggccgttcaccggtgatccaacgacttagcgcgcgttggatttcataaagacttagattcaatctgagacatccacgtctgatccaacggcccatcgtggccgataccgcttcgcagtgctcttttg

SEQ ID NO: 159510 - DNA, 816 bp, Zea Mays
ggatctcactgccggttaccatcaaattctgctacacccggatgatactcacaaaacggcttttcagacccactctggtcattatgagttccgtgtaatggcattcggattaactggtgcaccggccacattccagcgggcgatgaatgataccttggcgcctctgcttcgccgtggtgttcttgtattttttgatgatattttaatctatagtgccacttttgaagaccacttgctgcaccttcggtcggtattggagcttcttgcccgggatcagtggcagttgaagttgtctaagtgttcttttgcccagtcccagttgtcctatttgggtcatcttatttctgctcagggagtggcaacagatcccagcaagatacaggcagtggcagaatggtctactccgggtacagtgaaggaattgcgcagttttttggggctggcaggctattacaggcgttttgtgaaacactttggacttattgctcgacccttgcaagctctgctcaagaaaggggccctatttgtgtggacttctgagcatgaagcgacatttcaagccttgaaggaagctctcattacagccccagtgttggcactgcctaatttttcattgcctttttgtttggaaacggatgctagcgcagtgggtgttggggctgtacttatgcaagctggtcatccggtagcttatttgagcaaggctttgggtattaaatctcaagggttgtcaacatacgaaaaggagtacttggctatattgatggctgtggaccattggcgtcattatttgcagctgaaggaatttcacattca

SEQ ID NO: 159511 - DNA, 357 bp, Zea Mays
gaagaaacgtagtggccgccggatgataaacgaagggctgcgatttgatctgtgaactgacttagctaaggctcctcgtgaccgtagattggaggatgaacgggcggtcgtgtgcgtgggttgtttttaatcccaacccttggattaggatctggtggtcggaagcgcgtaccccttcgtcgttatatcggatccgtcagatcgggatcggacggctcgaggcggatctatgtaataactacgtgcacacttttattaattagcccttggattctgcttcaattaacccgccatcctacgggatagctctgagccttaggacttttatgaattagaccccaagcttttctgttttgt

SEQ ID NO: 159512 - DNA, 754 bp, Zea Mays
accatgatctagtcagtgtttggctatgattgctatagcaagaatgtagctggatcatcaggcaacaaatttgatacaggtgggtggtgaggttgtcacatagattatagagaaaatctgccttgattgtggtctatcacgcgctctgtcgaacgtttccaatagtacagtaaacagataggatcaggtttagatcccctcaccgccgacgagccgtgcgcttggattcgtgcttgccgtggtgatttgcgctcggatcagttagataacatcgggggtacgtaaatatcacgccgtggatacactccggctactattttactccggccaccgtacccgagcagatcacagttgctttggatgggttcgccggagatagccacttcgcggccttgcgccacgtgccttggcacgttaaccacaccgccgtgactcacgttagcccgtccggtggtcgccggggagcttgccacgataattgccaccaatcgcgcgctagtgaccccctctttcttcggcctccacacgtctctctcaaattcactggccaacgctcaagacggctataaattgcgcatacccacggctcagttaagtagtcaagcccctcatccagcaaaccgtgcctcgaatcatccactagagctccccaatttgggatttcccccaaatcaaccaagaacactgagcggtgtgacctcgccgtggccaacgagtttcaggtccgttcatgtccgctgtcctcttgttttag

SEQ ID NO: 159513 - DNA, 418 bp, Zea Mays
gagacatgggttaataatatactactagtatcctccttccatgagcattgtgcagtccatgttcagctggctccctggcttgtgcacatggcctcaacactggactgctcttaaaggcaccattgcgctggttttcagctggaaaggtgtcgctgataacttcagtcagcagcactcagcggcaaagtcaatcccgaaaatactgcacaattgtgtgaagtgaaatctactcgtgctggagctctttgagttggttgatatttgagacttgagaccgtagttggtttgcagtaggttgctgtggttttgtctgttcgcttctagttttcctgatggggacttgtccaaacaatttcaggaacggtcatccatgatggttgccaaatttattttataatatgtacagaagacgtgaact

SEQ ID NO: 159514 - DNA, 726 bp, Zea Mays
gtcaacatctttgttcggagcttcgggagcaggagctttgatcttttcaggtgcaatctgccctgtcgtttttttatcaagcgcggcaggcttcgtctcgatgggcactgaaggcccagcttcggcttcggcctaaactttggtatcttcggcaattttcttgggggcagggctcaaggccttcgtagtctctataacagcatctaatacactggccatgctcctcctcttgggagttgtggtaggaattttttgcatctttggcaaatctgcctctgtcggtgggcttagaatttctggcgtttttatcaccttttccacctgtggctcttcagtcttatcatctctagctttggctggcccgactttaggcaccttcagcactacaatcggctcttcagtactctacacaatcggagcagcttccttggcctcggcagctgaagaggtccccgcgccaaatttaggcaccactgtcggttcaatgtaacgcggccggtgggtcagaaccttcatctttttgcccttcaactcagctgctttagccgaagcagcagtctttctctttttctcttgccctcaaagcgggtaatggtgatcagggtatacaaagccaatagcatcaaataccctgttcaatctcttcttgccccgacccccgaaagctgcggacaaagcattatcttcggccttggagtatgccccaagtagctcatcactggtagc

SEQ ID NO: 159515 - DNA, 705 bp, Zea Mays
agagacacagggaataaaggaagtaggacggcgggttcattataaaataccctagggtttctttagcaaaatgtacccccgaaggggtatggtgcgatatcagccgctagatcccgaaccaagggcccggattagatcctacataaactgaaacagtatgccaccagagcggttggatcagagatctacggtccaatttcaccaatcccgtggcctaatcgtcgctattggatcccaatccaacggtccggtgttatttcacacgcgatctattctacgcccttcaatccggatcggacggcacgggtcctgtcttctaccccgcggccaggcgacggcggtggccacgccctcgcggcagcgccccaccggtgagcaatttccgccgccctgatgcctaaccgataccccaaggcgatccacgtaatgcaaggaacactatgaacacgtgagcggagtttttaccggagttgaagcgtaacggcgcttgcccacgcgccaaggcggatctgcggcagcgcacgaatccgaggagcgattcgaccgacgaagctacgccaccgacggaatcagctgtcgccgaagcttctaggagtcacggcgcaacgctattttgccctacgggtgcccgagtgccccctggctcctagttcgacggcggtgacctgttttctcccccgtggcggctctcccattctcttcctc

SEQ ID NO: 159516 - DNA, 712 bp, Zea Mays
atgtacgtaattttgtaatggttcatctgatattatctttacgtgcgcataggagttgacatgtcttgctagaggccgctgtcaattattaggccaagtaagggtacttgtgccatgtctatatgtacgtgaacctatagggtcacacacttaaggggaaggaagcctaactcagattagatccgaaattagatagggctttagggttactaatgggccttggagttagaagcccactagaacgcctatataatgagggataggggcgcgattaattaaaccctatttcgccaccagtaaatgagcagacgcccgcccctcgcctagccaccgtcgtgaacctagaagttcagaacgcgacgctttctccctgtacgtgtggatacctcggaggcgctgcatctggagtactaggacgaaccgtgcgaggacgtgaaggtcattgacgactgcaaagcactgctcgacacattcatctacatcgagtggtaattccataatctataaccatagtagttcctggttttatggggtcaaaaatttggttagcgctagtgtagcctccccattatccttcacctgcaaggacccacctcggtcgaacgccatagcaccgagcccgaggccggggatggtggggcctgacaagggaaaccgggcgtgtcggaagggagccactcaagtggattcaacgctcggcgctaggttgacc

SEQ ID NO: 159517 - DNA, 402 bp, Zea Mays
gtgagtagaggaagaatgcagggagaacgcagatgagagcacaaaccctagaccacgtcgtctgtggaggagggagcagtcgagaccgtgtcgagggagggaggactggggatgactgcggcggcgttgtggacggcgacagagtggacggaggcagcagaggaagtccgactcgcgtcaccgcgccagcgtcgctcgcgccgcctccccctcgtatgcggggaaagctgtccggcctcgctgctggtggaaagctgccccgggtattttgatcgggtcgagggagaactggcccggcagattggcttccaaataggccagaaattttccctgggcgctatttccacgcggacttcgctcccccggaaaaggccgggttcccctccgaaaatctgactgcca

SEQ ID NO: 159518 - DNA, 299 bp, Zea Mays
atttggagatgggttctgctgacacctacaatgcggacgtgagcgtgaccgcactgagctattctgacgagcagcagaagccgcaggaccatatctacccttaccatcagtcgtctcttgactccactgcgctggagaaacccatttgggaatcctgatgcacgcacgcattttacttgactctggtagttcagcttcaactaagctgtccttggacatggaacagcagtagtcgttattaagctggtattagcatgcatgtgccaggcagtgaaagccttgttctgttagggcgggct

SEQ ID NO: 159519 - DNA, 329 bp, Zea Mays
tcaaaacagaaaacttagaaaacttcattgaagatttgcaactggtcttcaatagcctgaggcgatactggtggaagctcaacccagagaaatgtgtttttggagtaccagcagggaagttactcggattcattgttagccaccgaggaatcaaagctaacccagaaaaaatcgaggccataatgagaatggaagcaccgcgatcacagaagaaagtgcagaggcttactggatgcatggcagccttgagcaggttcatatcaaggctaggcgaaaagggcctaccgttctacaaattgctcaagaaggtggacaagtttcagtggacc

SEQ ID NO: 159520 - DNA, 552 bp, Zea Mays
gatcacctcaccaccgtccagaatgtgctcgtggtaaggttgaggttcgtgttcagtacaacttcatcttctctcaatgcccttatgtcaccctccaacatgcgtgagtatgcacttggcgcgttgtcttgtcccttctagcacgggggtcattactgtggagactctcttgtcgtggcccctctcggcattgtacacatggcccccgtacatagtttggtgatgatgtgccctgtcacgatcgtcgtgagccaacaacgttggcctgggttcctttcttgcaggtccgcttggcgtgatctttgtcgtatgccttgcctcgctgtcttgctcggcggagaattggttggacgctccgcctcacaggtttgctcggtggggacttagtcgttcgtcccgcctcgcgaacttgctcggctggacttggtcgtccgccccgccttgcatgcttgctcgacgaatgggctagaaagaggttttatgggcctcaccatgggtaccccgttcctgggtacccaacacgttgtgtgtcgtctgcctctctcaattgtc

SEQ ID NO: 159521 - DNA, 623 bp, Zea Mays
gcgggtttattcttaagaatcccagggactctttattaagattcctgagccaaaggggtactctcagatctaagccgtcggatgtggagcgcatggcctagattagactgcatagcccatgaaccggtaagtcacagtagcagtcggatttaatatcaactgtcaagatttaatgaaccgcgattgcccaacgaccacacgatcggagatcaatgtctaacttttactcccggcgaagggttacgcgaccttctaatcttgaccgcccatccagatcaaacggccagggcatcgtcttcaccccctggttctctctctcttcttttcttctctcgcgatgacccaagcaacagcgcccagccaacacggcggaaccgcgccggcgactctcccatccacgacccggtgccctagactaacccgaagggaggtgcacgtggtacggggaactgcgaacatgacggggcttagtcataccagtgttatgtcgtgagggctcttgtccacggcgtgaggtggacgacggcgctcacccagctccggtgagcaatcccggtaatagcagatccttacggttgcggccgactctcaaatgtacctccacgatgtaccgtcaatgcccc

SEQ ID NO: 159522 - DNA, 503 bp, Zea Mays
gttcttgagcagatttgagggaagtttaaaattggagctcactggtgatcgactgggagcaatactgcgtggctgggtgtgtgatgaccttgtggagctcacggcgggctcaatttataggaagcgaccgcgagcacaacgaatttgagcggcggatcgtgatcggtaagaacaaggtgagtcactggtggccggttaacgtggcttttaccgtggcggcacctccgccgatcaccggacatgcaaagcacggttagccatgacgtggtaaagcttctggacatgcggcgaacgacggttatggttcaacggcggtgagaatcttatccgagggatcggtgagcaagggggaaggtacggcggctagccggagtggtgtccagctcaacggcggtgctgatccttctacccgagatgttacccacttgccgcgagcacgaatctagacgccggcgacatgaatcgcggcggagatatcgtcggcagtgagatctctacactgg

SEQ ID NO: 159523 - DNA, 743 bp, Zea Mays
ggcatgacattgcctatgcagtacaataggtgtgcttccacattcatgatcctttggagcctggtctaacgttgaggcggagtgccgcgctttggccagtgtagtgaccgaggttacttggctacgacaacttcttctcgagctgcacgctcctctttgtcgcgctccgttagtgtactgcaacaacgtcaacaccatctacatatcctccaaccccgttcaatatcagcgcaccaagcacattgagatcgatcttcacttcgttcgggagcatgttgcggttggagatgttcatgtactccatgttcccacatcatctcagtacatcttcatcttcatcaaggggttgtcttctaccgtctttatgaaattttggtctagtctaaacgttcgtggcactgatggttagactacaggggcgtgttagactattgtattagactataggcccgactgttcctgtggaccaagggcggcaactgtctaggcagcgtccagccccactagtttcttttagattaggcaaagatctctttgattggcggtgtttctataaacccaggaatccttgcctcttttggtccttgtatattaggcaatgatttccttgattggtggtgtttctataacctaggacatccttgcctcttttgtttccttgtagattaggcaaggctctccttgattggtggtgtttctataaacccaggacatatttgcctatacatgtacgtgttatgcac

SEQ ID NO: 159524 - DNA, 452 bp, Zea Mays
ccgaccgccagcgtgccaatccaaaactggacgccaccgctcttgcacactataaattaagcgtaccgctagcaccgttagataatcacaaagccagagcactcgctcctgcctccgattagccaccacaactctccaatttctctttctccccaattctgttttctgccaccgtgaaagagcccacaccgtggccaccgttctgtaggtcagctcaagctttcttaattagtgttcaagctttcctcatgtcccctgaagctcaccgacccattcgattgaactagaccgccttgaattgcctagaacaccttggattatcctcgatttccgccgtcatcgtgagcaggcatgctccggtccggatcagtgaaattagctgaggaattagtgttggggagggttgaattaagtggcaagcaaaggagaagtctagccatggcgttttccgg

SEQ ID NO: 159525 - DNA, 965 bp, Zea Mays
gccagccccaaaatcgcgaggagaagtgcgtagtcgccggtgtgcaagggaccggcatggggccgccaccgtgaagtcttggttcggtggtgcctctgccccaatttgagtctcccatgcatcgccggtgagaatagaagctgccggtgggaagaatcgcgcgggggtgctgttgtgggctcgggaatttctccccggagtctagccgccaccgtagagccgcgcctggccggggccaggctgaatgctgctgcgatccacggtgagacatcctccaaccagttcgtttatgcattcacttacgtttgtgcgcgatagggctcgggtgggggagatctgcgtccgatgaacccggaattccacaccggagcctggactcgtggccaagccgcagtgtgctgcagctagctcccctctccgccctccaacgatggtaagcacctccctctggttcgcaaacctcctctcttcgtttagcgtcggtcggatcgagaattcgagcactagaacctaggatagagggatccgttcatgggcgccgccgcggcagatttgtgcgtcgccgtgtgagtcgtttgcctcggccctgtagcgtgcggagggtgggagatgatgtgtaagccgtagatcttaggatgtgtggcttggattggctcgcgtggactgttttggccaaactgatctggttcgtccgatccaaatcatgcgcgtgtgaatcaacgtgagcaacttaaaatctgggacgtcgatcgttgatccaaggacttgcaagacgtgccgatctgttaaaagaccagtttaatcttcgccgtgagttttagatccgacggccaagatctctcgataccccttcgcgatggtcatttttctaaagagtcctcgggaaataagaaaatagaacccgccgtcccatattgatgttcactgtgtctaggataagttaccagtgagtccctgcagttttc

SEQ ID NO: 159526 - DNA, 1200 bp, Zea Mays
gccagcacgacttatagaatttcccagtaaatccatctcggccgggagccttatttgaaggaagagataggactgttttccagacttcgtcttcagtgaacgggctatccagcgatgtcagatcatgggtagggatgtcaagttgagctaggtcaatggtgtgcgcccggtcaggtgaacatcccagcagcttgtggaagaactcactgataacctccaacttttccccatgtgatgtctttatcgatccatcatcaaaaatcagattgccaacaaaattcttgcctttgcggtatttagcatggaggtggaaaaaggcagtgttagcatccccttcagccaaccatgtgatcctagagcgactccgagccatagaacgctgcagtgatgagaggaccacaatgcgaccatcaagctgatccaccaaccaattttataacaccgacaaggatctgaaatcttgagcagactgcaacttatgcataatctcccttgccatccctagctgagaggtaacatgtcccatccttttttgagaccagctctgaagatgtttgacagtggctctgaattttttggagagggtgacaaaaggataaggggaggaggaaacagagttccaagcagcctccactgtcgacagaaaatcaggcgcctttgtccagtgagattcaaaacggaacctcctgcgcccaagagataaatcatgaagcccaaggagcagagggcaatggtcagacccgtcagtgctagcactctgcagaaggcagttaggaaaaagttgttctcaatctggcaagcaaaacattctatcaagcttgacaagagtgggtggatcttgacgattagaccaagtgaatttcctcccatgtaaggccaattctttcacccccagatcattaatgagccttctgaatctgtccataaggtgtctattaaaattgccggagctcttgtcatcatccttgtagatgaggttgaagtcgcccattaaaatccagggcccaggacaagcagatctcacattgcgaagctcttgcataaactgaattttgtcgctgatgccttgaggcccataaacacatgttaaccaccaaggatgttggtcacgtgggctgaactgaattgtcacactatgatgatccaccctagaagcgctggccggaccaatctcattactctaggccacgagaatccccc

SEQ ID NO: 159527 - DNA, 900 bp, Zea Mays
ctgaaatatagggtttttgcccaaagtgaccacaacaagtttgtagcccaattataggaaaacaactttgtttaaggattcaagccatggtcttatgagaaatttggagaaaaacccaatcaaagatggactgtcaggctgatacagtctgaacttcagatagacagtgacttggatctaggtttgagagccatttcgactaagatctagagagaatctacctagggttgctataacaaagttgtagagttattaaagaggaacaactttgttatgggtgtttgggtttggtaccacatggaattgggagaaattagagctccaaagtactctgtcagctgctctgaataagtgttcgccatggtacagtaaaaataccggatcagaccgctagtgcggctgtcttcaccgtcgacgaccgatcttcgccgtgattcgcgccaccgctgtgtgattcacgtcgccgatgacccgataagaccgccaggtaaaagccaccctctggggataactccggtgactcaccgtgactgcctttctgctttgcggctgtagccgataagctcaccgtcgaccgccgcctctcggccgtgtgccgcgtggctcaactcttccaccgcgtcgccgtgacccgctactgctgtcaaatcggcgccggtgagcttgccacggcgttagccacgaattcaccgcgccgccttcttcctcatctccggccgccagcacggctcggctaaattgatcaccaccgctcgcgggttctataaattgaccatgcccccagctccgccatgtatccaagcacctactgcacccacctgcatctcaaatccctcacccgcaagcacgaatttcggattctccccaatccggttctaaaacaccgtgaactcaaccccg

SEQ ID NO: 159528 - DNA, 294 bp, Zea Mays
atagcgtgcatctctccagttcacctgtcaacagctgagattggtttcgatagggacctttctggtttgtatttgtgcacccccagaatgtgagcattgattgattcctggtcctaaaggttcaagtccaagctccaaatgtatcttcaaggttgtgttctgatctcatagtttctgatttggtattctaaacgtaacatggattgacatttcacgttcttcttccagggttgacagaaccaccgatcagaggatacaacagaatgaaccgtttcttttgaaatttgatcattt

SEQ ID NO: 159529 - DNA, 553 bp, Zea Mays
agattttcaagtttttgatagacatttggagtaatttgcagatttcagatttggtacagttttggtgcagctgaaaatagtttggtttgcttgtttttgggcccctgtaacttttgatctatgggcttttggcaaaaggttattatagaaaacttgaagagtaactgtaggagaacaacttttattaagtatggtagccctaaaaccatatgcaactgagtgaaaagtggtccaaagtggggttggtcggtttcaaaaatttcagacttggtgcagtttactaaaactgaatttggttcagatagctgaatctgaatttttgtatttttaccccactttgaagcactataactcttgggcccctgtaacttataccctgctcacttgtgttaaaaggcttggagtagtgaggtgtgtcctggccattttcaaaacccataactgaagataatggtgtgccacccatctgcttgtgttctgataaccaagataaactagttctgttgtgtaatatgctaaagaagatctgagttaaagggggggttcatttgcc

SEQ ID NO: 159530 - DNA, 305 bp, Zea Mays
gggagacaagagatgggggcggacgacacatatgggtgaaggagaaaaggagacagaggagcaggaagatggagacaggagcacgaaggcttctcggtggagttctcgtatatcttctctgatgctttcctcttacagtttggatcctatatagctgcacgagctcagcctatgatgtattattacacggctcattcttggcccattacacattacatggtccattagagcccattcacgtgagttccagctctagtcgatgtcttctgctttctcacaccgtgcttcatcctcagcttctcaac

SEQ ID NO: 159531 - DNA, 639 bp, Zea Mays
gatattaacaaacccttcttctcttgctaccagatggaaggctcctttgtcattaggacatcctactgctcagaggtggaaggattccctcatcttttacagagttgcgcgcttcgcatggggatccgcaagaagccgtagtacgtctggaaggaatacagcgagaatggaaatgaaaaatgctctatggcagtctacctgggagaaagccaaaactacccaaatcaccctcccttccaagtcaccgccactggacaccgcttcccagacacttgccaaaatgtttcccaaaaagccctccgccagctatgccaaaactacagtagggaagtctccgagacatcccttcgttactttccacccagcaacaaaaatacccctacctggaggaaaatacttcaggccttgtcagggagagatcctaatgaggatgaccccaccatagtctacatggtcggatatctccacacccttgacaaccactatgacgaccttttctcccactgcacccacctaaattcctgggtggaaagcctagagcaacaaatcaagaaattaaaagaggaaaaggcgtccctccaagaaagtctcgaaatagcagaaggcgaagaagccaacactcgtgaggcctaccaaacc

SEQ ID NO: 159532 - DNA, 796 bp, Zea Mays
agctcactcaaccttgatgtgtcctcctcctccatcagctctaccgtcgccattttttcctaaacgtatcttgcacgagcctcatctgcgagatagttcacgacacatccaatctctgcaatgtaatgagacaaataagtttgcaaagtcaggataaataaattgtacaagcgaaattatcatgtcatttttctcactcacttccactgagacgactggcaagattccccaacatctatttctcggctctagccgcctctggatcccattcccttgcatcttgtgctctcttctcatttgccgccttcaatctcctctactctgcacgcatcgggctttcaaaactcattgattttgcgaacctacgcatgtcctgtatacgatcgttaacgtacgaatcgacgagttgagatccacaatgcatcttctgtcccattagtctcttggactttattgtatgcatcacctcttctttgtcgtcgtatctctcccaaccgcatttcctcgtctcctacacaaaagacagtaagtacgggtgcaacattgcagctgagcaaacaaaaaataaatatcaacctcatcgtaatttaccatatgtccacaaaaatagccaacaccaagctcggaaggaactaatccaaacttagcttcaataccacatttacagattactggatcagacttcaattcttcctcccactcattttttttcttttcctttgcctctggctctagccaatgggacataggaccatacaaccactctaagaaatgacacttacgccacccgtatggc

SEQ ID NO: 159533 - DNA, 551 bp, Zea Mays
ttggcgtgttgctcggacgctaagctcaccttgatcgcgtgcaacccctatgctccgtcctcgaactcgtgcgtcccactcgcggccgcactgccgcggctccctgtgaccgcgctgggcgggccgctcctccccgttgaccgcacaccctgggcacctttatcaccggtaagaattcctctgctgaattcgtgatcacctacgcatcgcgtagctaggttttgtgacagagtcggagcactgggtcactcgatagccatacacagcaatggtcgccgtcgtgaggtccctgtgcgccgccgtcctggccattcgtgtgggggagatgatggagcaccgtccgatcgtacacgagtggctaagattagttggaggataccgcttcgcccgatcgcgatctggggcgttgatcttgcatcaggcggtcagcgggcatcgcacgactcattaaatgtgggccgtcagatctagatccgagggtccgcgctacattccgtttggtggggctcgggatttaatctggatcgtccaccttacatcgtacggtccca

SEQ ID NO: 159534 - DNA, 712 bp, Zea Mays
gcgccggttcctcactgtccgtggaagaccacgcgcggccgttcctggtgtcccccgacggcaccttctcctgcggcttcctggaggccggcgacaacgccttctccttctccgtctggtacagcgacgcagtgaacaagaccgccgtctggacggcaaaccccgacgcggccgtgaacggccggggttccaggatctcgttccgtgacgacgggggcctggttctcacgggcgccaacgggacgacggtgtggaagagcaaaaccagcggcgcgggtctctccgtctccctcctcaactccggcaacctcgtcatctcggatgatccgtcgtcgaccggtggcggccgcaccctgtggcaaagcttcgactggccggtggacacactggtcccgtcgcagcggcttaccaaggacaccacgctggtgtccaggtacttcatcctatactacgacaacgacaacgtgctgcggctccgctacgacggccccgacatatcgagcatctactggccgaacccggaggacggcgtcttcccgaacggccggacatcctacaacagctcgagggtcgccgtcctagacgacgccggcgtcttcctgtccagcgacaacctgcgagtcgtcgcctccgacctgggcgtccccggagtcaagagacggctgaccatcgatccggacggcgacgtgagaatctacagtctggatccgtc

SEQ ID NO: 159535 - DNA, 785 bp, Zea Mays
agagaggatgctgtatcgggcgggcagcagcggtctccaagggcagaaggaggggagaattgccgccacaaagaagaatctggcgcaccctcgtctgagccctggcctgtgcgtgccgatgttcactggaggttaagtatgttgtgtgtggcatcttcggtcaagaaaggtgactacggagctggcaatttctcgacgggctttggggaaccgagcgccgtcatgaccgttgcgcaacaacgaacttcatcactagtgagtgccctaattgagtttgcaggattcttggctgggtattaggcgttgtgggtgtgagattggagcactggggtaccgtgacacggtgctccggcaagccctcaaccgtgcggggcggaggagcggctattgccggcggctatgggtggaagatgacctgtgtgttgtgggatcatggacgaacggtggtgattaaatctttccttacctcttcgtctcatatagattcagccgttgcggggtgatcgggtggtggagattggattacgccaaaattaaatctggatcatagatctgaaatccgatgcccctggttgcctaccgatttacatataatctgggcacttgatgagtgatccaacggctcagatcatccaataccccttcgaccgtgcgtaatttgttaaagactccatggatttttatggaaccaacccgtgctccaccgcactagaagaaccatcgccaataggtcctaaactttatgttttaaaccttgaacttggttaaaatagtgtctgcagtcc

SEQ ID NO: 159536 - DNA, 520 bp, Zea Mays
ctcaaggtaaccattcagccccgcccttattttcccttgtctcgcatttacctgcccgtgattgctcaccggagtatcccccggcccactgagaactcccctccgccgtttgaccgcctcacccccgttctcacaaaaccgaccctgccatagagttcgcacgaccctccctaatctctccagttacccagaccgacccctcacgcctaggagacccagtttggggagcgccacccctggcttcccggcagagacaaaaccccctagcgcgcatccagtccgcccaaatccaatcagacgttccgattttaaataggccagatctaaccccgaccgcccaatctggatctgatcgttctccactctctccctcacccgcgccctgcgtctgggaccggccgatcagaccatctcgccccaggccgctaacgcccttggcccgctggttagtcgcgcccgcattcgtgcgcgcgcgttcgttcagtcagatctaatcttggccgttgctcgctgatccgat

SEQ ID NO: 159537 - DNA, 538 bp, Zea Mays
taacccacaaccatgctcatcggaccgcgggttctatttacgtaaaggatgagggttcatatgcaaaactgcagtcgcgaagaggtatcgcgaagtcctggccgcccgattcgaaacagacgcgccagattagatccaggcgagttacacatccgcgctcaaccctagccgtcggatccggaattcacgaccctgatttaatgactcgaaggggtacgccaggattgatctaagccatccatctaacatctacgactcccacactctcaaccatcgatctaatcgtgaccgttgaagatgagatcaacgatccgctgtccttcttcaacctctggctgcccaggcacagacgccgaccacacacaacccgctgccctctctcctgccattcaaccggcgctctgcctggccaagaccaaacagtggtcgccaccgtcgtccttcatcggcgcactggccccgagaccgcttcctacaagcaccagataaggcagcactgtgctcccacggcgggcatcgccatgccgccaaataccag

SEQ ID NO: 159538 - DNA, 484 bp, Zea Mays
ttttgggcctgagcttattcaagaggcagaagaacaagtccgtataatccgggagaacttgagggtagctcaaaccaggcaaaagagctacgctgataatagaagaagaccactggaatttgaggaaggtgatcatgtgtatctcaaggtgtcaccacttcgtggaatgaggagatttaaagttaagggcaaattgtcccctcgctttattggaccattcagaatctttaggcgagttggggagatggcataccaacttgagctacctgataatctatctaatgtgcataatgtattccatgtgtctcaacttaagaagtgtctatgtgtccttgaggaatagttaccaatggaagagctcagtgtttagggtgatttgacttacacggagtatcctattaagattcttgacactttgacttgagttacaagaaataaggtgataaagatgtgcaaagtacaatggagtcaccatggagaagat

SEQ ID NO: 159539 - DNA, 1234 bp, Zea Mays
ctggtctgcagctgcactatccccgtgatcctcctgctcgggtctaggctatttttagccgatctaattagcttgttgaagtttaactaaaatgaatttaacacggcataaatcagaatccataagatggttcagaatttctcgtttgggggcctgtactaggcctaaatcagttctctctagcatgcctgtttctttactcggcccggcgtcgttcttgacgggcctggcgtcgtggtgtcctggaatggatcttgttacatccattttcatgtcagcaggccgcgtttgctttagcatttttttcctgactctaggcgctagaagccgttgtagactacgaatagctttttagctcgtctacatgagaatcgctttgataaaaaaaaacgtacaaatcaacatgaacaaataattgatggagtcgtcgtgatagcaggaatctatcactttctaaatgctaaatcatgtggacatctttatcttccacctcacgtaatcctcatggtaatcagattctctccacaactagattaccagaaatcctcgtaagaaaaagctgaaccaaacaggtccgaaattgactgagcacataaagacgctgcgccagcacagacaacatcgagggatccaagagttgtagtatatgtggccgtaaatattataatccatcctatgtcacttgtatgtaatttcttattcttgtacatcatcactagtggtatagaagcgattagaacatgcaaattttttacccttctatgccactgacgacgagggttaaggacattcatgatagtaaattaggtaccagacaaagttgaagtgacaatgtgacatacaaagaattttctcttttctcaattgcccaccattgacaccacaggttcgactctactcaaacagtgacaagagagcatgtcagcttgtcgaactggtgtgatgctcaccattggatgatcgtatatcagggtccaacgatctctctatcaacattctatagtaaaccgtcagattgtcactgtatcaatccaacgcccttgaacagttttgacgccctctatttatcttatttccccccaccttttcacttgtgctaaatccaacttgtttccaacactatggaccatgagtaagcttaagctagtggtgtctatggtggttcctctcaactaattaggttctaatgcacatgcataagttaatctcacctaacaacacataagaaacttac

SEQ ID NO: 159540 - DNA, 588 bp, Zea Mays
gtagactggcttctagatggttcggacccctgtgattggtcccgagtcctcagcctcctggcctttcatcaacatcgtggtggtcggaccaccaccttctcctgggggaacttgttgactcccctggggttgttgtgccgccctttcggtgaccagcaccatgctcaccgccttggaagccgctgcaatgtataagtacaacggctcctccggctccagggctaccagtattggcaggaacacaaggtgctgcttcacctcttgaaaggatcgttctgcctctttggtccaagagaatggaccagacttccgcatcagcttgaagaaaggcagtgccctctcagccagtcttgagatgaagcggctaagagcggctagggaccccacaagcttctggacgtccttgatgcgagctggaggcctcattgcctcaattgccctgatcttctctgggtttgcttcaatgccccggtgtgaaaccaggaaccccagcatcttccctgcagagacaccaaagacgcacttgtccgggttcagctttgtgcggattgcccgcagcctgtcaaagaccagggttaagtcttccac

SEQ ID NO: 159541 - DNA, 467 bp, Zea Mays
ggttctcacacaccggccacgttatattgaaccggccacaatgcctgagtttgtcggtgagacctcttcggccaccgaagctaaagaaccaactcccctgccaaatattgaagggctggccgaagtgccggcgacggaaaaaatagaagaaccgagggctgaagaaacaaagacatcaaaagttctaagtccttcagcaaaaattgaggcagcaaaaagccaaaagggtccagcagtgacccccaaaagaaaaaggatggttaatgtgttggatgttttggagacaattaagtcttcaagcacaactccgaagaaaattgttgaatcttccgaagtgcatattgaagcatttgatgccgaaacttcgaaacatcagtctgagactgaagctgggcctttagagcccaccaaggtgaaatccttggaagtcgaagaggcagaaacagcagaacaaatttcggctgaag

SEQ ID NO: 159542 - DNA, 674 bp, Zea Mays
gccaatcatcatttggctcatcaaattggcttctgtaccggaaggtgtacttaagataaaccaagccaccctgaatggagccagcattagtttccttcggcatttcccattcatttgtaagaggccatactttgaaagcgatgtgttcctgaaccaagtccctggtaccgataaaggtacatacggtgttgaagaccattaggcactcttacacttcattcccaattgcgattgatggtcttctaatgccgaagcgcgaccatatgggacgttgaatgatgcccctcacatcctccctctaattcagatcattctttacgtaaaaccattgcttcatccaagagcccggccatttcatctgaaatgtaggtacatgataatttgccttagagcggggcacgaagctgtagcagccgaagttgttgtggtattgttcttttttcggttgccttcgtctggtaagataactcgtgaatattgcagaagcatctagcatccggctctagcccctgactcttcatagcccatataaaaacccccactttgataagagcttcgggggtaagttgatgaaggtatattttgaatgtctttagaacttcaaccaacaccttgtgtaatggaaagcgaagcccaactttcatgaagctcttgaagaccaccacctcatcagc

SEQ ID NO: 159543 - DNA, 290 bp, Zea Mays
gttgaggtggactaatcatgtatccaaacatttttctattccttttgttgttcttcattccattcatcaaatatctatgtgactcagttttctcgttcatagttgttaaggtaggaatattgtcgttggcatcatttacttcatttccattggggttcatcatctagtcagagggtaaaagagttagtgagacagactgcataagaggcttgcatgacattaagataaagagctaacacaacattttgatttccaagataagattagttaaggatgatttccgattccgc

SEQ ID NO: 159544 - DNA, 1430 bp, Zea Mays
gatcttatccccgatagtaggccccgggcccccaggggagtgtatttccccttggaggattttcctggttcagacgttgtctcttcccttctgtcgctcgcaaccaataggttggcgaggctcgtaaggcccggtataggcttctgggagccagtcggcgttataagtagagggtccctctacgctcacccctaattgactttggtcatcgctcccttgcttcctagaaacgacattctgttggggggggtaacgctgcctgaaaacctttgggatcctatcagctgacgatgggtcgtggaaagcgtctagtggaagagcgccccccggtgttgcggcctctttggtagaggatgaccaaatcggggtatgggcttttcttcctcttgctcccgaacttttaaggtattatttgtctcatcttttactttgtgtagccaaatgatctcgactgtcaaaggaagattttgggatgcctttctactagggccaaattccagtcctctcatcgcagacctcctcggatcttcgggggagcctggctgctacccacacgacgctcgaagctgccgatgatgagacgacctatcttcgtgcccgcctggttagtggtgccttttctctttacagagacctttttggttgtcatgaccttcctcttttctcatatttttgagaattagagtaggaggtcgtggtcctcttcgagggtgcagacgggttggtcacatttgttcgagcctagggagctgatcgagaggagcaacttctcgatgtcggcaaccgagtttgccaagccgttcatcgtggcgcctgtcgcggtgttgccaaggttgtggccttcgttcagttctggtcgtgctacaagctcagcactggcaactcattgaaggacatgactactggtgccctagaggattttgaagatgacttcggcatggatgctgagggtgtggttgacaccctttcgctggaggatgtaatcaacagatcccctagctagggtgtagtcgaaggctgctttggtcatgggatcgcacgggcatattcgcccttgaactcttgtgatgttattgcatctccttaatttggtcatggagagagccccctttttaactgctcttggtgtcttttcagtgtttggtgcgaaaaacgggctttgatatgtgtattttgggaccttgcttgtcacttcccgatcgtgcaaagggcggctcttaaagcgatttgtgagtttcaacatgcggtcttgtgaacctctaacccacactgatgctaggtcatccacccttatttttcctaccatgcgtatcctcgggggaaacaagagtatcatatcgagggcagggtggtcggactgcgtcgctgtctggtcgtgtttctacatgaggcttaccatacattatttgagctagggctccttgttcgtt

SEQ ID NO: 159545 - DNA, 806 bp, Zea Mays
cacttgcttgaacttgattggttatgccgaggttgaaaaaggattgaaagacatggtccatattgtggcaaccaagacagaaataaagaacaaatgggacaagttgaaagaattcaaggcatggaagaagttgatgaggcagacatgtactggttggtgctctacaaaaggaaccatcgatatggatggcgagtggtggaaaaagctgaagttataagtgttgagttattgctttcttttctatttatgtcatgtacatttcttgtattcattcgtgcaccacatgttgctcttttacaggacattccaagttgtgggaacttcaaaatatggaggaactagaaatatgttttggcagcatcacaagtattggttttgatcattggtctcctcatatggccactgcttccaccattgctgaacaaggaggtacaccacacgaggcaatcaattgtgacacacaagaagatggtgacaccaatgaatgtgaagtttcaccggtcaatccaaatggcaagtgaccgccaaggttcaatcaaaacaaaggcaagaagcagaaaacagaaaatagggacaacactaatcatcgttcaataaacagttacatctatgtctgtttcaactaattcttatgctgcaaaaaagggaaaaatttccattgatgaagtgatgaaacatgtgcttgcttgtggtgccacctatggtagtaacgagcacttcattgcaactgaattatttgtcaaactgacccaaaaagagatgttcatgacctttcttaccgaacatagattcaactggctttcagg

SEQ ID NO: 159546 - DNA, 403 bp, Zea Mays
cggccttagctgaggtcaaagaggcaatgggcttgaactctatccatttagtgaatttgtcgattgctaccaatacatgagtgtatcctccttgagctttcttgaaaggtccaatcatatccagtccccagcatgcgaaaggccaggttactggtatggtctgcagttgctgtgctggtagatgttgttgttttgacaagtattggcaagcttcgcacctctgaattaactcggctgcatcactcttcgctgttggccaatagaatcctgacctgaagaccttcccgactagtgttctggatgctgcatgtactccacattgcccagcatggacctcctccagaagtcgtttcccagtagatgggagaatgcacttcatgaagacgcctgacgcaccccttct

SEQ ID NO: 159547 - DNA, 378 bp, Zea Mays
gtccgaggcaggttctttgccggatcaaattatcttgtccggatttggcgtagtacaggttacattagtacattttatatgttcgaacaacgaggaaaagcagatcgcccgcggcgaggataggaaggaagggagggagggaggaacagacaagaacccgggaccagcacgcaaagctatacagggctgggcacaagtgcgtctcagaagaatgggacactggaattagcgccgtacggagctgatctgacggactgactggcgcacttgaacgcctgccgaatcataccccagcgctcgcatttccccgtcaccaggcatgcggttactgaacggattcgatcactccgggatggcgacgagcatcggccgccacgg

SEQ ID NO: 159548 - DNA, 651 bp, Zea Mays
atcaaggattcttggagcggcattgctgctatagagtaattgcacttatttttacataccctcattgtgcactagcgccttctcacgggaatggagtcataatagctggtgtatgatctattgatctgtgccttgccaattgccatgagtcaatgacgtcgattgcgctgtgctccattcatatccattctgaatttctgatttgattgtccttggagtaaatcttggactgtcttcatgtgtccgaatccaaaatagtcatgtggttcgtctgcctttcagctcatttggaaggttctcagagttgctgatcccaccattggcagttcaagtatcaagaggccattggtgacagaagctgcagcattcatggttatgcgatcgttgccagagaaaccatcgaaggtgaactcacctgatctatcataagtagaggcggacagcagcagaggcacgaggatgaggaggagatactgtagaaagcaaggttgatgcatgttcatcacatcagctagacagacgaggcctgctcttctctgcaatatcgatggatcgagtcgagtcataggaagctattcagctaaattaataaggttcatagaatcatatgtattattttattttcatctatgcttttgtactgtagtgcat

SEQ ID NO: 159549 - DNA, 496 bp, Zea Mays
cgagcaccacaattcacgaaagtctacctagacatctagcatcacatagagagcctactacttcacattgcaattcatacagaatcgcggcgtgacagtaataacacacaggtaatcgacctttctccacgaccttcagctaggtcaccaacagacgacatgatgactatgaaggcatatcatcacttcatcacactcattcattgcctatatgcgcactaattcatttcttgcgacacatgcactcaaaatcaatccacactacacaaagtacacttatctcttatttctgcgcagacttaacacctttcgggataaaacgtcactataaacaccttacacataattgcattaggaacctattagttcactcgaaaacatccattcaaagcagtggcgcacccagaaattggctaagacccaggccgaagcgaccataaactctaatagtagcatataaagaaaaattgtacgacgaaacaacgttgtcataaat

SEQ ID NO: 159550 - DNA, 594 bp, Zea Mays
cacaacatgattcacaaggaaaaagattaccagattcggacaaaggagaggtaggaaaacaagatctgctaggatgagcagcagaaatgctatgaagattcgggacaggatctatggaaagaaacatggccttgatagggtttgtgcaattagacaccaaacaacaattttttttaacacaacaagtgcacaaggagacttgggttggtctagcggtcaagctgtgggggtctataagctgtgcaggtgcattaccaatagcgcaacacacaagggctagaaaacaccaatacaatcatgtgatttgatttttttagggtttcacttgctaaccactaggttgtttggagaaggaggtcttttatgggaaaaacaggcaacaaatttttttattggtaaagagggttgaacaattacaataccacctagctagcaagacaagagaaacacatagcacgacctaacaagacttaccaatctgacacgaggtaaggcatttcttagagttcgcaaggtggcaatacatcacattattcacaagttcttattatgggaataaaggtgagagaagcatgttgatgcacaagagacaat

SEQ ID NO: 159551 - DNA, 324 bp, Zea Mays
gcaggcgtggccgacggcgagcttcagactgtgcaggacgcgagtagagcggcctgccgtgctgaaggaaggaggaggtgaaggtggggcggcgagcgcagcaagaagcaggcggggaagatggatatctggcatcgcgtggagcttggaggcaccaccagcttggacgcagctgccttcgccggcgctagcatcgactagaaggagacgtaggccagctcttgctctggaagaaggctaccgtcgtcgagggccagctcgacccggcagctgctgccatcaacttgctctgctccaactccaagaagactgctgtcggctttg

SEQ ID NO: 159552 - DNA, 475 bp, Zea Mays
cactatgtggggttatggcctgtcactgaacattatacatcaatgtttgagacagggcacttccctaacctgctgcaggatgttctacatgcgttgggaaactatgtccgacccctgtatatgacaaggcgagtgtacgagcctcctcgggcttgctactacatcactcgcattcatgtcagggtgatggatgcaggtgatagagggttcaggactctgtcagctcatgagtctctaacaccgctatccacctacgctgctttggtcagcgatgctgctaggcgaacactatcatccctcagccacacctactggtagcagctgcacaacacgaactataggcatcttcctctacgcattcgtggagaaagccagaccagcattgttccaggtggagctggagaagatcgcctcaacaccctagctggtgtggtggcaggtcttaacaccgacctggatagtgctaccatggacc

SEQ ID NO: 159553 - DNA, 550 bp, Zea Mays
gtgcgttgagagattacatggcgccccatatatctactgatgccgaaacattcagattgttcttcacagtaatggtctgatttttcgcaatccaaaccgaatgtaacataaaaatacaaaggcaatacatgacctgatgtttggactgacacataaacatccatatctatacaaaaaattggattgcaaattacctgtcgtacacggtacaccgacagccggccatcggagttcggaggcgggcatctaagcaggaagcagccagccgttgggcgctaggaacagcggcgcatgccagcctccgggcgctaggaacagcggtgtaggctgcagcctacaggaacgaccagtcaccggctcgccgcccaccaggaatagccgccaggtagccaggcagaggcaagaacatgaacagccgtatgtatggacgtattgttgagttgttgtgactagctagccaccaaaagcgattaggtcaaacatagaagttgggaaattggaacggccgatgtcggatggtcgggtggggtcctcggtgggcctagcttag

SEQ ID NO: 159554 - DNA, 461 bp, Zea Mays
cgaaaatttcacaagcgcggtccacctgaagcaggccaattcctagctgccgcctattctttcactgagccaaaccctagatagttattttcttcttcccaattccaaatcaccgccccaccgtcggcccgttcagcgtcagcacgaacgcacgcagcgacgatcctccttcccaattcaagctgctaccctgagtgtttagcgtttgcaagaaacgagtgtagctagcgccgtgcgtgcgttcatgccctgcctctcggctctcatgtgtgcatcctctgtcccaaatccatcgtgaatcatccctccccaagttgttgtggtcaagccgacctcctcactcacatcattgccgacggttctaggtacttgttttttgttgtactcctgtcctcccaagcctctcgccatctgacatgctaccttgacttgaggcaatgtgctaagaatccaagtaggag

SEQ ID NO: 159555 - DNA, 281 bp, Zea Mays
ggaaatgacgaccatgggaggagcttgttgctgccgtgagggagagggaggacggcgtggggaggaagggagcagggcaggtgggctgccatttaaagaggcgtcgccagcagccattgggcgagatgggcggcctgcagagctctggtcagtcagtctgctggcaggtgatgccagggcgactttggacagatgtttttggcattttccttttggaatcggaccttggttgctgcacaaaatatcttccttgatgtataatctacaaatcgtgtataaag

SEQ ID NO: 159556 - DNA, 618 bp, Zea Mays
ccaaggtagaagataatgcattatccacagcctttggaagtaggggaaaaagagattgaatagagtttttgatgctattggcttcgtctaccccgactaccgctacccgttgcgggtacaggggaagaagagaaaagttgatgcaacgggtgccccagccaagcctgtgccggaggctgtaagcaaaaagttgaaggtgcttacccactggccgcgttacattgaaccggccgtggttcctgagtttggcgtagggacatcttctgctgctgaagcaaagcgcgctgcctcgactgtgcagagtactgaagagtcgattgtagcgctgaagacgtctgcagtcgggctagccgaagctagagatgacaaggctgaagagctacaagtggaaaaggtgataaaaacgccggaaatcttgagcccaccgacagagacagttttgtcaaagatgcaaaaaattcctgccgccactcctaggaggaggagaatggtcagcgtattagatgctgttatagaaactacgaagaatttgagccctgctcctaagaaaattgtcgaagcttcgaaagttcagatcgaagctgaagctaggccttcaatgcccaccgagacagagcc

SEQ ID NO: 159557 - DNA, 426 bp, Zea Mays
ctccccggacaggtgggacccgcctatcagcgctagcctgcacccgcgcgctctccctccctctctccctctgcccagtggggccgacctgtcggcatcaactcccctcaaatgcgggccccgctctctctctgtcccgtgggccccgctcgttagcgccacgaaccattcaccttgcactctctctgtgcatcgagggcaaaccttgtcagctctgtcttcccctcaaccatcgttgacccacatgtgcacacacgctaacaggaccaaccacgtcgccttcccacgcgcccctactcctttttgagcccgcatgcacccgctctccctcccttgcctcatttcacccacactcaccctctctcgtgctctgccgttgccgccagtgctcgccggtgatccacgcctgccgtgcagccgtctagc

SEQ ID NO: 159558 - DNA, 720 bp, Zea Mays
aaaaatcgttgtgtcatttgtcttcatcctactacgatattctctttattcacttcacttacattattgctctaagtttaatactcacttagtgaagagcaattaagtgaagaagtttactccgctcatacccctcattcgaacttggctcttactttcactaatctaatattagtccaagtttgtttttgttgagctattttttataggatcacctattcaccccctctaggtgctctcatataggtcacccccgaaccttacactcaaaatgtagcatgacaacaaactcttcctttgtaataagatcacatttatctatggtccagtctggtaaggtccgctctggtaagcccggtctctggtgccatttgtggcccggcccggtgagagccgcccttataaacccagtcttgggtatcacatgtatccgattgcaaagaagaattaattctcatccatcggtttttttcctgtttacgcatgttgtttccctctaccccttctatggatctagacttctgttgtaatcatgaaatcgaataatagtgcctattcttgcacctgatttagaacatctcttgagaatgaatgaagatccgatcactaagagcttggttcaggggaaaggatcacgttctcggggtggcccaaagtcatgtagccgcttggcctggtcttgtaccataagcctacatgcttcaccaccctaggataact

SEQ ID NO: 159559 - DNA, 380 bp, Zea Mays
cagagatagtccattgagcggtaggatttcatccatgaggaggtccggaagctgctacgcgctggcttcgtcgaagaggtccatcacccagtatggctggccaatccaatcatcgttcccaaggctaacgggaagcttcggatgtgcatcgactacaccaacctcaataaggcctatcccaaggacccatatccacttccacgaatagataaaattgtggattctacctctgggtgcgacctcctgtccttcctagatgcttactctggtttccatcagatccagatgtctaggcaagataggaagcataccgctttttaaacagtggatgggctttactgttatgttgtaatgccttacggtctgaaaaaacgccttgc

SEQ ID NO: 159560 - DNA, 353 bp, Zea Mays
cctcggctctggtatatgtcccaagcaactcgtcgctagtagcctcaatgcatttcaaccagtcatcatttggttcgtcaaaccagtccctgaatctgaaggtatatttcaatcgaactagtccaccttcgctggattcaacagtagtctccttcggcatctcccagctgtccacaagtggccatactctgtaggctatgtgctcttgaattatgtctcttgtgccaatgaaagcatagacattgctaaaagccttctgacacgcttcggcatcactttcaatagccaccttcggccttcgaaggccaaagcgagaccagatggggcgctggataatttccttaatatcctcc

SEQ ID NO: 159561 - DNA, 296 bp, Zea Mays
gtgaagactgcacacacccaacaagagattgtccagaaacgaaggccacaaagtacaggatgtccagagcacagccagccgacaaccagcgagttgtcacgcacacataccaccatcaacaacaaccttataacgaccacgtccagcacccacccaacaacgtgtaccaacatcgccaggaagtacaaatcctcccaccccgcctccacctccgcaccacccaaatcaacaccaccataatcacctccaagcaccaaagcaggaatacttcgtcgaacaaccatatcacggagtca

SEQ ID NO: 159562 - DNA, 1111 bp, Zea Mays
catgaatctgcccatggcatctatgacaaacttgtagctggttagtagctctataactttgctgcagagtttggtatgtgttgccatacaggtttgggagaaaatcatgttcaaaaatggtctgtcaggtcgactgcatacactctgcgatggtacagtaactgtaatggatgagatcaccagcgcactgtcctcaccgtcgacgactccctccgccgtgattcgtgtcaccggcgtcgggattcgtgtctgagcggatggatagcatcgcggggtagggtgatcctcgccgccggtgagctggatgccaccccggccggccgtaatccctccccccttgctcaccgcccgtggataaaggttctcaccgccgtcaagccttcgccattgcccgccgcgtggctctgcctttccaccgcgtcgccgtgactctctggggccggaccatcgtcgccggtgaggtcgccacgacgttagccacgggttcatgcgcaccggaacctccctgcccctttccaaccaccgcgcatcgtcatccaaattcccggccaccgtctaagccgcctataaattgaccctgcagcgagcttcacaacatcatcacccacctagccacgaagaatcgttagcaatcgtgcaccggtgagcttgaattccggttttcccccaaattgattctccgccgccgtgaaccacaaactaccgtggccagccctccataggtctgctcatgccctctttatttctgttctagcctctctgcacgctggtgatactcgacaaccctcacaattgcgctaggagtcctctggtcgccgggaacacgatcaaatgttcgtagtctccgctgttctcgtgggcagaagagaatagatcaccattggtgcaattaagttaggggaaacgttctccaggtagcgaatttggtttagtccgaagctgaacactggtcttggcctcctccggctagtctgtgtgctcgccagagctcaggtgcacgcaacgccgtcgaggccttggccgtgcgaagaattagaaaccgaaggggttttatgcaaaccgtcagcgacacatagaaatagtaaaagaacacgtttctagttagccagaa

SEQ ID NO: 159563 - DNA, 447 bp, Zea Mays
gcacagaacagtgcagtgcagtcggggaagggattccaatcatgccatgccatggcaccactgctgcacctaccaagacgtcgccgggtttttgccgtgtgggcagcagctggcacgctctcgcgaatcgccggggagtccttttgggcgccacgccatgccaacctaacattacattacacgaggagatggatggatcgatcgatccaggcctctctttcttttcctcctgtaaaaagtagagtagactttattccttgtttcttttctctcccgcgcgctttccctccgctttgctcgcccgtggccgtggctccctttcttcttgcttccctcgatcgccaccgtccaccggtgctgactgctgtgggctgcggtcaggtcagtggtagtggaagagttcgcgcggcggcagggaagcttcgcggcgacggcactgctgcatgc

SEQ ID NO: 159564 - DNA, 720 bp, Zea Mays
atttggatacctactttcatccctaggactgatgtaccagtttcagacttgtgtgcaacccgacaaacacctggcagaagtgcatgaaggtatacaacaacatgatggagttggggataggcgtcttagatggatgccatacacctctagcaacatcacaaggaagagcgagactgggaaccctagtctcaccagcatctactcttttgtgcctcggtcattgtctacatcggctaggatgccgacgacaccttgtcgtgctcctctaggcccgtccacctaagtagtgtccggtacatccctagagtggtcttgttggtcacccttgaccatgggagcacaagcttcttcgttggtggcttcatcgttgtcgctagggaagatgttcaaaaaagggagcagggtgctccgaggaagatgaagagtttttggaaggctaagggctcgagtgcgtagagagtgcaagtgctcaagtgcttgatactcctgcgtggttgccctaatgtcacatttatactacactcaccttgcgagccccaaggacaccatgaaggccccatgacatcgtgtagggcccaagggcactgcatgtgcccaagactgtcacgcgtgacccaaggcagcgcacaaagccccaccaaatcagagggcgtgcaccattgcagacccctgatagatcgagaagtgtgtcgattctactcccaatgatttgtcttccgt

SEQ ID NO: 159565 - DNA, 317 bp, Zea Mays
gtgatattttcacatgccttgttattagggtctaaacaaaggcatattgccaaagtatgcacggagaatgttgatcggctcaattgcgccaatatgcacatacaacgagtgcagagggtgtcgattcaagtgtactgctgagcaagtcccagtggatgcaaatgaccccatgaacagtgcttaccactacaagtgtgtttgccacaggtgatcttcaatgagtaggaggagcttctatgttattgtgtgtcctggagaatagtagtattttcgcccgtttttggttctccctctccttttctttctattctttgttt

SEQ ID NO: 159566 - DNA, 816 bp, Zea Mays
gtaaacggcttcttgcttctcatgacaatctagatatattatatcgtgatgctagcaattccctgactatcctagagaggagccatcgctttactatgtcggacttggaccatcatagggatgattgagggcatccaagactgaagtgtcatgacttagtaagctgttgtcttcgaaggattctgtcatcaaggagttccactcctaaaagaaacttgtcacgcaagaggtagaggccgctcatcacaacatcaaggccttagaggatgatttgttgttatgaaagcaatgtgcgacaaagccatggacaaggttgttcgcgccgggcgaatcctgatgagaaggcctggtgttgtggttcctgaggacattgttgccgacgttctcgctacacctgttgtcgtgagcaaaccttcttcctctgctactccggctagcgaggcttcctgcaaaaatgctcctgcacagtgattcgttcggatgagaaaatattttttattgagttagtatgggtcggaggcagtgttatcgcagatctgatctttgtagcacccagattaacattcgaaagcatagccaaagcagaagcaactaggctggaggacatcgacatactagaggaagaacggctaaatgtggtcattcaatcggctagataccagcagaccctgaggcgcttcacgacaaagcagtgcggcatcgatccttcacagtgggagatttggtcctccaccgagtgttggtgggagaaggacgacataaattatcaccaccatgcgaagggccattcatcgttgcagaggctacccggccagg

SEQ ID NO: 159567 - DNA, 569 bp, Zea Mays
gccacgacgtcccctgcgtcgcctcgctcgaccccaccggtgccacccctcggcatagccacgtgcagcctcagcgtctcccgcacgcctcgaccggccctgtcatctcactacaccaaccccatctagacataccagcgtcgtggatgtcgtggtgcaccggctcgccctcacgccgacccctccggcctatcacctcgtcatcgcccaccaggatcctcgccacatccacccgatggtcacccggcgcgcggcaggtgtcctctaggcccctgatcgtgtgactctcatcgcgacctcctctccgaccctatcgccgattcctatgactgtctgtggtgtgcttgccgatccgcagtcgctgtgtgccatggaagaggaattcgatgccctttaggccaaccacacctgggacctagtgccgcgttcccatggcgccaacgtggtcaccgggaaatggatcttcaagctgaagctgcatgccaacgggtccctggagcggtacaaggcctgctatgtgctctggggctttacccagcgccccaatgttgactatgacgagaccttca

SEQ ID NO: 159568 - DNA, 617 bp, Zea Mays
cttgtttcatagtcttctaaaaaacaaaattcggttgctctctctaccgccgaggcgaaatatatatcggccggaaattgttgtgctcaactattatggatgaaacaaactctattggattatgtgattatttttaagaatgtgcctctcatttgtgataatgagagtgcggtaaaattggctacaaatctggtccaacactcaggaactaagcatattgatatacggcatcacttcttaagggatcatgttggaaagagagatatctctatttattccattggtacggatgatcaattagccgacatttttacaaagtcattggatgaaacgagattttgtactataagaagtgaaatgaatgtgatcgatctctcaaatgtggcttgaagttgatcgcgcatgtgtagtattgcatttcggttctaaatatgctctctacgctatttatttggtattttttatgcttttttcatcttaaattgatctaagtagtttgatatgaaaaaattgcattacccaatttcataatgggtatatgcatgcatactaacccttggattggtcgaaatgtccatatatgagcaccaattcggatttgaaattcaaaatcagaa

SEQ ID NO: 159569 - DNA, 1441 bp, Zea Mays
aattttttttagtgttcggctattggtagtgaagtccagtagcatctcggggtgtttgtggatcttggggtgttacatcgaggcccctgaagcgggcggtcgcttctggggtgctaacgataagggggccgtagtgggccctcgtggtagtgttgagactcctaggtagaaggggtcgggcttctgagcccctgactatttccccttcactatcgaggacaaagtcaatgtttctgaaatggatcatcgttttgggaatccgatcggtgtcgcggccggccatttggagcctagagagttcgtcaagaatgcacaaggtccctacctggcatgtcaactgttggtgtttcaaacctagatccgacaagtaaatttgtttgtgcgcattctatgttccggatggtgtgcttagagagcgtggagcttatactagtttgggcagaacatccctacatccagtcttcggtggctcgcgctactcgcaccgtttttgctcaatgctcatagtaggggttacaagcgggcaagagagggaagaatatcccccatgtctcttatgcgtagctatacctaagaactaccggaatagagatttcaactaaaccttgggcatcgcagtggttcactctggcctccgtggtcctccgggtgttgtggttcgtctgtgtttcatgtgtgtcttgcgtgtatgtgtgcttctcttccttgtgtccatatccgacccttcccttttatagaccaaggtggggtcggttatcggctccttctcttagaaggagctataaagtcgtggtaaaatgagtcattccaccttggtaaatcatgcttgtcatcttgcgccctggtcgtctaggcttccctagctgtgtccttaatggcgggtggtacgggcggtgtggagccctagtaccatcattacctcctttgtgtcgtgctgacccttggcctccgtagcctgggtcttggcgtggctcatcgtgttgcgggtcctgtagatggcctgtgctaagcctaggcttaataggtcatgagtgcgccataggccgaggggctcataagtcatgagtgagtcataggtcaaggggctcgcaagtcatgagtgggaggtgtactgactctcctactgtggcttgtcgctaggtgtagttaatgtgttcggtcatttgtggtgggtaaatattgggccaggcgaggaacccactcgagtggcttcctcttagttcgcttggccctcctctctggctttgccttgctcgaccacaggctcgatgcctcgggatttatataggggcaggcgcttttagggtatacgaatcccttaccctcctgctaaccagtggcccccagtagtccgaagactttttcctcgttactctctctgactagtgggccttaggagcccgtgcatcttttcttcgacacttgttgaccacatccttag

SEQ ID NO: 159570 - DNA, 341 bp, Zea Mays
cgcttggcctcgttgatgtcggttggatggtagtacccctgcaagaacagggttattggtgcccgccagtcttcggtcatgattaggttgactatgcggtggccctcgctgtcattggttatttggagcccctctgggctgcggacggctggcgtgccgatgacgtggtagaacacgtcggagggtagggcctcgcccctggcggttgccttggccaatgcatcggcctcctcgttcttggctcggtccacgtgttgcaacgtaaaacccttgaattgtctttcgagggtgtggatggccgcgaggtactgcatgagtgcggggtccttcgctgcatagtc

SEQ ID NO: 159571 - DNA, 683 bp, Zea Mays
aaactattcatcgaggcagcggcgaagtctgcccgatccctagcaccccatggttggggcgccatggttctggtcgtacccttcttgtgccgtcgttttcgtgatgcctcaatgttgctccgcgcatcacaatggttgttgatgaagtggtgcatgtcgtcctccggatgggctggtggaagaaggtgatcgataaccctccatgtcggtcgtgcgaggtatgtcgttcatgatccgagccagtacactgtcgacctaactaagagtctacatgtcccgagcgaactcaagctacagattccgtgggagaggtagacgatcgcacaggagcctagcgttgcattcagccatctcaagctcacgctcctgagcgatgtggtggttcctgtgcctaccattcatttgcatgtggaatcccctctcgttcagggactcatcaacctcgaacccctcgtccctagaaataggttgagttgggtcctgcttaccgatttcgatggagacgtgcatcgcgcttgcgaaggttcctccccttgtatggtgggctcttcgtcagagatgggatcattgtctacccccttgatgaataggacgtcggggtagtagaggggaggctctgcctccactagcttgatgattggacccgcgggccgagtgaccatggagttaatcaatcgtgttct

SEQ ID NO: 159572 - DNA, 923 bp, Zea Mays
taggaaaataaattcaagatacccagatgttggactctcactcctctaagagtaactccaatggtgagtcctaaatctaggctgtaaaatttgttctggtttatttagggccaaaacaaattatgactctacaaagcttgagccttgaatctcataattagcaactgattttttttatctcgttgcctttgccgccaatctctgtgctctctttttccgtgtgtcttctggaaaattgcatcgatagcatttttcaaactcttttcaagtgtgcctaagtccaaatgttttgcccaacattttagtgcaaagttagcaatgtcaaattgttttaaaacaatcatacttgtttgctcttacgtgcaacgcctaggcctatatacgatgcatatgtatccaaacacctccaccattgagagtgctgcttcttgtaatggttgaatcattaatcctccagaaccttatgaatgcacgaatcttaaacaaggatgacatggacaaagtacaagagaaccttgttgggtttcccattgctctcgaacaacggtcgtcgtacaacctacccgatgtggccccctcaagaggaggacgacaattatgtggtcttatatgctcatctcattgttggagtccattttcctccctcttgattcttctgtaatgtccttgatttacaacctctagcttgggtatcttatgcctaatgttgtccttgccctccccaccttttcttgcctccacgtgacttgtgttggagtaagaccctgcgtcaccttgttctgccacttcttcgtcgattgtacctccaatggtataagtcccttcgggaaggtatattttcaattgggcactgggcccaagagtcactcccactacatttctatggacattttcgagaagtgggatcattgaaggacaccttg

SEQ ID NO: 159573 - DNA, 722 bp, Zea Mays
agcaccaaaacaagtgtagaaatggattaaaccccatttccctttcaaaaatgatttattcatactttaagaatcatctataacccacaatcacaacagtttcccatctcatcattcatattgttctaaacaacacaaggaaacacaaagagccattataagcaacacaatagcatttgtgatgtcacataggcgacacatagcatccaattgtgccgccaccacaacactgaaatacaatcacatcttagcgaccattccttgctcgtagctgacgtggtctgtgcagtgcaccgattgatgcgactcacatgccctctgctgcaaggcgcgacctagtaaggttgtggctaacagatcgtgcatatggtcgtgcaaaacactattttacgttattttacactgtttacatagtggaagtttgaaatcagggatgagatgagtaagactgctacaggtagcctaagtcaatggcggcgtaaccatatgcccacgcattcgccgggatttgttccacgacccatgcgttggggttgaaaaccataatagggtgatggagaatcgtcaggactcctcacgagtatgccaggggagattccacaagtggactaaactacactagtttcatgttgaatctgtattgaacccaccctgagattattcttgtgaatcgagccacgatagggaatggcctaactaaacatgccctataacggcaacaa

SEQ ID NO: 159574 - DNA, 469 bp, Zea Mays
ttttattctgttccttttcttttgtctcgtgctcatctcgatggttactggtgagctaagcgctcccgacaatgaccgacactgcgtgatgttacatctggttggtgggtgacgagtttgttcttaaagttgaaggtattcagcgaattgatgattatataacggcatgtgtggaagttttgaaaatttggtgtcttgtgtttgatgagaggggaattcagacttcgcatctttgctctgaatagtgaatactgccatactgcttaggcgtttactaccttgcattgtaggctgctctggctctgcagttctactcctattaggattgtattgcttatttgtctgtcttttccttatgtcttgcgcctttagtactccctccttcccaaattataaggtgttttgacttttttacatccatagcctttgctatccacgtagatagggagggagagcagataataaccag

SEQ ID NO: 159575 - DNA, 575 bp, Zea Mays
ggctatccaatccactggtaccggaatgaaaacgaaatcagatcatcaaacagctggaaattctgaccgtgatccggtaagaaaaaacgttgttcaacctactttttttttaaatcagaacaatttttatcaaattagtagaatgttgactccacaaaaaaggccagtggtggggcttgggtatatccttcggagtccagttcttgcctgagagaaagcaacaaaaagttggagccgaagcgtgctgtgaaaacgaagcatccgtttcgttgctcttgacagggtcagtgactagtttttcaggccggccgtgcgttgtccccttgtgaaacggtcggcataacttacaatagctcgcttgcttgcccaaagcaaaccgaccattgttaaacttgcactgacctcaactagcctagtactttttatgggaggctgctatggttcggcgtgaccacaactttcacgttacgtgttacttaatcgggaaatatcatcgggtgccttctgccttgttggttcaaaggtgactgaagtcctgaattctcagtctccaataggaccaataccaatagtcc

SEQ ID NO: 159576 - DNA, 389 bp, Zea Mays
caaccttcgtcgtcaagcttccgctttgggtactcccttcgcccctcgctctcctgatgtacctcttcaccctcctcctccagatgtcaacgagtggtaccagcaggcgtatggggtacctttttctacagctgatgacgtcgaagaggaagaaacttactttgatgatccggagcagtttgtcccgcccccatatcgtggggatccgggccaatcgtcctcttatcctccgccccaggacccgtctggcagtgctcctcctccggcccagtctggcgaggaacactttgcctatgacctggcgcaacacctctttgctcctcatcaacctcctccccactggtgatccttggattgacgcttctctctctctttttggttcttggtgc

SEQ ID NO: 159577 - DNA, 678 bp, Zea Mays
aagagagacaagtggagtcttgtattaatattgaaaagttaaccactttataggtagactaaatagcaggctgcaaggatacttacagcaaccagatgttggcttaaacctgctctaatggcgtaatccgtggggacgatcgtcggggttagggggaacgcatggctctgattcatcgtccacagctagcttcgactacggctgtagcgagaacactccgttcctttcaaaaaaaaaaactattaagcataatgttgacaacagtccgtcgtctatagtcgattatcactcttcgcaccgctacaactaattatcgattacgtttcagcacacacattttcaataatcaagggacctgagaaccacccaactggagacgccatgaacttgaatccatccatcccaaggcaggtgaatcctacagcgtggtatcatatcactctagccgaggtaacatttgaatgcatacctacgtctacgttacatcctgcattgctactgaaatactcaattaattgagcgcgggtgactgcggcattacaaactgcatgtatcaatctctgttgcaatgcacgttaataatactgccgctgcaaattattcagagtttattagctgtcaactttactcggcatcatcagttgaattagcgtccaccgcgcgcccggtcccatggac

SEQ ID NO: 159578 - DNA, 411 bp, Zea Mays
ctcatggtgcttcaatgtccgaagtgggtgctgaaagccatcgataaaattagaaggggcttcttgtggaaaggcagatgagacattagaggggggcactgcctggttaattggggccgtgtttgtagaccaatcgagtttggtggcttaggtattcataacttggaagctcttggctggtccttgagtatgcgctggctttggtttaaaaagactcagctagatcgcccatggacggagtttgacattcaggtccatcccactgcaactgcgatgttcgctgcctcagtggtatctgttagcgtgatgtatagggaaatagggcccaggtggctcggctgccctaacagggtgcggcggctgcctcccccctctgtatttggttagttggctgtgtttggcaaggatccc

SEQ ID NO: 159579 - DNA, 489 bp, Zea Mays
cttagaaactactaagaatcgtcaggactagatcgctagacctaggacgaaaggccttagggatagtgggagaaataggtggctaattaagtaggccctgtgggccagtacttagatttttaaaggatgccttaaagcaccttatattcggtgaggagacgttactttcagcatgcatgcattataaaagctaaaaggaattaaaacttgagctaacccgcttccttttaaaaccatccaggctcttttatttttcttccttccaccataatctttacctttaatacccttccgcagatgaattcacccacccccgccagtggaggagacactcgtttcagctttgacttcttttctcacgatggctttccttccatcttgtgggaagtgcttaactccgccggttaccctacgccccctttgtacatggtgcagttgtatgaggagcatcgggtacctcgttgctgagtctggctgactttggaggct

SEQ ID NO: 159580 - DNA, 1322 bp, Zea Mays
gagaggcgcaatgtccttcagtattaacccttgcacccacgcatcattccaaaaggacacctttgtcccgtctcccaccaaaatcgatgtcactgctgcgaagagctgtcgatcttttgtcatgcaagggagttccaaggccgtctagagcctagttgatgaagcccaatcttgccatagccaacgcaaacgcaaggtccttgcaaatttggttaaatgaaggatacccaagcctccgcactcttttggccttgcggaacggagccaatttaccttgcatttacctcccgtaatttgtgcacacccagcccaaaggaattttttccttctcgagacaattaaattcaatatttccttaggagcccgtaaagcagagagaaggtagattgtttgggaggtaatgactgacttaactaaagttagtctaccaaccatagagaggtttttcccattccagccactgagcttgttcgaaattttgtcaattaagaactgtaagtcgctcttcttcagtctggatgatgagagcgggaggcccaggtattttaaggggaaggtagcccttctggccggcatattccttaggaccacgttgagatcaataccttgacaacagataggcacaactgtggacttatggaagtttgtcaacagccctgacgcctcaccaaatagcccgagcagctttagtattgtctcgacctcctcttttttggtgcaataaatgaggccgcatcatcagcatacaatgagagacgaaggcaaggcgagcgacccctgattttgctgagaagtcccgtctctgttgtcaagtctaaaattttctgcaatgggtcaatggcaagcacaaataacaatggtgagagtgggtctccctatctaagtcctcgaccatgagacaaggagggattcgagaccccgttaacaaagaccctttaggtggatgttgagagggtggctgcaatccaatctctccaccgagaagggaagcctagatgttgaagcagcaagagaaggtattcccattggaccaaatcaaaggctttcacaatgtccaatttgaggaagagcgagcgtatgttcatgcgtcggtagcgcctcactgcactatgcacgaccataaaattatcctgaatagtccgtttcttgatgaacgcgctttggcatggtgagactatttcatgcatatgtggcgctaatctgagagcaagagtcttggtgatgattttgacaaaggagtgaatgaggctaatcggtctaaaatcaccaactgcctccgctccctcctttttaggaagtagaataatatttgccgagttgat

SEQ ID NO: 159581 - DNA, 1981 bp, Zea Mays
cggacctgctcgacatcggcgagctcgcgggcggcggcgtccgcgccaaggaggcggaggtgtgcccgcccgagtacgacaactacgtgccctgctactacaacatcacggacgccgtcgacgtctcggatctgggggccggcgtcgtcataagctacgaccgccagtgcacgcgcgacggcagggtcacttgcctcgtcgcgccgccgcggagctaccgggttcccgtgcgatggcccagcggcaagggcttcatctggaaggacaacgtgcggatcagcgggcaggagttctcgtccggaagcctgttcaagaggtgcgcgaacaaaacttgctccgtcgctaaaattccaggtggtgggtttggtgtactggttgtgaatttggtggttgctcattgataacaggatgatggtggaggaggaccagatctcgttcccgtcggacgcgcacatggccgacggtgtggaggattatgcccatcaaatcgctgagatgattgggttgcggaatgaattcaatttcaatgaggctggggtgagttattgccatatgttcagtttaacctatgctattactagtaattacctatttgacttccaaatctagtgaaggcatacccagaagccagaactagctgaagtatgcaactgaaccaatgatatttctgtcaacgaggtgtcattcacccattcttttggcacaaaacctaattattaaaagagtcactcgctcttggtagtgctctttgtcaacacaacaccctacgaatttgctggcttctgccaaaattttctgtccactttgttttttttttcttttcaggattcaggacacctgtactttatagtggttccataagtaacccttgtgatttccgttgagcattttctttgggttcgatgttttttaaagtatttaaaatttctacttcattattttcgataaattcatggcacagttttaagcacataattgttttttttaaaaaataagtagcaggagctctgctattcatataagatcggagaagggtttcaaaaacataggtaggttaagcacataattgttgatcagttattttggggcaaatattctatttatttgggaaacagtatttcatttcattcataagttgtttccctgtctgatttatcgtttaaaatgacccttcacatcatgatttgttattcagcaacacttgtctgtcgtggtctttccacttggcggtactttagaaatcttgcatgttgagtgggctggctggaaagtgccggtctatttctacttaatttgacttgggaaactctgcatgcccaatgtgctggaaagtgtatatcagagcttactactgtgcctgcaaaagtatgttggcaggaccttaggatctccactacgatatattattaaagcacagttgtttttaaagatcatcatacaaaatacatctggacatactatgtagatcactttatgctctgattggctgaagtaagactttgggtaattgttatgtttacaggaactcttatttctgatggtgtttcttgctatgccattttcaggttaggacagtccttgacatagaatgtggatttggtacctttggggcgcatctttttgagagagatctcttgaccatgtgcattgctaactatgaagcatcaggtagccaagtccaaattacactggagagaggcattcctgcaatgattggttcatttgcaacgaagcagcttccgtatccctatctttcctttgatatggtgcattgtgctaaatgcaatattgaatggtacaaaaatggtatgtgtgaaagtcttctttcacatgccctggccctcattgacgattataatgttattcagcaatgtcttaagttggcacttcacatgtaaagatcggtacatgcctagctgaatattaaatatttaaggatatacagttgtgggtgacttttggttgacttgtaacccttgtc

SEQ ID NO: 159582 - DNA, 740 bp, Zea Mays
cctagaagacatcaaactgaagctgagtatgaaaaaactaaatgtttgtgtcagagggcagatcatactgattaactatcctcctggagcagtactcagccatagagaatcttctcttgggataggtccatcctgtgacatcaattggataatctggatgagcgtgtggagcgtcctctgtgtccatataaatgctgcccctagctgatgattgggcctcagagtctgtagctggattataatctgcatcatctgcacgacggcgctttgactgaaaacgacatgcaagcttcttcttaagaccacccagaccactgcaatatatatgaggaatatccactagttaatagttgatgatgtcacaacataaagaaaggaagtgtaagtttctgtcagggaccagactgttcgtgctagggggccggactgtccgcgccatcctggcggacggtccgcgaccgtccagaggcgatttctagaaccctagccgccccatccatctaatcatcgatttgacagaaaataaccatccaaattcattcaaatttttgcaccacattcacaatgagtaacacgagcaattccactaatcaaaattttaattccactgcccaattctagattagagagaaaaccctatgaatccccaaatttgaataaatcagacaaattctatgagattttgaaataccgagatgaagacatggttaatgaactccaaacaatctcccggacagtcc

SEQ ID NO: 159583 - DNA, 356 bp, Zea Mays
gaaaaagagacgcctccggcgagtatccagtttggatcgggacgttggtatctcggttcctgctgctgaagaagtgcctatgactgaatttactgacgctgaccccaatgggtgtacccaatctgctgctgatcccaacgtgggtgctccatctgttactgatcccaatgggtgtgctgcctgtgttgctaatgtagacgacaaggaggaagaggatgaagttcctttaactcggaaaaacagtcggcagttcatcgctagtggtgaaagtagtggagttccttctcctgctttgtctgctctcattggtctgcacgaactgtccctggccaattttgatcagactcttgaggata

SEQ ID NO: 159584 - DNA, 817 bp, Zea Mays
tttgctcttgttgggatcattttgcaatgacagacaacgtgcaatttgtgcctttttaccaggtaatggaccaagcaaatgaacacaaactctagttaaactacctttgtatgatttcttgcaatgtttacactgccactcctttgttccaccaacattttttccacttggaacaccaataatattaacttcatctagaagtggatgtctcataccagtagccgcagccccatcttcgtcacaactgtctgcgtctgcaccgccatcttggatatctacaggcacctcatggatgacttacacatcatcatcatcatcatctttttgatccgcacactttcttttgcttgaagaatcgaaaccatgtctgcgttgagcttcaggtttgggttgggctgtgcattggcggattgagcgtactatttaaatggtgtgggactgtgggttgggctgtgcgtcgtcccttcttctccccacgatggcagccagccgcggagccgtctcagcttcctaatcccttcctcttctcctttcgtggccccgtcgctccctgtactcacgctgcagcaccgatttcccattgcaacgcggccgacggcccaatcgattcctcttctcctctggtggccccgtgccccgccgctatttcccttcctcttatgtcgcatcacatcccgtggccccgccgctattccccttcctcttcctgacacgtttatggtttcccccaccgcgtcctccatggaagactggaagagccttggtgccttgtccgcttgacgtcgatggtggctctgcgcctttgcgttgcctccac

SEQ ID NO: 159585 - DNA, 383 bp, Zea Mays
tctccacatcctcgctaaactcttgtccagtcgtgatggccatcggctcggtaagggtagagttagacgattccccggccaacaagctaagcacgacgtccatgtcagcatcatcagtgctagctggcatctcaaaatgggtttgcctctcagcctcgggaagactccgaagtggggcaatcaaggcttcaatatcctcgggggagggtcacactctatggcccgggctacatcatgagcaggagggttggagacaaattcagagaagagcctattgggaggcaggttccacgcagagtaagctaagggagcaccagcattcaagaccctgccccttagtatcatatccagtcgactcagcaagtcctcattgggaatctgtc

SEQ ID NO: 159586 - DNA, 664 bp, Zea Mays
tgatgtttccctgatatcaagggcattgtattcggacgagagggtattagagtacaactagtggatgaagacattgttgggctagataatgaccttttgtgataccaggtttcctataatcctctctattcaaggcatacctagatggtgtttatgtccactcaagtaaaacaccgcacatcattatgccacatcatttctcaaaataaaataaaataaagaccatggaaaatttagccaaattgcgtgagtgaactgtccatacataggttaaggttgtaaggcaatttttttccaccatacatttgctaaaaagttggaatataaagaattcaaaacaatagattgccttttaaacctcaaatgacgtttctatgatattgagggcattgtaatcacacgagagggtattcgagtacaactagttgatgaagacgttattgggctagctaatgaccttttgtgataccaggtttcctataatccctttattcaaggtataccgagatggtgtttatgtccactcaagtaaaacatcacacatcattatgccacatcatttctcaaaataaaataaagaccatgggaaatttagccaaattgcacgagagaactttccaaacataggttaaggttgtaaggcacctttttccaccaaaaagat

SEQ ID NO: 159587 - DNA, 1022 bp, Zea Mays
aaaatctatttttaactctattcctctgatttacaaaatccctggactgcgcaccgaataaccagataagacaaggacccctgcgcaagtattcccgtgacttagtgcccacagcgcaggactgcgggttgactaacataaacttcagggtctctttagcaagtttaccatggccgaagagatatgggggttttctaatcgttagatccaaaatctagggtgcggattagtctggtccataaatgaatcggtacgggctccccaccattggattttggatacacggtcacggtttgatccagccatcaactaatctatgcagctccccctggatccgatcgtcacgatgtcctagcacgaaggggtaaatggtgatctgatcccggtcgtacaaatccggatcaacgacccacactacttcttcttcctcaggtggcagaacacgaccgtgcctaccaagccgcggcggcgcacaatgtcccaacggcggagccgtggcggggtaattctccggcgagaagtccatagcccagcccccttctaatccccacggcgcaccaggtatcaatagcgcatggcgcgtcttcaatcctcgacccaaaccaggcggcatgcagcggcgccagagcgccacccggcggtcagtcgctggcgaaatacccagcctcaccccaaagcgccactctcccgaccaacaagagtaaagtgaaattcgcagtatggcttatcgaatgggcggaatcttaccgtgatttgcagcccgaatcctcctgctcacggtggagcgcggcccgcggcggcgccatgcacattaacgagaaattcccagagccctaccaccgcatccgtcgttctccgcccgtggcgtccctatggcaaccttctcgagactcgtgtagtgccaccgagtggctttgagggcgacaccagtggcggacagtcaagtccgcggcagcggccaaactccaacctctctccgcggcggaacgaacccggtggagtggatttcggtaaggggaaag

SEQ ID NO: 159588 - DNA, 433 bp, Zea Mays
acttgtaataagcggcctctacctctttagcggcctgcgacataaactcgtcctccttctcttgagcacgtaatcctgcctcagcgagtgcgatgagctcactcaaccttgatgtgttgtcctcctcttccccatgtaatcctgcctctgcgagagcgataagctcactcaacctagatgtgtcgtcgtcctcctccatcagctccaccgtcgccattttttcctgaacgtatcttgcatgtgcctcatctgcgatatagtttacaacacatccaatctatgcaaatataaagagaaataagtttgcaaagtcaggataaataaattgtacaaacaaatctatagtgtcatttttctcactcacttcccttgagacgatcagcaagattatccaacatctgtttctcggctctatccgcctcccattccctcg

SEQ ID NO: 159589 - DNA, 340 bp, Zea Mays
gattacagcgtgccttgtctccttcgtcgaacggtcgtgtccgcccgatcgtgatcgagcgattaggaattgaatccaccttaagggagtctagattgatcgcaggccgttgatttttgatcgatggatgtgattagagctcagggtaccccttcatgtactgaatcccaaccgttgacgtgagatcggacgggtgcgtgctgatctcgaccaaataaaatctagaccgttgattgcagatccagtagcctgccttgtgtaccgattcgacctcgtgttgatttaatcagagctgtagaattctaatctgatggccgaggatgctccataccccttcggc

SEQ ID NO: 159590 - DNA, 818 bp, Zea Mays
gatgaagccgcagaggagcgtgatcttgatgttgttcagggtccgctgccgctgcttcttggcgctgctggcacgcagccgcgccccaccgccggcggccacccccatgctagttcttcgttccgatgcagcggtgcaccctgcacgtgcttctctctagatcgctgggactgggagaagctgtgcatgtgcatgtggtggtgaactcgatcgtggatgtatagccttggcgttgccgacgagctagcagggaacgttctgcttcagtttgtgtgtactagaagtcagcggggggcgcgggaacttcgagggagaggtgaattttgcaatctcatgcagctgggcctgggcgtgtggcagcacgattcccgatctgcaagactactggtgcttcctccgaggttttagcaccaaacacaagtgacacacaggctctaaactaatctgcacgggaatcgtagcacgcgcaaattaaagcatttatagcggagatcgagtactatttgtttgtttattgattaatttgcacaggctgtacgcgcatgtccattcactggagagtcagcaagcgcaactggcttggttactgacggtaactagctagaactagaacatcttttttttgttccatcatcgcatgtgtgcagtgcaggtcaccgacagaatcgatcacggaggaggcgaggctctggcatagagttttgtggcactataatctacttttgtgaggtttaagaggctgtttggacatgcaccaacggcgccgcactacgcctaaggtgcggcggtcgattcgagcgctacaactgcggtgtctg

SEQ ID NO: 159591 - DNA, 449 bp, Zea Mays
gcccacgacattgtagtttatcaccagcgcatctgcgtggggcgcgctacgaaggtcgatgtccctcacatcgaaggcaaccagaatgtgggacgtctttgtttgcaccactgggccagtgagggcgacgtgattgacccttcggcagtggtatttcttctgtcacttgctctcaaattctgcgctatacccttcggtgatcatatggatgactccctagaatggtgggttggcgaattcttgttcttatttcagaagcggagggggttgttggtggttttcttgtggtggcggaggttggggtggtagttctaatctttcttggtgctgcaggcgcaactgttgggggaatgcatggttgtagttctggtgttgttaggggtgatatgggtggtcgtttttataatggtgatggtggtattggtgagggtggtaagtgtgggaaatgg

SEQ ID NO: 159592 - DNA, 517 bp, Zea Mays
tgaagggtaaaaatcttggcgctcggattagctcggactcactcacctttgcggccgccgtacccacttgaaccatagctggttgggatcatcctcgccggcgttagccactcaacgatcgtgcgccacatgccttggtgtcttaccacgtcgcaatagctcgggttacacatatccggtgatcgctgttgagctcgccacggtaaaagccaccaattgcttgcgccagtgccccccccttctctccgaccgccactgcgacatctcaaattcatgggccactgctcggggatcctttaaattgagcgtacccttagctccgcaaggtattcaagcactcagcgcacccactcgtgtcccaaatcgttcaccagagagccccaatttaggatttcccccaaatcggtccaaaacaccgcgcgaagtgagctcgtcgtggccagcgtgctttaggtctgttcatgctctctgctctcccgtttcagtgcccttgtgttctcctgatgctcctcgacct

SEQ ID NO: 159593 - DNA, 619 bp, Zea Mays
tcctgattctccatagcggatcctcttgcggggaggggataatgccatagcggggacttgaacttctgtgggattccttccatcaagctgagcttctagggctgctatccttgcatgtgcatcctccagctccaagtgtaccctagagaggtccagggtagcactatccaggtcggtgttaagacctaccactacaccagctagggtattgaggcgatcttctctagctccacctagaacgatgctggtctggttctctccatgaatacgaagaggaagatgcatatacttcatgttgtgaagctactgccgataggtgtggatgagagaccacaacattcacctagcagcgtcgccgaccgaagcagtgtaggtggatagcggtgtcagagactcatgtgctgacagagtcctaaaccctctatcacctgcatccatcaccttgacatgaatgagagtgatgtagtagcaatcccgaggaggctcgtacacctgccttgtctcgtacaacggtcggacgtaggttcccaatgcgtgcagcacgtcttgcagcaggttagggaagtgccctgtctcgaacattgaggtgtaatgttcagtgacaggccataaccccacg

SEQ ID NO: 159594 - DNA, 298 bp, Zea Mays
attgcgccgccgtcacctgggttgatgccgtgagggaaagaaagggtgaaacacctcgtgttgaaccacatcttcggcgtcgctccgaccggcagtcaggggcagggtgcttcgtcgtggcatggcacgagtgtctgtagcaccggtcgatggtaggcggcttcggtgatcgcggaatttctcaccagcgcaatatttctccgtgggaccacatcgcgtcgtgaacaacaccgcggggacctcgtgcttcggtaatgccctcggatcgactctatacctcctctgcattgtttagcac

SEQ ID NO: 159595 - DNA, 481 bp, Zea Mays
ggtaaaacgcctacgactcagggaacagtgtataggatggcgggttgattctgcgaaatcttggggtctctttagtaaaaagacacggccgatggggtatccgatgatcttagccgtcagattaggaacggacgccccagattaaatctgaccaacccgaaccggtatgcgtcacgagcgctcagatctatatccaacggctcgaatttaatgaagccgagatctcgccgcagccctcggatctagatcaacggctaccgctacccgagtccgaatcgttaccctggatcaaatcgcggccgtatatcatgagatccacggtccatacactaactgaccctgagctgttcatcctgagatcaacgacactggtgttttctcctttcttccgctcatccggtgagccgagcacccaggcagagaacgcccacgaccgcgccatatggccgacgaggtccgcagccccaaacccaaatcaaac

SEQ ID NO: 159596 - DNA, 379 bp, Zea Mays
cacaaacagtgctcctctatcagacacaatagtcctcgggattccatgcaaacacactatttggtcaatatagatctctgcatatttttccgccttgtgggtggtatgtactggcaagaaatgagttgtcttggtttgcctatccacaatgacccaaatagaatcgtggtgccgggaggtgtttggcaatcccaccacgaaatccatgcaaatgtcctcccatttccatgaagggatggggagaggctgtaaggcacctgctaccttcaaatgactagctttgattctttggcaagtgtcgcactcagatacatacttagctatctccctcttcatcctggtccaccaatataaggatctgaggtcatgataaatcttg

SEQ ID NO: 159597 - DNA, 1139 bp, Zea Mays
gcttcgtgctcagcaccgacgggcatcccagcagcctggggaccttcccggactggatggtgacgtcacaggacaacggcacctcgctggtgctgaaccctcctccggacagctctaacctgaccgagttcttgcagttcagcctggggcaagtgagcctgatgcggtggtctgcagcggcgaacacgaacagcagtggctgggtggctcgctggaccttcccgtcggattgcaaatccagtggcttcttctgcggtagctttggtgcttgcaggagcaatggagaatgcagctgtgtccgcggatttgagccttcctatccagcggagtggagcctcggatacttcgcaaccggttgctcgagaccgagatctcttccgctgagctgccagacgaacggccagactgaacaagacgactcctttatcctgctagacaagctgcaggggctcccgtataatccccaggatggtttagcagcaactgatgaagactgcaaacaagcctgtctcagcagatgctactgcgtcgcgtatgcgtatcactccggatgcaagctgtggtactacaacctgtacaacctgagcttcgcttccagaggacctcctccatacagcaaggtttatgttcgttggggctccaagctcaggcccaagagtggtctgcgcacagggctgattgtatccatggtggtcgggtcagtagcgttggctgccgtgatagtgatactggcgctcctatggcgatcccggacctggagaggtgtatttacttgcagtcgcagagagtttgaagcaggaggttctctcgcgttctactcttacgcgcagatgaagaaggctacaaggaacttctccgacaaactcggcgagggagggtttggaagcgttttcaggggaacaatggcaggaccaaccgccgtcgccgtgaagaggctcaaacgcagcgggcaggcggacaagcagttcagagccgaggtgcagacgctcggggtgatcaagcacgccaacctcgtccgcctcctgggcttctgcgttagaggagacacgaggctgctggtctacgagtacatgccgaacgggtctctggacgcgcacctcttctcggagagatccgctcgtctgagctggagcctccgc

SEQ ID NO: 159598 - DNA, 429 bp, Zea Mays
tgccttcctgcgcggcgacggagcacttcgcctgtgacagtcgtttcggccctccgatgtgccaacctccctgctgaacgatggcgcatgactcggagacgctaccggatagcatagaggcaacgcacctgcaattggaacgacacccgagtctacacatgtcgtgcagcgggtccatggcggcgccctttctccggcgagcaattccatatactcagaggagcatcgcactcgccccctacctctagcttgcacgcgatccatgagccaaggagaccctccttaatgccacgtcgtggtccatctagcaccgtgcttgcggtttgttgacagcggctctcgtctcgctcttcctcctctctctctgtgcaagctcgagcctctccagcgccatcttcaaattttttagtctcctgggcgaaaccataa

SEQ ID NO: 159599 - DNA, 751 bp, Zea Mays
tgtccgtatttttgacgaggacgaagaagagaaagaagaagttccgctaattcgtaaaaatagtcgatgttacagaggtagtagggggggtagtgatattccttctccagctctgtctgctcttgttagccttcaagaattatccataacagattttgatcaggcccttgaggatgtcattcctgaagatatgctgttggaaccgactactggtgatatgatggatgtttgctctgacattccagacgtgggattagaggtatcctgggtagtatctcgtgcatcgtcgaccttggaaggcagtcttcggtgtcaagaagttggtcaggattgcccgactcccatggaggtgactgaggatccttcagcctcagaggtgactgttgcagaaaacccagcccccaaggatggtgctgacggttacccagcccccgagggtgtcgccggtaatgatctggctctagtgggtagcgcaagctgcaacctagcccccgagagtgttgccgatggtgatccggctccgatgggtagtgcgagctgcaactcagcccccgagggtgtccgagtgagctctccttcccacacctccatggacgtccacgtcgggtcgtctccaccacgatctgatggagtaatagcgatgcatgcttctttagcttcgagtgagggagtcgccttggaggtcggcgagccggatgctagaattctaatatctgctagtgaagctgagtcaacccccgacgatgctctt

SEQ ID NO: 159600 - DNA, 398 bp, Zea Mays
ttcgccccatcagccgtcgagaggctgcacctctgtgagaggaacaagaggcagagccggaagaggaagcccaggccgcagagacagagaacaagctctcccagtatccagactgtcaaggcgaccaagaacagagtgaagaacagtaataagaagagacagcgtactgatgatcaccaaaacggtgtacgcccgagaggccataagagcaagacggcagctcaggtctgcgtcgacgactctgacgtccccgatcctgcgtctgaaccgaagtgtccagacacgtcggaaagattgccggaggctgaagtcacagaaccgcaagaaatttctgagccccctgcgggacgacatgagcgtgaagctcagaaggtgttagacggagaggcagaggtagc

SEQ ID NO: 159601 - DNA, 663 bp, Zea Mays
gtgatgacgaaaccatgtcagcgtcggaataactgttgaccacgtcggcgctcttagatgtgacagccgagtgacctgtgacaatgccagcgttttttagagattaccgccgagtgactgaggacatcgtcggcactttagagatagctgccgagcgactgaagacatcgtcggcgctttagagatagccgccgagcgactgaagacatcgtcggcgctttagagatagccaccgagcgactgaagacatcgtcagcgctttagaggtaaccgccgagcgactgaagacatcgtcggcactttagagataaatgccgagcgactggtgataacgtcagcgtcttagaaataacagccgagttaaaatgggtcgtgtcggccactttgaggataatagccgagtgacgatgtggcacaccggggttttagaagtagccgccgggtgacgacgtggcacgccgatgttttagaagtaaccgccgggtgttgactgggcgcttttggagacggtatctaactcgggaatatcccgcatgtactacgctttcagccgcctctgctttccgtgccctagttcttgctttcctgcctccagatcctctctgcaattcggctctcgctctgtttgccagtatagttgagatggcgcccaagagaaaggcc

SEQ ID NO: 159602 - DNA, 314 bp, Zea Mays
gccacacactatctctcaggctggaatagctgttgatcctgataaagtgcaagaggtgatgaactggaagccaccaacaactgttcgtcagattcggagttttctaggattagctagttattaccgaagatttattccggacttctctcggattgcgaagcctataactgagttgctaaagaaagaagtcaaatttgtctggagtcagaagtgtgaagatgccttccatgcattaaggcagcatctgaccaccgcaccagtgttggcgcagcctgacaacagcaagccttttgatgtatattgcgatgcctctg

SEQ ID NO: 159603 - DNA, 617 bp, Zea Mays
ccgccacctcctcttttctctcctccccttcccttcttctctctttactctttcatttgttttagccgccgtcgccttcactttttctctttctctttctctctctcactcaccacactccaaatccctctcaaagccatcaaatccttgtggagtttgttggagacttgttcccctcggcctcctccatcaactccttcctcttcgttgggatttctgtggttgaatcgatagatcgaggtattgtcttatttccccattttttgacttgatccaacatcgttcttgattatcttgtgtatcttttcaaggatactgtgtagtttaggtgcttggcacacttaaactgttttcatttgtctcgaacattgtttgagttaagtagtttggtattgttcgttgtagttaaaccgctcacatgaacggttgaagtgcatgctcaatatcatacgtgtctttactcaaacgtgtttgttaaaatccttgaacatcgatttcctctctcaccgtatgttcctctttttatcttaaggatggtgcattgtaggaatccgtcggtagttgagtccgactccgatgacgacgctcaagagattcgtgaagaaactcctccgcgg

SEQ ID NO: 159604 - DNA, 607 bp, Zea Mays
gagaggttgatgtgtggatgacccaatttatgtttgtcgggatcacaccctcgtctgactcctctcttgcttctaccggtaccatcccggcagattagcatgactcctagcaaccaaaaccagacggagacatcgttggggtgtcaagctcagctagcgctagtgcagtgcctaaggccaccagtgctttgccaatggacccattgagcgagaccttagcaaaagcgaaggggagatcatggcggcgacaggcgcatcggtgacaaatgcgacgactttgttcgcacatttaaacaaaggtggttcgagcaccatagacgtgcctagaattcctaggggtattcaacctaggacctagcactaaccgccgacgcacctagctctggacttcaacccccttccaaagaggtgctagaagagttttcaggtcgtcgtctctacacaggagacagtttcaccggtccctcttcccaagtgctgctccggacccatcagaccctggaggaggcagaaaaggcctttcgacgggaatggggcaatggaggtagagcaagaattcttcaccgactaacatgtgcggctggagaagcgtgtcaaatttgtctag

SEQ ID NO: 159605 - DNA, 643 bp, Zea Mays
tgccgctgcattcaaaactggcaaacaagttaaggcgattagtgttggtatgggagtggaaaattagctatcgtttttggttttagctgtccatgccattgttgattagcaaatgtcagtgtcagcccctgtcacacaaggactcaagaagacccgctaccatctccgaaggcctgctaccagacttctcccagccggagctcacagacgaggaaaaagtgcatcaatggctgtctagtcagcttgaagacggttcagagggtgcctattgctgttgtgcttgcatacttgcagaatgccgttgtgaccccctatggcgacctcaatgggcaactctgtcaacgccatgacaatgtttgtgctgcacacgacgtgttcgaggtattccctcttagcgcccctactgcttgagtcattattgggaggatcttacccactcggtgttggaaaattccatagccaccacccattttgttggagagtttgcgtgctggaataggggagctgcttctactctcggccacttcccagcaggaccattcccctgacagcatggtggcagcaatcaattctgaggaaccccaattggtaattttagaaccagaaatagtgtctacacgctcaagccatgtgaaaggttttc

SEQ ID NO: 159606 - DNA, 282 bp, Zea Mays
gcaaaaggcgctgggacgaagttggcttgatttcacattttgacacgagggtggtcaatgattaattcgacataatttaagctcatgttaggcaagcctgagggtgattttaaggaatacgtacaacaagctggtgctcgctggggtcagtgtgcttgttgtctagtatgctaatagtggttagcacgtctctgttatattggtggaagctgcacttccttccaccactcaatgttttgccatggcacctaacgatgtcatacagatctatttgcagcaacc

SEQ ID NO: 159607 - DNA, 571 bp, Zea Mays
caattaaggaagcttgaactgacctgcagaaggctggccacgacgagctcactcacggcggcgcggagaactgaattggggggaaaaggaaattcgggcgctgtggtggctaatcggaggcaagggtgggtgctctggcttcgtgacaacctaacggagctcactggggcattgatttatagtgtccattagcagtggcgtccaatttgaaggaagtgtgctggcggccggagagaggggaaatgtactgacgcgggtgatcgtggttgtcaccgtggcaaggcctccgacgatggacgggcttgctacaagggttcactgcgacgtgttaaacctcccaggcacgtggtgcacgatcggtaagcggccaacgccggcgaagatcattccggtcggccgtagaccaagtgggtgcggtgaactcaacagtgaccgagtccgagccaattcgggcgctaagatcttttactcccctcagttatccactttgcgctgggcacgaatcgtggcggccggcacgaatccaggcgtgaggtcaccggtggcgaggtgcaacgcacctaagatcttc

SEQ ID NO: 159608 - DNA, 678 bp, Zea Mays
agtctccaaagatcccatatcttggaagtaagttatgaattcatccttatatattttccccgcgccaaagtctcacttatcttgcacctgatttttaagttcttcatccaatttttcatcagaaggttttccatccaaaactttgatcacagccactagcccaacaatctgatttttgttctccggtatgtctattccgaaaaaaaccttgctctggtatcccaaaaccaaacaaccagagcttcccgtgagaatgacaccctgtccccatatgtccaaactcactacacttgtagcacaacatatcgtttgtgcatttagattggtgatgacctatcctcatacaacggaagcatttgatctgcctcttttgttcatccttcatccaaaattccttctcattatgcaagagtttcctattatcagaattctgaccccccatgatagaagactgcacccctgatctctttctctcttcctcgctagtccgtctcctttgctactagcctcaaaacgctcttcttcacgtcgacttgcaaaaccacccctaccaagagcaaatgacggacgacctccctgcctcctttccaaagaccaccctgccaagatttccagtacccgtgacattttcctgacggcgtcacccttgttcctaaagatccacttctctactctccc

SEQ ID NO: 159609 - DNA, 535 bp, Zea Mays
ggccgcgcaagccacgaccaccgtagaccggccaaaccagccactccccgtcccgtccgaccctcgggttagcttctacggacctcagtgaagctccccgagccggggattgaactctacctcactggagacgccggtcaacgtcgccagacttcaaccggccgtcgtcgcatgtagaccgcgctccacggtaagcctttcatcgattccttgcacctgtagcatccttagcatcccgtgaagctccctgtgccatttgattgagccctaccaccgtgagtaggccggagcacacgccgccgatgagcccgaccacctgcgcacgcggtcagaactattccggccatcaccgtcgatgacccgcacctcgacgtgaccgccaggacctcctggatctcacctagcccttcaccggacctccctcgccgccggtaagccgcgtcgtcctttttcctctccgcggttactgttacatgggggaaggagcccgggataaaagaaggaaaagctaggcgggattttgcgaatcagtgcc

SEQ ID NO: 159610 - DNA, 395 bp, Zea Mays
ggagaagcctttaatcttggaggttgcctggccttggtcatggtgcaacactaggagagtaacatgtgcggaatggtcacactcccctagagtatgtaggggtagatggtgtgatgtccctaggacattgccgctctagtggggtgcgcacaaaagactagcctacatgtttgttatatgtcggctcacggagccatatccatccaacgaaggtcgctagagtgaggactacatgagatttatatgcctcttatggcgtggatcacaatttgagttgatggagtaggttatagagatagttgttcgaactggcaaacatgctaacattgccacaattgtgctacacaacaaaacacaagaaactcaaaaggaaatgcaccatattcctacttggc

SEQ ID NO: 159611 - DNA, 596 bp, Zea Mays
tctcagttgcgccatgcaataggccgtattaccacgtcgtcgcgagtcatggagagtaactagtgactgatgtaagaccttgccccagtacgtgccacgatgaactcactttagcaacatatcccttcaccgtcgtgatccaaatctcattcaaattcggagcaaccgtgaccgacttttataaattgagcgcttcccttgctccgcccctttgtcacaaacccagtgcaaccccaaccatgtcctaccctccaccgtagctcgtgaattcctattttcccccaattcggtcatccgcgccgacgtgtgacctcgtgccatggccagccattcacaggtctgttcattaccctcttgtccgtgtttctatctcctctgatgctagtaaatctcgtcggctcaaccgattgagcgctactgcgccatagtgtagagatcgcgacaatattgtccgggaatgccgcctcggacatggctcctgtcgactggtcgtgccaggtagtcccgtctgagtttgcgcaagcaccataacccttgtcagccactcagtccttccgcgtccttggattaagatagaccggctagggtacaccggt

SEQ ID NO: 159612 - DNA, 546 bp, Zea Mays
gtggttctgccacatcttgatcaccacatcatccacataagcttccacacgcttgccccagtggtcagctaagcatgtctgaatagctctatgataagtcgctccagcgtttttaaggccaaacgacatggaggtataacagaaagctccaaatggagtgatgaatgttgtttttcctcgtcttcttttgccaaactaatctgatgatacccagagtagcaatccaagaaagacaacatagaacatctggcagttgagtccaccacctggtctattctagggagtctgaaggtgtccttcggacagtgtttgttgagatctgtatagtcaacgcacatgcgccaatccactttattctttttgagtacaagaacaggattagctaaccactcaggatgtaacacctctctaatgaaccctgccgcgaccaagggagccagctcggcacggatggcttctctcttgtcgggcgtgaagcgacgtaatttttgtcggatcggcctcgcctgggggtagaccttcaatttgtgctcggccagttctctc

SEQ ID NO: 159613 - DNA, 362 bp, Zea Mays
ttagcaactccgacggggacgtaattaggtgtgacctaccatatatcggccccatatgactagttcaaaggatcactctaacatctcctcgagcaacatcatcgaaccaactatggagagcctattggctgaagattagcaagaatttaaggagcacaagatgcatctaatcaaggaagccgagacaaagtacttggccaatttcaaggtggacatgcatcagaaagtcgtccgacaatggaagactgacctagcattgctccgacctcctgcaacctccccaaatgtaagtaacacatacgacgtccaatctcttagatcttacgtagatgaacagcgggagcaaatgcaacaagtattag

SEQ ID NO: 159614 - DNA, 748 bp, Zea Mays
ctcagctcaattacctctgagcgaaggttgctgagagctattgtacaactttcgtcttcggcgttcttttgtgccctcaaggcattgctaagaatcaagccctgcaaagaaaaagaaagtattaagcatgacactaaaatacttcatttccaactttaaagttaacttctatacctttatactgttgtacgcaaggctatcagcaagatcatccttctacatagccgaaaggccttcctcaagcttcggaaatcccatacttttagctatctcccggcaaacggatatttctttgttgtccgggagatagtataggaaatcatcttcgttagtgccattgaacactaaggcccccttcagatattttaatctctggcgtagtgtctggcttctaggatttcttcctcagataattttttccccgaagcatgtcgaataatgtaatcaacatcttcgtccggagcttcgagggcaggagatttttctttttccatcatatcttgccccgctgtcatgacagtatctgaaatttgttgctcaactttatcttcaggcgcggcagccttcgttttaatgggcactgaaggcccagcttcggcttcggcctggactttgacgacttcgacaattttcttagtaggagcagggctcaaggcctttgtggtctccatgacagcgtctagcacgctggccatcctccttctcttgggagttgtggcatgagctttttgcacttttggcaattctg

SEQ ID NO: 159615 - DNA, 436 bp, Zea Mays
ctcaacacagacagatcgaaaaaaaccattttaacagtattaccagaactttatcagtatgcccagataactgatggggtatgattggatattgaactggagtggagatccaacgacgtggaattctacaataccattctaggtaacaattccttgcatgggtagcatctcaagtccttgtttcctggcgcttaacaacagagatgagcctgttctcccattccttaataatgtagttatcatggtaagtaggccaatgctgatcagctttaccctgcactgtaacaggttcgtcaatgttgattagctttaccctgcattgtaacacgttcaacaacctcatggctcgttcggtacaatgcgtttcagttccaacctgaacgattccaaggcaagtattcagtgaattcggttggttcgctcaaacctggtgacc

SEQ ID NO: 159616 - DNA, 341 bp, Zea Mays
tctgcacggtaagtcttcgcgttagacttcgatttttcgcacttattgtgctagtccggctgcacccttaggcgacttctgcatggtaagtcttcgcgttagacttcgatttttcgcacttattgtgctagtccggctgcacccttgggcgacttctgcacggagttgtcgcaagcgagggtggccagcgctgagcctcgcggtgactttgtattggtcgaatgtcgaagaccgtcctcgcggtctttttttgacgcatgtttttgcgggggatttttcacttgtatattacatggctccgcctcgttaaaaacctcacccccccgggaggaaaagagtgc

SEQ ID NO: 159617 - DNA, 900 bp, Zea Mays
aacccccgtccttgcatcttccgcccgggtaaccaagctttccaggccaccgaagtcatcgacttcttcatcgttcatcatctacaaaaaaataaattaataaataaacaaaaaaatgtgtcacacacctgctccagcacccggtcgaacctcccccggacagtatcgcggccgtgagggccccacatcctgtcataaagcgccctagcggaccactttaacacctcatctttgacctggaagattccacggtcgaagtcgactttgtaatgcctgcatccctcacgggacaaagcattcgcagccccctcacaggtaataagcgaggcaaagaacatgagacccatcatgatggatgggagcagctccagctcctcctgcagccacccgaggaagcggaggcccacctattcgccggatgtgtcgaagggggcggtacacgcaccaagctgacggtacgcgtccacgagcaacgcatgtgctcggtcgaccccagtgcgggtggaggcctccgctttgtccacatagccgcgcagagtcctctgccctgactccgtgtcggtggcgcgcttgagggcgaggttggcctcagcacgggcagcctgggcctctgcgtgggctttttccgcgtcttccttttctgccgcaagccggcggccgaggttctctttctcagcctccgccaccgacaacttttccagcagattgcggctcttgttctccgcggccgacttgtatcgcatagcctccgtatgctgcgttcggaggtgctcaatcctcccctcgagtcaccgcctttcggcagaaaactccgaggtcaatgcccccgacgcaatgtgctcggcgaaggcggccgcctggcacgaaagactgtcaacttcagagcaatggaagagaaat

SEQ ID NO: 159618 - DNA, 653 bp, Zea Mays
gctcgcacccgcgcaccgttgacaggctgaccccgccagtcagccactcccttcccctcgccgcgtacggcttcaccacggtcacctccgaccaccgtcctctcctcctccccgtctgcactcgccgcacagggaagtttggcaccgccccgtcctcgctgttgtggtcgcgtccttgcacggcaccgccccgccgtgcggtctcaacgccgctgctgtgcagcattaactccgttgctgtgaacctcaccggcgtccacccagcaccgccgctcccctcccctcgggcgactataaaagggtcaccccgagctcctccttgccccgcaccagcctcaaccactcatctccccctcgcccgagcccagtcgcgctagctccgcatccttcctccactccggtaagcccctcctcctttcccccactctctggttgttcagcaaacaattcgctaggctcatcagtttcgccgcaccaccgcgagctcagaacaccactcccttgcccctgatccccacacaaacctcaccggcgacggctcccgctgcggagctccaccacttccccgcggtcagccccctcttagcctcctctagcaaaattggacccacccctaagctcgccagcccctcctcgtgctagggcgcctgccc

SEQ ID NO: 159619 - DNA, 705 bp, Zea Mays
ccaccaataactacttcaaattcctgcttgtatatagtagattgcaaggaccaaggagaaaagtggtacctctagctatgcactgccttctcacatgtttctctctctctcttcgtccctctttctgtgggcatttttgacctggacccagtgggggcctactgaatttgactgcaaatgcatgtgggaggagtttaaggttaaaaggccatgaagcttggtttgcttagggtttcctgcacatatatgcatgcatttgaatgtcctttttgttcttccatggatatactgatctgctagcactgtagctctgtgatagcggtacttacttctgttaaaagactggtgggcagagctactactgcaatcatttgctaaggccgggcacgggcatgcagagacatgttaaggcataatcaccatcttgttttggtaatgcgagctgatacgcaggtatggtcttggggagcaattgtacgaccgataccagaggcgtcacatggagatggagggcgtgcatggtggcaggggaaaaggctggagaaaaggagccagggtgtagtatattgattgcagctacctagctcctcaaagcttttaggtgcatgtgatctttaagtaggaagtatgtgcacccatcacaaaggtcccgtttgtttcagttttttacggcttccggccactaaaaactgttgtggactgtct

SEQ ID NO: 159620 - DNA, 276 bp, Zea Mays
tttggacgatgcacattctttgaatttttctctcaatgctcagcttaactttgaaagggcagctcatgaggtaaacttccttaattggctctgtcgtgcttactgtttactggatgcttgaaagttgattcttgtttgtaggaggagagacgagcacttgcagcttctcgtgacaatctggataggttgtatcgtgatgccagcaattccttaaccatcttggagagaagccatcgctttactatgtcatatctggatcatcatcgtcgcgaactg

SEQ ID NO: 159621 - DNA, 403 bp, Zea Mays
gccttcggcattgtagtcgactcttcaatcttttgcgtgggaggagcaggttctttcgggtcagcagctgaagaagcctcctcgccaaactcaggtatcacggccggttcaatatagcgtggctggtgggtaaggaccttcaactttttgctcttcggcgcaggctcatctggagtggccaaagcagcagttttggctgaagcagcagcttttctcttctttccccgtcctcgcagcagatagcggtagtcggggtagacgaagccaatggcatcaaaaactctgttcaatctcttttttccccggcccccgaaggatgtggataatgcattatcttctgctttggaatatgacccaagcagttcatcacttgtagcttcgatacatttcagccagtcgtcat

SEQ ID NO: 159622 - DNA, 636 bp, Zea Mays
gtcagtatactacgcaccttgccggcgatcacctccgccatgcctaacctttgccctggcttcatcttcgccgttgcagcctgcttgaggtcagtgtaccgaccgaccgaacttgtactgaaacatgatcgtcagttcaacaaaattattaaacatggatacatccgcagtcctaaggtctaacttgtaactgtggatgtgttattaggtttgagaggtttcactgcaagtgcagccgtgcaggtacacctgagcgaagatcttgggcactcagcactctggtgtgccccatcggggcaatgtgcgtgagcttcctcaagaacccccgcccaggcggcgaagaaggcaggcacgactggatactgtcttctggccggggtcacgatctgtcatgcaggtgcgtactacatctgaacttcaaagcctctattgagcaatagctgtactcacacacaatttttttttgcttgttattacaagttcagatggtgtacacgactacccaactacaagtggcgttatttgttcaatcaacaggcacaggcaccggcaccctagggatagcgaccagcagcagctcagagcgtgggggcatggtgatcccagccgcctccgtcacgtccatctcctcagcaa

SEQ ID NO: 159623 - DNA, 749 bp, Zea Mays
ggtcctcctcctgccgggtaagaccagctgcccatttcgcaagggaagcttcccccgccttgaggcttccctcggcacgagcaatgtcgctggccctgttggcgagctcatgctgcagcttcacctcagccgcagcctgcttgacccgctgtttctccagcaccgtaatgtaagctttcagcttagcttggagcgctgtgacagtctcctccctttggtctaagcgtacctccttcctagccaggcctttctccttctggatcacctcgtcctctcgatcagacaccttccggatgtcctccttgaagtcctcacgctcctgctcaaactcggcccgttctgaggcaaaatggcaggacaccaccttagtgcgctcctccagttgggtgcaccagtcgccaaggcgttggcgcttggtctcgagcgcctcccactcccgccggatagccacctcggtttcccggagatcctggtgagcgcgggacagcacccgagggaggggagtcagcgttgcttcagattcggtgccagaccggagcggtcgcccaaggataacctccggagaccccggggttggtggtggaacagagctgggtgcgcctcccacgcctaccgccgacggtgcatccgacggtatccccgccgctaggccctcagcggctgttggcaacagcgttgcctctggaccctcagctggaactcggggacccgaaggtgccgcctcgacggtgacaggcggatcctggggg

SEQ ID NO: 159624 - DNA, 947 bp, Zea Mays
cttcatcatctttcaccatcctagcagcctgtctgcttagaacgctaacaatcctttttctcttttgcccttcggcacccttgtttaatcgttcatagtcagggtattcaaagttcaaagcatccatcacccgattcaaccttcatttcggtctggtaccgaaggctgcagtcatcatttgatcctcttttttggtgtaatttcccagcacttcattacacactgtttcaatcatttccagccactcttggcaaggttctttaaattgtttctcaaatttaaaccgataaggaagtcgcacaagcacaagtcccttcttcattccttttagcttcggcatgctaaattcgctcaaagtcagagatgttttgttagccaaatattcttgaactagatctctggtgctgatctgttcggctaccaccttgaattctgccacggcctattggattggtgaccccgacgtcatgcgacacaggggcctagtcaacccgaagcttaaactcagcgggctcatcactagcattttcaacttctccctcttcttctcatcggcctagacatagaaccactcacttttccaaccggttggccacttggtgtggtagctaagcaccgaggccttcatatccttgcgatatgcgaagttataacagccaaagttttcatgcagcccgtcttctctggccttcgtctggtaatgcagctcatgcactcggcagaaagcttcagcattcgggtccactccttggcttcgaagggcccagatgaagacgctgagcctaacgatagcgctaagggtcagctgatgaagatatatttcataattatctaaaacttccccaatcatctcattcaaggggaaccgcaatcccgctctaaaaaagctcttgaaaaccaccccttcatcttttttgagttctggagtgatttcttctctggcaaag

SEQ ID NO: 159625 - DNA, 294 bp, Zea Mays
gcctcgatacagataagctgggtatgccctgtccttcaatggctgaatattcttgaagacaaaatcagcaaccacaacttcagcagtcagacccctctctttcaacagttcaacttcagctagcaacgcacctgcctcagctacctcctgatctgtgggagactcggtccagcttggggtgcgaacatccggctgtcttcccgaccgggggggagagaatttccataattctcaactatgaaccactccaggcgccatcccttgatactgtctttgagagggatttcgagatac

SEQ ID NO: 159626 - DNA, 508 bp, Zea Mays
gactaagatgaaccaacatccaaagacctcatcgacggagaccgcgtcttcgccctgcaggccctcaacaaataccaagctcaaacgaaggcctggcgtgaccacgcagtcatcccaagagaattcaacgaaggagacctcgtactcgtccgaaccacacggatagagtcacggggcaagctggagccaaaatgggagggtccattcatcgtcaagtcgaaggcgtcccccagcacatacaggctaacaacgccatccggtgaagacctagaccattcctggaatattgacaaactccgcaaattttttgtttaaatcctcagggcctacgcgcccttgtaattcaccaaacaatattatcctagcccacactcttttcctcccgggggttgaggtttttaacgaggcggagcctttaatatatctgcaaaaatcccccgcaaaaactaagatacaacatgtcgaaaaagcccgcatcgacggtcttcggcattcgaccactctgaag

SEQ ID NO: 159627 - DNA, 555 bp, Zea Mays
gggatgggagctcgactggcccatggtattgcagccttcttttccatgtgcaggaacatatcttccgatgtgcatgagctggtgaggcgtcagcgggagactgacgacaaccttcatcgtcaagcctcttccatgggtatgccatttgctccccgctcgcctgatgtgcctcttcattctcctccgccagaaatcaatgaatggcaccagtaggcctatggggtgcccttcatgacagctgaagatgatgaagaagaggaagaatattttgatgatcgtgagcagtttgccccgcctccccactagggggatctgggtcaatcttcttcatatcctccaccccaggatccatcgagtaactatcctccccagctcagcctggggaagaaaactttgcatctaacttggcgtctcaattctttgatccgactcctcctcagtggtgatttgtggtttatggttctctccttttttggtgctagttgccaaaaagggggagaaggattgtcagcttggcagcttggcttggtagccctgaggggcttttgatttttg

SEQ ID NO: 159628 - DNA, 375 bp, Zea Mays
ttggacttgcttttcctggcgcagatcgaggcgtgatggaggacctggacgtggacgaggaatacggctgggtcggtgcagtagaacttctagcttatccgaagtgatagattttagagttttagttgtctctgatgttataggatctgccgcaagttgatttgagtactctttatctttgccttagttgactcaatattttatttgattgttctcccaaaacttttgtgtgctctataagcctatagcatggatgaaactcaccctaaatatgttgttgcatttatgcccattttgatggttgctttattgttgtcctgatttttccactgcccatttcaggcttgccctgagtccctgactactctgagatgg

SEQ ID NO: 159629 - DNA, 574 bp, Zea Mays
caccgcgccatcccaaattcacaggtcaccgctctcggagcctataaattgagtgtgccatcgggtccataaggtagtcaagcacccaagccaccaagtcgttcctccaattgctcacctgagctcgccaatttgggatttcccccaaatcaacaaagaacaccgtgcagtgtgagctcaccatggccagtctgctccaggttgattcataaccctctgttgagtgttctagcatctctaggatctcctgttgcttgtaggctcgattgattgaactagaccgtaccgaatttcccggaacatcgtagcctcttctcgagttttaccgtcgtcgtgaacaggcatgctccggcccggattagtgcgattgattgaggggttagtgtcgccgagggtagaattcggtgccgactaagttaggggtccggtattggcatattccggccagtataggctcaccggagacgtgctcgtcgccgaccaccatcgcggacctggtgttgcgaaggaatagaacttcgggggtcttggtgcaaacgttagtgagacagataaatagtgctctgggttattt

SEQ ID NO: 159630 - DNA, 1084 bp, Zea Mays
ggctcttatgctctaaggacatataatgtataaggtagaatcaccctaaaggcatgcaaagtgtataacatagaatcatactttaaggtacaatgatgtggctaaggccaaagtgttgtgcataagtgtcatggttttgacccgacgttagtgaatttgtaggttaggatggggttagcgtgcttttgtcctaatggctttgcacttggtgattctaaggaagaaagtttagatgggttcggagagagccctacatttagtatggagctaaagtttttgttgcttggttttgtgtgttacaaggcgaagcgcttggctttcgtgctcgtgtgaggaatgttaccaacttagtttgcctgcctccacaacgaggcacccaatccattatatagcggagggagcgagtaatcattgttatatgatgtttttgatggggtacgtcatctctacctttagtcgtgtagttgctctagtgtgtctgctttgtcatccttgagatgacttggctataggggtggttgagtcctaaacgtgttcgaagccatgttgctaggtatgcttttctgagaggcatgtggtgattttcctcatatttctcttgctttcctcacatctggctttattgacttctatacccttggagcgtgactgaccatgacctgtgaggccctattcgtacctttgatggtgaaatagttggttggaggagtcattagtctcatgtatcgtacatgtttctgccctttgcacgcctcagttaggagtccgcgccgagtgatcaaaatatcataaatgcacttccccctagccatgttgtgtggcttctaggtcatggggtctatcggtaccctaaatataaggtacccactcctgttgggtcaaggcgagacccatgtggttgcccataaccacaggattaccgggtggctagctcgactcagagcttaggccccaccatatgaagctgcgggctagcgtggctcatttcctaagctggaccgccaacaccacgcgtcccataaagggagtaaccatcaactttgaccgaaggtctgggttaccccaagtggagcccgaagaccca

SEQ ID NO: 159631 - DNA, 798 bp, Zea Mays
taattatgaatttcacaagtttcttgaatttcttttacattaaaaatcaatttccatatttaattctctatttttatttgctcccggactgcgagtcattttctgtaaagtacaggggccaatcaataaaaatccctagacacagagggcacccgcgcaggatggcgggttggttcctgtataaacgaggggctgttccgcaaaatgcgcacggcgaaaggatacgaggtgatatcggtcgtctgatctaaggcttgcgactgcgattagattttatcacgctatgaatcagtgtgtgactggcctcgtcagatcggaatccaatggttatgattttatgaagtctgaatcgcttcaaaccgtccgatcagaaccatacggtcccgattgactcgccaaggggaaagcaagattgaatccccaccgtgcattcacgatcccacggctaccaatcctaccgcacttcacctaatctcggccacccatcaagaaatcgacggcccgcgccatctcttctccgcgctcgcctgggtacggcgactccactatgccggcgacgaacaccggcgaaccgcggcctagcgctttaaaaccccaaccctgagcccgatagcctcaacacaatgcggaactaatggtgaacacgtggatgggtaatttacctgcagtggcgcagaagaattctccagccacggaaccgagctgactgcggcggaggagatagcggagcgaagaattccagactcccttcgaccccaatcgcttcttcccagctccgtaaaccttgtaggagacccg

SEQ ID NO: 159632 - DNA, 491 bp, Zea Mays
tagccacatgatagttgggtcattgtgaattaacatggtagtgtcctatcttctttggatccacctaccacccattactcggttcttcattattgaatcacactagttcttgcttgcttccaaagtgttaggttcctccatatatgtgcttttgtagtcccatggaggtacaccacatctagttattcatcctaagttattacttcaattttatctaggagggatcctattattatgaaaaatccttcgatgtacaccttttgtttgtgtttaggatgatgcacgagagctatccattgatctaagacatgctacgagcaatagttgtgtgatcatgttagtaattggatagctggagtttttggtgtttttcggcaactcttgttggtaattggataactggagtttttggtgtttttcggcaactctctttttctagacctaattgacctttccaccaacctttggaccttgaggtatcactcaagcta

SEQ ID NO: 159633 - DNA, 614 bp, Zea Mays
aagttacatataatgatgcacaattagtagtggtctaaactctaaagcaataaagttgaagtccagtatgtattcctgaaacttcaaataaaacctctcttactcagtgccaacactgccttttacagtttgtgtacagttgctcaaaatctagtggctgttatttttccatgttaattttcagctatcagtgactacaagcaatcactgcaattccaaaatcttaatgaagaaaaacagaacattcgtttggaggtgaggattagagagacatatatcgctattggtttctttgttaatcccaaataacgttatgaatcattcaggttgttagaggcggaaggcgaatcacggtatcaatatatgatttggttgtcggtgatgttgtccctctcaaaattggtgaccaggtagagaaagccattgagcatgagcctcaattttcgattcatgtgtctattttcaattcctatggataccttataatttctttgccaggtccccacagatggtatccttatcagtggtcactccctttccatagatgaatcaagcatgactggagaaagtaaaattgtaagttactccattatgcagccttggaagtaacacac

SEQ ID NO: 159634 - DNA, 697 bp, Zea Mays
ccgatctcttcgccccaaaggaaacgcatggcagatgctagcagggcggtggagagagatgtgtgaggccggatttgagctgctgcaactgcatgctgcaggtgcaggatgaaatggccagagggcagtgccagctagctagcttagtactagcgctaagtgcgcacacaatcctcagtgagcaaaagccgggcagaatcttggactgctaaagccacactgtcgtctatctatatacgcgccgcccccaaagctgaatcatcgagagaccatgtgtggaagcgccagtgctgctcatgatgcatgctcgatcgctatattatattccattctcttctctgctcaaatcacaccgtcggctgctgtcgtccccactccaccgcgcctccctcgccgtccctaacctcaaatcactgttcccaaaatcctgattgcccgcgcgcgccaaataaagattgggtgatagatgcaagaagcctgttctgaaggctacgcatgcattctgcaggtaggagcagtctgttgcagcctgggcttctggcactgtgaccacttttgcctgatcgatacactgaaaggccattcaccaggtcagtccccatgaatgaatgagcttatgagctagctagcttatcgataattgggaaggccgggtgcacttgctagaccctgctacgctgaaaagagccgaattgct

SEQ ID NO: 159635 - DNA, 1084 bp, Zea Mays
ttctccgtgtcgctgctgggctctagaagctttcgtcctttcggctcggaacagaaacatgagctcggcgtaaccgcctcccggtagattcgatgcagtatatatctatctctattagcttcccatctgtcatcatccagcgtcgtcagggtaacaaccaggcggacctcgtggcggcttctgttcttcttccccaaaattggaaccaaagtgggttgtttggacacggagagatctgcgtggtattcaatcgctctgggcgtcacctccatactataaagccttggcacctccctcgacgcctcgtccacctcattcaagttcgccgtgcaccaagcagggagagagaaaaagaaattgggtgagataggagtgtagcgcctaggcatgctgctgctcgaggattcactgaagcgttgaagaacatcaaagccttggcggattttcctcttggttccgagattcatcgctgggtcgcggcgagctgtggtcggcgtcgttgcaagcttgtcatcggtgagtgcttttccgcctgtgttcgcactgtctctgtttcctgggtgtacgaccgtggttaggctagtgctcgggccgtcacagcaattgggttccatgcaccagtggtcatcggggcatcggtggccaggtgctcggtcaggggccaccgcggttggggcaagtcgtcacccagctcggactgaggaagaagaatagagcttggccgttggatttggaatctgtgaccacaattagttttgcggcttgaatagttctgagccgtggggataggaatcaactgtcacaattagatctagatgagtcatgggttccggccttcggatcgaatctcggtggccaagatctgtttgcgcgcatcgcttcggtgtgtgtgtggtgcgccatccgatgcagatcggacatgggagaatcgatcaccctgtttttagtcctatccgtccatcgtggatcctacggctagtactgcgtaccggttcatatcgggccgatctaatctggtcggtcagattgtgatcggatggctgacaatcaagcataccccttcgtggtgtaacaattgctaaag

SEQ ID NO: 159636 - DNA, 558 bp, Zea Mays
tgaccgaagaggtaccggctgccatgaaccgtccgatccacaacagtcggcccagattagatcatcacttaaatgaagcggtacgccaccggaaccgtccgatttaaaaccgagggctacgatcgcattcgccgagggagttcttcatctttaatcctaaccgcacaatcatctcacaatggttccgacaatactccgaaccggtatcaagtcgctcacatctccaccgttggccaggatccaacggctcaggctaattgtcctcctcccgcggccaaatagaggcgtcggcgcgctgagcacggcgaagctccaccggagcacaggcgatctaaggcctcgacgccccaaatcaggcctaggtaattgctacgtgtaacgaaagagaaggcgagcacggagagcatattcttaccagcaatagggtcgcaggaatggttgcccacggcacgggacgagttcacggcgacgacgagcaattgccgaggacaccagccgactacccccaattgtactctctcccggatacgacgagacccgaccaaccctcggatatcc

SEQ ID NO: 159637 - DNA, 415 bp, Zea Mays
gctaaaggtaccttcggcattatagccagatcttcagcctcctgcgtaggaggaatgggctcctttcgttcagcagctgacgaagtctccccgccaaactcaggtaccgctgccggctcaatatagcgtggccggtgggtaaggactttaaactttttactcgtcggtgcggcctcatccaaagtggccaaagcagcagttttggccgaaacaacagttttcctctttttttcccatcctcgcagcgggtagctgtaatcggggtaaacaaaaccaatggcatcgaaaactctattcaatctcttttttcctcggcccccgaaggatgtggataatgcattatcttctgctttggaatatgacccaagcagttcatcacttgtagcttcgatgcatctcagccagtcatcatttg

SEQ ID NO: 159638 - DNA, 963 bp, Zea Mays
ctacacaaccgcggcctgggctgctagggcaacagaggacatcatgacagtgtacttgcccatcgttctggggtaggacacactataatggctccgacatctgcctcaacactgcatcgacgattggggagatttcagtcatcggtttatcgtgaacttccagtccctctccgataaactggcgcagccgtgggatctcaaatccattaggtgacacaatgatgaaactctttgttcgttcctcaagaggtttcaaacaatgaggaactgtatccccaaggtcgctgaggcggctgtgatcgaagacttctataggggatccaacgatctggctttcgtccaagccataattcaaaaagcacccaccacctctaaacaactgttcagggaggcagacttctacatcaccacagatgagcgggctcaatacctcattggaggcgcaaagcccataccaccagcaccgcgaagggacatgaaccagcaaccagacaaacgctgggagaagagaccccgggaggaggaacacaccaccgggccacatggagaggtaaggacactggatgagatcctcgactcccaatgcctgcactacaaggacatgcggcacaccctgtggaactacagggatttcaaaaactccgtcgggcatggccgaccattccagcctctaccgcctcccccacctcgagaagagcctaatgagcctaggcagcctcagcaacaggaagggggtagaggtggagctttcccacacattggcagggaggtcaatgtcatattcggaggccacggggcaaaagaaatcaaaaggcaacaaaaacttaatgatcggcaagttctagtagccacaaacaacgctccagttccttaccgatggtcggagcacacaatatcctccaaccaagctaatctgtggcttaacatcagtcaccccagcaaatatccactactcgttcaccc

SEQ ID NO: 159639 - DNA, 599 bp, Zea Mays
cttcttcttccgctgccttttctccagtttccaaggatttctctttggcgggctctgaaggcccagcttcggcgtcggcctggctcattgtagcttcggcttcggtcagctttgtctcggtttcaatttgcattttcaaagccttgacaattttccctggagtagagcttgaagcttttatcgtctccagcacatctagtacactagccatcctttttctcttgggggtcgctgctagacctttttgtgtcttcggcacctccactcctgccgaagggcttagaacttctaatgttttttacccttcgattctcggttctttaattttgtcagtcttcggtattgcagccggctcttcaatcctctgtgtaagagaaagtcctttggcttcaatagctgaagaagtctcaccgccaaagtcaggcactatggtcggttcaatgtagcacggtcggtgagtaaggaccttcaactttttcctcttcggtgtgggctcgcttggagcagccgaagcagcagccttcccagaagttgcaccctttctttttttgcccccgcgacgggtagcgataatcaggatacacaaatccaatagcatc

SEQ ID NO: 159640 - DNA, 509 bp, Zea Mays
ctggtctttcggtgcagaggttgggtcacccaattttggttagttctgctaatggctccattagtagctgttcagtttgtcaggggtgttccgtcattcttgctgatgaggtcttttcggtcaatctggtggtgatttccttaggggcattcgatgttatcttgggtatggattggttatcccagtatcacgcagttatatcctgtttttggaagacagagttattgcaggtgccgtcgggtaaggaggtggtattcttgggaagttccccaaagttcacgttatccttgctggcgcaattgcttccagatcaccggtcatggaaatcagggatctttttctccatggtggtcgagggtgaggctgccttgcgggtgcaggacatccgggtggtgtgtgactttgctgacgtgtttccgttagagcttccaggcattcctccagagcgcgatgcagcttttgagattaagctgattccgggtatgcagccaattcataaggccccatat

SEQ ID NO: 159641 - DNA, 509 bp, Zea Mays
gccgagtatgttgctgccgctagctgttgttcgcagttactttggatgatactaccttacgggattttggcttggattttcatcatgtgcctctgctttttgtgatagcacgagtaccataagtgttgccaagaatcctgtgctgcattcgaggaccaagcacattgatgttcgctttcactttcttcgcaatcagtatgagaaaggcgacattgaattgcgctatattgataccactccccagcttgctgatattttgaccaaaccctttgatcaaaaaacttttgttcatttgcgaggggaattgggtgtttgtttccctttttgattatagggctcccttttggtcttttcttattttctgctttcaccttcttttgtattatatcttcatgtcacattgagtttcacttgtataactgctagaacgtgattctgctcctagtagtatgttctttgtgtacatgataatgctatggcatgcttaggctctttttgctcatattgat

SEQ ID NO: 159642 - DNA, 822 bp, Zea Mays
acaaatagaggtgtggtgcaatatctttggtgtataatctctctgtaatcattgatcaaaatgtatccccttccccctcccttactttgctggtaataaatgagccttgtaattgtgattccctcttcctatgtagatagaaaaagagatagactagaaacaagatcatgtatatccatttctattgtattggttggatcaccgtgattgatcctatccaatttgtatgccatgttcagtgtgttttggtataaacatgtagatgatgcaacctcaataggcatgtttaactcattcgatagggctcaatctcccatggctagccagcatcgagtgctcgtggctagatgttgttgccctaaagcctaggtaggggaagggaagggtttataacctcaagagttgttggtcgacaatggcacacgagctctaggtgagtatttgggctctgctccaatcgattcaagcaaaatcttcgtcgtggttgattcatgtgagtccagaagctcgatatgaggcatgatatgctaaattcatgggcaacatatacttcaatttatgtgcaattgtgacaatcaattagcttctgtgtgcaaataatggtatcaaggtggatgggaaaagtatgtctgccatgaataaccgcatcgtcgataggggagatacatacattcaggagagggaggatgtgtgcttttgcttacttaaaaaactaagcattgagtgatgcaataaaaatatgttggaagttggaaccctcccaaactatgtaacacaactgaatactccatgaatttacaatgattactttgtggttgaatt

SEQ ID NO: 159643 - DNA, 628 bp, Zea Mays
gggaaacagacggctgcgggcggcgctgctcctctccgtggcggtgaagtcgccgcagttgaggctggcgcaggctagggtggctccggggtcgccggagttgggcagaggggaagagggtgccacggcgaactcgatggcggggacagggccatgaatccatgggcagagaggggagaacggcggtgagaaggtctcgggcgggccagagaaactctggtgagccattccgggccacggggaggggacttaaggcgcgctaaggcctgggctaactttagcagaggcaggggtgacatagggaactactccggtgaactagaccgggctaaatcggccggccaccacgcgagcacgacggaccgccgcggtcgagcactggcgaaggcaaaattggacgaacacagggcacaataagggaaattgggcacggggacggatgtctcacctcggggcggagctttgggaggattggcgcgatctctggcgagctggatggtcgggaacgagggctcgggtctccagcggtgtctggcggttagggcagagcgcgagagagggtgaagctgcgcgaaatgaggtgaggggtgtgcgcggggcactgacggggatctaaaaagagagctgg

SEQ ID NO: 159644 - DNA, 446 bp, Zea Mays
tgatcagctcggctgaaggatattgtgtgctctgaccatcggtaaggagctggagcgctgtttgtggccactagaacttgtcgatcattaagtttttgttgcattttgctttcttgcaccacgtggcctccgaatatgacattgacctccctgtcgatgcatgggaaagctccgcctctacccccttcctgctgctgaggctgccgaggctcattaggctctcctcgaggtgggggaggcggtagcgactggaatggtcggccatgcctgacggagtttttgaaatccctgcagttccgcagggtgtgccgcatgtctttgtggtacgggcactgggagtctaggatctcatccagtgtccttacccctctacggggtgcactgggggctcgagcggcaggtggcccggcggtgtgtacctcctcccggggtctattctcccaaag

SEQ ID NO: 159645 - DNA, 434 bp, Zea Mays
ttaggggactcacccatataatcaccaaagggtccaacacagagtttgagaacaaatgatagaagaaagaccactaccgaggggtcaatcatgttgcccccattagccccatggtctagatgaagtggtatcacaccccactcaccttcaacgcaagaaacgacaacctttgcagcgcacccccacacagatgcaatagtgataaattatagtgtcacagggtgggacctgcacaaagtcctcgtcgataacggcagccgagttgacatcatatttctgcacgccttcgaccacatgagcacaaaccatagcttgctcaagccagctgataaccccctatatggcttcagaggaaaaggaacattcctaataggcataatagaggtatcactatccctcagcacaactccaaatgcaagaatcgagtaggtcac

SEQ ID NO: 159646 - DNA, 473 bp, Zea Mays
ctccgaagatcttgattatatcattcgacatgcttcgggaaagagattatccgaagaagaaatttttgaagctaaacactatgaccgagaactaaagtatctaaagcgggccttagtgtttaatggtacagacaaagatgatttcctgtcctgcctcccagacaacaaagaattatctatctaccgggagatggccagaagtatgggttttccgaagctagaagctggcctctgtgccatgacgaaggacgatctcgcagatagtcttgcatacaatagtctgaaggtactaaagttgtgaattttgaagcttatggactctggaatggggtctttttattcttatgtgaatccttttattttttcttgcagggcttaatacttagcaacacactaagggcacaaaaaaatgctgaagatgagagttgcactatagctctcaacaacattcgatcagaggttatcaggctgag

SEQ ID NO: 159647 - DNA, 391 bp, Zea Mays
gatacatcttgttactgccggggtgcatggaaaatttttaaaggtgagcttcatccaatattttctttctaagctcggggttcttgggaacaacccattggtctccaaaccatagaatccctttgctgtcctgatggaagcatttgtattttttcgccttctgttcgattatttccttgataacttgaacacccttgtcaccaatctaaggccagactatctgctcatgtaaagtgggctccactgagatataactcaaggcaccagaggaaacaacctctaggttcagcttgcacaactcatcacatagggtggtgattcttgcatccatattcatacaattgcactgggctttcctgcttaaggcatctgccacaacattggctttgcc

SEQ ID NO: 159648 - DNA, 285 bp, Zea Mays
gtgagagagagttctttaactatcgccctcagttgtattgcgtagtgggcccctctggggccaatcttggggtgtgcatgcgcacgttatagctccttctgacaggtcgtgtgccttcatattccttgcatggcgctctatcccatccatctacccttcaggaccctatagtttactctatgcccatgccatcgcaccggatgggtcccacagaacgtactcccggtaaggttgaggttcgtgtccagtacgacttcatctttcgtcaactcccttgcgtcaccc

SEQ ID NO: 159649 - DNA, 544 bp, Zea Mays
agaggagtacggcgagcgccgcagccggcggccagagccccacgccgaggtcgagtagggacctccactggggaagaagaagtgcccacgggagagagtggctgagcgtgcggtaaatagagagaagcgcagagagaaataggacatgggcgagcagatttttctgcttgagcggcgggcggataggaacgagagagaagagatttttccctcccgcggatgaacgcgcgcaggtaaaaaatttggtgaagatgagtctcacgcgagaaaaatcagcaggaggcggttagaaaaatattttctcttttctctttatttataaagaaaaatcgctgatattttgagtcacgatttgtagcgataatcaaagggtcgatagtatttgtgacacggtgtgattcgatttgaagcacgagatatttgatctgctgtcagaacacatgattccatggtcacggtaatttacccgagaatcgaagctcaattataattctcggacgcgcagtcacggttttgatttagcgaatacttggaatcagatgaa

SEQ ID NO: 159650 - DNA, 564 bp, Zea Mays
cgtgggtggtgggctggtggctgtgccgtatgagatgtgaagctagttacaggcggcgagctgcttttgcaagctctgatgcttctgccgcagagttgacaaggtccgaatgggagttagtctgtctgtctttgcagctctgtttcttctgcacttgggtaaaaacgctgtgaaccccaaaattaggaagattcagttcagaggtgaggattaggggtgggtgtccggtctgaaatagcagtggacctttgatgcctctgtttgtcttggtctggttccagtgatagctgtatcttgtgctaggttatggttatagcagttcatcatatgagcttttggagaccagcaagatatggaaagttcctggtaattacttaagtatcatttcactgaatgagtaatgctagctagttagtgaaaaggaacatgtcagcacctaactgcaccagatatcagaccgcaacatcaggatacaatacaatgcagcgagataaacagtctacccaacgagtataaatatactatgagcagtatgttggggcctcagggaaagggggtaggcag

SEQ ID NO: 159651 - DNA, 798 bp, Zea Mays
ggctggccacggagtgtggaggattttcgctcgctggtgactgaaaggggaaaaacggcgtcgcgacgggtcctggtggaattaggaggtgaggttggggctacacgatcgcaaaggactatggtttcaccgtgcactaccaattttgggagaggtggagaagattccacgaatttggggttcaaccgagctcactagcgaagatatgaatacctcgccgtgggtggcggggctatttaaaggcgtggtggtccggctagcgatccacgaccgcggattacatcattcgtgcatggttaccacgtaaagaagggacacagtgagggaggagcgaggcatgggtgacacggcggaaatgaccgagccacggtggccaccggtgaattatctctgactaggctcaggctaggtccgcgagatcgcgacacgtccaaagctacctccccgcgaatatccacggcgtgccaagcacgaatcacggcgaccggcacgaattcgggcacgtggatcaccggcggcaagggggtctgaatcctgggatatttcagtgtactgtaccattggaacccaattcagagtgcctgacaaccagagttgcaacgcctagagcttggatttctgtgcaagaacatgccaatccatctataacaaacttgtagccctaatataaactacaattctgctagagatcttgctcagttgcttactccattgagcatgaatcaagcctaaagttcttcaaaactcactgacagtcaatattcagtctctgtattatctgacagccaaactttaggg

SEQ ID NO: 159652 - DNA, 637 bp, Zea Mays
cctaagggtgcagccggactagcacaacaagcgcgcaaaatcgaagtctctctcaaaagactacccgtgcaacgaccgactacaggtgccgccggaccgacataataaacgcgctagacctagtgcacaagtcccctacggggcacgaccggatcagcaaaggcacacaacctcttcatacaaattatagttacatacgtacagcgagggcatcacaccttacaatggttcaaccttcgggataatacccatctccctatagttaaacaacattatcctcagctcctcaccctcaaaaagacttcgcaattccccctcacctacactcgccccaactggcgaggacaacaattcccgcttgccagtcctgtccacacgaagtcaaccaccctccacctcactcactctacgcttcgccaccgcccttcgacgcctacacccaacactcggaccgggaacttctgcacccaccacacgcggagaagcctccgctgcagccacatccaatgctgcaaaataatccaaatcatcatccgaagactcttccgtccacaccaccgaactcccagaatcatcagactcaaaaaacttagacacagaatcacccgaatcattttccgcaaccacggtcgaagcc

SEQ ID NO: 159653 - DNA, 372 bp, Zea Mays
gttgttcagagttggagctgtatcaaataggccctaactctgttaacatcattccttgctctttcctggatccgccccattcccactcaagccagtagcctatgtaagccatccgctcccacctaatatcaccaacaaccctcctaatgcatgcacaactcccaccatgccaaagttctctttaaagatgaataaataaataatgagggaaaggatcaaaggagcatcaaatataaccccgcactcacgcacccagccacaaacgcatagttgggcgcacaaaatgcttgaatcatggccattaaggattcaccatcacacaaccgttcctaatctaggacaaaaggcacggtgtctactcaaggacacttg

SEQ ID NO: 159654 - DNA, 1006 bp, Zea Mays
gttgatttgccatactacaatatctaataggaacaaatgtgttcttgtgaagtgaaaacataagaggataaccgaaaatataactgatgaacaacaaatgcttattgcaaaaaaggaaagtgataaactgcaatggtgatgcttggatttagttaatcatgggttgtatcggacattaatgaaatggtgtagttctgaatttgttcagcaagtattgatatttcattttagccatcttagtgatttccattggttcttttactgcgctgtccggtgctgttccaacatttcatgaactacacaaaattgtaagcacaatgcttggacctcttgcttttgtagttttttagatctcagttgtcaaaccaatttggattcctgagtgtggtaatggacctaacatagaccaagcatgatagatgatcagttgtccttgtattgtgttggtggttatctagacgctacctaattctcggcctcagactgaggttgtcatatttcgtttcctgcttgactgtccagtcagcagtcagcagtcacagtgcatgtttgtagcagttttgagagcaagtctgttatgtgatataattaaagatagaagattagttggatttgagtagctgatgtgtgggacagatgcgaatttggaaatttggtttcactgctagcctggtggtctcttggtttatatgttaaactggtactagcaagttaccgtcaatctgtcgatgccttcccatatactggcttgtggcatgattatttccttattcaaactagcatgtaaatcggcatggctagttcctggaggattaggtaggtcgttactggcaatgaagtgaatttgtttttgtatattcagattttacgggacagagatgtcatttaccttgtaatttgaaggactattacatgtgcttatgacataatatgtagccgtttcatttgcatgtgtcaaaatccatccatcatgactggatcgaggtcaaagttgtcatgttttggc

SEQ ID NO: 159655 - DNA, 866 bp, Zea Mays
gctcttctatctcagcggcgagatcatcagcggaaggtagtaccttagaagtagtgtcgtcgctggtgccgaccgcgtcctcaccaagtgccatggtgcataagcctcctgcggtgtcggtgatgaagcacaacccgttcagcttgtcctcgacccgcctctcagtctcctcgtcgctcgaggaagatataacatcgtcggagtcgtggtcgaggtcgctgagggaggcgaggaaggcacgctccttgatctttgccttctgaaggtacttcttcttgagcgcctccttgttgaatcctcccttggacttgtacttgccggaggagtacttgcccttgcgctgactagagtgatggtcgcgcgggccatactccaatttgctcttcttagggcagctagcaacaaagaggtcgggatcaccacagttgtagcttccgtccttggacccgccacgccgccggctcatacggttgttgtggaactgcatgaaccggctggccacaagtgccagctcctcatccacaaggctctccacctgctcctctgtaataaacaataaagaagacagagcaaacatagcaggtgaggagttagaagcagaaccacctccagagaccagggccatggtgggtgcactagggttctcaatcttggctcgagtctggtggtcaatctctatggacttgagcttgctgaagagcttgtccacggtgagagtctcgtagttgggtgacttgatgatcgccgagaccttcacctcccaaaccctctgatctagagcatgtagtaatttcagcgctctctcatgatcactatagggtagttgtgccttgttggcacgcatcttgttcacaattgactggaac

SEQ ID NO: 159656 - DNA, 676 bp, Zea Mays
gcaaaccgccgagcagctattgctcttggtcataccagcgctcgtagttgggattgggggcattcgtcgtgccgaccgacgtgataatcggcttggtcttgagaggagcggcattggatccatcgaggaacccgagaagcttcgaactgcgaaaatatggcaggagttgtgcacgccaaaggagatagtttgtttttgtgggcttgatggtgatgacttggtggatgggaattggtggagaggagaacgatggcgtggtggtcatggcagaggcagcgagagatagatggagaaggagaggaggcggtggagaaaattgtggagaatgattaggatttcgttggctctgttaccatattaagataatggaaggccctaccttctaggggcgcccaagtctctttatataggaaaggattacatgcatgagattacaaccgaaggcaacaatcgtgccgtgattccagggcgagattaacaatcctgccatccttatcttctattcctaacaataataattagactatcctatataagtggctagatatttccgattatgatgggaattcataatatttttcatgaggattaacataggtgcccttagttcgtaatgtgaatatatgacttcttttttttgcgatgcaattgccagaaaatttgcatataattcaca

SEQ ID NO: 159657 - DNA, 554 bp, Zea Mays
ttagcatatggagccacagattcacccctaaagaaggaacttgggacccaaacttttggtggcagttgaataattttagcacataactttgctccagcattaggattgagatgggaaaaaggatatactatctcatcaaagaccacgtcacgtgagacatagatacgtcccaaggcaatatctaaacacttgaaacccttgtggaggacgttatatcctaagaaaacacactgttttgatcggaattggagtttgtgagaattatagggttgtaggtgaggccaacatgcacatccaaaggtgcgcatggatgagtagtcaggtttctggttggagaggcgctctaggggagttgtgaagtgaatgacacgactaggtaggcgattaataagatttatagcaacaatgaaagcatcgtcccagtactttagaggcatggaggcatatgggaggagagaaaggccgacttcaatgatatggcgatgtttacgttctgcgacgccattttgttgatgtgtatgagggcaagacacattatgcatggtgccaatgtt

SEQ ID NO: 159658 - DNA, 1077 bp, Zea Mays
ggaccgcattgtcggtcactcagccggtacctatgcacgagagtcatcgccatatgggccatatccgttagctctatctcccccgtaaatcccgcataccatgaactgattacggttgagctccgcacgggtcctcctgacccaaccctccttcggactcgtggccatggcagatataaaatacgggatccataccctcgtccatcacctcaagcaccatcaaacccctaggtcgagtattgtggagaacgaaaaaaatagagagtgtgaggtttcacaggggagagaggcggagtatgccgccgccgacccgcgcctacgtcggtgaaccttttccccaatgtggtggccgtgtgaattcgcgggtgctcactagtggcggccatgaccaactcgggaaaggaaacccactagggtcatcagaatttcacatcgtagatccagcgctgccacacatccacccttcatcgtggacaagctcacccctacacgaatatcggtaataaacgtctcaacttgctcacttccgacttcactttgagtcgagcgcttcagatgggagaatagggcatttgggatggggggtggcgggtcgccggtgatggcgccacctcggccggtcttgtgccgccgcccctgttatggtggggaagaacacgtatgagtcgttgatctcatgtggtgcggcttggatcgtgctgggcttatcagttcggtcgggggaaggcaggtaccattgactccatgatctacggtggagatgggattgggggtaccgttttgcgatgcagtgatccttgccattgatcaaccgatggagggatcagtgctgatcgcggtgtggcttgatgaaggctgtggatcgcgaatcttacgtccgttatagcgtaccggttcattacaacgagaatctaatcctgaccgtagattcaaaatccatcggccgagatctagtcataccctttcggccaccactttgcaaaagagcccctgctctttttcagattcaacccgcagtccactctggtggagaactgagtctttggaaaaactatggattagcccctgcactctctg

SEQ ID NO: 159659 - DNA, 449 bp, Zea Mays
ggcctagacccacttgtaaaccccttggaggggtggacttttagatgtgtttgggtgtgcgtactttgttgtgtgtaatgaccccgctgctggggaatattccaggaatgcagtaggtaaccgggggcataatggtacttgggaccacctactcgcccggttacctataaatatccccgttctgtacacgcataacaagatgctatagtttgctacctatcgtttgtagtgcacctgagccctatcaacttccgagtttttgggtccgcccgtccacgtgttggcaaatccaaaatttggcgcccaccgtttgtgctccgaaaaccaacacccacgatggctccaaaaaagtgactactagagctagctcctccatggacgaggccacgaaggcggccctcgtcgacaagaaaggcaaagcagtactcgcagatgacaccctatctgcc

SEQ ID NO: 159660 - DNA, 1133 bp, Zea Mays
tctcttgagttgtgacacaaaaattagagaaaaacctgttacaagttgctctgtcagaacagtttcagaaaactgaaactgaacctaaggttaaaacaaggttccagtgaggtgaggtcaagtttgatgcgccatatcttcgaatcccctcggttttgacccaaatgtcctgtataaggattgaagactgttaaatcaagaacaaaccttattaaggaattttgcccggttattcacaagaatcatgagagctagtcggtggaagggggacggttcaggcgactgacgaagatgtgccatggtacagtgccccgatggatcagaccgccagctaagctcgtcgtcgatgatcgccgtccggattcatgcacggtatagaaggataacgccgggaaaagggtgaaccgtacgtggcgccatctcctgtgctcagccggagtgattcaccggcggccatcgcgtcaatcctttccgccgcggtgtcctcggcaccgtgattcttcctcactgtaccaaatctctacgtgcttggcatgcgcttgtgatggtattcgagccgtgaggtgatcgccggacctccgcggctataaatagcccatggttcgcggcgaggctcggtcatcacacacataccagtgaaccaaatcaagtcaaattcgcactgccctctccacctttgcccaaattgattgtgcacagtgaaagcacagcctcttacggtcctttagccctgatcccatctcccaatttcgctcagagccgccgcgaccccattttcccccccttttccgtctccggcaagcacgaaataccgcgctccgtggccatatcaccctggtaaggctctgcccagatcaaatgttgtttctgcaactccgtttgcttgtgaagctcatcgtggcgtccgattactcaatccggccccggttgtgcgggaactcgtgcccgtggtcacggtttccgccgtgcacgtggacatgtcgttctcagtgcattcatgtcaaattgatgcgtgttccgaggtcacctattgtcggttatgctttcccgatcattagtccgggcagtcgtcgccggccatggccggtacagacctcgtccgagacgttcgaccagcgcgccgcggtcaggga

SEQ ID NO: 159661 - DNA, 946 bp, Zea Mays
gcaaaatgagaaagtcattgcctatgcatcgcgcttactgaagccgcacgagcagaattatcccacgcacgatttggaattggcagccatagtgcatgccctaaaaatatggaggcactacctaattgggaacaaatgtcacatcttcaccgatcacaagagtctgaagtatattttcactcagccagacctcaacctccgtcagcgaagatggctagaattgatcaaagattatgaccttgagatccactaccaccccgggaaggccaatgtggtagcagacgccctcagccgaaaacctttcgggaagaaaggaaccaacttcttagaagattggaaggaagaatcagctcagctgaatgcatgtctgggagacaatggtagcctagaagtcaagccaatgctagaagacctcatacgcaaggctcaacacttggacactgagacagcaggtcttatggaaaaagctcgcaaagaacaacttccggacttcaggacagatgaagaaagagtcctttggttcaaaaatcgtctgtgtgtaccaaaaggagaggcacgagaggtcctgcttgacgaagctcacaactcagcctactccatccacccagggaccaccaagatgtacctagacctcaaaaccagatactggtggagagggatgaagaaagagatagcacagtatgtggcccggtgtgacacttgccaacgaactaaggccgagcatcagaagcctgcaggtctattgcaaccccttccagtgcccgaatggaagtgggaagaaataggcatggattttgtaaccggactgccccagacccaaaaagggaacgactctatctgggtgataatagatcgtcttactaaggtggcccacttcatcccagtgaaaactaccttcggaggagccacccttgcccggatatatcttaaagagatagtcagactc

SEQ ID NO: 159662 - DNA, 308 bp, Zea Mays
ccaccacacggggaacgaaccgccgcacgaccgcgcgccgcttcggggctactacaggaagatatttttctaaccgaggcggaggtaacgaggcgccccgcgtgacccgatggaaccaccaaacgtggggctgtgggtcagtcagccgcagggacagatgtggcagtcgacgtgaccgagggcaaattgacagcgcatacgtcactagatgcactgagttaatgcagcgctcgcagaagaggcgccccagtcaccagtcatgccacattgacgcgaagtacaagttttggccccacctgcaggctcgc

SEQ ID NO: 159663 - DNA, 600 bp, Zea Mays
gaggtcagagaagcgattggcttgtactctatccactttgtgaatttgtcaatggcaactagtacatgagtatagcctccccgagctttcttgaaaggtccgatcatgtccagcccctagcatgcaaacgaccatgttacaggaatggtctgcagctgctacgcaggcaagtgttgttgcttcgataggaattggcatgcttcacacttctggactaaatcagtagcatcgattttcgccgttgaccaatagaaaccggatctaaaagcctttccgactagagtccttgacgctgcatgtattccacactgcctggcatggatttcatccaacaattgcctcccagcaactaaatgaatgcatttcatgaggactcctgttgcacctcttctgtacattaggccccctatgatggtgtaatgggtcgactgcctcacgatgcgctcagctgcagccttgtcatccggctcttcttcattttttatatatctgatgctaggctatctctagtagttggggtttgactctggttggctcaaggtgttgcactcttccgcctgacctgaaagaatgcttggtcatgatatttcttggacgaag

SEQ ID NO: 159664 - DNA, 392 bp, Zea Mays
gttctgttgataattctcattatgcatccctcctcttccacaagacacagtatatgtatctccatacaagccggctgtgaagcccagctgccatccacgcacgcaggcgccacaccaccactacttacatccagttcagtccgcatacacaggcattcggacggtgcacttggataggatgcttttgggttacactaatgccactaccaggatcagcgaccagctagctagaaaacatccaccacactactagtactaacattccccctacttaaaattcgacttgccctcaagtcgatgtagaatctgaacacatccaggatcccgacgcatgattgaagcaacattctagacttgagtatctccaaaataacaaactgcactcatctgct

SEQ ID NO: 159665 - DNA, 536 bp, Zea Mays
tagccaacacattaaacaataatgcatcagagaatagaattattagctttcttgatggtaatgtcggatataatcagattttcatggccgaagaagatgcgtctaaaacggcctttatatgtccaggcttcattggtttatttgaatgggttgtcatgacatttggtttgaaaaatgctagtgctacttatcagagggctatgaatttgatcttccatgagctgttgggaaacactgtggaagtctacattgatgatattgtagtaaaatcggctgagtttagttctcatttagctgatttgtgcaaagcctttgataagatgcgtcggtatggtttgaaaatgaacccacgtaaatgtgcttttggagtgtcggctggtaagtttttaggatttgtcatccatgaacatggtatagagatagaccctgaccaaatcaagtttattcggaatgtgggacctccgacttgtaaggtcaaagtacaaaagtttctcgacaaggtgaattatttacgaaggtttatttctaacctagcc

SEQ ID NO: 159666 - DNA, 1753 bp, Zea Mays
tcgaaatgttatagataaatcatctggattatgggaaataaaatgacattctttatatataacttgttatccgcagtaaacatataaacatccaaaccaagggtaaacatgtcttgtcacacaaaaaacacatttctggagctgattagtgattacaatcttcttgccgaatgcctcaaactctagaatagagttgctccttcctggatttttggagcagagttgttccagggtggagtggagccaagccaaacatgtcctttatatcagataacttcagcacatttaaaattacaaaagattatattgctttcacgtaggttatacctctttgtacttcacctgatggttttcatatcttgttattaagccctaatgatgattacatgtgcagccacaattatacgttggacgaggaatgcaagaaggactcgtatctatactgaagttccgtatttttttacaattgtattacttttatgtcaaccatttaacatgagctaaccattctatttatacctcacaggtacacaactttttggactattctattgtcatgcaaatttttattcagctactactttgaggtaatattccctcaaaaatgcgctgaacacaatcctagttacaactagaaaaaatctgtttgttgttgttagttttttactctgcttcctgatgcattgtttcttaaacaaaatatatacagattaagccacttgtgggaccaacgaaagaaattatgaagatcaatgtgaacagatatgagtggcatgaattttttccacaaggtcctctatatgttatcttgatttttgtgttttttcctttctgtaatagtattatattcgtccagtcaaattacagtcaaacaaaaataatgataccatatgtctcttgcaccagtcaagagtaatgctggcgctattcttgctgtatgggctcctataattcttgtgaggattctattcttgcagtactttggttttaattgcgcatatgcctctgtaaatgtgattgtctgtttttatttcttccaataggtctattttatggacacacaaatatggtattcggtattctgtactattttcggtggtatgtgtggtattatccatcatcttggtgaggtgagatggaacatcacttaacatgggtactcatttcagatggctatagtgtactaaattgttaactccgatactcgtctagattcgcacaatgggaatggtgagaagtcggttttattccttaccagaagccttcagtatgtctctttgtcctcctgcaacaccaatacagagaaagggaatgttttttagtttcttggagaagagaattttcaaggtgaaaaatgttcatgtcaatttttgaactacccgaaggtgccttttccccttatgtgcctttttctcccaaatggttccacttttcagaaattaggtaaagatgaaagatattacccaagaaagtttgcgctggtttggaacaatataataagtagcttccgttctgaggatttaataagtaataggtacactttgattactctgctgcaactcatgtctctccagatttgtaaataaaaaatgttatttttctagagagatggaattgatgacaatgcccatgacaccaatgcataattctggttctatctgttggccattgtttttacttgctaaaaaggtatgttgatctattctgcagtaaatgacatcggtttgggtaaacatgtgttcacctctttcgc

SEQ ID NO: 159667 - DNA, 426 bp, Zea Mays
aaatgtcatctatcagtctggcaaggtcatagtcattatcagtatatggcacacatacttcatttggaagacaaacatcaccatcggtgttcgctttctcagttccacctccgacacgcaacaaatattctacaaaccatgggtcgctctatgccctcatgttttgaacaagctttaggtggcacgtggattcccagaggtaagaactccatagagaggcaacaactatctgagcccttgaccccttgcgtacaacagggagtacttgtctgaaatcacccccgaacacaacagtcttcccaccaaagggcagcccaggccgtcccattacatcacacatgctattgtctagcgcctcaattgcttgtctcttagtcattgatgcctcgtcctagataatgagcgatgctttttgtagcaactttg

SEQ ID NO: 159668 - DNA, 788 bp, Zea Mays
agtggacatagaaccctttccaatgaacatgatcagttttgacgataaaaaagtcatgatttgacctagtgcgattgttaagggcaaaggcaaagagaatatcaccggcgaccaacgagaggccgatgaagtcaccaaaatttcttgtagcaaagtggttgcagaaaagaccccagatggaggggagacattgaagatcaccatcccagcctccaatgctggggtgcaggcgcaggtaggtggccaagtgcagtgacctgttctgtgcatcgcgaacggtctggagcgatcgggcggacggtccggtagtatccaagagcaacgacgaccatgtaccttaaagccacgacgactagagataggtacgtggaagaccaacacatctaaagcatcaggtcggctagttaaagccgacccaacctttgataagttactatccaaatatgtgaaaaagaaggtcagtcctaacaatcggccagcaaacgaccccattcacctccatgtgagagacatgtaggatctaatgagccacctaagaacaatgtccaactaatacccaatgcacctacatggacaccttcaccctcatatccgcctgtgccatatcaatatgcataccaaccgtcaccttatgtcccaaatcagacgtgggacatgccactatatccatatgggatggcacagtaacccacttgggggcaccccaaacttccgtatttgacaggttggcgtcaccagtgcaagacgattgagtccgcctcaatctggtcaccaggcacaggtccaac

SEQ ID NO: 159669 - DNA, 544 bp, Zea Mays
caggggccctagcgcaaaataaaccaagacacagaatcctgcagacaggactatgggttgattcttaactttcgcgggggttctttagcaaaaaggccatcacgaaggggtatctagggtttctggccatccgaccacacatgtgcggcccagattagatcgaatctcgactacatacctagttgcgcccacaaccattggatcccagatccatggcgcacggcgcacgatgcccttcactccctctcggccgcacgatttcctttcaacacgccagatccaaaacgacgaaggggtacccggattctaatcatgaccacacgtccgagaatcaatggtcgacacgatatcagagccgggacctaatctaaccctccgacgcggaatcaacggtcagcgggctatcttgcaccttctgcccaggcatcggcggacacgccatggcctctcccccgcccctcgccgcggcgattaaccggctgctacggtctctaacctgcgcctaagctttaccccacaactcaacaaagtccgctcgactcca

SEQ ID NO: 159670 - DNA, 473 bp, Zea Mays
acgaaaagggaagaagagggcatgttatgaatgtggcaaaaccggtcatttcatagcggattgtccaaacaaaaaggaacaagaagccaaggagtacaaaaaggataagttcaaaaaggggggcaaaaacaaaggatacttcaagaagaagaaatatggccaagcccacattggtgaagaatggaactccgatgaagagagttctagctccaaagaagaggaagaggtggcaaacattgccatccaatctacctcaagctcgcaactcttcaccaaccttcacgacgactcatacactccaacttgcctcatggcaaaaggagacaaggtacatttgtttaatgatgaccttatcaatgatgatgaagaacaacttgctatgaaaaataagatgattaaagaatttggtttaaatggatacaatgtaatcactaaactaatggagaagctagataaaagaaaagcaactcttg

SEQ ID NO: 159671 - DNA, 598 bp, Zea Mays
agataaaccttgataaatcagaaattttcccgatccgttacccggaggagctgtggccaaatcttgtagaagtctttcccagtaaaatcgctaagttacccgggaaatacctgggtctcccccttcacttcagaaccgctaaaagaattgagctacaaccattagttgataaaatcaataaaagactcgcaggatggaaaggaaggcttctctcaaaggcaggtagagagacattagttaaatctgtgttatccgcgcaacctatttatcatctgacgatcttcccggctcaaaaatggctattgaaaaaaattgataagataagaagaagcttcctctggaaaggaagtaatccagaatcatgcaacgggggtcactgtctgatcaactggtctactacttgcttgccaaagtgcaaagggggattgggcattctagacctgaatcgttttgcgagagctctaagactaagatggctgtggtttcgatggaaggccaaagacaaagcatgggtgaatttgcagctgccatgcgatgaattagatgaagatcttttcaacgcttccacttgtgtgaaggtgggtaatgggaaaactgc

SEQ ID NO: 159672 - DNA, 334 bp, Zea Mays
gctaaagaaggtgaagaagcaaaaacgcgaaataaatccaaggtaaagcagatagggtttgtcacctgttcgacagctgctacaacaatcgtgtgcgccacggcgaggacggcattcgtgatgagcaagacaagagaggggaagtggctgggcgagggacgaatgcagctaggcgaggaggcgagcaggagacgggcggcaggggcacgacctccctcgattcgaccaccacctcgatgctcagaaggctatctcgaccgggggtagcaccatagcgccttgatggtgacagcggcgagcgcgagggctagggcagggggcaggtgcggaggac

SEQ ID NO: 159673 - DNA, 478 bp, Zea Mays
gcgtgctaataaagtctgcaacgcccgtcgcgagctgccccctccccttgccctgtatgtgtttagcgtcgctggtctgctgcaacgttcaacgctaaaagctcctttacactatatagtactatggtggagcagagaagtctgccagagtaaggggcgctctaagctgtcccacttgtctcgaagttggtgagcaccattatttgtcaattggggaaaataataataaaagatgaaaatgtatagaaaataatattttatgattgatgtgagatatagaggaagaatttaaaagaacactacaggagggagaaaaaaaaggatgaaatctgagtgatatggctgtatactgttgtatatgggaaaatttttgaaccgacgataggagtggttttctattgctgggtggatccccggtcatgatgagatgttcctcttgtatcattgtgaagtggatctatgcgtggatcaattccga

SEQ ID NO: 159674 - DNA, 790 bp, Zea Mays
agaggttctttaataattttaccacatgaaggggtacgaggctaaactgaccgtccaatctccgatcaatggtccagattagatcccgcagacaagcgcgcgaacacggtcgcgcagcgagcgctgataggtgggctcggggtgtcagcgacctgaggtagggctgacaggtcgggcccagcggcaggggcccgagtgaggggagcgggtctgagcggttggattcgcatcggatggttgcgattagatctgttctaattaaacccaaaccgccagatctcggatggatgtccgagattcaacggccggcggccggtcatgggtgtggtggcaccactcgaccccgcggcgaggtatcgtcgaagatgagggggacgaccacagcagagctttaggggttttgggaagagctcgagcacgctcagggagatctggcggactcagtcatgggcgcaaaaccggcacgggggcaccagatggcgcagaacacggcgaggcagcctaacggcggcgcggatcaactctggtgaagaattatgcgggcactggggaagtacctggtgaaataaaggcatgggaaggttgctcacctcgagtgcgaactcaggagtgcttgggagacgacagggatgcggtgaagcctcaggtcaacggcggcggactcgggctgcacggggaaggcaccgatgagtgcgaactgggcaaactagaggggttggggacaaattgagaggtgtcccgagttgctaacggcgaggcggaactcaccgaggcaacgggcgcggcgcgg

SEQ ID NO: 159675 - DNA, 629 bp, Zea Mays
atgccaaaggacatgtatcagtccaaaaagttgctctctaggctcggtatggactacgaaaaaatcgatgtttgtgacaataaatgtatgcttttctagaaggagaccgcgagtgagaagaagtgtattgtatgtggtgagcgtagattcgtagaggttgaaaatgacgatggtttgaccgtgacgacgaagattgcacgtaagcagcttcgttatatgcctcttatacctcggttgaaacgtttgtttatctccaagaatacagccagacacatgaggtggcacaaagaaagggtacgtgagaatccaaatgtcatggtgcacccaactgataaagatgcatggaaggcactagatgcttttgattccagctttgctgatgaagtgcggaatgtccgcttcggtttggcaacagatggtttctcgcctttcaatgtaactgcaacgtcctactcatgttggcccgtctttgctattccatacaaccttccaccagctctttgcatgaaatatgaatttattttcttgtgtcttgttatacctggtctggatcatcttggaacaaagatcgatgtgatgatgagacccctaattgaagaattgaaaattttgtgcgaaggagtcgaggc

SEQ ID NO: 159676 - DNA, 316 bp, Zea Mays
gggcaggcaaggggcagccgagaccgatcaagagcgttggaggcgcactaggagcgataggttgcgacgcaggtaggctaggggctaccaaggccgacagaatgtgctagaggcagtcatagcaggtggcgcgatgactgtgaccggtgggggcaagggtaaaatgatccaggatatggacgggtgtagccagactggagcaggcaaatgtgttagccgtagtggggcaaggtgcaccgaacgacgatggcgtgatgggtagatgggcatgtttggtttcctacctaagttgccaaaatctttttgaagaaaaggg

SEQ ID NO: 159677 - DNA, 645 bp, Zea Mays
gccaagccatccggttggaaataggctccacacgacggcgtcttgtcgattccaacggaatcgagatttgaaggacgctgcaccataatgacagccttaatatcaggtctaagtccatcaatgaaacgtgtggtattacttcttgttaaaacccgttggggtttctgtaacaccccaggtgttaccattggctagagccactttggcactagaagctgtgttcacaagggtaaagacttagggcaccacataagaaccttggagatcatgtgctagtcaagttgccaatgacataagaagcattactctaatccttgcacttttactaccttggatcaggggggagaagaaccctagacctcacaagggtaaagacttagggcaccacataagaaccttggagatcatgtgctagtcaagttgccaatgacataagaagcattactctaatccttgcacttttactaccttggatcaggggggagaagaaccctagacctctcctaagccctatcttccaaaaccctaagtaaggggggaaagagagtgaacaagtgggcaaagcatgtgtaacttttacccaaagcctaagcaacattataaccatcaattaggggagggaaatattgcaaaaagacccctgga

SEQ ID NO: 159678 - DNA, 524 bp, Zea Mays
cttcgccaaattcaggtatcgcggccggttcgatgtaacgtgtccagtgagttaggaccttcaacttttttccattcggcacaggttcatctggggtggccgaagtagcagttttcgtctttttcccttgtccccgcagcgggtagcggtagtcggggtaaacgaagccaatggcatcaaaaactctgttcaatctcttctttccccgacttccgaaggctgcggatagtgcattatcttcttccttggaatatgctccaagcagtttatcacttgtagcttcgatgcatttcagccagtcatcgtttggttcatcgaacttatccccatacctgaatgtatacttcagccggaccagttcaccttcgctagacttggtgatgatctcattcggcatttcccagctttctacaagcggccatactctgaatgctatatgctcttgaattaaatctcttgtaccaatgaagaagcagacagtaccgaaggccttctgacacgcttcggcggcgtcatcaatttcg

SEQ ID NO: 159679 - DNA, 539 bp, Zea Mays
tggaggttgagctgcagccaggaaacaacggccatgtggctgagagaagcgtggatctgcaggacgaactacggcgacaaggagaccaagtgccaagcggcgctgacgaggcagagctggtgtggaagctgcggaagtacttgatgctgctagcaatcctttctgcaaccatcacctaccaggcagggcttgctccaccgggcggcctctggctagacaataacgacgaccagcagcacggccatcttgccagcgacatcgtcctgcaatccacctatccgaagcggtacaaggtattcttctactgcaactcgacagcgttcatggcgtccctgatcgtcctgatgctgctcctggtaaggaggctcagctgccatgcagtctggctccgctcgctgcacctcgccatgttgctcaacctgctcgggctcatgggcgcctacgccgcaggcagctgcagggagatcagaacgtccctgtacacctgggcgctgctcgccggtgtcttcacgtacgtcgcgcttcacgtcgtgttcttc

SEQ ID NO: 159680 - DNA, 622 bp, Zea Mays
aggtaataactgctgatgttgttttcttgttttgttttgttttgttttgtgtggagaaagaatgacactgttgctggggccaccatcatctgggaaatcgacgctcttgttggcccttgctggtaaactggatcctcagctaaaggtgaccttgacatttttgtctgtgaattggtttttctggggagttttcttttttattctctcacataatcaaaccaacttgcctaatctattccattactatgttctgtatcattcttgccatatcatttttccttgtcatattctgacagaaaactggacaagtaacctacaacggaacttcgcttactgaattctttgtacaaaggacttctgcgtatgtcagccagacagacaaccatattggagaattgacagtgagggaaactttagattttgctgcaaaatgccagggtgcaagcgaaaactggcaaggtaaggctccctttccttgtgctttgcaaatacttaggttgttcatttgaataattctgtcattgttgatatgccttacacacattgttgatatgtgtagagtgcttgaaggagctacgcgatcttgaagggaagagaggaataagaccaaatccagaaatag

SEQ ID NO: 159681 - DNA, 381 bp, Zea Mays
ttagcaccgccgcgggcccctccttcactgcgaacacgcgcgtcttcgcctctaatctcggtaaagaaccctttccctccgtccgctttcagctcctcttcgcaatgcaccgatcggatttcgctattgggcgcttgggacagaaatcgctgtgccccggccatggcaccaccgtcagctcgggcagcgccgccgttctgctcgggtttatgggaagggatggtcgtggccgttgatgataagatgggcgggtctgattgaagggcggtagcatttggttacgggccgtcgatcattgcacgggcggacgagatcagtgcccacgtagtgttttaggctgatgcatcgggtgtcgttcaattttgatcgaacagtcgaaga

SEQ ID NO: 159682 - DNA, 724 bp, Zea Mays
ctcacgggcaggtgaggtcactgaaatgacagaagaggtgagcacatattagtcacatagtcataagtatatgaaatgtgaataaatacatacacagagtgttatggcacagaaaacgagagatatggcgatcgagaggtcaaacgacgcgaaaacgacgtttgaacgagaaatagtgccataggaggtttgaaattcgaattgaggcatgaaatgacgtggaattgagccgatacttcacgaataggtttatatgggtaaatatgagtgaagtgtgcgcttggtttgattttaggcgaagaaaatggaatttgggcactcggctcggaaacgatcgctagaaacggggatttgtgtaaaattgaagcctgggatatcggattggcgtgaaatttggcgaatatgttactggaggtatggtgaaggtgcctaaaaattttgggttcaattggagcaattttggctggtttgggcatttcaccgagcacgtggcgtgcggtggattaggtttttggtgaaatgactagtttaggctgtgaaaccctccctagggagctaggaacctgcagaggtgttcaaatgatacacatggacatacacaagtgcttggatcacaagaattttgacaagaatttggaattggatcaaagagtggagcacaagctagattgactggaaaacagagagaggagaagggggacaaggagcaggggttgctcacgag

SEQ ID NO: 159683 - DNA, 440 bp, Zea Mays
catggccggttcaatataacgcggccggtgggttagaaccttcacctttttgctcttcggcataggctcatctggggtgaccgaagtggcaatcttcctctttttctcttgccctcgcagcgggtagcggtagtcagggtatacgaagccaatagcatcaaataccctgtttaatcttttcttgccctgacctccaaaggatatggacagagcattatctttggccttggaatatgctccaagtagctcatcactagtagcttcgatacacttcagccagtcgtcatttggctcatcaaacttctccctaaacctgaaggtatacttcagtcggaccaaaccaccctcactagaatcggcggtggtctccttcggcatatcccagctctccacaagtggccataccctgaaggatatatgctcttgaatcaaatcccttg

SEQ ID NO: 159684 - DNA, 1144 bp, Zea Mays
ttcttcgccctccccccttccgcggcgcgttgtagaaagcgagcggggggtagtaggatccatcggtaggtcgtcccatcccgtcgcaccgcccgctacatacgccgcggcgggtaccttgcttccgttcatggcatgtttgtctcggacggtgggttagccatggacgccggaggccgtgcgggcgtgagcggccccgccgcggcgaacggctcgttcggactcgtccgcaccgtggtggggtactccacctcgcccctcttcttctggctcctcaccgtcgcgctcgtcgccgccatccacatcgtctccggctcgtcctccaagcctgccaggtacaactcaaaaactttcatgaaccctggattctgatcggccgtgcggatcgccgcgctcgttggcacacgacggactgattgggggtcttgtctcccttgcaggaacaatgagacggaggagaggaagaaggcgcgccgcgataggttcctcccggccgccgaggaacgggaggcgtcgggcaggggagatgaccgggttctggagatgatgcgcagtttcagcttcatgcaggcgaccgaggaggatttcatggagggcatgaccgcatacgagcacaacggcgttggcgacggcacagcgcacgggcctgtcgcgccggagccgcctgcgctgacggcgactagcctcagcttcaggtttcagcaccagatgcccgaagttccaacggagacggcgctggtttcgagagaattcactgcggcaagacaagagacggcggtagtttcgagagaactgacagcagcgagagacgatgatggacgacaacgagaggaagagaaggaaccacactttcctttggaaccattcgctccgttgcagacggcggcagacatgcaagaacaccggcacgacgaagcagaggaaacagagttcctggcggaggagccggcagaagagcggagcggagaggttgcgcaggaggaggcagcgccacccaagaccgtcgcggccacgcacaactatcagttcctgactgagcgcgacttccgggggttcgtcagggagccggaggccgtgacggtgcgcgtccaggaatctttcgtgccgtcgccgcctccggcgcaccagcccgaggagcgacggg

SEQ ID NO: 159685 - DNA, 530 bp, Zea Mays
acgcgaagcgctgatggtgcttcgtgtgtctcgtcggctgttgatggcgtgacgcagatcgttcgctagatgagcgaggggtagaagatgattggccgcctgtgtaagcatccgccggtagccttccgtgtctggggttcacggaaggccgtcggctatctgcgccagcactcctccaacttcactctgcgtgttcaacgctcgggcgaagttggggtacaggtttcgagcgagaagagggttctctcgccggagtctagcatcttgttttgttagttctcactctcgctcttgagcctcttggcaatcacagcggcgggagttgcgtctttctcggtgtactcgttcatcaggtgtttctcccacttccgaagctttgtcctgggatacaggttgtgctgggtcccgttccctagcttcatgatgccgccacacattccggcgtctgtttctccgtcgccaggcatcacactgggggctcctccccttgcaggttcatcgtcggagacgggcaatgactccaatctccc

SEQ ID NO: 159686 - DNA, 467 bp, Zea Mays
cctggccatggcctcctggtgctttctttggttctccttgtcttgctaaggttttggaagctggctgctgctaaactactttcttcgagcagtgattcgcccagtgaccttgttcccaataatgaaaacttccacggccttctccttgctttggcgctacctgattgttctggttggttgctgaggcaggaaggcgaggtgcctggttgctctagcgctgatactaaattcctccttgctggttgttctaacggtactattgttgctgccgctgagggaactacctctgatactgctgcttgtgctaacgctgatgctgatgctgatgtccttgagggtgaccttgcttgaactgctgaggtgggttgcctgagtaacggggacggctactacccccgacctgagatccaccaatcttgtgtttcacgtcctccatctcccggcgctttctttcggtcatgattgct

SEQ ID NO: 159687 - DNA, 414 bp, Zea Mays
gagagtgtcggtgtttggaccacgggtccttgaccaactagtaaattgtgcgcgtgaccggactctaaatggtgtgcgagaagacacaagcaattattttggttcgggcagcataaggccctacttccagcagagggaatgatgcttatattactcgcaccgaggtgcctgtaataggggtttacaagcacagcgggagaggggaagtcccaagtccctagagatgagtgaggcaaatgccaatatatgaaacaaagtggaagagtgaacgttcgtctgcgttttcttctcctatccctctctcctggagggaccactgtcctatttatacatgaaggggagcgttcacagtgaagctggatgttgtatctgaaggagagatatcctggcgtctgcaagccgacgtgacggtga

SEQ ID NO: 159688 - DNA, 780 bp, Zea Mays
caatcaactaattgctccattaatgctagttcttctccgatacccacgacattgcatgtgcgctgtttgcgcttcttagacctagacatgaggtatgaaacatggtgaatggaatggtcaagtcttggcagtgacattcgagactaatgaatgttggattcttgcagatcctagtagttgttggggccccttatgacaccttggaggtgatgatttggatcagggttcgaccaatgtagggtcactcaaggatttcagagtgacataccatgaagctctggtgtgttaatttctcccttcacaatcacaacctaggtcctgatcgaggacatcaacgcgctcatcgatattgacgcgacaaagattagggagatgctagaggaagttgaagcatgttttaagacacgatgtacactaacattttattgaataatttgtgtgttgttgcgacgcatgggcattatacttgtatcttgtaatacatgagagggatacccattgattcattggagaataatgaataatccattgaattggagagtaaataataattcattaataaggtatcttgtgcttgtatgctaaactttagcaccatggatctaaggccctgtttgggagggcttcacgttttgagaatttcaacttcgttgtagcttttcttatctaaacgggtctagcttcatgagttctagttttaaaaaattgaaactagagaccaatttcatgaaattttcgaagctccttaaagggtgcttcagaaacaatatttccgtagcc

SEQ ID NO: 159689 - DNA, 359 bp, Zea Mays
gatttccgggccaaactgtaatagttttcaacaagcgagggatggcgggttattttcaagcttcctcgaggactctttagcaaaaagacccggccgaaggggtatccaacgaccctggccgttggatcagagatccatgacccagatcaaaaggtatcgtggctgattcttaacggtctagatctagatcgagggtctggattcaatctcgaaggggtatgcccacgatccgatcccagccgtacactctacatcctacgactcgcacgaatttcccccaaccctctcttcttccccaatcagcagggcggcgacgaagcagagctccaccctgggagctcgctggatttcctccgccc

SEQ ID NO: 159690 - DNA, 407 bp, Zea Mays
cacctaccgaaaaatacgacggaacattgaacccgtcggagttcttgcaggtgcacgttaccgccatcacggcagcaggtggaaataccgctatgatggcaacatactttcatgtggccttgtctggaccagcccggacctagctcatgaacctcaccccggggtcagtcactcctaggaagagctctacgtgcggttcgttgcgaacatcgccagtgcttaccagcagcacggtgtggaggcccacctccatgcggtgaggcaggagcccggggagactctccggaagttcatctcccgcttcaccaaggtgcaaggtactatacctcgtatttctgatgcttccatcatcacggccttccgacagggagtacatgatgaaaaaatgttggagaagttgaccacgc

SEQ ID NO: 159691 - DNA, 690 bp, Zea Mays
ggaaggtggagcgctatgccagggggagagggatgctcaggaacgtctatgtcgccaacgccttggtcgagatgtacgccaagtgcggcagcatccaccgggcttggaaggtgtttcggggcatggggacgcagagggatctttgttcttggaactccatgatcatggcgtttgtcgtgcatggcctctggacggaggcgctgaccttgtttcataaactgagggtgaggatgtcttgcttgcacttctcttcttatccctgcttcattcgctttgcatccagcttgcttgaccaaatatgcttcgaagcaccaaactagtgaccagtaaccttaaatccagattatgcaccgtagttggtatggctggagctgattttactctgtttagatgacaggggcaaaaccagatggcattacatttgttggagtcattttggcctgtactcatggaggcttggtggatgaaggcaagctgcttttcaactcgatgagaggggagttcggtcttaagccaagaatcgagcactatggttgcatggttgacctgctggggcgtgttggtctgttaaaagaagctaacagtctgatcgcgagcatgccaatggagcctgacgccgtaatctggggagccctgcttggagcctgcacttccatggcaacttagaactagcgaaaacagcggtgggaa

SEQ ID NO: 159692 - DNA, 898 bp, Zea Mays
attgaagaataaaaggtttattctaagacacaataatctctctgcgaagaagcatttatatcctttaccaaaaaaacccatcctgatggtgatctctttgtggtctcccactagtgctatgcatatatgcatcttgatattttagatgttatttgtacacttatcgatctgcctatgctcctctataaatggcctccccgtacttcagtcttatgttggcatacatggcactcaattaggagtgaatgtgttccttgttggcttgttctgcctgaatctgctgtttttttttgtatcccctccgtttttaaatacagtatgtgacgtttacgagtttaaactaattgtgaaaaataaggattgttttctcttagcttagcttttgtacctcaaatcctcaatccctttatttgctttcatatttctgaggatcatgatgtgaatgagagtcatgctcattgtctttcatgaatcgctcttattattcagcagcttaacatcagtgttgacttcaatttctagtccatactcctactttgtaaaatttgctgacgcaaatgcttccaaacttagcatcttctatggcgacatgataataaaagttacaggaaaatctgacacttgagcaactacgatccgggttcaggataagtccaaatcgaacaatgaagtgaagtttgtcgttttatgactccagccgttgtctttcttgtttgatgctgtccacaattatgtgggttcgctgattgctgtcattactattgcccaagtgcgctccgctgaataggaccacgccgagttagcccgtctggaatgttagttttatttctattaatattgatcggctacaatatttccgggcctcaaccccaccgaaacgaacggcccgttagggccc

SEQ ID NO: 159693 - DNA, 593 bp, Zea Mays
aataactttgctatagagatcatgccttggtatcatgaagtattttgagataaatgtgcccaaagttgggctatcagtctgtctaaaacctgaattatggtattcagtggcataggatgaactttgggggccattttgaagatgatcccgtggatgtttgagcatggttaccacagtcggtttatagctggatcatagggctacaggtttgctacaaacggattagtaagttcttatgcgaaaattcaagattttggcatcacaaatctgtctgtcagactgactgaaggagatcgtgatggtacagtaaccaaaaacaatccgcagattcagtgagctggccgccggtgacccttcgccaggattagtgctgctcgccgcgattcgtgcgtctgggctgtggactgagttcgctggggaaaagatctcatcgcggatgggttcaaattactgtggcctcgctgttcttcaataacttgcaccgacgacgtggctttaaggccgtcaccggagttggtgcccttcaccgcggttgtgccatgctccaggcctttaaccacatcactgctagccacaccagctcgccaataacc

SEQ ID NO: 159694 - DNA, 750 bp, Zea Mays
cgcagatgcctgggatccccagggaggtgatcgagcaccatctgaagatcaaccctgacgccaaaccggtgagtcagaagcctcggagacagtccgttgagcggcaagacttcatccgaaaggaggtccggaagctgctggacgctggcttcatcgaagaggttcatcacccagtgtggctggccaacccagtcatcgttccaaaggcaaatgggaagcttcggatgtgcatcgactacaccagccttaataaagcttgtcccaaggacccgtatccacttccacgtatagatcaaatcgtggattctacctccgggtgcgacctcttgtccttcttagatgcttactctggtttccatcaaatccagatgtctagggaagataggaagcataccgcttttgtaacagtggatgggctttactgctatgttgtaatgcattacggtctgaaaaacgccttgccaacatttgtgcgggcgatgagtaagactttcggggacttgatcagggacaacgtagaggtatacgtcgatgacatcgtggtcaggtctaagagagggtcaaccctagtggaagacttaaccctggtcttcgacaagctgcgggcaacacgcacgaagctgaacccggacaagtgcgtctttggtgtctccgcaagaaagttgctggggttcctggtttcgcaccggggcattgaagcaaacccggagaagatcaaggcgattgaggcgatgaggcctccggcccgca

SEQ ID NO: 159695 - DNA, 1290 bp, Zea Mays
tggtactgaatgctatttttgttttctgttgttggaattcaacagttgttatgattgcagaagtaaatgcagtgtgctggtttcgagtctttttcctactttatgctaattgattagctagtgaggcatagaaatcaccctaagatgaatgattgtaagcatgttatactaggtcgagtaggtgtgagcatgttgcaccgtcttaagtcattgccgacttaagccgattgctccgttagtagggtatagcaggcaccctaagtcgagtaagcgtgagcatgttgcaccgtcttaagtcaatgccggcttaagccgattgctccgttagtagggtatagtggtcaccctaagttgagtaagcgtgagcatgttgcaccgtcttaagtcactgccgacttaagccgattgctccgttagtagggtatagtggtcaccctaagtcgagtaagcatgagcatgttgcaccgtcttaagtcattgccgacttaagccgattgctccgttagtagggtatagtggtcaccctaagtcgagtaagcatgagcatgtcgcatcgtcttaagtcactgccgacctaagtcgattgctccgttagtagggtatagtggtcaccctaagttgagcaagcgtgcagattgataataaatagttcaagtgcccttgagaatgagatctttttattgatgatgtatttttcgattacagaatacaatgctgccccaatagcttttgaaatctagctaggggtaaaacttcctgagatgctctatattccatgaattccctatttttgtgccatccatttgagtaagccgatatgatcctagccgagtgacttctgctaccatgaatggcccttcccatagtggcgacaatttgtgtcatccttctcctgttagaattcggcgaaggaccaagtctgccactgcgaaggatcgatgtcgtctggacttatcatgatagcgcctcagggtttgctggtatctagctgattgaattactgtattcaatcattcttcttccaatatatcaatatcctatagtctggtagcttctgcctcagctatgttttcgaagaccagccttggtgccccaaacctgaggtcggcaggtagcactgcctccgaaccatagaccatgaagaagggagtgtttccatgcaaagctctactaggttgagttcttaggctccaaaccacatacgacaactctctgatccactttcccgcaaacttttcattcttgtcgaagactttcttcctgagtgcttccaatatcattccattagcc

SEQ ID NO: 159696 - DNA, 580 bp, Zea Mays
ctggttttcgcctcgtcgcggcccaagaaggaccatcaccacgccagcccgtttaccaactccgtgtcagcaacaggaggggccaccttgtcattctcacgtgcctcctctcatttctctaccatgtgggcccacccactattcctcttctccaccgatgctggggttgttgtgcgccgaacgtcgcggaatgcgcgcggtgtccgaatccccgcctttgtcgcgcttcccctccacctataaaatcagccgagcacctgggaaccttctccataccaccaccatcatcgtgaggaagacagaagctgctgcccaaccaacttagcgctgccgcgcgcggaaccaggtgaaacgccgtcagggagctaaattactggccggggttgatcaatgggtgctcctcacatgtgtgggtaacctggctgagcgagggaagttgccggtgtacctgtgattgttcaccggaatcgggctccaccttgggttcgctcgacatctgcaaccagtcgcgtctccacctcgaatccaggtgaggactctccctttagattcgtagtattgcgtggaatgtgtagcgccg

SEQ ID NO: 159697 - DNA, 1210 bp, Zea Mays
cagggattgaacaacgacatctataaaaagacaaactttctttctcacgtgagaacgtataccacgtatccaaattccagcgagtccccaaacaaaatttgaaaaccttacaaatcaagagtccccaaacttagaagattctagccatagtccctctccccaataattccccaactatttaacctcagtgtcttctaagcttcaacacctaaactttcatcggtaatttgaagaggccgccattaattaataatttatgttggtccgatcctagccgacgaaagttaacattaactacaatcggcttctgacacgatcgatggaagttagataacttccactgacttctgacccgcccggcggaagttagattaatatacctcgttcggttcctaccgttggattcactcttcctcattcatagccgcaactacgtgctttgctctccacggttggcccatcgttgcgcctccccgtgctcacaccacctccccttgctcattgtgatcacctcctccctgtgctggcctcctacctcccttccccctgatcgcatattacccctggtgctcgcaacttgctcccgcttgaagttcactagtgtttggtgcgcgctcatgcgcgcgtgaccaaatgtggcgtaagatttttttggtataagcgtgtataaccttttatgtgtcatgaacatgtatacatggagagtagtatttttctcccttttttgtgctggtcacataagtatgtaagtatggaaccaaatctaaacatattatgagtatataaacacataggtatgaaaccaaatgtaaccatattacgttgtttttcgatagttcatatctgttgtagagtgaattgagactacaatatatattaagtagcattcaaccagcgtgatcaagagctagcaacaatgtgtctgcaagtgttgtgtcaacttatacagattcatagagagggcaacagttagtttatatttacatggaaacattcatggttcaaaactgatggtgcttttgataggcgcgcaaaaaccaaatatctgtgcataaaagaaaggaaaatattagttggactgaaagttgtttttgccaaatagtttgttgatgtgtattaacgacaagggagagtggaagatatcatgttgattgcagcaaccctttaatccatccctactgacgttcaaggcgtcttcaaagcgatgcct

SEQ ID NO: 159698 - DNA, 845 bp, Zea Mays
ggaactgtgtcctcaagagccgggcaatagaagccggactaaaggcgggaggcctcaagggtggcctagaactaaggaggccagatcagctgcacaaagatatgacagaggtagtgacgtacgacagctgacggtgagcacggagaccatccaacgttgtatcctcaatctcacagatcagaaaatcaaccacatcaaactccgagtgagagatcaaggcaccaagtagccagagctgaatatgcgtggtggcctccctatatcccatcctaggtagcaaagtctgcctcatcaactcatagagaaacttcactgctggagtgaagtcggctggagaacgccgtgacccatctatgaatggaggtctaaacagggcagcgacatgagttgtggctggagcaactccgccgtgagggtgacggggaggatctgacatgccatagcacaagctatggagcctcgtcgatgactcaggaaatccaaacaactctctgatctgggtagcatgcaaaatcacatcctcgcgctcaaacctgtaccttagccactgatgatctggatctatccataccgtggcataaaatactctgacccactcctcaatgtatctaccatcgaaggttagaagagagagtaaccctagcagataggagagatgaccctctaactcggcaccgtctattgacagaaaggcaggaagatccaaaagccggtgtgccctctaggcaatctgagcagacaactgcgccatgaagaacgactcgtgagtcctagtgctgaagagtggcacaactgttgggtccctctaagctggcaaccaagaatccacgggtacgtgtctgaac

SEQ ID NO: 159699 - DNA, 453 bp, Zea Mays
aaagccggatggaaacggcgcctcgagcctatccacgtcgctccaaaatttcgtagtcgttagatttgtcttcaacgcttaggatttcagatcgtgggttttcccagcgtttgaatcttcttgccgactccaatctcctcctggactccgtatgaccatgcctacccccatcctcctccttcgccgccgacgaagctgaagcccaatctatccgacgaggcgacaaccttggccacctgctgctccactcactcctgcgtcgcgtggacacgatcgagcacacccttccctgctggttccggtcctcacctccggcttgccgaccggtacacttgaactctcgcccgcgccgcatggtcagctaccacgagcaagaggtggacgacgatgaatcggagacagaatactcgccctcccctggttgtcatggccatggcgaccggtgcgcacatg

SEQ ID NO: 159700 - DNA, 548 bp, Zea Mays
gtgggggtcatggtggaggggtcaatttggccgatgggggcttgtaatggtcggtccgtggtgaggtggcgggcgcccgcggcggtgaggtcgccggcgaggcctatgggtgtaataggtgaagggaaagggtgcgctgtgttcgtggtgaagtggtgaaactcgtgagccaaaccaattggactctaggctaccagagaagggagggagggctcaccggagcggagaaagagggtggtgcgctggctcgattgagctcggggaaggggaagagaggtggccaaagctagtgtgaagaaagctagagctcaggcggtccttttataggcggccagggagggggaggagaggtggcgagcaccggcgaggcttgccgcggcggcgatgatggcgcacagtggtggcgacgggatggctcggggtagacggtggtgacaggatggctcggcacaggcgcaaggcgtcaatttggctggtgggcaagtaatgacgaggggatgtggcggagcggtggctggtggtgatcacgtcgatagccgatcacgggc

SEQ ID NO: 159701 - DNA, 1076 bp, Zea Mays
gcctgactatctctttaaggtataatcgggcaagggctgctcctccaaaagtggtcttcactggaacgaagtgggccacctttgtgagacgatcgattatcacccaaatggaatcatttcctatctgtgatctgggcagtcctgttacgaaatccatgcctatttcttcccacttccattcgggtattgggaggggttgaagtaggcctgcaggcttctgatgttcggcctttgttcgctgacaggtgtcacatcgggccacatactgtgctatttccttcttcatccctttccaccagtatctggccttgaggtctaggtacatcttggtggtccctgggtggatagagtaagctgagttgtgggcttcatcgagcagggtttctcgtgcctctcccactggcacgcacaggcggtccttgaaccagaggactccttgcttatctgtcctaaggtccggaagttgctccttgcgtgttccttccataagcttggttgtttctgcgtccaggcgttgggccttgcatatgagatcttctagatttggcttgacttccaggccactgttgtctcccagacatgtatttagctgagctgattctttcttccaatcttccagaaagtttgttcctttaaccccgaaaggttttcggctgagggcgtctgctactacgttggcctttccaaggtggtagtggatttcgaggtcgtaatccttgatcaattcgagccaccttctttgacggaggttgaggtccggttgcgtgaagatgtactttagactcttgtgatcagtgaagatgtggcatttgttcccaatcagataatgcctccatatttttagggcatgcactatggctgccaattccagatcgtgggtggggtagttctgttcgtgcggcttgagtaagcgagatgcataagcaatgactttctcattttgcattaagacacaccctaagccttgcttggaagcatcacagaagatgacaaaatcttggtgtatgtctggcagagtcaggactggtgcggttgtaagtttctccttgatgatttggaaactttcttcacgtttg

SEQ ID NO: 159702 - DNA, 549 bp, Zea Mays
gtactatactatgcgcttttatagatgggttacacagagaaattaaagctgtaattatggtacaaagaccttctacactggatactgcttgtgctctggctttgatgcaggaggaggcattagaggtgggccgagacgtacatgtcgttactctgtctcgacataatcccaaaatggggtatcttcattaggacctcctaaatgggatcaaccagcccggttgaagactgcatgctctactaatgaaaaattggcatctctgcatcgttttcgtcgtgcacggggtttgtgtgagaaatgtgctggaaaatggtcttcgggtcacaagtgtgctgctacatgtcaacttcaggccatggaagaagtttggaaattattgccaacagaggagggtgcagaacaggaaacagattctgttgaaccggcatccgacacggtgcttatgtccatatctcaagcaacttggatgggatcggataatgtctacactattcagctccacggtctgattcaaggtcatcccattcttattttgattgacaatggtgg

SEQ ID NO: 159703 - DNA, 639 bp, Zea Mays
ccccacctgtcagctcgtctctaacctctcgcccacgatctcacgtcgtggacgcgcccacgaccgcgcgttctccggccacgtccgagcccccgcgccccttttgagccccgcgccctgctcgcccacctcccatcgcccatttgcgccctctgcaagactcgctcgccctctctctcgctctgcccacgcgtgtagagagcccccgccaccgcccgccaccgacctttgcctgttctgcggccactgttgcatttgcgccccgtccagtgccacggtgacctccacctcaccgtcagcttcttggaacaccgttcagtgtgccctttccctccctggttcagccggcccgcgttcactggagtgattctcgcgcagccggagctccgccaccgtcgtccgtcgcgtccctgcgccaccaccatagccccgtgactccatcacttcccctcgaggtgagaaacctgcctgcgcccctaattttctgtgtaatgccctgttgttcacgcgattgctcgccggagcaatctagtgccactgttagtctgcctttccgcgtgtagcgccctctggtgctcccacaccggcgtggtgccctcggctgagtccgccagatcaccctgaacacgcctgaaccac

SEQ ID NO: 159704 - DNA, 491 bp, Zea Mays
tataactctctggattgggtctccaatactagaaaagacaggggcaagcgcgcataaaatcctagactcagtgaacaatgtatgtggacggcgggttgtttagtgatttcttcgggggtctttctgcaaagtgggggtcgaaacggtatggtttagtttcggccgatggatcgcagatgaacgttcctgattagatcgaagtaactgcgaaccggtatgcgattgcaatcgtcagatcaaagatcagcggccagtattttacgaatcccgatcgaaggacgagcgttcgattcaaaacagacgtacccgatcaacaccgtgaatcggtacatccctgttctaatcgtagccgcctattggccatctaacggccgaacgatacacccttcccctcctaccccgcgacggcggcgccgctgcttctacggctgagaagtccggcgagttcccccaactcggcgttactctactctgaatcactacggacagat

SEQ ID NO: 159705 - DNA, 874 bp, Zea Mays
tgctagctgaagttggattgctgaaggagaggggtctgactgctgaagctgtggttgctgattttgtcttcaagaatattcagccgttgaaagacagggcgtaccaggcttatctgtatcgaggcctagccgactcaactcgggttaccaacagaagaattccctctgcagacttggtgaaccgacttgatatgatccttagaggcaaggtgtcaaatgttggtgccccggtggcttactcggcctggaacctgcctctcccaaagccttcaccctttttgcgtcgaatccacctgtcactgatggcagtttggaccttagagtgcgaccctctgctgaagaagttagtgccttggttgcctcgcttggggagattcctgatgatgaacggcaggtccattttgaggtgcccctgaatcctagcgatgcagagataagtgttatgcttgatttgctggctgaggactcttctgatgcttctcccgctgggacattggtggtggcgcccctcccagaggctggtacgaccttggatactcagaagcctgccagtactcgcccgagacgtccttgccgagccaatcaacctgatccttctgctgatgagcagaaaaagaaaaggagacgcctccggcgagtatccagtttggatcgggacgttggtacttcggttcctgctgctgaagaagtgcctgtaactgaatttattgacgttgaccccaatgggtgtacccaatctgctgctgatcccaatgtgggtgctccatctgttgctgatcccaatgggggtgctccatctgttgctgatcccaatgggggtgctgcttctgttgctgatcccaatgggggtgctgcctgtgttgctaatgtagac

SEQ ID NO: 159706 - DNA, 795 bp, Zea Mays
gcggttggcaggcagcgtgacgttctctttctcctctttccgtggcatgctggaggacatggtcggcatcaaagatctatccagtatcgccatcgcgtttgtcgttgaggtcaacaagctcgcccctaaagttggtatttggcatagtacccacacacccattgaaccatacgacgtgacgcgaagatgcggttaatacgcgcggcatggcctcttcttcctctatccgtggcgtgctagaggaaatgactgacgtcaaataccactctagggtcgtcgatgtgttcatcgtcaaggttgagaagctcgcccaaggctggtacttggagcagtatccacgcatccatccatccatcctaagattgcatcttttttttgagacccatagatagcagattcagaatgaatggaacaagggagtatgagactaccgaagtttcccaaccaaacaagcagtcggtgttgctcatctctgcataaaatatgattggcttgtggaccttaaagctcatgcattattttggcctatattttcctagagttttgagtggatcacaggagcacatgaccaaatccagcaacaactattatcacgaatgaagaaacatgaatgctttcctcatatccatgtgccatcttcaatgtcttaataatgttaatttgattgaatgttaaagtattcgtcaatccacatgcacctcaatctcagtgtccttgaggaaaaatagtgtttagtcaatttgcctcaagttatttgattatgttacaagttcgtacgaacatatatgttttcgg

SEQ ID NO: 159707 - DNA, 869 bp, Zea Mays
cgagggtgggctttatagccgctcgcgggcacggtacgggcgtgggcacgggggtggccgaccatacgcgggggcgcgcacgacagcggccagtgcgcactcggccggtcagataaggcatcgagcacgtggcagcatttgctctggtcatcttcaagcgtcgattggcccatgatctcttcgtacctatccaaaatccctgtataagatttgttccttgttgtataccctttgtatctcatgcagtgctcgagtgggtttcacctcgggttggcaagttacgaggaggtgaagttgggtctgtccgaccagacttttctggtggaaaatgggtgccaacacatgtcaaaccaattgggtttggtttcaaatttttccagagtgtcctaggggtctttaggcgccattttgttaattgggccatatggttttgaggtttggaaaaaggtgaacatgtttgatctttgaaagagggctggttttgaacttgagaaaaacctgatttttcttttatgttcttatctttggtggcctttttagggtttttctgaaatctttttggggtcactctctttctattttttgtagggtattaagtgtactacaacttttataattatcccaagtcatgacaatgtggtttacgtagcctttttgctaaactcccctctagggctccatttgcctaagggagttgaattagggtttgagtcattctctcctctttaggtgcatggtaaggtcaaagcatgactcctaagatgggttacaactacttaggatattgacccccaagtttggtgtcttttgctcaaattaaccacatgtgatgataggttcactagtgtagtcttgagtgaaaaccctaa

SEQ ID NO: 159708 - DNA, 271 bp, Zea Mays
gtcgtggccttgagagagtcgtgtccagtgtgttaggaaaccgaaggtgcgcaacggtcggctcggctgtagaaggaaacagatcagtaactgttcagttcggtgcacgcagacagggaaggctgattacttcccatatgaagaaccaacgactcctaggctccttgaggatataaaaggccccttaggcgtcatggagcagcacccagacaacacactgaaacaatcacaagagcatataacaaactctgagactccgatcacactttga

SEQ ID NO: 159709 - DNA, 372 bp, Zea Mays
tcatatctccatcgatcaatgtgaatgcccctacatgacgcgcctattgtcgtgaattgttcgacagtgaatttatagtgtaggtcgtaagatcgagaactggaggtaaagatatatgagacacgaaacttgagaaagattgaagctctcgatgtgagataataccatatgtcttgtatacctatgcaacgtgatcaaatgatctgctctcttggagcatcttagccctcattttatagtctaaggagaaggacaattacatgttcaaatcggttacataatatgaatcgaggttggttacaagatatagacaacaactaacctaaactgagcctatcccgatttaccgaggatcatatgcttaccgataca

SEQ ID NO: 159710 - DNA, 673 bp, Zea Mays
ggctgacaacagggtggactgtgggttggatactcaattttgcagggtctctttaacaattttgacatggcgaaggggtacgcgttgcttacagccgtcagatcggatccgagggccgcgattagatcccgcgcatcgctcaacctctcacacccgtgaccgcccgatcaacatctaacggccacgatttaaaagaacccagatctaatttgatgcacatgatacaggatcgacggctcgaatcttaaaacttgaaccggtatctgtgttctgatccgagacgttggtttgagatcggacggtgcccgatcgatgaccgccctaactctctctcgtatccttctcacggccaacgcctgcggcgaagcaagtttccccacgacgacgccattgccacccgcacccgaaactaccctccaacgtgtcaaacttcaatacgagcctagctgtgcgtgaagcagatcataacggacatggcagagggtcacataccaacacggcagcagcacaactcccagtccatgagctagagcggctcctccgcgagattatcgctccggcgagcaattctcctccagccgacccatgaagatgctcgggaaggccaagcgcaaacacccgcgaacgcgacgaagctcccgacctatacgcctaggtcataacaccgatgggg

SEQ ID NO: 159711 - DNA, 400 bp, Zea Mays
ttttgaaaggaaacaaagcttaatttctatcttttcctccatcctatgtactgttacttttgctcgcgcattacgcgggtgtttaatcaattaatcaacacgtgtgaatttttgcgggcaccatgtggttgcacgaatatttattcaatattcaatacatgtgaatttttgcggggcaccgtgtgtacgtgtaagcagctactaatctagtggactgaactgatccattataggacatgctcagaaagggaaagtttagacttacaacttcttgtaggttgctaagtcgagcgagctcatggtcgcaggcttgataaggaggacgtgaggccaaaaaagagtgaaattcgtaggacttttggtaggtggatgaatcccacggcacatgattagcttcaaa

SEQ ID NO: 159712 - DNA, 607 bp, Zea Mays
atagtatcgccggagttagccacctcgctaccttgcgccacgtgccctggcgtcttaccgcgtcgcagtagctcatgttatgcatatccggtgatcgccggtgagctcgccatagtgatagccactaatcgcttgcgccagtgcatccccttctctccgatcgccaccgcgcaatcgcaaattcacgggccaccgctcaagggccctataaattgagcacaccctcgactctgctatgtaattatgcactcaacacacccactcgtgcctccaattactcaccagagcccccgaatcgctcagttcccccaaatcagttttccgccatcgtgaacaagctctcaccgtggctagtgcacttcaggtccaatcttgccctctgctctcttgtttcagcactcttacatgccactgatgctcctcgacccattcaattaaactagaccgcgccagatcgccgggaacacttctgttcatccgtagttcgcactatctcggattgtgcaattgaggactcggattgtgcaattgagcgaggggaaacgattattaggtgttgaattaggtgacagccaagttagggcaccgaccattgcttatcttggcc

SEQ ID NO: 159713 - DNA, 781 bp, Zea Mays
tgattctgaatattaaatatgaaaccggagtcaaatttgaatttgaaatttccaaaatacaaataaatagaaataaggaaaagaaaaacagaaatagaaaagaaaaagggaaatgccagaactggctctcgggcttaaagtctttgctggcggcccaactcggcttccctcccgcgcggcccatttccacttcacccacgccagcccatctcgtcctcgttcttttcttttctcaccctgtcgctgacgtgcgggtcccattcgtcggtcatagcgcgtccacgcacttggtcatccccgtccttcgctcacggagggagccgcaacaaactcgactgcatctcgcgcgagcttatcagagcaaactccgaaccgtccgtggaccctctgtggcggcgctataatgcacagggtcgcgatctcccatccagccttctcttcttcctcgtgcaatccacctagtggttgaccgctcatgttcccatcccccaccagcgctgtgctccaccagttgcacctcctcccagccatggcgcagggcctgttcctcttcggcttcccctccgcgttggctcgccttcggccgtcgcgtgaacaccagcaaactccagatccgagcgctcgtgctccaactccggccggtcaccatcctctacaccaagatcttcccggcacgcggatccttggccaccatctctaggcgccactgccccaagtccgaccggtgcccccgccatgacccggctccgcgcctcctctggtgcacgaccgcatctattgc

SEQ ID NO: 159714 - DNA, 986 bp, Zea Mays
atttccctaagcctggcagaaaaagaaaaggaaaaggaatgaatagtaacgagctcaaacgagcccgagccggccccacgaacagggaaacgcgcccgcgcgcgcgctcgcgttggcggctttacacagaagacctcggctttttgaacaaacagtaaagaaccctgggcactatttccttgtctcactgacgtttgcacttagacccttcctctttcttatctttgcaaactgcagtccccgatggtgatcgccggtgagcacgccttccggcgaacctgtactggccaagacactcaatgaccggcgccctagcttggctgatgcctaattccacccttggagacactaatctctcaactaattgcactaatccgggccgaaatctctctgtccacgacaatgacgaaaaccggagataaaccaacatgttctaggcaattcaaggcggtctagttcaatcgaacgggtctgtagcaataggggacatgaaggaggctagaacagtacacagaagggcatgaactaacccgtagacgtctggccacggcgagatgtctcacagcgacgttctgaccgatttaggggaaatgggaaattgggaggttctggtggacgatcggaggcgagagctggtgctttggatgtgtaataacctagcggtgctcactagggcaacaatttatagcctccatcgacggtggcatttaatttgaagaaagtgtgctggcggccggagagagggactgagtcactgcggcggtctactgtggcattcactggatgaggagctacgactgtcactagtgaactattatggctagcaacgacgtggtgaaagggtcacgacatggagcgatcatggcgaacgacgtacacctcgacgacggccgctcggccacgtcgccggcaagtggatgaggcgacagagcggccacagtgttccgacctcatccacagcaagatcttttcaccaagagtcgtta

SEQ ID NO: 159715 - DNA, 679 bp, Zea Mays
tagggctgccccagggacaatcacggtcaaaccctgcttggtcctgacacgagctgcaccagtgcacgctcgggctcagggaccctagttcatctacaagtcatgcatggccaccgttgcgtcggctggacacagaactgcaccagtacctttgtctcggtagtgcgctgtagcaggcccaacatgcaaactttgttatccacctccctgactcgggactagacttagatcagtcagaggaggaaaaagggtcgagggccccaccatcttcaagagtcaaaaaacacgactgactgacgccatggccacttggcccgcaagtgcggtcatcaagctcgcggagccagagcctcccctatactacccttacgccctcttcaaggggggagtagacaacgatcctttctctgacgatgagcccagcatatagggggaggagcctccacagcgtggggcacgtctccgtcggaatcgacaccacaacatctagtgtcaccacaccgccagggagcaagacccaacccagcctattcccaagatgaggcattcgaggtcgatgagtcccctaatgagaaggtattacacatgcaaaggaatgcccgccgctcaccgtgtcactcaggagcacaagcacgagatggccgaacgcactgttaggctcccgcatgatcctatgcct

SEQ ID NO: 159716 - DNA, 637 bp, Zea Mays
gaggctgaaggtctctgaaaatggctggccatggtggccggcgctcgggtggctcgcgggtggcgcagagctcgccggagctaagggtggtgtctggccagtgaaggtgagtgcggagtgaggtgaggcatgtctgggggtggtcttaaaggcgtgggcgagcatggccaaggggtggctctgacatgtgctcgggatgtgtgcgggcgagcgccagtgcgtgttctggcgcctgtgcacggcgtcgagcacgaggcagtgcagagagaggtcaagttcatgcacgtattggctccaaatctttgcgattatggccatgatcccgttgagagatatcttcccctaacattcctttgtcgtttgtgtgtggaggcttatgggtttcgctgactggatcaaaagaggagggatgaagttgggtttgtctcactgctaaactcggagaggaaatcccgggtttgacgtgtctagggcacgaatctcaatgccatcttcactcacgttgcagagggggttagtttagaacaattttgccaatggggacttaaggatttgagctagggaacaaggtgaacgtgctcaagttctaggtgaaggctcaaattcataaatctgaatttcagattttccctagaga

SEQ ID NO: 159717 - DNA, 905 bp, Zea Mays
aatgattgaacaccaaattagaaaatggttgattacaaaattacaattacgaactacaaaaatagaatgactaactacaaattagaatgactgaacaagtacaatgaccgagcacaccaaaatcacatgaaacattcacaattttttggaatcaaacaaattgatcctgccataagttcatgataaacaaaggaacgactgacacataaacaacatcaattgagcacaaaaaagcaccaaaacacatacaaaacttacacaaaatctatcatagtgctttgagttacttgtcacaatctccaaatccactaggaacaaattgcacgcaaaaagcaatagggaaccaaatccaccagaatgtttacatttggaggaaaactcgctagggttgaaatgctaagatagcaaccgaagaattcaccagagaggatgacagagatgatgaattggattgtagcctacacaatccgcaccataaacatccactgatctccacaactacgaaaccccataatgtttacattggggggaaactcgcttgggttcaaatgctaagagaacaacagaaggactcaccaaagaggacaccagagatgacaaaccggattacagccgagacaattcgtaccacaaacccctcgatctctacaactacaaaaaccatggaggattccacaaaaagccataaaccacctaggtcattgaggccaccacgaggaagcatggaccaaaccaatgccgaaaaaacaccacaactacacgcggaagatcaaccccatcaatggaggagagagcatgtgcgaaaatcaatagaactaaagcgcaagagagcagagaggagagagcacgacgagcgggaaaaaatgaagcaactaccacgtgagaaaaaaggtgaaggggaacga

SEQ ID NO: 159718 - DNA, 621 bp, Zea Mays
accgagttgccacatagaaattaaagaagaacacctctgaagatgctctgtcaggtactctgaatggagcttcccattgtacagtacgcaaaaagatcttcagattcatccccctcgcgctggtggccatgcgcccgaattcgtgctggtcatcgtgattcgtgctaggcgcgcagtggatatcaacggggaagtaaaaagatctcgcgggggagtggatttggtcgcggggtgaagcttatcaactgcgcctatagccgtgcgacgtggccggaccaccggtgacgccgtggtactccggtgacctcaattatgccacgttgtagctctttaccgcgtagtagtaactgtggcacgcctaggcttgccattttagaaccgttgcaccggcgggcgccacgactgagccgccagtgactcatctctctctccggccgccagccttctccttcaaaattcggagccaccgtcctcgggcactataaattgatggtgccgctagctccgcatgatcgtcacgaagccaaagcacccgcccttgcctccgattagccaccatagcctcccaatttctctcttcccccaaatcgggttttcacgctactatgaacgccgcaccgt

SEQ ID NO: 159719 - DNA, 753 bp, Zea Mays
atcctataatactccgcgttcatattcaccctaaatatctaccctataccaactatcacatattctattattttttcccacactttttccctctgtggcgcatgtgggaggtgggcccatccgcatgcaactgccctgaccagtgcgctggatttggagtagagttgaatgagcgctagatttggagtgagagaaagagtagcgttcggtgccgagtacgtcgctgcagcacatgagtaaactctatctccgtagcgttcggcattgagtccgccagtgcgggcagccttagccctccatgcagtgtgtgcatgcatattgaagtttctcaacatccaagtgggtctgaatctaatgtaagatcgtcctgaagtttggaccaggattgagccgtcaacttatacttgtaacgttgcaaccttgatacatacatacacacacacaccaaatttgctatcttgttacaaaattgcaggtacccttccatctcagacttacacccagacttgatccgtcaacatagatagtgggctgggccaacattagaatttgatgatagcgttggatgtgggctttcggcctacttcttcccttcctcggtctgcctctgatccgtacatctagttcccctcagactttacacccagacttgtatccgaaatttgtatcaccgcaaactccattatattgttagcggacaaatttattgcaagtttggcacatactgcagtacagattgactgagatgcccgg

SEQ ID NO: 159720 - DNA, 715 bp, Zea Mays
tgagggttggatgttccggtgatatgtcaggtggctagcatcggtttgggtagggattgttctgggattcgactcatgctggttcttaggcctctaatctaaccggtgttcaagctcccaccacgatcgctaggcctaaccacgtgtaggatgttctagctgtgtggtgaaactttaaatgtagtgggtcagacccgcttgacgtggacggagcggggtttcaagggccatctcccccctatgccaccaaggcatggattcgatacgagcccaggaagagtgattggttccttacaaccgatacgactcagggagttgaacacggtttgaactgtcgtttgcgcatgtttgtgtatgtagggaacctattcggagcacgtcaataccttcttgattgggtataagtcagatgacacactagacgaaccttgaagcctagtcgtacgccaggatctaggtcattgaccatgggattggggcccaccaatagtcttgggagcctcccagctcctcgtgtcgcctgccatatctcgccagtgggttttgggtggcaacacattctagcacgcctagtgggaccatctatgttaacatatgcgacattggctgcctagatagcaaacactcagacgaacatgtctggactagtgcaagaccggcccatcacgtatgaagagctgcctccagaacaccgagcaaagtatgatcaatcaaa

SEQ ID NO: 159721 - DNA, 628 bp, Zea Mays
ttagagaaacaatgggtttgtattctatccatttggtgaatttgtcaatggcgaccaacacgtgagtgtagcctccctgagctttcttgaacggtccaatcatgtctagtccccagcacgcaaatggccatgttacgggtatggtctgcagttgccgtgctggcaaatgctgctgctttgataaaaattggcaagcttcacatctctggactaactcggctgcatcactctttgccgtcggccagtagaaaccagacctaaagaccttcccaaccagagttctggatgctgcgtgtatcccgcactgtccggtgtgaacctcatttagcagttgcttcccagtaaccgaaggaatgcacttcatgaggactcctgttgcaccccttctgtacagtgcgtcccctatgagggtgtagtgggctgactgccttgcgatgcgttcagctgcggctttatcatccagttcctcttcgttctttatatacctgatgataggccccctccagtcattagagtcagactctggctggctcaaaccattgcactcttctgcttgatctgaggaaatgctcgggcgtggcaactcttggacaaaaattccaggtgggacctgagtttgactggatac

SEQ ID NO: 159722 - DNA, 373 bp, Zea Mays
gccaaattctagaaaggccaggggctttctcgcaaaaaccccacagactcagatctaatgcgctgatggacggcgggttgattggccagaaacagaggggctcgttagtaatttttatcaactgaagcggtatcggccatctctggccatccaatcagaatcagacgcgccagatcataacgtgaaccgttacgagcccgcgagcgcaggatcccgatccaacggtctacaagtatggtttcctttcgcccgcacatccgatgatcatcggccgagattgacacggccgaatcggtacgctagctcacatcgtgaacgttgataatgaatctaacggttgcgcatcaatccggctgagcggctacggtcatcc

SEQ ID NO: 159723 - DNA, 891 bp, Zea Mays
catccggcgaagacttagaacattgacaatctccgcaaattttttgtttgactcctcagggccagctcgcccttgtaattcacaaaacagctttattccggcccgcactcttttcctcccggggggtgaggtttttaatgaggcggagccatgtaatatacacgcaaaaaatcccccacaaaaaattacaacgtaaaaaaaagaccgcatcgacggtcttcagcattcgatcacaacgaagtcaccgcgaggggcagcgctggctaccctcgcgtgcgacactccgcgcaaaagtcgcctaagggtgcagccggactagcacaataagtgcgcaaaaccgaagtcttccccaaaagactatccgtgcaaaagtcgcctaagggtgcagccggactagcacaacaaatgcgcaaaatcgaagtctccctcaaaagactattcgtgcaaaagtcgcctaagggtgcagccggactagcacaacaaatgcgcaaaatcgaagtctccctcaaaagactatccatacaaaaaccgactacaggtgcagccggaccgacataataaacgtgctagatcaagtgcacaagtcccccacgggcacggccggatcagcgaaggcacacagcctcatcatacaaattatagttacacacatacaacgagggcatcacaccttacattggttcaaccttcgggatgatacccatctccctgtagttaaacaacattatcttcagctcctcaccctcaaaaagacttcacaactccccctcacctacactcgcccaaccggcgaggacaacagttcccgcttgccagccctgtccacacgaagacgaccaccctccacctcactcactctacgctttgccaccacccttcgctgcctacgcc

SEQ ID NO: 159724 - DNA, 498 bp, Zea Mays
ttagtagtagtataatgtagttagtttgtagtgtaatgtagtttagttagtaaggtaatgtagtgttggatcgagggggcaattggtcgactcataatgagtcggtcttccttttgtaatgatccctgacttatggatggaagaatgaagcatgtttcatgccattcctctattgtgtattctgttcttttgtctgacggtctgatcccaggtaaccttattgttgaatcttaggtttctagaggtactgaccgagtcccattactctattgcgaccaaaactctcccgagacactggcttgttcttctgtgcccgactcagtgtgccaacctgtacatttgtcgacgtcctcttggctcctgaaccctaattcctgtttttctatgcgctttccagctttctgagttcccacatcttttcacgttttgttcttgaaccacgctgtttgaaaaatcgtgatggtacccaggaagagaaaacagagtgctgccacgccg

SEQ ID NO: 159725 - DNA, 1002 bp, Zea Mays
agaaggtcaccacccaagactacgcctagctctgacgccccatggcctcacacctagtgcgtggcgaccatcgcgggaggggtccgtccttagaccgcgcgcacgccgagtaaaccctccagcaatccacgttgattactcgggggctacatctatctgatgtgcttgcacgcaccagaaaaagtataagatctcacataaaagctctgcacgactccaagaagtcccacaaaggcttaggggttgctgccgggtacctaagaatagggtatccaaaggtagacccacaactcatttccgacccatttaccgaccaagactctgtcgagcaaccctgcgaggcggagagaccgaccaagtctctactgagcaactcggtgaggcggtgcggccgaccaaagctctgccaagcaacccagcgaggcagaacggtcgaccaagtccatgtcgagcaacccaacaaggcagggcggccgaccaagtccctgctgagcggccgaccaattcactaccgagcaacctagcgagacggagggctaatctggaactcctgactcacgtcagcaggacaagacgcatcatcacctaaccacgtccggaccacgagtacgacgtaccaaaggggcgccgaggagtccccgtcaatgcgacagtatgccagcatgtacgatccctggcgtatcacatctgcctttgtggggtcagtcaacctcggtcgtaggggaccccagcacctaagtcgctacagtgatccacgtaacaggatagacagggcaataactcacgccactacgacatcattaggcttgctataagggacccgctaaaagggacccgcataccaaacagatgacgcggtgcgccacgtcggtagtatggccacgctcgaccctacggacccggggataccgctttcgcatccaacaaagcattgcagtctctctctctttctccggaggaaaaaataccacctctgtaaggttcccttgaactataaaaagg

SEQ ID NO: 159726 - DNA, 417 bp, Zea Mays
accgatttggggagaaagaggaattagagagctatggtggctaatcagaggcaggagcgggtgctctggcttcgtgattacctagcggagctcacggcatgctcaatttatagggcccaagggtggtggctcttgaatttggaatggcgcgctggcgaccgaagaggaagaaggtcactggtggctcaatcgtggcgttcaccggtgcagcggttcagagattgtaatcctaggtgtgccacggttactaccgcgcagtaacgagtcacatcgtggcataactgaggtcaccgaagtctccacaacgacaccggcggtccggccacgtcgcacggctacaggcgcggttgataagcttcaccccgcgacccaatccgctccccttttgatcttttcaccctcccggcactatcctgc

SEQ ID NO: 159727 - DNA, 515 bp, Zea Mays
caggggtggaagagtgagtcgacgtgagtgtgcgcttggaggtgttccacggcggtgagatgatgtctcgatgcccgaacatggtagcgctcaatcggttgggccgatgagcaacgttaacagtcaaggatgctaaaacatggcatagaaggggatgaacggacctgtagatggctagccacggcgaggtatcttacggcggcgcggctcaccgaattgggggaaaactgaaattctcgggctatgatggctaatcaggggcgagaagtggtgctctggcttcgtaacaagctagcggagcaggcggggcgtcaatttatagtgaccagaagcggtggctctgaattttggatgagagcgggactcatttccccggcgagataattactgagatccactgtggagcgcatgtgttcaccgggtgacggtcacgacctaggggatgccacgaccacgacaatacggtgaatcaggcgactacatgtctttcactgcgatcacgacgaacaccggcg

SEQ ID NO: 159728 - DNA, 406 bp, Zea Mays
ccatagaccatgaagaaaggagtatttccatgtagagcccggcttggctgagttcttaggctccaaacgacgtagggtaattcccttatccatttccctgcgaacttttcattttttcgaagaccctcttcctgagtgcctctagtatcattccgttggctcgttcaacctgcccgttggccctcgggtgtgctaccgaagcgtacttgatctgaatgcctttttgctcgcagaaatcgaagaattccgaacttgtgaaattggatcccaggtcagttataatgttgtttggtattctgaatctgaatattatgtcttgtatgaattcaacggccttggctgaggttaaagaggcaatgggtttgaactctatccatttagtgaacttgtcgattgctaccaatac

SEQ ID NO: 159729 - DNA, 546 bp, Zea Mays
cagactttgcaagaaaacccctggcattctggttaacttgaagtgggttctttcactgttgctttgagtcactcacagtttccaagaagaccccccgtattctattcctttactagtcgaggtccccgatagggaacagcgttgcagagctccggcgagctcgcgtaccggccgaaccgctccaggactggcgccctactttggtagagatcaaatccaagatctaacgagggtttcccctcaatcaatttcacgattggcgatctacctagctctgcccacgaagacagcgggcatcgtggacattcactcgcgttcccggtgatcagtgggttcctagttcaattgggcgggtcgatgatcatcacgggtacacgagagcactcaaacgagggagcagacggtatgaactgacctgaattgcgctggccacggcgaggtgttcttgcggtgtgtttgagcagatttgggggaactgtaaaattcgagctcgctggtgatcaactgagggtaatacttggtggctgggtgtgtgatgatcttgcg

SEQ ID NO: 159730 - DNA, 435 bp, Zea Mays
aacacaaccgctcagatctatttcaacagccaagatcaaatcgcataaacagcgaaccggtacgcgcccagagccacctgatctatatccgatggctccgattttaaaatgtcacgatcaattctaacgcgtgagatctcgatccaacggcacgacctcatttcaacccatctggtatctctatttgatcttacccgctcatcattaaatcaacggccaggtcactactctgaaccgatcaaatcgaagccgttcagataggatcgagtggcatgcacatgtctctctctccggctgaccggacggacggcggcgcacgagtttcccacggtggcgccatgtgaccaccagattcacaattccccgcctagaacacgaatctggtgcttgcaacacgaagccaaggctaagatggaagtatggatggacttatta

SEQ ID NO: 159731 - DNA, 938 bp, Zea Mays
atgatgagtgggccgataagatgaaatagcatttaatcggtgtacatcatagtcttcgggagattgtcaatataggtatgtataagcccgcccaaggagaagagatgactcaggaaatggtgcaagaagttcaccgcaatgctcaagcggtgagcataataaaaggaagtctttgtccggaagaataccggaaagtccaaggaagagaggatgctcatgacatttggaacattcttaaaatgtcacatgaaggagaccccaaagctaagagacatagaattgaagctttggaaagtgagcttgctagatatgactggactaagggtgagtcacttcaatcactctttgatcggttaatggtgttggtaaacaaaataagagtgcttggaagtgaagattggagtgactccaaggttactagactattcatgagagcatacaaagaaaaggacaagagtctagcaaggatgataagagacagtgatgactatgaggaaatgacgtctcaccaactatttgcaaagattcaacaacatgaatctgaagaatccccaatcaaggcaagagactctcatgccttgatctcaaatgaacaaggcacccccaagaagaacaaagaccacaaggtaaagaaagtggtcgagacatcaagtgatgaagatagctcaagtgatgaagacacagctatgttcatcaaaacattcaagaagtttgtaaggaaaaatgataagtttcaaaggaaaggaaagaagagggcatgctatgaatgtggccgaaccggtcatttcatagcggattgtcttaacaaaaaggaacaagaagcaaagaaggaatacaaaaaggacaagttcaaaaagggaggcaagaacaagggatatctcaagaagaagaaatatggtcaagcccatattggtgaagaatggaattccgatgaagag

SEQ ID NO: 159732 - DNA, 1217 bp, Zea Mays
gtccactaccatgtgggatcctttcaccagtgtctcccaaccacgccatgttccgtttcactggcacgtggggtcatgtcgccagaagcttcttcctcgggtcgttacgaacagaaagcacgtatccagggtgattcggttcaagctgcacaaaaccacctcaatctatccgagcgctccctgacccagagtataaaggctatgcgccgcaacctttccccctcatgaacccccgtcttgcacgaacaacgagaagtccttgtagctgccaccaccatccggagaggagagggtccatcgtcatagaagcatgtctctgctaccgttcagcgcataggatccggcctaggagcttcactacatcctcgaggcagtaatagtggtcgcgccaaggaggggtagcaaccggaagtctcagaattgctcgccggatcattgacctccgccgcggagccgcggagcacagtggacagcctcgtcgccatactcaccgccggtaagaagcatgccatcacattggtcttcctgttctctctctctcgagcaatgagtagattcaagtatcgagcgctgggagtatagttgggctccgtggcggcgggtgcggtagcgccgtcgtgcccttgaggcggggaaagaagaaagggttgtggtcgtcgtttcttgatcgacactctagattagaaggaaaatatctctttgcgttttaagatctgagccattgatcttggatcctgcggccgtgatcacgtatcccttcgtgacttaatatgaaccgtagatataggatctgatgaccgaagacttgcgcgggttataatgacctggcaattttgtttaacagtccctatgttattttgaattaaatccacagtcctacgctatacaagaatcatcaccaataggtcctaatgttttcaagttgaaccctgagctctttataaataataaccacaatcaggaatatataaaataaaatttaaaatgatttttagcacaaaaataattttaagaagattagaaatttcataacttcttcgttttaactccgaatttagtggttctcgaacctatggttttgtagtgacgggtagaatattgttgtgtggtttttttccatcttttgtgtaatattatttttatctattccttgtctatctgtatgtattgcagcgatagaaaggcaaggttacgaggaacctgaagatcaattggag

SEQ ID NO: 159733 - DNA, 766 bp, Zea Mays
cttaactctgattgtgttgttactcgaataatcgccgtttcaatatgtagttaattagcacgagcggttctagacggaggggttgactgaagcacgacgagatgcgcaacacaaaatcataaactagttttgactacattgctacgctaataaccaactgacagactgacaattaagtaaatagaacgaacatacgtcatgacaaaataacatgtttaacgtgtatacaccattattatgaagttaacgccacgcaaatagatcaaaacagatacaaaatgcgaaagctaatgcttagttaataatttcagatttcatgcgacggaacgacgcggaggcgaggcgcgggagctggtagacgtctaggggtagatgacgacgggtagacaatgttctcacctcggcgtgagatgggctcgacacaggtagctttgggcccgacgatgttgatgggcgcgatggtgatgatggggcacgacttcctgctcggcaatgggcccagggcaggcgaggactctggcgtgctacggtgtcgaggcttcggctaggcgacagtgaggcatgcacgctgcgtgacggcggctacgggatgcgctggacctcgcaccggggacggacgaggacacggcaagggacatgatgcgcgctagaagggagagagacgagagcaggaggggctcccgtgacacggacgtactcgaccatggcgaagagaaggaacaccggccgagtatcaaaggaagcgagaaccgacggcgtcgtcgac

SEQ ID NO: 159734 - DNA, 759 bp, Zea Mays
tgggggaagcgcgtaacacacgtggttgtttcgaagctcgatcttgtgggagaggctcatggtcgcctccaatgactgggggttgtggatctccacatcatggttgagtggacagaggaggccgacgatgaacatctagacatgttgcacttcatcgagacagcccacgcgcggtagcagggcctagaatgtgtcatggtactcttccacggtgctggatcagtgacaagccgctatcttgtcgagtggatttgatcggagaggaggcccatggcgtaggtggaggagctccttgaaatggagccacaaaggagtaccctcgtcttgctggacttggtagtaccatagctagacgtcgtccttaaggttgtacgatgccatcaagaccttctcctcctccatgattcactgttgatgaaaataagattcacaatgattgataaagatcaggggatctgacttgcaatctgtcggtgtttggactcgaggacctaactgactagtgatataatgttgcacatccaaaacctagatgggtgatgcaagatgacacaagtctttatcttggttcgggtaaaagatggccctacttccaacagaggagggatgggacttatattacctacacctaagtgcttgcagtagggaatacaagacgagtgggagagggaaggatcccaagtccgtggagttgattgagacaagtgccaataccgtggtagaggagaaaaaatgtgaagtgttcgcctgctaaagccg

SEQ ID NO: 159735 - DNA, 390 bp, Zea Mays
gcccgaattcggatttgagaatatataaagaggagtgtcgaataaggctgttgtctaacaaatttttttccccatccaaacagaagttcagttttcagtacgtgagtggtgctttgttgttaatgaactaatctacatttttaacgaaacgaaactgcagaatagatccagcgtccaaaactgccctggtgacgcaaacctaaatcacatcgtagcatgcaggcccattgccacagcagcactgttaacaagcagatgcacgttatatatatattcacctgtaccaattgcaatgtctgcacgtacgctaaccccgacaacccacctctattcacctctaatctcgtacgagcataccagagcactaatcaataatcccacagacaactc

SEQ ID NO: 159736 - DNA, 551 bp, Zea Mays
tggcgaagcatagtgttggtgagagctcgcgaagtggtaggcgccgtcggatggggctggagcgaacttgtcttcgtgtagatcggggtggccaacgtgacttgctgtcctcgtcgtttggtacgagtattggtgagggggatctgcggaatttgtttgagggtgaggaattgaaaatgatgttgtttaattatcgggaggcgggcattatcccgaaggttgagccgatgtagtatgtgtgatgccctcacttgtcgtgcgatagtacaggacacaattgtatatatttgtgcggtgggtcaggtgacccttcgctgtgtgtatgtaatatgcgacttgtattgtaatgtggaatgttgcccttcacgtgccagtgtgatgttgtaactgtcctgtggcacccttgggcgacttttgcgagttgtcttgtggaaaagacttcgtatcgcacattactgtgcttgtccggctgcacccttaggcgacttttgcatggagttgtcttttagtaaaagacttcgtatcgcgcacttgttgtgcttgtccggctg

SEQ ID NO: 159737 - DNA, 410 bp, Zea Mays
acttaatgtttcttaaccttttctcaacttaaactggacaacacacaagtcacttaaaacaccatattttagggggtctaacataaaggctttaacacctggcctaaaactccgtaagacttacactggctactgaaggacctacagcacccatgtgcatatgttatcggactgttcttcaattttagcaaggattgactcatgaacgctactcgcctccaataattattgggctgcgataactctcatataagacctctaatcgatcaacaagatatttatttatccaaagggaatggaatgcaataatttataaagctaagcatcgatctgtcatacaacaaaaatcatgacaacaccgacagatactatccactattcgttgaaaaattaaacttacttctcgcttg

SEQ ID NO: 159738 - DNA, 1261 bp, Zea Mays
gaagactgtgggtaacaagttggaccagttggaagcttcatgttcacgtcgaagactagcaagactgtgggtgaaaagtgtatgagttagtgccttgcacaaaaaatagatggggcagttggttgaagtcttggttttatgtaaaccttggcgaaggcggtgctgacttgccatggtcgcgcgaccggcagcatggtgccacatgctttctggctttccctgagttcgaagtcaaggaaagggatcaaggtgaggttgtgttgcgtcagacaagggttaaaagcagtggctaagacttagtggaggagtttattgcttataggttatggtcgttgagccatggctggccgtcggggaaatcatgtggcgattgatgccgtagaagagcgttattttgaaaagtgaagttgtggtgattagtccgcccttcactattgagcttggcgggcaggatggggtagccttcgttagcgaggtacaggcggaggccatcaagatcattggaaagtatgtcgggaagttggagtggtcagagtatggacatccgtgggggtaatattcgtttgaacaaagattttgagttcaatggtctggagtatgggccctatcccaaagatgggatgaggaagaggaggaagagactagtgccaagttaaaggggaaagaggtggcgaagggagcagtggggatggggtgcattgaaatgaaaagtgtcacccgctgatagtaagagaaagaagaaggcaaagaggctgaggtccctcgaccatgtggaggcgatgcctactacgcaagagaagagtttggccatcgggtcagctggcttcaccaaagacttggaggccacaagcctggcgaagctgtgtcgccttccagcctgtagacgacagggatgagggtggccacagttaccagggtgagtatcttaggggagaaataattcctagagctactagcgaagactttgaattgagtaggctagcttgatctcttgaaatttttccaaatggttgtaacattggggatgtttatcagcgctgatggaaaggaccggaaggtgtcttcaaagaactagaaggaggtgatccggattgtagtcccatggcaggcgatgaaagccatgattgtgaagacaggtgggtcgaagacgagcatccagagtactggggcaaggcaaaggcccataaaagcgggtgggtggagcctccgcccatgatagcgttgctaagaaggtgaaacaaacgcagcacagatggcagga

SEQ ID NO: 159739 - DNA, 951 bp, Zea Mays
cacatcgctacacaaaccaaaattattattatttaaccacacgcctagataagcatgatttcaaatcaaattgcccatattttaaatctcgacataagcttggctattggctaacgacttgactattttctaattaccaacatacaccaccttttgccatttttggatacttgcacgacacatagctattctaatacatcacaagtacattcaaccccatcaatagagcaccagcacatttccaaaaatttcccgagactacgacgacaaggcgtcgatcctaccacgcacataaaagcatcacaagcatatttacggaacctatcggttaacttgatcgacacactacacatgttcttcgcccttcaaaatttatcgcacaaccgaaatcatcccacttgctactgacaccaacaatgcttattgatctatcattcacaacacgaacatagttacacgccgcatactagtttctaacataatcctcacataactcgtaattcaactactcagtaacaataaatcacgcatgacaactaccacatcgaccggttaatttatttggacaccgcctgcctagcgtaccactagtatcccgcattttgactcgacttataaacatagagaaagtgatgactactttggcatgtcaccacctctctatttaagccaagtcaatttctacctacaacgaccgaacattcatgtcgagcataccttattttaccctgtctcgcatacaaccatattgtggcgtgcactcgagacgcatcgatcatcgtagcgtaaccactaatatatgaactccgacactcatgtcttaacaatacatcctccacacaatctagcattttctaaactactcgtcacatcaacaaatatatcccctatataatcacgaatcccatcacatggcataggatttgcacttcaatctctacttaattgcac

SEQ ID NO: 159740 - DNA, 290 bp, Zea Mays
ggcaggattggaggttgatgatgcttctcgtaatatgccacactctcctcgcaccaagggcatcatacaacactttgtaaggctggtgaagacacacacggaaggtcttgataatgacttgcaggtgacgaatgaaaagatggggcaattggaggccacacagatcgacacaaacaccaaacttgcaaatgtggaaatgacagttgctcatattgacaagagccttatcgcactcttgaggagatttgatgagatgcatgctaataccaatggtgggcatgatgagggcg

SEQ ID NO: 159741 - DNA, 821 bp, Zea Mays
agggaggaagaaaagggggagaatccaaggtgatttttgtgtttatctcttgttcatttgtgctgcaatccaattgattagatgttgcgtatgcgatttggtagaggggctgtccagtattttagggggtggacgaacagcaaacgttctagcagtttctggtcatttttcgtggtaaactaatgggaatcagtttgggaatcatgtagaactttgacatacctttctaacgagtatttatgcgctcaattcggagttataaattaaaagatatcgccgtttgaatccgggtatgtggctgtccaaaaaaacagattttcaggtggacgaacagcagcagtattagcagtttctggggatttttcgtgagtaattagtgttaatcagtatgagaatcatgtagggctttatcttacctttccaacaagtacttatgcgctcgattcgaaattatattctaaaagttatcgctgtttgaattcgggtatgtcgctgcccaaaagagaaaaaaacagattgcagggtttgtcttgtggaccgttttggggtaattagattttggaatttaataataaattgtatacaaaccttgtggggaattttatatagttgtctctggagtttttgtttgttaccactgctgtcttaattttaaagttatggaattgttaagcagcgccactgcagtttggtgggtgtggggagaattgttacccgtggctgggtttgagacttcgcgtaggtgcggtgttgttttttttgtcttattatgtgaaattggtgcactaagttgggtgtcaaaaacaggtggtggacttccg

SEQ ID NO: 159742 - DNA, 746 bp, Zea Mays
ctccacttaattattcaaaatctaaattaaataacaaattctagaaatagtattggactagagggtttcctatttttaactcaacatacagagcttagcaaaaattgtttggttgaatttgaacaaatatttctcaagttatgccttttacaagttctctgtagattttaaaattgaatttttaaataggttggagaaattccacttagcgctggggtccctgggttttctttccttctgctttcacaagttagtcctcagggcactattcacccgattcactgacattgcggatagccccttaggtttatgaactatccaacccccgctccctacttcatcggaacagtaacagaggcaaaaaaaagggacaacagggcttatcggcagcggtagagttccgacgaggtggtctgtgaggttggggagaatccgacgaacacgtcgacagttggattgtggcaagtggtcgtcggagttgctcggtccgcgtgtaggcggtggtgatcagcggcgactctgattccctatcaacagcggcggtagcgttcgattccaccggtgatgaagcttcttgagagtacgagggtgctacctgtgcaaggaattaggtgatggactgatggtgcagagtgggggctggccacgttcaccggtgctcgggtgaggttcggcaagcagcgatgcttcactagagggaagtagaggggaattgggctggccgaggaggttccctagggcttagg

SEQ ID NO: 159743 - DNA, 507 bp, Zea Mays
gagtagcatgcgaggaagaagaagaaaaaggaagacgaacatggcggcctaactggcacgcatgacaaagatgctcatcatgtgatctagtacatgggatagtggcactacgagtaagctgcatcaaggcatcgtgtccgaggtgaccaaggcgacgatgccaagtggtagaagacgtggtggcagcaaaaacagcagcagtggcaggtgacgaagacgaagaagaggtggcgtgcggaagccgaagggtgtagagggggccggtgctgtcacatctgaggagggggcgtcgagttgccgagtccttcatagtaagaccagaagagtcaaactcgacagaacaagaattatcaggagtaaaacggcgaatagaaagaagattgtggaccaaagaaggagcgacaagaacatcgggaatgcgaaaagagccgggagggccggcggcacccacagatgtgacaggaagacacgagccattcgccaccatgatggacgaagggagagagg

SEQ ID NO: 159744 - DNA, 508 bp, Zea Mays
ggaaggaaagggggagaacccaaggtgatttttgtgtttatctcttattcatttgtgctgcaatccaattgattagatgttgcgtgtgcgattgggtagaggggctgtctagaattttaggtggttgacgaacagcagtagttctagcagtttctgggcattttttgtggggaattaaggggaatcagtttgggaatcatgtagaactttggcatacctttccaacgagtatttatgagctcaattcggagttataaattaaaagatatcgccgtttgaatccgggtatgtggctgtcaaaaaaacagatttttcaggtggacgaacagcagcagtattagcagtttctggggaggtttcgtgagtaattagtgttaatcagtatgagaatcatgtagggctttgtcttacctttccaacaagtacttatgcgctcgattcggaattatattttaaaagtcatcgctgtttgaatccgggtatgtcgctgcccaaaagagaaaaaaac

SEQ ID NO: 159745 - DNA, 395 bp, Zea Mays
cgagagaaagccactcgagtggattctgcacctaggctaggactgtccgtcataaatgatcgaccgcattaaacacgtctacgccgggccatggcggggaagtcggtcctccttccacatatgatcgatgaacctaggccagaaccccactcatgacctatgaggttgtagacttgcgacccacttagggcctaccgaggctagacctgagtcccctagtggtctataagactcgcaacacgacgagccacgtcgaggttcaggctacgaaggccaggggtcagcgcaacaaaggaagggtaatgatgacgcctgagctcctcgccgcccacatgcagctagacttattaaagagcctagccagatagctcagacgatcaggacgaataccgacg

SEQ ID NO: 159746 - DNA, 423 bp, Zea Mays
gaaaaaaatcgggtcgtgccagatcgagcccgccgtggccttaggctcagggctggcagggctcgatagccaacatgccaggttgtatttatgccgggctaaaacggtatcgggttacgggcttatcggatggtccgacccgtttagacatctctaactgctatgttgccgtggagaacttggcttttaagaaatgaggtggtccatggtacaaagcttatgcttgtggctgtatctgtcagtttcctttagaattatgctacttctctgctccttagctgatatcagacaatggaaaaaggacctaaagggtaagcgaactatcctttttagtttctgaacaaagaagtggaagcacagtgtgtgcccagtcttttctaaaacttaaacataacgactaaccaaaataaaatggaattaaac

SEQ ID NO: 159747 - DNA, 597 bp, Zea Mays
gcggccaattcaagatcatgagttggataattcccctcatgcttcctcaactgccttgagccataagcaatcactctgccttcctgcatcaacacatagccaagacaatacgcgaagcatccgtataaactgtgaaacgcttaccgctctcaggcaaagctaggataggggcgtccaccaacttgctcttcaatgtctgataactgacctcacaatcgccggaccagacaaagggaactcccttctccaagaacctagtcaaaggcttagcaatgctggaaaatatttggcatgaagcgccgataataccaagcgagccccaagaaacttcggatttcagagacactagagggtctcttccactccaccacagccgcaacattcttgggatcaaccgcaataccctgctgattaatcatgtgccccaggaaagccacttcggatagccaaaaggcacacttcttcaacttgccatagaattgattcttccttagggcacccagaacgagacggagatgatgctcatgctcggtctcggtctttgaataaatcaaaatatcatccaggaacacgaccacaaagtcgtccaggaattca

SEQ ID NO: 159748 - DNA, 628 bp, Zea Mays
gcagaaataaatgtagtgtgcaggtttcaaaatttctccttattttgtgaagcatagagatcgccctaagatgagtgaccgtaagcatgtttatactaagttaagtggtcatgagcatgttgcaccgccttaagtcattgctgacttaagccgattgctccgttagtaggctatagtggtcaccccaagttaagtaagcgtgagcatgttgcaccgtcttaagtccctgccgacttaagtcgattgctccgttagtagggtatagtggtcaccctaagttaagtaagcgtgagcatgttgcaccgtcttaagtcactgccgacttaggccgattgctccattagtagggtatagtggtcaccttaagttaagtgagcgtgagcatgttgcaccatcttaagtcactgccgacttaggccgattgctccgttagtagggtatagtggtcaccttaagttaagtgagcgtgagcatgttgcaccatcttaagtcactaccgacttaagccgattgctctgttagtagggtatagtggtcaccctaagttaagtaagcgtgagcatgttgcaccgtcttaagtcattgccgacttaagccgattgctccgttagtagggtatagtggtcac

SEQ ID NO: 159749 - DNA, 448 bp, Zea Mays
cttgtatggacgaaagtgtcagacccctctgatgtggtccaatgtaggggaaaagacactggaagggcctgccttcgttaaggaggcagaagagaaagttgccctaatccgcaaaagactactcgaagctcagagtcgacagaagagttacacagacaacaggtggagagaactcaggtttgaggaaggagacttcgtctacctcaaggtctccccaatgcgtggagtcaaaagatttcaagtgaaagggaagctagctccacgattcgtcccccgtatcctataattggcagaataggacccgcagcctaccgccttgaattgccagaatccatgtcagatatccacaatgtgtttcacgtatcccagctccgcaaatgcctaaaagtgccagaaagtcacatcgaagaagaggcaattcagattcagaaggatctacagtaccgag

SEQ ID NO: 159750 - DNA, 755 bp, Zea Mays
catacccgcgagtagagaaatcatcccgtacccgccttcatatcgggtaaaacccatcgggtattcgggtttcgggtactcattgccatcggcctgtgttgtacatgtactcggcccagggaagccaccgtagccattgtcgaggtcgatcccctgtgaaataccttaggtacatgacgatgacgcggttagcggactccgtctgtccgtcggattgagggtggaaggcaaacggcatgtgcagcttggtgcccatcaatcgcatcaactcgcgccaaaacagcgaggtgaacaccgggtcgcgcttggagacaatggactacggcatgccgtgcaggcgcacgatgtcaatgaagaacgcctgggccatggtgtcgacggtgtatggatgcgccagggggatgaagtgacaatatttgctgaagcggtcaacgacggagaggatcaccgatttgccgttcacccacggcaaagcttccacgaaatcgaggccaatgttggcccagacctcggtaggtactggcagcggtaagaggagaccggtagggtggaggtgctctgttttggaccgctggcaagtgaggcattcccgcacccagtcctgcacacaccgacgcatattgggaaagtgaaagtcatggcgaaggcgatgcagtgtgcgctggaccccttcctgtctgtcgtcatgtatggccaccatgatttcctgcagcaacggtgacgacggcagtatgtatagccaaccatcgaaagtg

SEQ ID NO: 159751 - DNA, 305 bp, Zea Mays
ttcatcgtgaaatcccaaaacgagaatcaagggcttccaataacctagcctcatcagtgcacactgagctaggttgtgaatgtcttccattcacaggataatccatatcctctaggtgtccaccaacgctaagttggttaccaacgaatagttggtttgcatttactatctcaggaggtctagccttcagtagcttgcaagcatcttaatcctagaatttatgaccatacttctccccctcttatttacaacatcattgtaatagggagttgagtggtgttccatttaaccactctttctggcac

SEQ ID NO: 159752 - DNA, 309 bp, Zea Mays
cccatgttatgccctccgcccgtctctaatgttgtgcctttcttcctagtgttctgtgctcctctccctttgatatgttttatgctcccctaccttccttcgcccagccgcatctttgtccacctaatcccacctccacatcccactccacacccccctcaagcatggcaactcctcattccgcacctcttgtgccacttcccaccatcacatttgatggcaccaactttcgggagtggtccatcatgtttcacgtgtgcctcaccacagcataaggggtctccatttggagttcgagcaacttcgtac

SEQ ID NO: 159753 - DNA, 584 bp, Zea Mays
ggagtccttggatgaaggcttggattattttgttgcgttggatgcggctgcagcggagacttcgccgcgtgtggagggtgccggggatctgggtgtaggcagcgaagggtggtgggaaaacatagtgtgggtgaattttcgcgaagtggcaggcgccgtcgtatggggatggaacgtggtcgtcttctagtagaccgggttggtaaacgagaattgttgtcctcgccgattggggcgagcataggcgagggggaccttcgaaagctttttgagggtgaggaattgaggataatgttgtttaattacaaggagatgggtatcatccgaaggttgagctgatgtaatatgtgatgccctcgccgtgtgtatgtaatttgtatggtaatgtggcctatttgccgtattcgtacgcctgtgttggtccggctgcgcccgtgggcgaattttcgtggagtgtctttttaatgagagacttcgattaacgcgcttggtgagctattccggctgtacccttaggcgacttttgtgcggagtgtcttttaaataaaagacttcgattaatgcacttgttgtgctattccggc

SEQ ID NO: 159754 - DNA, 664 bp, Zea Mays
atgtaatggtaacgctaatgtaatcagctagcagtgctatctattaccatggaatagaaagcaccatttgtttggatgaggttggtaacgcactagcgtgggggagaggagtcgtgggagaggataacgacaggaagggagcgatatcagacatggtatccgattgcatgtaatgtgattacaatcctacacaaacaaacaggtgcagccgtattggttacctccccatattcagctcccgttacaaacatcgaaccaaacaccaccttatctcgaatgggtcgtgttggagaatacattgggatatgtagattgggagaaaattgctaacgtcatcactgctgtcaccaaatgtcatttgtatgaggtcatttgtcccattgtaatcacattcatagaaaatataaatcagtatccacgatagccaaatgacggatatcttgggacattccgctctctcatttggtcgagcacgtagcacgcgagctggaaggcgacgacctcatgaagtgggatgtcgcggtggagcgaggagtcacaattgatatggggacggtccactctctcatttggtcaagcacgtggcgcgcaagccagaaggcaacaacctctgggagagggatgccacaacgaagtgagaggaggtggtgtgggacgggagcgg

SEQ ID NO: 159755 - DNA, 537 bp, Zea Mays
cctgcatagcagtcgttgccgatgatgtgtccccttagttactccttgatttatgaaaggaaatctattcaggctcttgaaatcgttgattatagttactccttgattcattaaaggaagtctatttcttgaagcctttgatttgattgtaattctagaaggaaggtaaatggtttctttaaatgagtttctgtgtccgtattgtgagcaactgatgaatgcacatggatgatggactgtggtgcatttggtgtttcaggttgtgctaataggtgataggcacaatcttctaatttccattccggaggctgttctagtctgtcttttggaatggaacgttatggtaccaacctataccggtgtaccattctggattttataataatatatgagtatgcctatacatatatatacttgtgtgcacacaaaactttagtaataatcatgcttggattgagtacttcagattggtgaatagcagcggcagtgcgaaacaaccagttggcttcttgtattcctctagtttagtcgaatcaa

SEQ ID NO: 159756 - DNA, 429 bp, Zea Mays
attggtacatgcttgggaggaatgggtatggacgtatgaccgagctatgaagacaaacttcaaaatgcatgtttggtactagtactcaatgcctgacttaccagcgtatgggctattctgtgtctggtgtgttcacggtatgttcccatgcctagtttgcaaggaagctcttaggttcatttggttgaaaaagggtggcaaatatccatcgttcgataaacattgacaatttctccctcctaaccatccattccgcctagacatcaagaactttacgaaaggtgtcatagtgacagaccacccacctgcaatgatgactggtgccaaaattcgtcaaaagatagatgggctcgtggcaatccataaggtggttttgtgggatatggtgagcaacatatgttgacacataagtcaggcttgacttggctc

SEQ ID NO: 159757 - DNA, 916 bp, Zea Mays
cgggaccggtcgtgggtcgtttggtatggcctgcgtccgacccatgcttagtgtcagatcggggcgggttgatccgtgcctccccgtcgaacgcttcgagtcagagtttttcaggttgggccgggtttcgggtcaaaaacatgatctgtacccggcgtggattgttgcgggtcaaaaaactatgactcatgcatgcccgtcaattggtcaggtcatatttttttcgggtcggttgggtggctcatgctcaaatctaattctaatcatatcactagtgtcggtgtttcgaacctcgctctgacaagtaaatttattgtgcatgttcccggctccggatggtgtgtgtgatggacacaaaatttatattggttttggcagtacgtccctatttccagtcattgatgcttgcgctaccggcaccattgatgattaaaactcgtagtggagctcccaagtctcttatcggagtggaaatggagctaagagctacagagtggagtcctagctaagtcttgggactcttggcttggcagcaaggctccggcctttgagtcctcgtcggtgctcctcctcctattcgtcggttcgtctggggtccatcctgggtgcgtattcgaaagaactccccactttgcctaggggtcaacccctccattttataggccagaagagaggtcagccaacagtggtttccaaggaaggagccataaggcaagggtaaaaacaaacaccgggtagagccacacgtactcttgggccccgggattgcctaactgtcttgtatttactatgacgattggcgcagggctgtgtgggtcccaaataccattatttaggctatgccgacccctagccttcatagcctggggcggtaaggctcgatgtgttgcaccctgccatcggtctgcacatgcag

SEQ ID NO: 159758 - DNA, 704 bp, Zea Mays
cagtgaattggcccggcttcccttccggacaaccgtagaagactatcaggagaggttttgggaccttcttgcccacatagtgcccctcacctaggaacaaaaagtccagctattcactgcaggcctcctagaacgcatcaaaattgatgtcgagttgatggcaccatgggaccttaatcacacactaagtttggcgcgcgcatatgaacgacgttctcaagtgcttgatggcaacgtcatagcagcacccaccaagccagtgagaccgccccaacgaccatcagttccaatcccagcaacatagccaacagtgccagccataggcaatgcagcgccgcaacgaccattcaagaagctcacacctggagagatggcagaacaccgaaagctagggctttgttacaactgtgatgaacaatatgttcgtggccatcgatgcccccagttattctatttggaagtagctgacttcgaagaggatactgccatagaggaagttgatgaggagccagaaccagttatctctctacatgctctgacaggcatcagattagaggacaccatgcagattcaagtaaaaatgaaagacaaattgctcactgcattactggatacaggctccacacacaattttgtcaacctcaacactgccttgtcattgcaattggaagtctgctcaagccgaggtaaggtagttgtatcaa

SEQ ID NO: 159759 - DNA, 432 bp, Zea Mays
atattaccccttcataaaagagtgttgtttgaagacattgatgttgatgtatagctgcatccaaattcgatggtgtgaaatcgtagtgttgattgcatctatgacttgctttgagcttcattgcatgttgattcatgttggatatcaggctgtgtagtttccttagacaattagtccgaggtggaagttcttgtgttaattaagaccaataatggacccatgttttgaatggtggtgctacatggggtaccttggatgctttgcttggagtggtcgaattcgaggacgaattctttttaaggggggtagagtgtgatatcccaattttctgaaaagaagtaaaatttctttttctcttttctttcatgttctgtggcattggggtttggagtttcgggaggcattactcagggaaacattagatcttttggc

SEQ ID NO: 159760 - DNA, 520 bp, Zea Mays
aacctccacattaatgtggtagtcatacatcctcaataaagtaggattataaggaacaacccaacggttgtccaagtcatgcccccttactcgtactttttgtccgtcatctcttcttctgtaaatggggtacgagtctttgccctgaagcgttgtctcaccaaatagtcgtggatagtggcacttgcaactaccattcttcatacatgtattttgcatgttgagatgtccgcatgggccatgcatcatgtgtttgactaccatatcaaaaagttctgggaatctgttcttatctggaagttctgccgatataacagtgtcatactggtctggaacagttagcttattgcctgtctgcatgataagaaggaagtgtgcatgtggtagacctcttttttggaactcaatcacatagacatgtgatgccacgacaccaagtatgtgctttttgaagagttgatgcttcaaattgtctagtttagccttaaaaactcgcaccaccagatcaaaacggtcttgt

SEQ ID NO: 159761 - DNA, 407 bp, Zea Mays
atgatccagcaagaatctgcccatggctgctatgacaaacttgtagctgatttgtagctctccaactttgctgcagagcatggagtatgttaccatatagatttgtgagaaaatcgagcctaaatgttgactgttaggcgctctgaataagtgctcgccatggtacagtgactgaaacggatcagaacgccagcgcgactgtcctcaccgccgacgaccctccaccgtgattcgtgccgtcgtcgccgcgattggtgtttggatggtttggatagcgctcagggtcacacaaatatcaccgccgtggataactccgaccataaacaagtccgaccaccgtaccaagttgccacggccagtgcggataacttcgccggtgaaccgccgttgctcgatcttgcgccgcg

SEQ ID NO: 159762 - DNA, 605 bp, Zea Mays
tcaaaaactccctccctgggctggctgctgttggatagagagaggggccaccctatggctcgtgccatgtctcctggttggtcgatcttggaggggaaaaagtagtctcgtctctgcatataattgcatcgcgtagtacgcaaacatacttacatgtctgttcgttggtgtgggttacgttaggggcatgcatgtgatgtgatatgaaccagtatgcactgagatcggcatcggtagttagtactccgtagtgtgccaccgaacgaacgggatgagttgacatgccaccaggaatccaccgcgcatgtgtcctcctccaaccactcttctttctttcttcctgattctgatgacccataagccataatccagcaaccaaccttagctgttagcttcctagcctgcatatacgtacccaactaaccagagacgctctcttccgatcttacccgttggtagtacaactgcacgcttctcgtcagccgtcaggtcaacgcagccagcagtgcaactgtttgcaacattgcgtttcagtccatgccatgcaatatcttttgagtcccagctcaacaatctagtagtctaaccttttttccccccgttcc

SEQ ID NO: 159763 - DNA, 336 bp, Zea Mays
ggacgagcttgctatggaataattgtactagctagtacggcgatatgggacccttgatttaatttattggagccccaggtttggcattgccaaattaaaggtcaaaaagagcagcattttcttattagaattagcatgatcgagccggcctactttattgtggatagaacttagagctaaggatcgagttaataaagtctagaactaaggtcccgtcttgccaggaattgaatgtcgtgtaccagagcattagagttgaagaagccataaatcgacttcattgagggtgtcggtacaagcaccgcgtaatcacgaagatatactgtacagtgtttt

SEQ ID NO: 159764 - DNA, 839 bp, Zea Mays
catccttcaatgtcacataaaactataaatcccatcaattcctccacttgttctttgaacatggaatgagttccacaacttcacccatagtctttgtagtcctcggagtgaacgtaaatgaaccaaactgcataatcttaccaccaacaaccttcttctttagtagagacaatagttcttagcaaagacctcaactgagggctcacctccatatgtagtcgctgcacacataaactaccccaatgccaccatcacattgggtgtaagctggtgaagttggacttcgaaacgctgtaggacttcgacgacaaatcgatgcacaggcaagcaaagaccagtagtgaaaaatgcttcaaaaataaccaactccccgtctggctctaggacctcgtcggctcccagagcacgcccccacaccatccccaaaataccctaagcgttgcatctcatgcaggcggcccgaatagatcctcgatgtgtcgaattccactgtgtgccctaacaacaaatccacaatcatcactgaatcgctaaccatcttctccgaggacggcacgctcgatgacgcagtcgtggcggacgacaacaaggaagaacacgacattacgtactgtatgcggtggcgagcggtccacttcacatgggtcagttcaccagtggcgagaaacctccttggcgtgagcgacgcaagaaggtgtgcgacagttctttcaaatagaacgaacgagatttttgcgccggcgcgtgaaagttttcaccccacgtgcagcgtcggtctttataggcctgagaacaccttgagaaaccaaaggccccatagtaaaaacatcgcatccccc

SEQ ID NO: 159765 - DNA, 809 bp, Zea Mays
cttggatcgggatgctggtccttcggctcctgctgttgaggaagtgcccatgcctgaatttaccaatgctgaccccaatgggtgtgatccatctaacgctgaccccaatgggtgtgctgtctgtgttgctgatgaaaatgaggaggaggaagaagatgagatccctctgacttggaagaacagtcggtgctacgtagccagtggggaaagtagtggagttccttctcctgctctgtctgccctcattggtctacaagaattgtctctggctaactttgatcaaactcttgaagatatggttccagaggatctgttatcagagccggtggatggtgacgcgatggatgtttgtgctgatgtgttcgacgccgggttggggtcatcccgggcagcgtcccgcgcctcatcgaccttggagcgcggtcttgagggtcaggaaactgacttggattgtcctgctcccatggaagtgactgagggaccttcagccttagaggtggctgctgcagagaacttggccctcaaggatggtgttgacactcacccagcccccgagggtgttgccggggatgattctgttcgggtgggaagcgcaagctgcgacccagcccccgagggtattgccggagacgatccggctcgaatgggtagcgcaaactatgacccagcccccgagggtgtccgagcggggtctccctcttgtacttccatggatgttcacgtagggtctcctccacactctggttgcatggtggtagcccaagcctttggtcaaggattcgctttagaggctagcgtacctgacgaca

SEQ ID NO: 159766 - DNA, 285 bp, Zea Mays
gtggaggcttgcaggttttgctgactggatcaagagacagagaggggagaaatcaggtttgtctcactgccgcgcacagagagaagatcgtgggtttcacgtgtccaaggcacgcgtcgtcccgatgccatcttctgatatgaggtagaagggttagttagacacaattttgtcaatggggtcattaggaattgagctagggatcaaggtgaacacgctcggtctttggctcaagggctgaaattcagaattctgaatttcagaaatccctattgaaccctcact

SEQ ID NO: 159767 - DNA, 876 bp, Zea Mays
gctccgccctccccgcgcccgccgtggaccagcgagcgcggactcacgcacgtcaccgggatcctcggccacgtcgctctgcccatgccccagctcctttttgagccccacccatgcccgcactcactcccccgcctcatttcacgcagtcccgccctcgctcgtgctctgctcacgccaccagacctcaccgaagacctgtgtccgcctccccggccatctagctcgtcggagaccgcgccaagccaccccgagctccgcccgaggtgagacacctatacccatgctcagtttccctaatttcgctttgttgttggccaatttcggcttcgccggagttcagcagtggcggtctgccgcgcccgcacggtgactggtcaaattagcccagtccagtgccctcacattggtccctaaggtacccttccctttgctgaagctatcccaggccttagcgcgcctcaagccccctccacgtggctggaattcctcactggagttcctccgacccgcccgaggccttttccccaccattccccctctctgacctcagatccgtggtcttttccccgccactgagtttgccgtgtcgttctccccctctctgacccaccccggtgaccccggaaccaccttagcacgcgcctgccccaactccattgacttcaccatcgcgaggaggagcggcgccgcacacagccgttcaccctcccccaatctgatctcccccgtccgatcttgatcgcacgacatagatcgcgagataccgcttcgcgcacgcgcgccctgcacccctagcccgcctgtcaacgcctgtgtcgcctggcgctgggcccgatcggtcagtgcgctctccccctcggtcgctgacacccc

SEQ ID NO: 159768 - DNA, 620 bp, Zea Mays
gcaaaagccttttgcctcttcggcagatttgccttcgtcggagggctcataatttttggcaccatattatttcttcaacctttggctcttcggccttatcaaccttatcttcgactgccttgactgtatgcgtcttcggcattacggtcagctcttcggcgctttgtgtaatcgaagtagtctgtgttgcttcggctgctgaagtggaccctgtgccaaattcaggcaccacggccggttcaatgtaacgtgatcggtgggtcagaaccttcacctttttgctctttggcacaggctcagctggggtgaccgaagcagcaatcttcctctttttctcttgtcctcgcagtaggtagcgataatcttggtatacgaagccaatagcatcaagtaccctgtttaatcttttcttgccccaaccaccaaaggctgcggacagggcattatctttagccttggagtatgctccaagcagttcatcactggtagcttcgatgcacttcaaccagtcgtcgtttggctcatcaaatttctccctaaatctgaaggtatacttcagtcggaccaaaccaccctcacaagagtcggcagtggtctccttcggcatttcccagctttcc

SEQ ID NO: 159769 - DNA, 551 bp, Zea Mays
gtgagctgctgcttgtgtgactaatctgtcaactgcaacaaattcttgtgattaaacaagcatcaagctgagttgatcttgccccaggtccaaacattagcaaatagcttgagtaggagcgtcacatttatgagctgcaactggaagttcagaaattatttggaatctgggaaagaagtggtgttgtgagctccactaatctccttcaaagttaccaacccacttgcttttgtttttgtatttcaaatcagcctacagtggtacaggtctccgtggacttaatctaggtgttctccctggccgctgtagccagttgagaccaggacgccatggtggccatgatgcgcaatggctttgcgtgggtgctgtactgcctagtggctggctgcatcatgaacgtgagccccaaggagccactacagtggtcgagtttggttcatgtacgctgccgtgagctgtgccttggccaacatgaactacatctgcagctcatcccaacccaaggaagtttgatgaacatgatgtggctcaaggcagtgaatgaaatggag

SEQ ID NO: 159770 - DNA, 548 bp, Zea Mays
tttgctctacttcaagacctaaactcctaaaagtattgtataaatgaaaagaccaggatgcatagttagagccatcagaatcaagaagttctatagttacctcttgtgacgacatcgtcatctccgaacggcaaagcccatgactatcttggttgcttttggcattgtaggaggcacgaatttagtatagcatcttatgtgtgctttcatggctcgccccgtgagctgtggccaggatgggtggccatagggagggcacaagggcaatgaacacacggacggtgtagatgggcaaaaggttgtaggcagacacaccttctggctcgacaaacacatctacaaaaatggccaggagtagttgcaatacattgttggtggagggaaggcatatggtcgtgtggcacctagctcagtccatttgatatgatggtcaatctgccaaaatgccaaggagaggcaagagaagtcacggatgatgggcccaagcgagcgtagctagttttactcgacgaccactttgtatccctcgaaaacaatgcagagcagac

SEQ ID NO: 159771 - DNA, 557 bp, Zea Mays
ggtgaacttatctactctgcaagtcttagggatgaagagtcatgacttgcacatatggattgaacagattcttcgtgcgatggttcgaggctatgtccctgagcatgtctcactagtgcttttagagttgagttatttcttctactagctttgtgcaaaagagttatctcggaccatgattgcagacttggaaagattgacacccgtgttaatgtaagcttgagaagatatttccacccagcttcgtcaatcaaatgcatcatttgattcttcatctcccctatgaggcacgaatggggggcccgtgcagggacgttggtgctatccaatcgagagatgtctaaagactattcgaaagaaatgtagaaataaatgcaaaatcgaggctttcattgcaaatgcatacatcctagagaaggtgtcaaacttcacaacaacttactatggtgacaaactgccgagcgtgcataatccacccctcgttacaatgatgacgacaatgaatcgaacctcagcatatttcaaggccaactcggaagcgcaagtggctcgaccac

SEQ ID NO: 159772 - DNA, 549 bp, Zea Mays
ggaacaaaaggtaagattgttgtaagggaagaggaaaacaagaatagatgaaggtaagagggggagaagaaaagaggaacaactagctacttaatataatagacagattatgctagttgcataatccattatattaaacaagcagaaacatggtaaaacatgttaatattcagttaaacacaccactaaaaaatttcagtacatcttaactgcacaagcagttaacaagcagttaccaagcagatatatcttgtataaatttcagtacatcacaaataagcatttacttaactaaccataaaaaccagagagagacaactgatgaataaattaagcagatctgctcagacaattacactttaactacacaagcagttaacaagcagatatatcttgtataaatttcagtacatcacaaataagcatttacttaactaaccataaaaaccagagagagacgattgatgaataaattaagcagatctgctcagacaactacactttaactacacaagcagttaacaagcagatatatcttgtataaatttc

SEQ ID NO: 159773 - DNA, 452 bp, Zea Mays
ggcggcgagcggcgctgctcctctccgcggcggtgaagtcgccggagttgaggttggcgcaagctagggtggctccggggtcgccggagttgggtagagggtaagagggcgccacggcgaactcaatggcgggaagaggccatgaatccacgggcagagaggggagaacggtggtgagagagtcttgggcgggccggagaaactccggtgagcgattccggccacggggaggggacttaaggcgtgctaaggccttggctaacttcagcagaggcaggggcgacacagggaccgactccggtgaactagactgggctaaatcggccgaccaccgcgcgagcacagcggaccacagcgaccgagcaccggcgaaggtgaaattggcctagcacagggcacaatagaggaaattgggcacgaggacgggtgtctcacctcgtggcggagctcgg

SEQ ID NO: 159774 - DNA, 394 bp, Zea Mays
cggaattcctatgtctcatcgaagattgagaaatagcgactggcagggggttatagaccggtttgaaaagaggcttagtacttggaaggccaaatttctatcttcgggtggacggctagtcctacttaattctgtgttaagtagcctgcctatcttttatgatgtcgttctttgagataccgacagtcgtcttgaagaaattggatgctattcggtctagattcttttggcagggaggaggtagtaaaaggaagtataggctggccagatggaatatcgtttgtcaacccaaggagttagggggtttaggtgtctctaatctagctgtaaaaaacacaagcttactcagcaaatggctctttaaattactcaatgaggatgggatgtggcaaca

SEQ ID NO: 159775 - DNA, 468 bp, Zea Mays
gagttccgtgtctggtgttcgggggcgccgtgaattggtcgtcggggcgcagacgcacactcgcctccgctcttcgtcgcagccacctccattggtccacctccgcgccgccgccattggtccaaatccctgttgccgttcggagcacgagctcgacccggtgagcttcaccacgccaccaagtttctcctccgggtcttcgcgggcaaaacggtgaagggcgcgcggcgaactgctcgtcggatcttcaaggccgcgtctcaccgtgggcagggaatcccactgctccgatctcggtgagaattacttctttagattcgctatgttccccgattcgatttgcgctagtcggtcggcgagtgaggatcttgggtcgcgggaacgctatcgccggcaatggcctccgccgtggggtctggcggtgaggccgtcgggtcggccggagaatgggggcaaggatgttggccg

SEQ ID NO: 159776 - DNA, 843 bp, Zea Mays
gaaggaatggaccacctatgcaacgtggtcagtggatggcgctcactcgatagggcatggatgatcgctatctcccacattgtgatagcgaccgcacacatcttggacgtcgtgcaactagcgaggtagatggtgcagtgcacaagggtgaggaggtgaaaccttctccatggatttggaacctaaggtatggtcctatcgccttaacctagataggccactatcgaggcatgggagcacgcagttggcacgtcgtggctggattcagttttcttaggacgaagttgtactagctgagaggatctagggttaaccctcacaaaggctatgaatcatcgtagagttgcggagaagggcttacatggcatcgataggcctcacgatgtcgtcaatgctgaagttgagacatcagcgagcctgctaggatgaccgccacttggagaaaccttcatgtctggagctcacatcataatgatcctcacgcaaggctggttgagtgggtgcgttgaaggattgtgcccctaaggaccaagaaggcatggattatgacgcctctaaggcgtggcatactccagaaggatcatggactaaagtgtgacccacatgagcatcatcatgtgaccccaccagagtaccaggccatgtcctcttgttggaagcagtagaggataagactaagcaggactacacacaatgtgtgtcatgactcgcgatccgagttagttgagtaggtgtcaaaggtatacttctatgttgattagacaacgcgatgacaccatagttgtacaacacataaagagtaccaaatctaagaaagagacttccctacatgatgcattgatg

SEQ ID NO: 159777 - DNA, 535 bp, Zea Mays
attcatcggcgaagactgacaaacaccagaaccccatccaaagtgacgaaggagccaagaaattgcccctcgatacaaccctccccaaccatattgtgttaatcgacgaaggcctagccccgcaggaggaggccaacttactcgactgcgagcgtagaaataaagatatctttgcctggtcgtcatctgacctgattggagttagtcggagcatcattgaacacaagctgcatatcaacccctccgttcaccccaagaagcagcgactccgtagaatgtcagacgagaagaggatgcaaccaaggtcaaggtccagtggctccttgacacaaaattcattgaacaaatcgactaccctgccaagctcgcaaatgttgtcatggtaaaaaagaaaaatggcaagtgatgcatgtgcattgacttcaccagcttaatcaaagtctgccccaaagacgagttccggctccctcgcatcgataaaattgttgattctactgtaggctacgaggtcatgtccttccttcattgtttttcg

SEQ ID NO: 159778 - DNA, 1500 bp, Zea Mays
aaaaagtgcgcaacatcaccctaagggtgcaaagtctttactataaaacaaatccgagcaaaagccgcccaagggtgcagccggacatgcacaataagtgtgcgacatcaccctaagggtgcaaagtctttactacaagacatgtccgagcaaaagccgcctaagggtgcagccaaacatgcataataagcgcgaggaatcaccctaagagtgcgaagtctctactatctgaaacagccgaacaaaagctgcctaagggcgcagccgggtacgcgccagaagcgttcggtatcaccctgggaagcgaggtccccatcccatccaagtaccataccaacacgattacaaatcgagacaatcttacaataaacgtagcacacgttataccatcgtagtttacatacagaaagcaaaaggcccgtcggccacatcgcataaataatacaaatcatattatcgtcgtccctctctattgcgaagcgggggagggcagtgttttcactcactatcgcaacacgagagcgaggccaacaaacatgctacatcggctcagccttcggaataagacccgcctcccgataattaaacaacaacatctttaacgctttgccttcagacaaatttcgtaaatccccctccccgatacacgccccggacgttgaggatagtaaaccgcgttggccgccccgatctagtcaaagacgggatcgttccatacccatccgacgatgcctcccacttcgcgacatcccaccaacactatgcttcaacaccacctttcgccggcggtggtcttcggctatcacccaaaccgaggaagcaaactcgttcgcaatacagcctgtggcgaggactctgctgcggccaaatccaacgcagcaaaataatctaaatcttcatcagaatactcctcagtccacgaaaacgggctcccaaaatcatcctagaccgatgaccatgactcagttttagaaccagacacatttgcattaacgggcatcgcattcgtagctgccacaaaattagtatcgacatcaatgggggttgcttgcgtaggcccagacgtcggaacttgcacagcaaccgaccttcagtattcacaaaaagaaaccataaacccaacaaccctaacgtgaccccaccacctgcgaaggagtagctgctactgcagggtcctcgccgaccgaagcagtcactgctgcagggtctttgccggccggggtagtcgccgtcgaagggtcttcgccaaggctggcttgaggcgccgattgctgttcagccgccgtccccgcgtcctctgcctaggtaagtgagctttcaaggccaccgaagtcctcgacctcttcatcgttcagcatctacacaacacagcaaaaaaacctgctccaatgctcggtcggccctctcccgaacagtgtcgcggccgttgcgggccccacatcctatcgcaaagcgcctcgacggaccgctttaacgcctcatctcagacctggaagatcc

SEQ ID NO: 159779 - DNA, 361 bp, Zea Mays
cgtgttcctgtgttccacctgagaggagcgtgtagtaaaattattagggataaccgtcaccgtttgtttcctgtttttgtgtttcgatggcaggcgacgacgaagaagcaaggatccctacagacttcgatgaatgtgttagccgccaagatcttgaggcaaacaacaagctcctgaaggagcaaatggaggagacggtccacaagtcagtgcatgatgccttcattgacatgaaccttggcaagacttacgagaggctggatcgacgattgtaccagatcgtcgacagacttgctgtgttggagacgcaacaacaagcaccgccaccaccacctcctcgtccacgtcttcccaatgatgc

SEQ ID NO: 159780 - DNA, 617 bp, Zea Mays
caacgtgtttatctattcatttactttcttgccctaggagtagccagtaaagtagccttcttcgtctcaatcttcgcctctctttaactctacatcatcttaaggcatcttgggtggcatgtcgatcccaacacaaaccctgggatctgtcctccatgacaagatccctccggtggagcgagatccaggtactgttgacgaatgctgccaccctgcgcacacgcggaccgtctggctcgatatagagaaccccgctcctacttccaggttgtgaaccatccgtgctgccgcagagagcccgccaagcagaataacttctagtgtttggcatccaaatcagtgccaacatacttttatgcgacccattggggatcaaggtggttggatccattgaaccggtccctaatggtcggtcccaagtactactccgatatcagcaatatcattgagtcgactatggaggcactgtcggttgaagaacaacatcaattcgatgagtacacagagcaactgatcaaggaggccaggtcgaagtacttggccaatttcaaggtggacaagaaccagaaagtcgtccgtatacatgagattaacctggcgccactccgacctattgc

SEQ ID NO: 159781 - DNA, 587 bp, Zea Mays
agaagggttgataaaaccacacacaacaagaacaagcaccatacagataagagctgtttaattgatagttccaaaagtatcttacaaaaacgaaagttattacatccgccttcaagcggagccctagcctcatttctataggtacgagctactcgacatcagtagggtcgcgttggaagcgtgcgaccgctgtctccacgacatcttgtacgacctcccggacggcgtcttcagtatcggcaaccggaccaatgatcaccattggaggcgacgtcgaggccattaaagccaaagagatggaggcgcgaaagatggagccgcggctcagctcgcttccctcctcatggagttggagctagaccagttcatggaggtgtaccatgggatgctggtgaagctcacgcgaaagatagagccgcagctcagcttgcttttcacccccggaaggttgctgcacaagaccctttcgtccgaatgctggcggaagaagcgttgcccccacggacatctcgtagaggtagacgaccgcttgaaggatgaagcggggcatgaagtgcagaggttggaggccgagctcctccagcagc

SEQ ID NO: 159782 - DNA, 660 bp, Zea Mays
cctgactgcaggacccagatagatttggagccatagattgacagagtcggagtctgtaataatgcttacttcggtgtcttagtcttagtcagtcttagttagccttagtttgcttatcatatgttttgatgcttgtcgtgatgaacttgtaatgaagttggatctttgtaatgattgtcactaaggtgtgagcatcccctgcaacatggtgtagttacaattatttagttgggcaatccctttatttccacttttcccctttatctgagaagttgtgttgagagtcagtgaagatgatcaatagttcagtataatgaagatttccgtatatcttttcttgtgctgaaagactatagagtcagatttgatgtctgtgtgctttctatagatgtctgagaacagacgtagaggtgaaaggcgtgctcaacagaagcagcaggcaccctaggaggaggcagcctagcagcagttgccactgccaccccccgatgaccattgagaagatgttcctgatgcaaacccaagcagtccaagcaattggtgagactttagcagcaatgtagcaggtgcagcagcagcaaccccaacctcaacctcaggtgcaagttcagatgccacatgtgcccagagacaagcgggcataattcatgaggggccatc

SEQ ID NO: 159783 - DNA, 482 bp, Zea Mays
gcagtgagtgcctgctggagaatcgttgccagtcccgcctggtcgctaacaccagccggcacgatcgtaccactcgacgaaccgtgcccagccgtgttccctgttggcggctggggaaagcaggaaccgccaccatctgtctgcggtctctcttcacctcttccacctgctggcagatgagcaccacgaccttggcctggccacgcccaagttctccccctggactgatgccttccgcccccataaccagcacgtaattggttcgggccgctgtactggaagccttgacgcggcacacctcttccggctccaacaccactgcctcgacctccttgcgtcgcctgctgggactcatcgcgattctccatgcctggctccggaagcgccctgaccgaatccgcgtaagaacgaaaccctaaggcgcagtagtttgttttgggggcacgccgcaggtcgggaattggaagagctctatcgaaaag

SEQ ID NO: 159784 - DNA, 451 bp, Zea Mays
atggtggaatccttggtggacaatagcttgccgagtcgagagacttcatcctaagatgtccgcagctcgttgcgatgatggtccaagtcagacatggtaaagagatggctcctctccagaatggtcaaggaggtactagcatcacgatacatcctatatagattatcgcgagatgcaatgagtgctcgtttttcctcctgcaagcaagaacagcactgagcattgaagcaagagagcaaagcaggagcagccaagaaagtttacctcatgtgccatcttctcggagttaagttgtgcattcagagaggagttcaaggagcgagcaccatccaagaaagcagaagtttggattaagttagcctggctctgggaatacttctcttcaatgtcagagcaccgccgagccaaatctaataaagcagcaaaagaagagcgcaagattcagaatgag

SEQ ID NO: 159785 - DNA, 619 bp, Zea Mays
gtgccacgtgcctgagtacctccaccgcatcgtcgtaagccttagtgactctccgttgatcgccggaatgaccgcacggtagaggccacgaatccactgcgccagtgaaacttcccttcctccggccgccgtgcgtctcatccaaattcacggccaccgcccactaagcctataaattaagcccgccgcgagctccgtaagacagtgcagtatccagctaccacgaattagcctcgattgttcgccagagctcacgaattttggagtctccccaattcaggtttccgccaccgtgaaaccagtctcaccgcggctagcgtaatccaggtcagcccccgccttctgctccctcgtttgagcattctcataacttcgtgatgcttgccgaaccaccaaattggaccgagagctcaccaatcaccgggaacacgaacaaaggtccatggccatcactgtcctcgcgggcagagcttggcagatcgccaaccatgaaatttggttggggaaaatgaccggggagggttcaattcggtgttcgccgctcggcagcgccagtcgttgccctgttcggccggtctacgcgctcgccggaactctgtcgcgttcgccgtcgtcgagg

SEQ ID NO: 159786 - DNA, 414 bp, Zea Mays
gtgtgggtgcgataaccctagcgacagtaaagggtcaacgaacgtccgaggcggtggcggtgaatgagagggtccggatggagagagcccgtacctgcgaagacgaagacagggggagaggttccttcgcgacagggctgcggcgccgacgtgggtgcgtgaaccctagaaaagacgggaatgagacgcggcataggggaacagacggttgggatggaggagttcgcggatggaggtcggccgtacctgcgaagacgacggcggcggcgcgtgcttgggcgagtaccctagcgaagtggacagacttctatccgaagccaagtgaaggccgcttccagcccgtgcgcggggggcttcttaccgaagcgcgtcgggcagaagccgcgccaaaatctgagcgtttgcttccagctt

SEQ ID NO: 159787 - DNA, 592 bp, Zea Mays
tggaaaccgtagtcctgctctgaaaaacttttaaaaactaccacttcatcatctttcagtgtcagagtggtttcttccccagcaaagcgaatcagcttcctctcggcttgtccgaagtagcccagcttcatcatcatgggcatatcagcttcataaatagtagatttttcaaaatccatgtggctgggttttgacgggatcaaaactataatcctcctcttcttcatcagcgattccttcctcatcttgttcagtttcggcagcaggtgcaccttcttcaatggctccatttatcacaactagtctcgattgtctcattacttcggagatcgaagcagtctcggtggcttcggcctactctccatcatggtcaccctcgcagtcgagcgcactctggccatctgatattgaatttcttacagttcttacgatgttgatgttttttcaaagtgtttgacgaagctccctcttttgccgaagctaatccaaaatgatggcttgctcaaaaatgcagtgaaaaagctttggctatagttaaaattttcaacagcacaaaagtgcaatggcaatgaatgctgtgataacttcacac

SEQ ID NO: 159788 - DNA, 436 bp, Zea Mays
caggccatacatcgcatttccgtatatgctgatgatgttgtgttgttcctctggcccctaagatcagatctctctttggtcacatgtctccttgatatcttcgggcaatctactggtctcaggacaaacatcgctaagagttcagtcactccgattcagtgtggggaggaagaattggctgctatcttggagctcctgccttgtgaattaaaggaattcccgtgcaattatttgggactgcccctgacaatcagaaaaccatcaaaagccgagttgcagcctctcattgacaaggtatcaaacaagttactaggttggaaagcctctcatgagttgagcagtccggctcgtgatggtcaaggtggtcttatcatcaatccccatctactatatgctcgctttcgacctccctaaatgggttttcaaagctattgat

SEQ ID NO: 159789 - DNA, 439 bp, Zea Mays
ccgttgatctgggagttgacagtcacgattagatctggggattgggagatttcgcgccgttaatggcgcgatctgcggtccagattagagggagcgtatcaattgtgttgggatcacgagcgccgtccgattatgatccggtggtgagaatcggatcgggatttcattaaactgtgtccgtcggattgaaatccgagggctcacgcagcgtaccggttcgcgttttcagcagtttaatttggcgcgcccaagtctgatccaacggcctgggttcatccgtaccccatcgccgtggcaatctttgtaaagagacctcctgtttccactgaaacaacccgcagtccattggccactgttccctgagtctaggttatcttgcgcagagacccttgagctttctgagaattgatgcccagtccagaacctgtttaaaatgaat

SEQ ID NO: 159790 - DNA, 588 bp, Zea Mays
gcaagtgtttggtgtggttatagttcatactgcatactttgaaatgaaataatttgaacggaacggaccaaacgaatgaactaataatacattacaacaaaatggaattgaactaacaacacatgacagagtcgaatcgagggtaaaatacacataaatggatccggaaaaatccgcatgttgtgagggcgttatgatggccaccgaaccttacactaaaacacagtggggtcgtacattattctatttagagaggctcgataggggaactacagcaggcaatcaaatatttcaagaataaccccaatctccaccaaaaaattgtagacatagaggtaaggccagtatttgggaacgggtcaaaatggatttattactggtaaaaagtcgcttattttacctgaactgtttcactggaagaagagtgggggatgtgtgcggcgcagacgcaggacaccggagagacgccgcctatggacggcaaagtcggcagatcctcccagcgcttttatagaggagaccagatggattctgaaggtgggagatccggccgccaaggtttagcgaacagacgaagggtttccgcgc

SEQ ID NO: 159791 - DNA, 1183 bp, Zea Mays
ctccgggttgaagcaccaggctctgactacaaacgaagatagctcttgcttggacatagtatcagggtgcacttcagcgatcaaacaggaatcattcagtatactcttcaccgtagacagaaaccaagcatgttctgggatccctcttatctctatgtctaccagccctgacatgattgaagatgaggcatgtgaacatcgtgtccaacgcttgaaaatcagactaaatcgaggtcctctcaaaatcttgccaacattaagcacccttgttgtcgtagcttcgtcaggtagaaacagaagaaaatcttctggcttggtttgatgaatcttcatatcctcggtcttgatgttgaaactgtgagcaacttcctcgatcacctcagaatcagtcacagttggcctggttcccactattgtaacgaagagagccctcctgagatttgcctcttctcgtgccatgtcagcactgaactcaagaatacaggatgaccttgtcccccaacccatctctccctgatcaccaggcctcggatcaggggactggctaatcatcggagctatggcttcatcagacgaggtcagagacgcctgaccaggggcaacgataggcttctttgaacctttttcgtgcttcggccgtcttctctttcttttgttgcggaggcatctatgagactccccctcagcagccatcctaggggaatcctccatcttcgcaacaacctctggtgtgttgatcttaacccacaccaagcgtcgcctacgggggacagcacacgccgaggttgctgacgaggccccgcgctgcaccgagaggcgctgccacacagacccccttgcttgttgtttttccaatctctgccacactgtcttcttgctctgcacttctcgacggcctggacacctgacagcctgatgtccagtcttgaaacacttgaaacagcgcgtgggtcgacggcagacagcagcaaagtggtcggaggagaagcagttgaaacaccgaccccgaagatccacaggggactctcgacgaggccgatgatcacctcgacacctcctcttactctggaccacttgccaaccgtcgtcgtcacaccgaggggcagcccgccgactttgcacctccggttggatatcagtcaccaccttcacgcttggcgccaggggaggagccgcaggacgc

SEQ ID NO: 159792 - DNA, 471 bp, Zea Mays
atagccgctaagtttgtggaaaagcatggcatcccctctacacccctagctatccctttggtcacccgaaccccgggctcagacctcctgtgcaaactcaggtgctcccaagtcagaattctcttaagtggggtagtgttcctggcagacttaaccatcttgccatcccaaggaattgatgtaatcctagggatggattggctagccaagcacaagggtatcatcagctgcgcaagcaagactgttctcctcacagatcaccaaggaaaggaagtttcctgtcaagcccaaccgcccgcaaatgatccaatgatgtttaatctaacagcagagagcatgtctgtaatcaaggagtttgaggatgtatttccggaagagttacccggaatgccaccagaaagaggagtggagttctatatagatctcattcctggcactgcgcccatcgcaaagagaccataccgcatggcc

SEQ ID NO: 159793 - DNA, 280 bp, Zea Mays
gatgacgtggaggtggaaggtggtgttatgggaatgagaacatcagatgtggatgtagaagatgatggttcagatgttggaatggaaggaagacacaggaaagaagtacattctgtgggataatatgaggagtgagtagactggttgtgaaagaaggggcaattttcattgaaactcacatctctagaaattcgaatacgacgagtagaaggatcataacaacgatagcctttatgttcaggactgtatccaaggaatacacactctacagattgagcag

SEQ ID NO: 159794 - DNA, 843 bp, Zea Mays
gagggcgcggggcgcgctggccactggattgcagatcggtggctctgattccacgaaccgcgcgaaccgttatccgccaattcgggccgtcagatcagaactggatggttaggatgggtgccaggggctttgccttcttaggccggccaggggcagtgccatacgaacccacagtggcgcagctgccggagatgaggtagactgtggctcctagggcgctaggggtccgtctgggttgctagaaaggttggggaggacccgacgaatcctatggcagggtcgggagagcagaaaagggactgaggcaaccgggcagcgcagggcgagtcctcgacggaccgaggaatactccggcgagcaatcgcgcgcgactaagggtataccaggggaaattaggggcggggttagatcagttaccttgagaggaggctcagggaccctcgaacggcgtccggggcacggcgaggacacgggtggacggcggtagagctacgacggggcagagagcgaactagtgagcgtggaccgagaggaacagagggggaggggcgaaccgaggggtgtcccaggttgcgggtgacaaggccaagctcaccgaggcaatggacacggcgagggctcgatggctactgcagaacgggcacgagaccacgatgaacagcggcagagctccctgggtgcgcgcgcagagcgagagagagggcgagggtgcttggctgagggcgcaactgagagggggaggacgagtgagtgtgggcgggctccagaaaaggctcgggcgtgtgggggcatggccaggaaatgcctggtcgtgggcgcatccacggcggagagagcgggcgg

SEQ ID NO: 159795 - DNA, 850 bp, Zea Mays
agtatcaacatgcaacacatttgtaatcaaatgcttaagggtaatagctatcttaccaagactaatgacatctcgggcattatcaccaaatacaataatttcattaggtgatggcattggtgtgtaggaagtgaacatactcttatctccggtcatatgattagtacaaccgctgtcaagtacctagcttgacccactggaggagtattcctgcaaacataaatttagttgcttgatttaggtccctaaggtgagttggggcctaataggtcagtcacaatcaactttggaacccaaatttgccttttgactaaagatttaggttgcttaacaacatattttgcaacaactttaccaaggttgttgactctaaggatatagatagattcatgtttgtcatgagatgcatgagccttgaagagttgatctttgtccttagctatccacaactgttcaacttgcttctgggcaattttcttctgaggataacctttctttgtatgtgccaaagtttgatcagaaacagaaatggtgaccttccctttattggggcgcgacactgccgcgtgctattcaggtctaattgtgccattccgcttcttcctctcaaacactacacattcaactcccttatggtagaatctaccatttgatttgctttctttattgtacccaaggccatcctttatgagaggatgtcttcctttgatgaactttgtgccatttactttttctagcttctttcccttttcttcatacctatcattcatgcatcccttactgatgatagagtttagcctagctatctcatgtctcataacattgatgttagcgatatgcacactatgag

SEQ ID NO: 159796 - DNA, 522 bp, Zea Mays
tcaacataatagtttggaggtctctagtagttggattctaatgtaataacaaccatgttttatagtgcttgagagcggtatgtgaggtgtttcatacattaacgatatatggatgtttggccttaatggcattaacaaacgaggttgttgaattagatgattgttgtgcttagtgttctaacgtacttggtgaagtgttgtttaaagactagggagctgcatccaaatttgatgatgggaaatcctagtgttgattgcatctatgacaatgccttgggtttcattttatattattttatcattgttgtcaaggtgtattgttttctttgataaattagtctgagttagaggttgtttcaggaaaagctttttttcaagatggcatcaatgctactagtatattatatgagtctatttagggagtttgactgagttttaccgctggtgaatgtcttgatttgtagaaatggcagaattcgaggacagattcttttaaaaggggggggggtagaatgtaacgcc

SEQ ID NO: 159797 - DNA, 834 bp, Zea Mays
ggaagacattaaggaagtcatcatgcgccccatttggtcccgcttcggccttcggaggcggaagatagaaattgatgagacagttgaagcgtgtcagaggaccttcagcactgtttgctcctttattgggacaagagaattaattcaagaacatatagccttcagggtatggtcgcttgtagacagctgggaaatgccgaaggagaccaccaccgactctagcgaaagtggtctggtccagctgaagtataccttcagattcagggaaaagtttgatgagccaaacgatgactggctgaagtgtatcgaagctacaagtgatgaactgcttggagcatattccaaggcggaagataaaactttgtccgcagccttcggaggtcggggaaagaaaagactgaacagagtttttgatgccattggctttgtataccctgattaccgctacctgctgcggggtcaagggaaaaagaggaaaactgctgcttcgaccaccccagttgagcctgtgccgaagggcaaaaaggtgaaggttcttacccaccggccgcgttacattgaaccggccgtggtgcctgagtttggcgcagggacctcttctactaccaaaataaaaactgtcccaactacgcagggcactgaagagccggctataatgccgaaggtgcttacagtcaagctggttgaaacgaaggttgataaggctgaagagccaaaaattgaagaaataatgaagatgccagagattttgagccctccaacagaggcaacagtaccgaaggtacaaatgggttctgccgtatctcctaagaggagaaggatggcaaatgtgct

SEQ ID NO: 159798 - DNA, 283 bp, Zea Mays
cgtcttcctactacgaagactcgtgcatctacatcccgtgttgccctttttagcaccactccctcctatgaccatcttcatgtttttgggtgtgcgtgctaccccgacctttctagctctgctccccataagcttggtactctctctgcccaccgcgtcttccacgggtactctcctgatcacaaacggtacctttgtcttgacctcacccctcatcgtctcttgatctcccatcacgtcatctttgctgagatagatttccccttctcgactatcagcccac

SEQ ID NO: 159799 - DNA, 485 bp, Zea Mays
ctccgttagcagggcatagtggtcaccccgagttaagtaagaatgtaagtcaatcatgaacaaactgagtatctttgaagccctttttttattgatgacatatttccattttacagagtacatcgtcgtcccgatagctttcgaaatacagctagggataaaatttcctgaggtgttctatattccaagagttcccgacttctgtgctgtccatctgagtgagacgatatgatcctgaccgagtgacttctgctactacgaagggtacttcccataagggtgataacttgtgctgtccctcccccgttagaattcggcggaggacgagatctcctactgagaaggatcgttgccgcacggccttgtcgtgatagcgccttagagtctgttggtatcgtgctgattggattactgcattcaaccgttctttctcgagtacatcaatgtcctccatcctagtagcttcggcttcagctatgctttcg

SEQ ID NO: 159800 - DNA, 399 bp, Zea Mays
gcccgcactagcggtggtggccggccggggagtaaccaaagtggcaccagagccaacccctatacgacaaactagcctaaaacgaaggtaagatcgcagggaatactatgaacgaggtcttaccacctatcggcacgtcggtgtcgctggccacgacgagacgcggctccgccgcggacgcgaaactccaacgaggaatttcaccgaccaccactgctcctcccgcctaaatcctccacagtcacgacacacgtagccaggagagtcgcccagaccacacgcagaccccggaatggcggtgtaggcgcgcggcaacggcggtggctcccggtggtttcggcggcgatatttttggtggccaaggtaagcagagaaggaaggaaaggagggaggaggggg

SEQ ID NO: 159801 - DNA, 391 bp, Zea Mays
ctgttcctacctgaaatgtcttctgttgtttcgtatatgtatatgaatcgctttagtctttacaagtccatcttagctgaactcagggtaccatgtttttctcaaagacctctgtttacacattttttgatctgtacatgatttgtggatgtgcactgaatccatgatatagtaaaataactgaagtcccaagtgtctatttaagccattgatttctctttgttgagagctgacttttctacattcatgaatgctataatcatgtggattcagtagacaacgagttacttgattaggatccacttgattgtgattgagctgtctagtttatagatggttgggcaggatatggagttctttttattgaccagtgacagcacatgcttcctcc

SEQ ID NO: 159802 - DNA, 879 bp, Zea Mays
gcccgatcctcgacggcgagcagcacgacagagctccggcgagcctgcgtaccggctgattcatgcgaggaacggcgtccttcttcggcctaaaccagattcgggacctagtaaatgtttcccctaagttaatttcaggaacggctaaccaaatgtttctggccacggtgagcgcgcggatgaactaacaatctacacgttcccggtgattcatgggatcttagcttaattgggcgagttggtgagcatcaccagcacacagagatgctaaaacaagaacaaggatggtatgattaaacctgtggagaactggccacggtgagctcgacccagcggtgtttaagaacataattgggggaaacttgaaattggagctcacggttgcaagattgggagcgatactagacggtgtggtgcgtgatgaggttgcggagctaacggtgggctcaatttatagattccagggggcggtggcgcttgaattgatgatggcgcggtggcggccggagaggaaaagggctctggcgcatgacacagtggtctttcaccgtggcaggtgctccggtgatcaccgggcatgcaccgcatgattcaccatgacgggagccagtgctaaggcacgtggtgcgcaacggcgacagtacgatgacggtgagggttatccgagcgaccgacgaactgggggaaagtacggcatgcttagccgcaaccgagctcgagtggatcagacgccgagatctttactgggttgtgcttatccatggccacggtgcacgaatcacggcaagcaatcgatcaacggcgacgggccaccggcgacgagatcttttggcgctggcggtctgatcctcccgatagcactgtaccatggaggagttc

SEQ ID NO: 159803 - DNA, 462 bp, Zea Mays
tggctttccggtgcaagaaggcaggggcaaagaggatgccatcaatatcacttgtatgttcagcgatgagaacccaaacgcatgcagcatagcgtaagatccatgtgtttgcaatctgctcaaggaattcctttctgcatgattgatgccaaagaaggttgcatagctgctggctagtgccgagggggacagatcatcatgtaggctttagcctacgtacagcggctagtgtgtagctgctgtaataaggcttgggttgatgtaattaaaagggtgagaaaggtaacagaatgggaacaataagatgcttaacttgtgcacatagtcactgtgggagacgattttcctggcaatcgccacggttttcactacgcccttcatgcttctctagtcctgtctcagagaatctataaagttgtggtcctttgtgtgtttacaaggaagtggcacaggtgctccggt

SEQ ID NO: 159804 - DNA, 546 bp, Zea Mays
ctcgtacaaccacacttgtagctaccaaagtctagtacaatattaccaatggttgccacttactaatgaggccttgttggttgtcttcagtacttgctgcatactaggtcggacatcgtctttgtcattggttatgtcagtcggtttatggagaaccccacaaccgaacacctcaaacacgacaaagtagatcctatgctacattttatcaagcacctcaacatgatgaagtggatcctatgctacatcattggcataatttactattgctgctactacaactacaaaagcggtggaaggagctaacgctactcggatacaatgacactgatatgggtggtgacattgatacaaggaagagcaccacaaacacgttcttcctcaactcctgtcctgtgactttgcagccctataagcaaaaggttgtgtgttattgtcctgcgaagtggagtatattgtagggacgatagcaacatgtcatggtgtatgattggcacgactcatgtagagctaaagagcgagcaacacacaacttctctcttaaag

SEQ ID NO: 159805 - DNA, 706 bp, Zea Mays
cctcaaataccagaaagagcaggggccctggtgcaattaatcctaagacacagttgacccacaagctagactgcgggttatttcttctactttccaggggggtctttaggaagtgttatcggcgaagggggtatctagcatccagggttgttggatcaccaaccgaaggttaggattagatcttttactgtaatgaaacggtacgccataatggccgcaggatccggaacgcgcggcccagatcaacactcgatgtgaatcatccgatccccaatctaattccagatccgcgcacgcaccggtatgagctagatctaacactggtcatccgttgaagatcgaacggccaacagtgtttcttccagcccccaacagagcccagtgctccacgccgcagactgacggcgcacgcgctgcccatggtggaagaacactggagcaaaacttgcccggccacaactccatgccggcaaccacccgcgtactagcctacccacggccacgccatggccggtgtatgaccaccgattcccaagatcccgaacaccatccggaggtatgctaaatgaagcagagaaaaggggaacggaatgggagatacctcaccgcgtgttaacgcaacaaggtgccctgacgacgatgagaagcggatccgcgacactccaagccccgatgacaaatcccgcaagctccaccgagcttcaag

SEQ ID NO: 159806 - DNA, 740 bp, Zea Mays
ctagttttttttaagttcttatttagaaaaccatatttaaacaattataataaccataatgtaaattcaaattttgggaccagaaagactactgaaaagaactatttattacgtaattgaaaagctactgaagcagtaattattctaattggatcacaaatgttcgctttatttacactagaaaattctaacgcagagacatatgcacgattattcattgattaaaagtgtagcaagtaaagttccatgttttcttcacggcacaagagcagggtagagctgaccttcaatggcggggctccggattgcggctaggaaggggaaaacgaaagcgtcgatagggaatcaagggatgtgctctatgcgagctgagcacacaggcagcaggcaaggcacgacgatgagtgacggcacaggcagagtcacacgaagcagcgaatctggggcagcgagagagagataggcgagaagggctggcgagatgcggtttgatttatagtccgggaagggagtaacagacgccagtatgagagtaataggggaggataaattctcaccgtcaatgggcggaagtaacggtcggcgctaatggacattaaagatgggagagagtgcgacggcattagtgaggagcggtcaagctgatcgcggcgatgctccgactgggcagcgctgagaggcggcaaccggtgcagtatcgcggggcaagtcagcggcggcgcgctgcgacgcagcgagca

SEQ ID NO: 159807 - DNA, 1002 bp, Zea Mays
tcgtagggttgctcggtagagggctggtcggcgagtggattgttaagaagttttgggcctacttcgggcacccaagtccaaggtacccaacatatgtcgtattctaatttactcacaaaagaatctagtttaaactcatacatttgcagaaggcccaaactagggttgtcctgagcctaatcaacgtttatatgcgagggcatagaggtagaaacaaccaaaacccaaagtgactagttagtagttctgaagattaatattttcttgtcatataattgtatattatatgtgtcatgaaccttagtttcattgcacgggatttacgggtaggagatggttagaaaggatgacaaagactatgattgcgaggagcccctaccatcgacaatgtagttgtgcattctattgggcggaaaggtccacgaacgataagatattgtatcgtatgaatttctaatggtgcattcaatacgattgaaactatgactgaatagctaactttctaatttataaggtactccatgttcaacggtgtgattgattcgacggagttgcgctctcatcgaggctctttgttgcaccctgctagtggtagcagccatggtcgtcgtacgagctaggtcatggagatggagccagctatgatggagtgcgaagaaatgtttcatgaagagatctgatagtagcaagaagcattcgcccaacaacaagagtacatggacacttatagcgcacaggggcaacaagcacttttggtgaatttccttgcaaaatggcagatacctgctccaacacctccttcggctcaggtgcattgaaaagtttctatatttgaacttccttgcaaaatatttttgaattttgtcaggttgatctatactaagactttctatatagttgtatttagtctacacttggtcgtggtagttcaatttagttcaggtttggtatttctatctaacccttttgaattctagcttaacttgctatgaactagatatt

SEQ ID NO: 159808 - DNA, 467 bp, Zea Mays
ttctgcctggacaatttagtgaaccctaggaacgacggctgcaaaggatagggtttggctacgtcgaccgagtttatagaggtgggcgaggggtaacgtgggttggcttcctgcagaattcggcggcgggttcacggggttgttgccgaggttctcggccggtttcccccgatccgcggcgacgccgttgtgggaagaagtcgcccagccaacgcggtcccgcgcgccagtgacagcggagaggtagtgagcgggtgaaagtctgctagtggggccagcggatcagtggtcgcagcgagaagcgagatccccaaggtggctgtccggtgggtcctttgtgtcggcaccatcatgcggacgccagttgtgggcggagcacgccaaatggtgaactgggccacgcgggagaaatgggcccgagtgtggtgatttggcccaagcggcgttttcccattttcctttctttt

SEQ ID NO: 159809 - DNA, 967 bp, Zea Mays
atttttctgctaagctttatgtaattagattgatcttacatggctagatgtgtatcacttgctcggttgctacattccacaccatgtgtctacgacatgtgcatacaacaacttgagatactgatacacattcaacacccctaccttacatgttttagttgcattatttgttttggatggacttttttggaggtcttgatacgtgtccgcatgcataatcattggcttgtagctatggatgttcctatggttgtcgacatgatatgtactgtacattggatctagaatgttcatatgaatgtcttatcgtttatctagccctaggtttggttaatagtgtgggtaatcctagcgcctttttggctcgtctctacacccttggttttgcgtgtggcatgtcttgatctaggaccaataattgtttaaatcatgctttacgtaggtttatttcctttttggttgctttctatgcatgtttatgctcatttaattgtttcttactgactcagaatagatgacaaccagctcaagggagccgattagtgcaactagacaggtcgatccatatgaccaggtcatttggcattttgttgttgtgcgtctatagtgtgattcactgatcaccgcacatattccctgaccgataggttaatctaggtggaagacttggaacttagttgtctctagcacttaaagatggtcaaagctgcatgcaggagagacgattgcaatagtagcatatctcttggctccatgtgtatcgattgcccacggatttctcatgatgacatatttgtggcatgcccgatgggaccaatacaattggctcatcatcaacatgccccgagtagggaaagaaattcttggaactagcaaaagggagcttctttgccgagtgcctgcctacatggcaattggaaaagggagcacctatgggcccctttgctagtctctttgccgagtgcca

SEQ ID NO: 159810 - DNA, 1762 bp, Zea Mays
gaagacccgacgtggacatccatggaggtatgagaaggggagcccgctcggacacccttgggggctgggttgtagcttgcgctacccacccgagctggatcattaccggcaacaccctcgagggctaggcaaccgccagcaccacccttgaggactgggttctctgcaacagccacctctaaggctgaaggattctcagtcacctccatgggaattgagcgaccttgaccaacctcttagctccgaagacctccttccaaggtcgataatgcacgagacgctgcccgggatacctctaatcccacatctggagtgtcagagcagacatccatcatatcaccatcagttggctctaacagcagatcttcaggaacaacatcctcgagagcctgatcaaaattttctatggataattcttgcagaccaacaagagcaaacagagctggagaaggaatatcgctactcccccattgactctataacgctgactgttcttccgaattaatgggacttcctcttcttcttcttcgtcctcgtcaacaatacgaacaataaacggtacagggtcacacccattgggatcagctctggcagggtcacacccattgggatcagcatcagcagggtcacacccattgggatcagctctggcagggtcacacccattgggatcagcatcagcagggtcacacccattgggatcaacgtcaacagggtcacacccattaggatcagcatcagcagggtcacacccattgggatcagcgtcaacagggtcacacccattgggatcagcatcagcagggtcacacccattgggatcagctccagtaaagagttccaccggtacttctttagcagcaggagcagaagagccaacatcctggtccaaacacgacactcgccgaagccgtctctttttcttcccctcggcaggtgcagttggatgactgacctggcggagacgtttcgggcgagtaccctcaggccttcgaatatccacgattttttcaagctctgggatagtcgcaagagacattgtttcagaagggaccgagtcagaagaatccccagccaacatgtccagcatagcacttatctctgcatcacttggactggtaggcatttcaaagtgaccttgcctctcatcattgggaagatcaccaagtgaagcaaccaggacctcaatgtctttgggagagggtcgcactctaagacccaaaccactatccccagcaggaggattggacacaaaattgaaaaaggacatagaagctggcagattccaagcagaatatgcaacaggagcaccaatgtttgatactttgcctctcaggatcatctccagtcggctcaccaaatccacagcaggaatcctcttgttggtaacccgggttgagtcggtgacaccactatacaaataagccaggtatgctctgttcttcagtggctgaatattcttaaaaacaaagtctgcaatcacagcttcagtggtcagacctctctccttcaacaaacaaatttcagcaagcagaaccttggcttctgttatctccaagtctgtaggagactcaatccaacttggattacgaacatccggctgtctccctgaccgaggggggagggacttgccatggttttccataatgaaccaatccaaacaccatcctttaatgctatccttgagtgggatatcaaggtattctgttttcctcccatggcgcatctccagactcgcactgcccacgagctggtgctgtcc

SEQ ID NO: 159811 - DNA, 467 bp, Zea Mays
gggagaccatggtgaacagtgagctagtgatagtaggctattgactaggtgatgggctaacaatgacagcgacacgagcgactgggcagcaggctagcgacagtgggcttatgattaggtgacgggctggtggcgatgattgggcgacatcaatgctagggcgagcgttgagcaggggttggacgttgtagacgtgtggttggtgtcttcttttgtctgcctatgtttcagttggtgtgggttgtggtctaagatgatggcctataccgtgtgggttagtggatgttatgtcgtggtgatgtttatctattttggcctcatataccttatacttttttattttatagtatatacgaaaggtaggtataaagagtttcaaaaattgaggtggggctatgggccaccttgcccacattgtggatcctcccctgcttgcatgcaacataataagagtctgagtattcaat

SEQ ID NO: 159812 - DNA, 536 bp, Zea Mays
aaaaaagaaagaatatttcctctgcaaaggagactacttcagccgctcctagtgagccggcgccgaagaggaaaagggtaaaggttctcacacaccggccacattatattgaactggccacagtgcctgagttcgccggtgagacctcttcggccaccgaagctaaagaatcaactctgctgccagaaatcgaagagttggccgaagagccagcaacagaaaagacggaagaaccaaggactgaggaagcaaaaacatcagaagttttaagtccttcagcaaagattgagacaggaaaaagccagaagggtccaatagtgaccccaaaaagaaaaaggacagttaatgtgttagatgttttggagacaattaaatcttcaagcataactccaaagaaaactgttgaactttctgaagtgtctactgaagcctttgttgctaaagcttcgaagcaacaacttgaagctgaagctgggccctcagagcccaccaaggaacaacctttggaaaccgaagaaacaaaagttacaaaggca

SEQ ID NO: 159813 - DNA, 756 bp, Zea Mays
cagacatagatacaggcatacatggataccctgtctttagtttttcaggttaggtgcactgtacaggatgtttgcgcaggcggtctttcagggatgcaccaatctgaatatccctgccagcacttcatcccaatcttcattcgatcccagcttggccatggcaaggagagtaaatatcaaggatagatatttcagccttttctgaatcttcaacagataattggtccccctttcttcagtcagccctttctccatagtttgattaagaactggccaatcaccagtaacagagcttgtcattggtccaaggtctatcaagtctctgtagaatccatagacccaaacctcctacattacagtttatggcatccaaaggctgactgcaaaagctggttaccatttctgtttgcctgaaccaattttcagttgttcaccccattgccttctttctggcaggggtagtagactgaatccgacgctccaaaatgtttggaggatcagacactccaaaatgaatcatagactgaatccgacactccaaaatgtttcgaggtattaacatgcaatacccgggaactcatattataagacattggtgcatatttctgttctcaggctctgtatacgctttagagtcagtgtgcttgcatctttctcataggttctattgccgctcttgttgccttctttctcttagagacatagctgcattaccttcccttccatatgatcctgttgtggtcatgtgtcacttcc

SEQ ID NO: 159814 - DNA, 456 bp, Zea Mays
cactggtcgactcggttgaacatgatagcatgctcggaccatcgatacggggctggggaactgttggttgccaccaggacctgccaatcggtgagcttttgttgccttttgttctcctgggacccatggcctccaaagatgacattgacctctccgtcaatgcgtgggaagtctccaccactgcccccaccctgctgcaacggctgatcttgcttgacaggttcttctcgtggtgggggaggcgacaacggctggaatgatcgatcatggctgatagaattcttgaagtcccaacagttgcgctgtatgtggaacatctctttgtggtacagacactaagagtggaggatctcatccattgttcttacattgccacgcggcgcgccgggcggccgagtcgctggcggcccaacgacatgcagttcttccctaggccttttatctcagtgcttgtct

SEQ ID NO: 159815 - DNA, 741 bp, Zea Mays
ggtatcccaaatctgaatattatatcttgtataaactccaccgctttggctgaggtcagggaagcgattggcttgtactctatccactttgtgaatttgtcaatggcaaccagcacatgagtatagcctccctgagccttcttgaagggtccgatcatgtccagccctcagcacacaaatggccatgttatggggatggtctgctattgctgtgccgataaatgttgttgttttgacaagaattgacaagcttcgcatctctggactaactcggcagcctcactattcgctgttggccagtagaaactagatctgaaaactttcccaaccagagttctggatgcaacatgtactccacattgcccaacgtggatttcctccaatagttgcttcccaatagtcgagtgaatgcacttcatgaggactcctgtcgcacctcttctgtatagtgtgtcccctatgagggtgtagtgggctggctgtcttgcaatgcgtttcgctgctgctttatcatccggctcttcttcattctttatgtatctgatgatgggctccctctagtcattggggtccgacttaggttggctcagggtgttgcattcttccgcttgatctaagagaatactcgggcgtgatacttcttggacaaagatcccgggtgggacctgggcctcaccggaccccagctttgacaacgcgtctaccgctacgttgtgctctcgttccacgtgatggaactcc

SEQ ID NO: 159816 - DNA, 367 bp, Zea Mays
tcagtcacggagagggtgagaggactgggtcctgagttaactgtacgtagttgctgttgctgaccatgtatacgagtgtttcaacatcaaacgcaagccttccttctagaacactactccaagagcctttcttccatgggggcgtcaagcaatggcaaacaggcgagccgccagggaccaacgacggggactggggaggcagaagtcataggccgtagccgaccttgcgtggcagcaattggcatgcatttctgcgacaccctggttgccaaggatggtcatggtcaagcccgcctgttccgatgctgtgccgccatgccgccctcgcctgccacgccaaggcgaatttccgacaggacactcccca

SEQ ID NO: 159817 - DNA, 846 bp, Zea Mays
aggaagaatctgttcaacccatatgtggaagtcatgactcttcatccctaggactcgcatagtagataagttcacccccctactcaggttagctacatacccatcagggaacatcaacatcttgatccactgaagtacttccttcctctgggccctgcttaggacgaaatcggcattaggccttctccacgtattttcgccacttggcggcttcatctctaggtttggtctatcacataacactgccagatccactcttgcctttacgttatcctttgacttatcaggaatgtccataattgttgcccacagtgcctcatcaacattcttttcattgtgcatcacgtcaatgttgtgtggaaggagcaggtcatcataataggggagccgagttaagccagacttatgtgtccacatatgctactcaccatatcccacaaaaccaccttctgtattggccacgagcccatctatttgttgacgaatttcggcaccagtcatcattgcaggtgggcggtctatcactacgacacctttcataaagttcttgatgtataggcggaatgggtggtcaggagggagaaattgtcgatgtttatcgaaggacgaatatttgccatcctttttcaaccaaatgaacctgagagcttccttgcaaagttggcatgggaatttaccgtgaacacaccaggcgtagaatagcccatacgccggtaagtcatgcatggagtactggtaccaaacatacattctgaagtttgtcttcgtacctcggtcatacgtccataccccttcctcccaggcacgtaccaattcatcgatcaaaggctccatgtacatgcccat

SEQ ID NO: 159818 - DNA, 295 bp, Zea Mays
cgctctatatgatgatacctgtatcatgatgattttcttgagtgtttgtaataatgtcttctttatactttaaacagtctggtatatatgattagggttcatactgtatcccgccgctcttccagtaccgtcacttacctgttgtagactccccgtagttgtcgccttttccccgcatgtggctgtgttgggataggttccagatttgtggattagagtgtcggtgtcccttttattccttttcttgatttcaattcttttggatcgactgtgttgggataggttccagattctg

SEQ ID NO: 159819 - DNA, 1094 bp, Zea Mays
tgttgaacgtgcatatcgtcgttagttagttaaaaaaaatagtataaattcgttctaggtcaatttgttttggctaaattcgccactcaagcgcaattttttaagcaaaaaagctaatacgtcgttcgtgcacgtacgtaccaacaaaaacaccccgtcaattttgatgaccgcaactatacgaaagacagatgagagaaatttacagggacatgaactcctgcgctaaatataattaaatcagactcattagctaaaaggtagataccattttagagtggctctttgtatgtcaccgtcggtggttgtttgttctcgtgcattaaataactcatttctctgttatgccagtgagctgactgtgtgtgcgatgtccctagatcacaacaacaaagcataccagatgaatccttaatcaaagtttaagctagaccttggttccaggtgcggtgcctacagagatggagagaacaaatacgatctccatcttcttatcttgctgctgatatcgacaatatttacatgaagagaagacagaacaagtgatgggtcgaggaaattgaaaattatcctgtccggccaagaacagacgcaaaggttcgctgtgcaatctctctttcagttgggtacatcattcacatcaaacgtgtactactgatcccccccccccccccccccccctctaaaaacatacgctatgttatactactgctatataatattaaaaacccagccaattgcgcgcgcgccactgcagacgacggacaaagaatcgagtgagtttaccaaagcatgtcggccaaagaggaatcggaacgacgaaggggccggatggagagacctttcagcttggcacccgtcggcgatcagtagctgcggtacacgacgtacgagttccggcgaggcgggcgtacgtggcagagcattagaagcaccagggcaatcatcatcgccagcaggaaccccttggggtcgaggccgccgccggcgtcaactccgccctcgtcgccgccgccgccgttgcaccctatgcagcagcacgatcccgatcccatggcgcggtgggcgaaacctgacacgcctcttctatggag

SEQ ID NO: 159820 - DNA, 271 bp, Zea Mays
ttatggtctaaaaacgccttgccgacatttgtgtgggcgatgagtaagactttcggggacctgatcagggacagagtagaggtatacgtcgatgacatcgtggtcaagactaagagagggtcgaccctagtggaagacttaaccctggtcttcgacaagctatgggcaacacgcacgaagctgaacccggacaagtgcgtctttggtgtctccgcaggaaagttgctggggttcctggtttcgcactggggcattgaggcaaaccaagaga

SEQ ID NO: 159821 - DNA, 592 bp, Zea Mays
ccagggaactacaggggcctctgcgcaagttgtttcaagactcagaatactatttgtagtactgcgggttgattctagaaaaacacagggactcttaagcaagtttccagggccgaaggggtatcggatgcgcacagccgttcagattacaaccaacggcctggattttatagcaagctacacgttacgcatgcgctcggatcacgatcctgtgatccacagagcgccacgttcacaccatatcccaatcgttcccctacggatctacggtcacgatcagttcacgcgactgatgactctatgagttgatctggtccgctcgttcggatcgaatggcacagatccacccacagaacaagtgcccacacattcaaatccgagccatccctctgagatccaatggcaccgggcacgtcacctttcccagctacccagccgacccaaactacggcggcgcgcgagtataaacgcggtggcgccatggtcagctacccccccccaagctaggccccactgcccgaatccccaatcctacagacgctacacgtatataggctgattgcgaactcgagggaggtacataccattgaca

SEQ ID NO: 159822 - DNA, 541 bp, Zea Mays
cttgaaaaggggtcatggcactattcatgcgtttcactgacagctacaaaacacccctggatttctattccttcacaacgtcaggtccacgacgcagcacggcggcagaccaagctccggcgaacctgtaccggccaagacatgcaatggccagtgctctaacttggctgatacctaattcaacatctaacaaacgtttcccctcgatcaattgcacgatttgagctcccgacctctctgctcacggtgaccgcacgatcaacggataacacgaagtcttcccggcgattcaatgggttctagcttaatcggtcgggtcgagaagcatcaggggctcataagagtactgaaacaagagagcaaaggacatgattggacctgaagcgtactggccacgatgagagtctttcacggcggcggaaaaccgatatgggggaagtgagcaattcggaggctctggtgaacaattgaaggcaagtgctggtgctttggatgggtaattaccctacggagttcatggcatgctcaatttatagagtcc

SEQ ID NO: 159823 - DNA, 571 bp, Zea Mays
ctcgattttcaaggaagtcaggggctatttcagaagagttcctaagactcagaattctgtaccgcggactgcgggttgatatctaaatacttcgggggttctttagaaaaattgccacggcgaaggggtacggtggggtttggaccacccgatcacacgcggatggtgaggattagatctgtgtggtcgcgaagcggtatgcgcagggaaccgttggatgtaaaaacgacgggtaggattttattatcctggatttgtttctatccgtccgatccaaatcaacggaccagaacgaaagtcgcgaaaggttacgcgatcatctaatcttagccgtacgcctacgatccaacggatggagtccttctccttcccctgatcgcacccaaccaaggctagccggcccccagcggcggcgccatggacggcgcggtgatttccggaccgaccaagaccctcagttcaattaactgacgcaacgcgaaaagtaaacagaggcgaacacggtgaggtgatttaccgagcgtgcggaccactggcagaagcaggccacggcggagggcggaacagagac

SEQ ID NO: 159824 - DNA, 366 bp, Zea Mays
attgaaccaaatggatacattgtttagagattaaattgatcacaacatcatgatcctcggaggaggggtatgagactgaccagaaatgagagatttatgcaaatcaacatccgatacttgagaacgggttatagcagataaccagataacggggcagaatcaatagaggatcccgagattcggatgataaagcaaacatgattcacaagaaaaaggattaccagatccaggcgaaaggagaggtaggcaaacaggatcagctaggatgatcgacagaaatgttatgaagttttaggggcaaggatttatggaaagaaacatggcttggtcatggtttgcgcaactagacaccaaacgatgtttttt

SEQ ID NO: 159825 - DNA, 288 bp, Zea Mays
cccagcggcagataccagaactccgacgatgaattcatgtgccccgaccaccccgcagtgctcgaaaacgatgcccaagcgttcctcgtatccgggcgacactcctgacccacaaattgaaatctagccgctagcgcagacgaataatgacggcgacggcaatcttctcccttgctctctctttgtttttccctgcgcgtcgttgtttggggaggagcagctttgattcttatactccgaggagcacgaccgaagaaatcagggtccgagcccaaaactcgccccggt

SEQ ID NO: 159826 - DNA, 419 bp, Zea Mays
tgtgcaaactcaggtgctctcaagtcagaattcttctaagtggggtagtgttcctggcagacttaaccatcttgccgtcccaagggattgatgtgatactaggaatggattggctagctaagcacaaaggtatcatcagctgcgcaaacaaaactgttcttctcacatatcaccaaggaaaggcagtttcctgtcaagcccagccgccagtaaacgatccgatgatgttcaatctggcaacagaaaacatgtctgtaatcgaagagtttgaggatgtattttcggaagagttgcacgggatgccaccagaaagaggagtagaattctatatagatctccttcctggcactgcgcccatcgcaaagagaccataccgcatggctcccacagaattagcagaattaaaactccaaattgca

SEQ ID NO: 159827 - DNA, 571 bp, Zea Mays
ccgccatcgcaaacatggggcccatacgagtcctcaagggtgtccagcgggtcatggggtgtttggcttccctcggccgcttcgtgtcgcgcatcagggagcgtgggttaccactctacaagctactgaggaaagccaaccacttcgagtggtcgacagaggtgcaggaggcgcttgacagcctcaaaagcctcttgacccgagcccctgtgctggtcccatcgaaggataaggagtcgctcctactctacatcgcggggatagcccaggtggttagctcagtgctcatcatggagaggcaggaagaataaggtgcgcgcccgctttagcatcctatctacttcataggtgaactcactcactaatgcaaaaactcgctactcggaggcacacaacttattgtacgtcattttaattactaaaaggaagcttaggcattattttgagtcgcatcctatttctatggtgacttcgttccccctgggcgacatgacccgcaatctagacatttctaggaggatcgccaaatgggcccttgaattgatgggatacgagatctcctacaccccat

SEQ ID NO: 159828 - DNA, 753 bp, Zea Mays
ccaattcacagatagcctggtaattctgaagttcttcaggcacattttcagccacaatccaaacaaagtggagtttggattttggcttagtctgagagctccacgaagatacagagatttttgcaccagacaatttcatcttcagttcagggaaattaatcatctcatcaagcctctcttgagaaggaaattgcatcaggaaaccagagtgacacttgatggctttccaagtacggccctaggggaaatgaaaaccgaaatccttctcaagatcctcagccttgatcaagccctcaacaattttaaccaaacctataaaactgcgcttcggtttatttgacaacggtttggagaaatgagaggagtaaaaccctaatccatccgccgccatcccaacaataggcatgcaaggcttgttttgtttggggagaacgcaccgagcggtattatgtgtttccttgcgacagatctcacaccacaaagatttgaagcactccctagcatgatggccatccataccgcatttttgacagaaaaccctacgcaccatttcattctctaacttcagaatgggaggaggatgggttttaagaatacttgtctgaccgccatcgtcggaagacgagatagggatatcatctttgttcttaggctttccagtccccggcttcaagcgccagctaaggctccggttctttccccaggattgggatccctgaggcgcttctttcggcccccaacggtcccagttag

SEQ ID NO: 159829 - DNA, 634 bp, Zea Mays
cggggatcaaatgggatgatcggagctctgggtagtgatccgcgcgtgctccggctagggagttccgtcgtgcgtggcatgtcaccgggattgggtgttggctggagaagactcgcgtgcagcgtgggatgggggatgtagggccagtattagatggtcgcggggaccgttggatctacgattgagggccgcgattagaagtgatgtaccctttcgttcagtgagatccggaccgtcgaccttgaatccaatagtggcgattagatctcgggttgggtgaatctgggtcgtaggatcggatggatcagagtagcgccagcttcataaaatctgaacccttgaattttaatccagcggtggcaatcgcataccgcatcatgaaacgtctgatctaatcccagccacaggtcttagatctaaaggctcctaacacctgataccccttcggccacgtgttttcacaaaagagcccctgtgcttcataagatttaacctgccgtacacggctttggcgctgtgtctggtgtttcttgcgcagagacccccaggtttctctgtttttatgtgcgcagtccagaatcgtaggaaattcagaaattcaattagaaaatgatttttagcacacaaataattg

SEQ ID NO: 159830 - DNA, 1214 bp, Zea Mays
ccatcaacagttagcgagacgcatggagcaacatcaacgcttcgcgcgatcgccgacatgaggaacagatgaagtgacgagaagagtacgatcgggatcatggtgcaccggcacatagccttgccaccagaatgagtcagtagcaacctccaccaacagttcgaccctgggtcgattgaggtgacacacgcctgacatcactcacctccacgagactgtcgacatgatcatcgccgagaggaccgagggacaagtggagtctccgcctttaccccccagctccgagcgatccagtgaccaccaaacttcaaggtctccaacgtcgacaaatatgaacccaagcaagacccgggtggctggctagctgtctacacaactgccgcacgggccacgagggtgacagaagacatcatgatagtgtacctgcccattgtcctagggcaggacgtgctgcaatggctccaacatctacctcgacactgcatcgatgactgggatgacttcacccaccggtttgtcacaaactttcaatcccgatctgacaaatcgacagccttgggacctcaagtccatcaagcgctagagcgacgagaccctccgctcgttcctcaggcattttcagacaatgaagaaccgcatccccaatgtcacagaggcagccgtgatcgaggacttttactgtgggtccaatgactcggcttttgtctgggctgtcctctagaaggcacccaccacctaggaacaaatgttctgggaggtggacatctacatcaccactcatgagcgagcctaggacctcatcgggaacacaaatcctgcacccccaacgccgaagaaagacataaaccagtagcaggacaagcgctgggacaagaggcctcgggagaaagtgcatgccgctgagctgctggctacccagctccacaccgcgccatgcggcggtgtacgaacactagacgagatcctcgacttccagtgtccgtaccacaaggatatgcgccatatcctatgaaactatcgggacttcaagaactctattggccacgaccaaccattccagctgctaccgcctcccgcaccatgaggagaacctgtcaagcagggtcaaccacaacaacagggaaagggcggtggtggagccttcctgtgcattgacagggaggtcaatgttatattcggaggccacagggcctaaaagaacaaaaggcaatgga

SEQ ID NO: 159831 - DNA, 386 bp, Zea Mays
actacaacatgtgaagccttggttggctgtgagctttaactcacgcagctagcttttttgggtaaaaatttggtcgcggtgcacgggacacaattgggaatgggaaacgggtcaggacactgttgggaatgggaataaaaacacacagggcacatgggaatggcaggagttcagaatgggaatgaaaacacacagggcgcatgggaatagcacaagacacagttgggaatgggaatgaaaacacacgggacgcatgagaatgagaatgacagaaccaggaatggggcagcctaccccttagagttttaatagatagtatagatacatataaatatatatgttctaactatgtatcatgtataatatgaaatgcgaataaagaaatt

SEQ ID NO: 159832 - DNA, 1019 bp, Zea Mays
caagagtctgaatgcctttgaaaataaaaaactttattgatgataaagtcccctgattacagagtacactgttgcatcgggaatttttgaggccctgctagggataaaaccttctaagatgctctatgttccatgagttccccacttctgtaccatccatttgagtaagacggtatgatcctggctgagtgacctctgatacaataaatgacccttcccatagtggtgacaacttgtgtcgtccttcccccgttagaattcggcgaacgaccaagtctcccactgcaaaggatctatgtcgtacgactttgtcatgatagcgcctcaagatctgctggtatctagccgactgaattactgtgttcaaccgctcttcctccaacacatcaatatcctctagcatggtagcttctgcttcagctatgttttcgaagatcaacctcggtgccccaatcatgaggtcggcgggtagcactgcttctgaaccataaaccatgaaaaacggagtatttccatgtagagctcgactaggttgagttcttaggctctaaaccacatatgacagctctctgatccactttcctgcaagcttttcatttttgtcgaacactttcttcctaagcgcttccagtatcattccattgactctttccacctggtcattggctcttggatgcgctactgatgcgtacttgatttggaaactcagttgttcacagaaatcgaagaattcagagctggtgaagttggatcctaggttagttatgatgctatttggtatcccaaacctgaatattatgttttgtatgaactccactgccttggctgaggttaaagagacaatgggcttgtactctatccatttggtgaacttgtcaatggcaaccagcacgtgagtatagcctccctgagctttcttgaagggttcgatcatgtccagccccagcatgcaaatggccatgttatagggatggtctgcagctgttgtgccggtaaatgttgttgctttgacaagaatt

SEQ ID NO: 159833 - DNA, 463 bp, Zea Mays
ggccgaagatgacaatcgatcagaatgacgaagcatgccaaaaggcttttagcaacgtctgtgccttcattggcacaagggatatagttcaagagcacatagcgtacaaaatatagccacttgtagaaaacagggatatgccgaaggatactactgccgagtcaactgaaggtgggttggtccgattgaagtataccttcagattcagagaccggtttgatgagccaaatgatgattggctaaaaagtattgaggctatcagtgatgagctacttggagcatatagcaaagccgaagatgatgccttgtccacagcgttcgggggctgggggaagaaaaggttaagcagagtatttgacgccatcggcttcgtataccctgattatcactacccactgcgaaggcaagggaagaaaagaaaagctatcgctttggccaccactgttgtaccgaagggcaagaa

SEQ ID NO: 159834 - DNA, 402 bp, Zea Mays
gccacggcgaggtcacaaggcacggtgttcttggttgatttgggggaaatcccaaattggagctctttggtgaaggatctgaggtacgggtgggtgcgctagatgcctgaatatatagcgaagacgatggcgcactcaatttataggctccgggggcggtggcgtccaatttcacgaagagatgctggaggccggaggggaaaaaggttactggcgcgcaagcttagtggctttcaccgtggcaagctccccagcgatgaacggatggctaatgcgagtcacggcgatgcggtggttgtgccaaggcacgtggcgcaaggccgtgaagcggctgtctccggcgaactcatccgaatccgccgtggtctgctcggtacggtggccggagtaaaataatggccg

SEQ ID NO: 159835 - DNA, 782 bp, Zea Mays
aagggaaagagacatattgccttaaataaaggctatattgaacccaaagagcgcataatattagtgcagactccgcgaaattgccaaacgttgggcactagggcttcgacggcaacacgccatgtgctcacatgtacccccatccattagcgacaacgcacacaacaacagggacgccaaactaacagggtcgtttggaagggaagatgccacaggcatgtctctgcgaggaagtaggcagttggcgggaagaggaggaggtcccgtgaaacgctaggaaggcagctgatgtgctgcacagtagctcttcgaagacgaaacagatctatggttgtgtaggcgaaagggaaagaggtagactggcataaccaagggccatattgaacctaaagaacgtagctataccagtacatacctcacaaaattgcagaacgctgagcactggggctttgacggcagtaggccatgcttccacgtgtgcccccatccatcattggcagcgcacacaaaaacacggatgcaaaactaacagggtggtatggaagggaaggtaatgcagctatgtatctaagagaaagaaggcagcaagagcgtcaatagaaccgatgagaaagttgcaagcacactgactctgaagtgtctacagaccttgagaacagaagtatgcaccaatgtcttgtaatatgagttcctaggtgtcgcatgttactcaatctgatcctccaaacattttggagtgtagaattcagtttatggtccatcatttgttcacgacattggtg

SEQ ID NO: 159836 - DNA, 626 bp, Zea Mays
cgccaccacgcatgcatgtttccaatttctcactgatcggtgggcccagctcggttttctctggcgcacaccgcacggacttgccccggccgccgccctgtgggcccctcaagctgcgtcgtgcgtcttctccgctcgaactgaccgcgggcaaaccgcgcgtgattcgcgcacgtacgcagcgctagcgcgggtcaaagcagtggccggagaaatcggctcgacctgccgaactcgccatataactggggctctgggagagttgtcgtctcggccgactagagaaatccagtgcgcagtgccgtcgtgttcgcaccgtcgagagaaagagaaaggggagcagcgagagcgggttgccgcggtgtgggtgtcggcaggccgtccgctatgcgcccggatcttcccggtgtgtacggctttgggcgtgatttgacttctcgtcgatgtggccgggtcatcgctagggcctcggtaagctttgttcttcctctctttggtattactgaagctagcaagttgccattaccagtcagtagaggcagggtagggcgtgagcgtgagatcttgacaccacgggtgggttccttgcggtggtctgcaccgctgtagatgcatctagcgaggaa

SEQ ID NO: 159837 - DNA, 1018 bp, Zea Mays
gaccagtgcttagcgtcggcctaaaccaaattcattatctagagaacgtttcccctaagttaatttgaagaatggcactctactttgccctgcccacggtgaccgagaacgttatagagggatgaaggtgttcccggcgagtggtggtgatctagttcaattggacggttcaaggagttcgtgggatgcctacggatgctagaacaagcaacagaaggacgcgagctaaccggaatcgagctggccgcgacgagctgttctttacggcggcagagaccgaatttggggagaattggaaattcgcgcgtgctggtggatgatcgagggtgggagcgggtactatagcttcgggatgacttagcgcagtagcccgagccatcaatttataggaagcttcgtcggtggcgcttaatttggccgcgccgtgcgggtggtcggagataaggaagaacgcgggtgcggtgaatccgtgtccaccgtcgtggcgagctcaccggcgacgattggacagccgtagcgagtcacggtgtcgcggtggaaagcaaagccacgcggcgcaaggccgggaggcggtggctcaccggcgagctaatccgctccagccgcaaagcagacggggcagccacggtgagtcaccggagttatccccagggggtggcttttacctggcggccttatcgggtcatcggcgacgcgaatcctacagcggtggcgtgaatcacggcgagcggcaatcaacggcgacgggccaccggcgacgagcaagggataggatcttctttagtttaacatttactgtaccatggcgtcccatttcagttaacttgacagagcaacttggagcatgatttactctcaatttccaatgacaactcctcccaagctctgcagcaaaattgtagagctataaaccagcaataattcgactatagggcttgaactcatttgagcactagatcaaggttgaattcatactcaaagttggctctgttacactgaacatctgaatttcagagtg

SEQ ID NO: 159838 - DNA, 366 bp, Zea Mays
agataattttgccaggaacagaaggaatcatgaagacttgagagagaggtatacatccattcatgactagatctagatggtggaatttcatggcaccccaacgtagaacattatgccaacaaagctactacttggcaaaatcacactatttctacccaaggacaatatgtaagcatgagtacttgaattagatcaataacatgctagcctatgtggccaagtgtgtcgaggctctggttgcaccaacgttgagtcttggttggcatgagctctcaacagaaccaacttagaatgagctagaacaatcgcatgtaagccataatcattcacaaatgaagtcactagttcttcccacacacaatcaac

SEQ ID NO: 159839 - DNA, 274 bp, Zea Mays
aaaggatgcaccgccagaaatggagtccccccagaactggatgaccaagctcttgattggccctcgccggaaatggagtccccgccaggcgcaaccaaccttatccctctcaacgagatagttgtcgacatcaatggaacatttgtgccttcactgagtgctcccgcgccaaccaacacaggcttctccctcaccattgatgaggtagacaacacctggttggaggcaccaccagcagctgaagcacccccttctctcgttactccccaggaac

SEQ ID NO: 159840 - DNA, 334 bp, Zea Mays
gatcggttgggcaatccgcctattggatcaagaatcaacggtccgcagcaatgacccatcctggccatcggatggacgatccacgacccgcgttcaatgggcgaaagggtaagcggccgatttaatcctaaccgttaatccagcgatcgatggcttctacgcgtcgcccccatcgcctgcaccttcggcgaacagacacggcggcgcaaagacaccacacggcggcgccatcgccggcgcccagccaaactccgaaccacgcgcccaaaccccggtttgattgcggcaacacgtagcggtcatcaacacgatgcagaagagaggtcgctcaccg

SEQ ID NO: 159841 - DNA, 312 bp, Zea Mays
ctcgacagggagggcgtgtcgctggacgacgtggtgtcgtctctcgtgctgcgcaatcgagaactggaggaggtctgctgcggagggtggcggccggcgctcgagagcataccggaaggcagcgatctctagcatgcacgtacgacagcgcctggcatcggtcgttcagatgtctagctctagcttgtggaagtcactggatcagtgacggtcgtgcctacactacactggagtacacaagatactttttgggaataagcgtaagcaaaacatgtgtgtgctgggtataacattatatacacatatatatag

SEQ ID NO: 159842 - DNA, 429 bp, Zea Mays
cggtgaatgtcatccgtgaaatatagccagtacttatcaaataaagcacgaacattgccaaccgagcaatggagggcaactgttacaaagagttggcgtagctggtgtgatgaggcagagacgatggcctcatcaaagagaaggctccattcgttatcgctctcaagaaggcccctcgcctcacatgcctcgtgaaaggtaccatagaccgtgccactaaatgtccttagatcaacataactcgttgcacctttaactatcatcaatagcatgcgcaagtagtacagttcaccggccgttggatgaatgtagtacatccgtccaattttgtgacaagtgattcttttccgccacagtcgatccgaagggtgccaagaccactcagtagggaaatcacagtatgttaagtgtcggtatccaggatttctt

SEQ ID NO: 159843 - DNA, 438 bp, Zea Mays
tccataatagcttcggccatttttataatctcatcatcctcctttgctttggggtccgccaatggctcgacgggctctgggggaggagatagtgcggctgtgatgcaaagcgtaaataagttcgaagtcataaaattacaacataaagtcaaaagttattaatcaatacatgttcgcctttcaagatccgcacttttctcagcggcctctgctatttctctagcatcatgaatatctttttcacttttccttataatttcttgagttatctcccgaccgtcattctcccaaatgtcggtgaaaatttttccaccaaccaagcttgcttcggccgaggggtcttttataccttcaatagataaggcagcctcggtttgcgctaaggatttcacatgttcgcagcctcttccttctaagatagcgacaaaccccctagca

SEQ ID NO: 159844 - DNA, 348 bp, Zea Mays
cgcactccgagttggaccgagtcccccatggaccaggaggtggctgaggcaggggctttgctggctgaagttggactgctgaaaaagaggtgtatgactgcagaggctgtggttgctgattttgtcttcaagaacattcagccgttgaaggatagggcgtaccaggcttatctgtaccgaggtctagctgactcaacccgggtcaccaacagaagaattcccgctgtagacttggtgaaccggcttgaaatgattcttagaggcaaggtatcaaatgttggtgcccctgtggcatactcggtctggaacctgccttcttccaaggccttcactcattttgtgtcgaat

SEQ ID NO: 159845 - DNA, 411 bp, Zea Mays
ctctcgcatctagcttgccgacctccaaggcaacttgtttgttcaaagcagtgtaagcatgcatcgccgtcgccccattggaccgaggtggagatgacccaacatggacgtccatggaggtgtgggaaggagagcccacctgaacaccctcgggggctgggtcacagcttgcgctacccacaagagctagatcactatcggcaacacccttgggggctgggtaactgccagcaccaccctcggtggctgggtcttctgtagtagccacctctaaggctgagggctcctctgtcacctccatgtgagtcgggcgactcggaccatcgtcttggcattgaagactgccctccaaagtcaacgatgcacgagacattgctcgggatacctccaatccaacgtctggaatttctg

SEQ ID NO: 159846 - DNA, 371 bp, Zea Mays
aagccacatctagtgtgaccagctttgattgtagaccgcaaaaattccctgaagctattctagatgttggaggtgcatgtgttgttagcggtttaggtgatagcgatacttttacaaagggacctgatgttattgagtagctaggtgtttttgtggattggagtaccttaacaatcatacctaaggagggggcagattgagaagccaatgtgctggatgatgaggagagagtgtttgaggccatggatttcgagatatctgatgagaggatagaacaattggccactaaggatctgcatattctagtgatgttacatatatgtaccaagggtatccgaagacatttcaataaatatgacattgacctgtgg

SEQ ID NO: 159847 - DNA, 438 bp, Zea Mays
cggccgaacttcaagacattgttcgtgtgccggacgatacggctcattggatggggtgcccttgaggctcagttcctcgacaaccgccagacttggattctatacctcgagaccgccttttgccagcttcctcagggcgatctcactgtggacgagtactaccgtcagatgaagacaatggcggacactctccgcaccctcggggcccccatcaccgatgagagcctcgtgatcaacctcctacgtgaattgagccctcgcttcgatcgtgtgactcccatcctcacccgcctgaagtcgttcccacctttgcggaggccaagaacgatctgcttctcgaggagcttcgcctctcggccactacgacctctgctcccgccacggtgctctacaatgcccctcgtcctacccacttcgactctaggggggtttctcttc

SEQ ID NO: 159848 - DNA, 788 bp, Zea Mays
cagtcgccaagccattgccccgcacgcccctttctcctctctctctgcgctgtggaccctccctatcagttctgtcccctctgcgctcgccgtggaccggcgcgcgcgcactcacacacgttgccggatttctctggcacgatgccccccacacacccagactcccttcttagagcctcgccagtgcccacactcgctttcccgcctcatttcgtagctctgccctcgccgctaggcgccgctagagacccgcgcccgcgttcccgaccatccagctcgccggagaccacgccaagcctccccgaactccgccccgaggtgagacacccatccccgtgcctaatttcccttattgcgccctatgctcggccaatttcgccttcgccggtgctcagccgcggcgttccgccgtgctcacgcggtggccggtcgatttagcatggtttagttccccagagtaggtccttgtgtcacccctgcctctgttgaagctagcccaggccttagcgcgccttaagtcccctcctcgtggccggaatggctcactggagttactctggcccgcccgagaccttctcaccgccgttctcccttctctgctcgcggattcatgacctcttccccgccattgagttcgtcgtggtgccctctccctctctgcccaactccgacgacctcggagccaccctagctcgtgccagcctcaacactagcgacctcaccgccgcggagaggagcggcgccgcccgcagccgtctgtttccccctggtctgatcccctccgtccg

SEQ ID NO: 159849 - DNA, 408 bp, Zea Mays
ccggttgtggtctcttgggcccgcgtgtcgactaagaagcgcgtccacgcgccagcgcctcggggccacgccgccggttccgttccggcgcgccgaccagccaacgctctctcttgcgccgagcccctggaggatacggttgcttcggcctccgtctgggctaagaagcgcgcccactcgccaaatcgtcgggaggacgctgcccgttctaccccggtttgcctgccggtcaacaagcgcgtgatgccgccgtttgtgccgcctccatccgtgcagtcagacggtgctcggctagtcgccgccaaagaagccaggcctcaaggatccagtacgcacgtcgacggcggcgccgtcagttctagagtggcaagtggcgccgaagaacgcgccagaggcaaagagttcaag

SEQ ID NO: 159850 - DNA, 585 bp, Zea Mays
tcgaagacccgacttcataaggcgaagggtgtcgcgtgcgtgcgaaggccgcgccgcccaacgatgggacacaggccgtgttttgttgtcatttgggtccatttgtaagccccttcttgaggtaggatctgtagtacgtttaatcagattgtacttaacatcgttgtaatgaccccgtaagggagaatatttcgaggttgtagcagggaaccgggagcataacagtacttaggagggcacacccacctactcggttacctataaatagccccacattgtacattgatggggcacgcttatcaggacgctacagctccctgcttaccattttgttgagtacttttgttccctcctctcgagtgtttgtgcccaccttacctcgtgtcagttaaccccaacaagcacctaatttgacaccactggtactgtcagatagtgtggcatactaggccaaacagttaagcgtgttagcctagaaaatccaatattagatatatttgagttgaagtcttgattcctaacgagatcctccgaaattcttgcgagattttgttgggctccgcttagtaaagggtctatacctcc

SEQ ID NO: 159851 - DNA, 764 bp, Zea Mays
gtgctcgtgcccgtgtcgtgccgaaacactacgatcgtgacgtgcttagtgtcagcccattttggcacgcacatttggccatctatagggcagggaagcgcagctcattctatactactctattaagaacctaatgtagttatctggtgctactacgacttcaccctccgcgctgacacactggatccgctccacgtgtcccgactggctctccgaccccacgcgccccgcctcgatgtcgtgtcctatgggccccacgccgaacatccgcgcaacactctctcagctactaccctgtggaccctagtgctcgcgcagtcggttactgtgtttgctcagcacccgatcccgcccacgcagctaccacactgtaaaaaaaagtatagagagagcactcgaacctacgcccacagctccataaatttggagctaactaacagacctatttatataatatataacaaccgtattaaaatatgagcaattggctagttgttgtttatgtcttgtgtgaaggatcggatcagactcagacgcatgccagcggtggccacacgtgccgcatgcctcgtgcatataatttatgtggtaccattttccactcagacgcataggatagggatgtaacgactatatatctgtcggatagtaccatttcatactcatatccattaataaaattatatttgttgggttacccaaatacgctcgtagatattaaatcttacccatatttgtacttgtgcggataattttacccgtcg

SEQ ID NO: 159852 - DNA, 388 bp, Zea Mays
aatgtccaggccccagtgctgaagaggccacgtgtgggcgattagctttgtgaattgcgcagggcttcccgagcgtggagaaaacttctggcaggcttcgcaggaccttgtgacccgatttgcggcgtagatcatggtgggccagtagaaaccttgatggataacctttgctgctaggtctctaggccctgcgtgagagccgcaagtcccgctgtggacttcgcgcaggatttggacgccttcggtctcggtgacacatttaagcatgtgttgactgacccccttcttgtaaagctgaccttcgattagagcaaagtcccggcttcgatgtttgaggtgcttggcctcattgatattggttggatgatagtacccttgtaggaacagg

SEQ ID NO: 159853 - DNA, 500 bp, Zea Mays
gcccgatcctatacctacggcccaaattacatctgtggcccgcacgaattggtacgcgcctgcgactgtcggatcagaaatcaaccgcccagatctaatacttcccacggtgaatcctatgcgcctgattagagacggacggactggattgctcccgccgaaccggtaccctaacatctaatcgcgaccgaacacaagtagatcgacagtccatggtcgttcttcttccttcgccgaccggacaccgccagctggactccttgcggcggcgcagccaccggcgtaaggcgaatccacgaaagaacgacaccaatctcaaagccctatttcccaaacgatgcggagcccccgtcgagcatgataagggtacccacatgggcccccgtgcagggacacgccccagccacggcgaggagggttgaggggaacaaattctacttccgccgagcgattggtaagctaccagagccctacacgatccccgcacgatcgcaatagaa

SEQ ID NO: 159854 - DNA, 1149 bp, Zea Mays
ccaaaaccttcaattgggattgattgcacttacaaccatgtctttgcggtcaccactcctcattcgttcaccaatagggcggggcctactcgccagccaacccacgctctgtcctggtcataggttgtggactcacgttaccagaagctcacgtcgcctggagtccgagacagaagctccatgcgcgatctgtgtaactaactccccgatcctcgggcgccagctggcatctctaacaaccagtccacgctgggtgtaaaagccaaaccctgcctctcccttagggatcgtttggaaaatacggtattaggtgaccctgctcatttagcaccggcggggcaaacctgcaaataattttccccgtctctgtgttgtccggtgggttttgggtgtcctgtggccatttggaaactgtttggcttgtgcaccaatggaaacggtttggtgaggacgagaaagagataggcgtggggctgtggggggcacacaaaaccgatggtccaatgagtggagccctatccctatccaaaccggtggtgcgcggggtaaggaaacctacatgcagcgcttccaaacgcgcagacagcgagggcgtgttttttttgtccgtggcccgcccgtcccgctgaaaccggccggtgttggtgttcccaaacgaagcattagcagtcaaattatagccaccagcaaaccctcaagagagtgtgcatagagagaagagagcgggatgtacgccgccgtagaatctcatccacacccacaatcggagcaggtagttcggccgtggagctttgcttgatcgcagagaacctgctcgaggcctcggcgggcggagctagggtcgagaggaccttcaatttctcgcagacgcccagtcttcaccgcaaggccgcgccacgacgtgagcaatcttctccgtgccataatccacagtaaacatctcgtcgagtctttcgcctttgtggtcactttgtgtagaacccgccagagtaggaaataaagcactagagtgcgtgtgtgggtgccgccggcaagtgctccgtcgtgggcctaggcgccgctgcgtcgtatgccatcggtatgaagggtgacatgcctcggtcgtcgatcctatagatggccatttggcagtaacacgatggtcagccc

SEQ ID NO: 159855 - DNA, 803 bp, Zea Mays
caccgccttaagtcgttgccgacttaagacgattgctccgttggcagggcatagtggtcaccctaagttaagtaagcgcgagcatgttgcaccgccttaagtcgttgccgacttaagccgattgctccgttagcagggcatagtggtcaccctgggttaagtaagcgtgagcatgttgcaccgccttaagtcgttgccgacataagccgattgctccgttagcagggcatagtggtcaccctgggttaagtaagaatgcagattgacaatgaacaaattgagcgctctcgaagtcttcttattgatgatatgtttcccagtttacagagtacattgtcgtcccaatagcttatggaatacagctaggggtaaaacttcatgaggtgttctatgttccatgagttcccaatttctgtgccatccatctgagtgagacgatatgatcccggccgagtgacttctgctactatgaatggtccttcccatacaggtgacaacttgtgccgcccttcccccgtcagaattcggcggatgacgagatctcccactgcgaaggatcgatgcctcatggtcttatcgtgatagcgcctcagggtttgctggtaccgtgctgattgaatcaccgtgttcagtcgttcttcttcgagtacatcaacatcctccagcctagtagcctcggcttctgctatattttcgaagatcagccttggcgccccaaacttgagatcagcaggtagcacagcctctgaaccatagaccatgaagaaaggggtatttccatgcagagctcgactgggttgggt

SEQ ID NO: 159856 - DNA, 545 bp, Zea Mays
gtattaaaaaaatctgaatcggcaccccttcagtccctgacgctttctttgggcgtcacctcaccaaaaccccaacctgctccgtcttcgtccgctggttggcgatcctcagttcctgctctgatggcgtataggcgcgttgatcctgaaccctttctcccaccaggcttcagcgcctcgatggtccttcaccgggaaattatggccaggtcagttactaggcgcctcccgccattgcatgaggactgggctattatcagcattcaacctttacctgaccatgagattactttcccggtggtgagggatgtggttagagaataccttgtggagcacagacgacttggggtgcgtgatatccagcggtcgcacctgggtcaggttctggttcagtttagcagcgtgcttgaaagagacaatcttgtcctgctcggtccgcaacaataccttgatgcttccttcactactcagtggaataacgatgcttggaatcatagagcccttttctttaatcgggaatgttggcttatgttgttgggattccc

SEQ ID NO: 159857 - DNA, 380 bp, Zea Mays
ggagaacatctaaaggtcaccgccgtggataactccgaccattaaataactccgaccaccgtaccatggttaccgcggcggaatcggataagaacgtcggtgatcaccgtcgcacggccttgtgccgcgtgtcctagtccttccaccacgtcgccgtaactccctatagctatcccatcgtcgccggggagcttgccatgacgatggacacgaattcacctcgcccaggttcttcttcatctccggtcgccagcacggctcggccaaattgatcaccaccgctcgctccttctataaattgagtccgcggccagctccaccacattatcacgcaccacaccatctagtatcgctcccaatcttgcaaccgtgagctccaa

SEQ ID NO: 159858 - DNA, 441 bp, Zea Mays
gcagaacaggaaaggactgagacgaccgaagtgccaaagcgtcatgcggaagctaaggaaaaaacaaccgaagaaccaaaattaaaggagccgacagggcaaccaaaaaccctaagcctgccacgagagctggagttgccgaaggtgtccaaattcctacgataactccaaagagaaggagaatggccagcgtactagacactgtcatagaatcgacaaaagtacaaactcctgcctctacaaaagcacctggtgaagttgagaagaactcgaaggaaactgctgaagctataacaactcgagttgaggctgaagctaggccctcagttcccacagaacccgagaaggtcaaatctcctgcccccgaagcttctgctgaagagctagattttattgtacgccatgcttcggggaaacagttgtcgaaagagcagattgctg

SEQ ID NO: 159859 - DNA, 307 bp, Zea Mays
cccttggatgactattgatgtaggtgatctgagacctttggtttatgatagaacatggtcttctacttgatctggtatgataatatggactctcagttaaagctataccaactttgagagttcatacaaagttagcttagatgacaagggatccgaagacaaatgcaattcgctaaaaccctaatcatggacttacaaaccataagctattccactttctggcattgatgttgtcttttgttttacctttaatgtttagacacatgcttatgatgctttcagcaacattgcgctcttggtgcatcaa

SEQ ID NO: 159860 - DNA, 476 bp, Zea Mays
ggatgatgcagaaatagatgttgtgctcaatatgttggctggagaatcttctgactcggcccctactgaaacaatggctgttacggttaatacgagagcttgacaaaacagtggacatccgaaagcctgagggtattcgcccaaagcgtcctcgccaagtcagccgcccaactgcgcctgttgaggagaagaagaagaaaaggcggcttcggtgactgttatgcttggaccaggatgctggcccttctgctcctgtttgtgaagaagtatcagtagaggtctttactgaggttgatcccaatggtggtgtaccagttgaagctaaacccaatgggtgtaaccttgcaccagctgaccccaatgggtgtgaccttgttgaaactgaacccaatggatgtaaccgtgcagaaactgaaaccaatgggtgtgattgtgcaccagctgttgttcgtatttttgacgaggacgaagaagag

SEQ ID NO: 159861 - DNA, 293 bp, Zea Mays
gtactttctgtcaagcaacaatataaaaattgtactaggatataacttagcaaccaacacgtcaagcttgaactggtggtttccaattggacttctggttaatgaatcaacttccacagaatcaaatacaaattctaaacataataatgatcatgacatcggctttaattttgctattatagtttcagattcaaactaaattgagactaattactaggcattccaggaaaaaggatgtgagaagtagcaggtatgtgaaagctgatctgctttactatcccaacttctaacct

SEQ ID NO: 159862 - DNA, 1330 bp, Zea Mays
cggacaagcgcttcagcagtacccgacgtcgacgagccaacttccaaagacctcattgacggagactgtgtcttcgccctgcaggccctcgataaatatcaagcccaaacgaaggcctgacgcgaccacgcagtcgtcccaagagaattctacgaaggggacctcgtacttgttcgcacaactcggacagagtcacggggtaagctggaaccgaagtgggaaggaccatttatcgtcaaaacaaagtcgtctcccagcgcgtatagattaacaacacaatctggcaaagacctggaacattcctggaacatagacaaccttcgcaaattttttgtttgactccatagggccaactcggccttgtaattccccaaacaattttattccagcccacactcttttcctcctggggggtgaggtttttaatgaggcggagccatgtaatatacacgcaaaaaatcccccgcaaaaaattacgtcgaaaaaagaccgcatcgacggtcttcggcattcgacaaacacgaagtcagcgcgaggggcagcactggctaccctcgcgtgcgacactccgtgcaaaagtcgcctaagggtgcagctggactagcacaacaactgcgcaaaactagtcttccccaaaaagactatccatgcaaaagtcgcctaagggtgcagccggactagcacaacaagtgcgcaaaattgaagtcttcctcaaaatactatccgtgcaaaagtagcctaagggtgcagccggactagcacaacaagtgcgcaaaatcgaagtcttcctcaaaagactatccgtgcaaaagtcgcctaagggtgcagccggactagcacaacaagcgcgcaaaatcgaagtctccctcaaaagactatccgtgcaaagaccgactacaggtgcagccggaccgacataataaatgcgctaaacctagtgcacaagtcccctacgggcatgaccggatcagcgaaggtacacagcctcatcatacaaattatagttacatacgtacaacgagggcatcacaccttacattggttcaacctttgggatgatacccatctccctatagttaaacagcattatcctcagctcctcaccctcaaaaagacttcgcaattccccctcacctacactcgccccaacaggcgaggacaacaattcccgcttgccagccctgtccacacgaagacgaccaccatccacctcactcactctacgcttcgccaccgcccttcgccacttacgcccaacactcggactaggcaaaacttcagcatccgtcacacgcggagatgcctccaccgcaaccacatccaaggccac

SEQ ID NO: 159863 - DNA, 768 bp, Zea Mays
gtaaccaggcatcaggcagccggtcttctccttctcggccgcggcttccgcggagctcggtgcgtctgcgccaatcgtggagtccgttgcgggcgccttgggccgttcctccatgactataaagtagtataccatggactcgttcgctccataccctcgcatactccctgttcctcgcgccatcgtcggtgagagagagaactccttcgccgtgtggagaaattgctgccgtgatccatcgccgccgtggaacctagcctgcgaagcttttcggaccaaaagggctggccttgtgggttcacggggttccttgggttgtgttcagggcaccgccgtgtggacttgaagcccgggaagctcagaatttctcaccatcggcgtgcgtcgcgccgcaccgtgaaacacttcttcgccggtcaccaagctaggtacgttacccacccgcgtactcgtttcgtgcctcgcagcgtatagaagcaactcaatcgggatttagggcgtcggggttgggaaaccaggtagctccggccaagctccgccgcggtcctggacattgccgctggcaatggctggaggagggggatgagggcgcttggcccttggatggtaaaggtgcggttaagattagatctgggggctggtagatttggaccgttgatataagatcgaacggtcgggtgttttgggcgggattcgaagttagtaaccgttagatcaacatcctggggctctgatgggatccgcgtgcgatcatactgtgggccgtgg

SEQ ID NO: 159864 - DNA, 368 bp, Zea Mays
cgctgatctcaagtttggggcgccaagattgatcttcgaaagcatagcagaagccgaagccactaggctggaggacatcgacgtactcgaggaagagcgactgaatgcggtgattcaatcagcacgataccagcagactctaaggcgctaccacgacaaagctgtgcggcaacgtttcttttcgatgggagacctagtcctccgccgaattctaacaggggagggacggcacaagttatcacccttatgggagggacctttcatagtagcagaagtcactcgtcccggatcatatcgcctcacccaaatggatggtacagaagtcgggaactcctggaatatagagcacctccgaaagttttacccat

SEQ ID NO: 159865 - DNA, 556 bp, Zea Mays
ccacgatcctcgtcgacgttgcgattcgtgcactctggcgtgcggataacggtcgatggtgaaaagatcttgcgcgaggattaattcggggcactgttctgccctgtcgccgtacccacttgcgccgacgacgtggctgtgcgaccgccaccatcgtgccaccgtttatcgcggttatgacacaccgttggtcgatttacatcgttgtcgcaatacgtgaagactcgacagtgaccgccgtagaccgtaaatcagtgagcgccacattagcaactccggtgtctcttcccctttctcatcacaatcgcttccccgtccaaattcgccctcctcgcagtcgtcctctataaattgatgcttcgacatgttccatctacttgttgcaaacccagtgaaccactcctcgcgcccgatcgtccaccatagcgccctaattcggaattttccccaaatccgttctccgcaccgccgtgagcaccccctccgttgacccaccgtccagtccctccacgcaccttcctagctaccgttcttgagccctggtatgttgctaaag

SEQ ID NO: 159866 - DNA, 381 bp, Zea Mays
ggaccggaacgccgcgcgcatcgaccgtatgacgcgccccggccgcggccgctgctttccgctgccgtgcttctgcttcggcggcaacggcgccggcggtggaggcgggggcggcgttgaagcgtgcatgaagggcatctccggcaggcggcagcggaagtggggtggaaggcgatctcgatggtctccgtggagatcgtcgatcgccgtgcaggctgtgtcatgaggcggtcggcgctgccatgtggcagcgccgcggtcgagcgggggcaggttggcatgcggcggttggatgaaaaggaatgggcgaatggtcctgcatgaaacaaggaaccacacacagcttgtctgccttcctggtttgtatgttagcgatgggcc

SEQ ID NO: 159867 - DNA, 378 bp, Zea Mays
ttttagtgacctctgggctttccgggacctggtgctcagtccactctgatatgaagttgaccagttcttgagtttttatcgccgtgcggggtcagaactctatatcatgagctccaagctcacacgcccacttggctattctcccaatagcttccttgttgtgaagaatatcgcctattggaaatcccgtgactactatgactttgtggtcgtcaaagtagtgccagagcttgcgggcggttagagtaccgcatataacaacttctgaacttgaaggtaccttatctttgagggcccgaggactttgctgatgaagtaaaccggatgctgcactgggtatgcatgaccttcttccaccagctcgactactaacgtggt

SEQ ID NO: 159868 - DNA, 618 bp, Zea Mays
ccattgtcgacggtggggcggagtcagggaacactctcccattggagccgacatggtggatctctctttggctctggtaccacttgttggacttcaactggcgttcacctgagctggagaagaatcactcgctcacccctcagacactcactcacacacacaagcgcactggacttgattcaggcacaagtgtatttggtactactaaaaccacagtcttttctgatgcatatgtgtctccatttatcaactacaaattacatgcatgcaaatcaacgttagtaatccatcgtgcgtctcccgggccgtgcgttctgcgcgtccatccccacgcggcacgaactcgcgatccgttcgtggaacaaggcgagtgagcgagtctcactgcctcctatactacacgacaccctgaaatataggagtcatgagatgcaggcttatggctacatgcaattaactgtttgactcgagatgcatgtgattgactaactaactctagctgaaatgtaggatcaaggttcaactaacacagtagcacccttgggttttgggttatcttcggtcatacccttctgggctggataaccctcatgtgtaacctcagggaccagagtgtcc

SEQ ID NO: 159869 - DNA, 718 bp, Zea Mays
tcaaaatccgccccgcgcgaatggctttgtccatagccttgtcgcactgagctctcagaacggcgcacctatcctcagaagctttggcaaccaatcgagcagtttccagctcctgtgcagcgagtttcttcgaagcacgaagatctttaatggtcaaatccttggccgataactgttgccccagccgctgaacttcatcctgagatgcttgcagctcgtggcgatggtgatccagatctgacatagtgaagcggtggctcctttccagaatagtcaaggaattgctagtgtcacgatatatcctgtccaagttatcacgagaggccacaagagctcgtatttcctccgacaaacaagaatcaacattcagtacccagccaacaataagcacgacagaaccaactaagagagtatacctcatatgccattctttctgagttaagctgggcattgagagaagaattcaaagaacgcgcatcgtccagtgaatcagaaacccgagccaggtcggtttgaccttgagatatttttcctcaagatcagagtaccgtcgggtcaagtcggcctgacttcgaagatgtttttcctcaagctcagagcaccgccgagccatatctgacaaaacagttgaaaagggatacatggttaaaaacaagattggtcaatagaagtaactaaggaagaaacaagatcactaaccagtgttcgacgctttcaa

SEQ ID NO: 159870 - DNA, 590 bp, Zea Mays
gtgggaagcagcaacaatctgcatgtgctgcatgccaggttgaaacggccgccgggctgaagccgtctgttttaccatcccaagcacgataaaacagatattggggaggaacgctcacccacaaatatgcgggagtggaggacgtcgatgcaggatgtggaatttttaggaagaagataagggaactattggagcaagaaaaaacagttctttcctgatatttgttttggggtaagtctgcattttcttttagagttgctcttatctgactagttaacgaaactaaaagaatgtgcatgggttagtgagacaattctctttattcaaaatatgacatgtttagttcatcttatttgcatgcaaagatgtacagggctttctcaataattaggtggctcatccaattcttctgatgttcttgtgtcaaatcattacacaatgtacaaaggcacagagaattttcttgagcgtgaagcgcaagctgtttgagtaatgatcactgctgacgaatcatgtgcccactagtctgcttaatttagcttctttcatctggaaaataatgatcacttagttgtatcacacgttcacac

SEQ ID NO: 159871 - DNA, 458 bp, Zea Mays
gcgatggctagggatgtatttatagaagagagaggatgcggaagacggttgtaaaatttgtcgcatgccgcgtcatggccgggcgaaaaaaagacgatcacgtgacgagttgcgcgatatattgtacgacggaggctgagtcaaacggatggtagaaagggttagataaatttagacgaaaatggttagagctagctcacggacccaagatggcgggggtggaaggcgaaggggtagacgggatagacaaggattatgtcgacgacgcgagcagcatgccgttcgcgagaagaagcagttcgatgatctcgtgaaaaagagcacgagatcgggaacagatcgacgagaggaagatatatatatatatatatatatatattatcgagtttccaaaaaacttatagttttcgcaactactacatttttggtatttaattaatattagaaagactaaaaaa

SEQ ID NO: 159872 - DNA, 470 bp, Zea Mays
caccaagtaccctgaaaacgaaaagtacacttaacctaggcgaaggcaaggactcgctgtacatgtactcgtggtttaggtagattttacctgttcctaacaaatgctcggtgttatccacgtttgttaacagcagggggcttggaagttggaagatggcgcgtctctctctccttcgttctcctggtcgccccctcctttacaaccctcctatgccaaacgcttcaatggtgggaagccctctcctcctcccttccaaaatgtggaagtctgtaagcccagatcgaccgctgcacaggaatgggccacaccccgcgttggcctgtggcgcggatggacttccggggtggagctgagccaggccgagaaggagaaatacgatgcaaatgttgaaggccctttctgcttgacggagactccgcctcacgcaggtaattcctcccctctctcgtcgcattgctctcttctcc

SEQ ID NO: 159873 - DNA, 823 bp, Zea Mays
cctggcgtggacggtgggttcaatttctgtgaaggcagagggctcatatgcgaaactgtctctacgaaggggtatcagggatccagagccgttgaatccaaagtcaagggctcggattatatcactctttaaccgaaccagtatcaaatcccggccacacgatccgagatggatgctcctgatataaaacgaccggattgagtcctgagcgctagatctgcatcggacggccgcgatcccttttgatcgaaagggggtatgcgagactcgatctcgaccacatgtgataggatcaacggtccacgtttaaccccctaaccaggcgacccctacggtggcgccgccctagattcgcgacgacgccatagacgggcctcgccgcaacacacccccgtgccccaacctttattctaacgggttgtacaggactatgggacgcgcgcaagttcgatggggagttttattcactgaagatggggtcgaaggaggccggccacgacacttggcggtctggtgctattgaagatactccgacgagcaattatcggagtcgtggtgccctcctgctccctcggtgaccacccgcacttccgcgatgaccaaccgaacaccccgaagccacacgccgtgaccaatcggtggcgcatgcatgattcctccggtggtcgtgcgtgacccacatccaccaagcacagcgctactagggttctggcggcggaagagggcttgggagctgggttctacgaagaacagttacgacacggagtttatgttgcgcacatcagggtctaggtgtggttcgatggccggagatcgcggcatg

SEQ ID NO: 159874 - DNA, 822 bp, Zea Mays
gtgcccttctcggtgctcgccatggtcgaccttggtcgagctcgttgcggcggcggggctccgtggccaagctcccctgcgcgcaccgttagtcggcccgcccagtcgcgtgcgcaaaagcagcctcgccgccatcacgcaacgtgcgtaggtcgtcgaacccagctccgaaaccggtcgtcgtgcttgtgccgtggacatacccacatccgctgtgcatagtgtgtcgtaggagtttaggtgacgttcgcctacccatagacgactctcgtctaccccctggctacctcgtctatccccctgcgctaattaatttcctactttattgtcggtcagtaaactgaatactcaatcggatcaaaattatgattttagttatgcgattgtaaatatgtggtaatgtgattttgacaacttagatgttgtatttaatacctatttagtgtttagtataaaaacaacatttagttagtaattctcgcgtactcgtgtgctgctttgcatgtcgcgtgttgtccgcacgctatccacctgtatcgttcgcatacgctgtcaccgcccattccgcgcgtgtcgcgtgttgtgttctacgtgtatcgcgtgttctatccgcacgacgttcgtacgtgttgttcgcgtgtcgtcgttcgccgagtcgcgattcgcgcgctttaataaatatttattagccactaattgttagctattccatatataacgtgccatacacccgtttctattcgtttcagtcgctttaactctgtagcaacgccgatttcatattagtaacacattttaccatgtcccaaattttaatggttt

SEQ ID NO: 159875 - DNA, 759 bp, Zea Mays
aggctatgagtgttgccagtccgaggggctcgtacgtcatgaggtgtaggcagaccgacgccctgatgtggctcagcgccaaacatagttaatgcggccagtcaattatgacgggttggtctcgggctagccaagggatccacaagagtggtttctcttcggctcacctgacccctatctagttccttcatgcccgacctaggctcggtgccacgaagctcgtctaggggtgggtacttttagaccagacattacctatctcctccagctgactaacgggccccaattgccagaggattttccctaacacgttcactaactgatgagcaccagggaccgtgatcttatccccgacattagcccccctcctctcgggggcttttcttaggtcagggcgttgccttgccccttatcctagcgcacactttcatagtttcgtgcatttggtgtttcgtctcgttccatacatggcgcttggaatccatctcgttccgctacgcctcacacctttctataaatgattctttcctcgagcgactttgacatactttgccttgttcccttcgctaaaggatggtttcttcgtgatcccctatggacccaaaaaaagtgtcgtgcggaggagcagcccccacgtgttgcgtcctcttaggcagaggatgatcgaatcagggtctgggctcctctccctcctgctaccggacccttaggacttgtttggaagtaagtggaacgaagaggattgagggtactagaatc

SEQ ID NO: 159876 - DNA, 2006 bp, Zea Mays
gaggagaagctgtatgaggagaagaaagttgtgaatccttttcttgctgggttttatgaatctatggcaaagacaaatacagaaaagatcatgaaggaaataatggcaggtttatctgaggattccgacgatagcgatgactatgatgtggaaagtggggatgaagattctgaggaccggccctagcgaccaagccataccatctttggaaagtcgactattatgcaaagtcatgttgacgccatgaggggaagatactttcgtgacatgtctattgtgagagttggaggagacagcactgcccctgctcctgaagaaaatgaggtggttgtttacaaaagctttttgaaggcggatctttggttcccattaagcagatttttagttgaagtgctaaagatattttagatctttcttcatcaacttactcccgaagctataattagaatgggcttgtttgtttgggctgtaagaagccaagggctggaaccgagcgcgaagtgtttttgcagtatgcatgaactgttgtacgagacgaaggccaccgacaaagagaagtatcacaacaacttcggttgttacggattcattgctcgttctaatgcaagctacccagttccaacataccagaaaagatggcctagggcctggatggaggaatggttttatgtcaagaattatctgattgagagaggacattaaggagattatccaacgtcccatctggtcttgcttcggccttcgaaggccgagggtaacaattgaaaatgatgccgaagcgtgtcagaaggctttcagcaatgtctatgcttttattggcacaagagatatacttcaagagcacataacctacagagtgtggccacttgttgatagttgggagataccgaaggagactgttgctgggtccagcaaaggtggattagttcaattgaaatatgccttcagattcagagaaaggttcgatgagccggatgacgactggttgaaatgcattgaggctactagcgacgagttgcttggggcatataccagagctgaagatgatgctttatcctcagccttcgggggtcggggcaagaaaagattgaatagggtttttgatgcaattggcttcatataccctgattactgctaccccttgcgaaggcaaggaaaaaagagaaaaagtgccgcttcggccaccactgttgtgccgaagggcaagaaaataaaggttttgacccaccggccacgatatattgaaacagacgtagtgcctgaatttggtgaagggacctcctccgctgccgaagcgaaacaagctgctcccgtcgctcggagcactgagggatcgattgtagtgccgaaggtgcctatagtcgggtcagctgaagccaaagatgatgcggccagagagccagagctggaaaaaatagtgatgctgccaaaaattatgagtcctccggcaaaggcagaactgccgaatgttacaagggctcccgccacaactcccaagaggagaagaatggcacgcgtgctagatgttgttgtagaaacaacaagagcactgactcctgctcctgtgaagaagattgtcgaagctgctacagtgcatacggaaaccgaagctaggccctcaatgcccgttgaaacgaagctcgccgcaaccgagtagagggccgaagaagaatctctagatacttgcgtagctctagagaaaagtatggccaaagaagccaaatcccctgctaccgaagcaccgtccaaaagtcttgattacatcattcgacatgcttcgggaaaaagattatctaaagaagaagtttttgaagccaaacactatgcccgagaactgaagtacccgaagggggccttagtgtttaatggtacagacaaagatgatttcctgtactgcctcccgaacaacaaagagttatccgtctgcaaggagatggccaagagtatgggatttccgaagctcgaagctggcctctgtgccatgacaaaagctgacctcgtagaca

SEQ ID NO: 159877 - DNA, 503 bp, Zea Mays
cgtcaaaaattgttattgccgagaccgccgaagccgaagccgccgaagctaccagggctgaaaccactgaaattgcaactgccggagccgaaactacaggagccgaagctactggagccgaagccggggccaccgaagattcaaacctggaaaccacactggaagttattgacaatattcttctgaaattggctaaagaagaagctgctgtggctgcggtgaacacggcaactgaaaaggggaaagagcagattgatgaaatgtcggaggaaggagattttaactttcaagatttgcttggacaagagttgatagacgccgaaaaagaagagttgaaaaaatatgccatatcttgtggatataaatcaggggctatgctatttggtggggtcaacgaagggaagctaagatgccttcggaatcgcaccgaggccaaaattgttagaaccctctccaaaagcgttggcctgccgaagatagaggcagacctctgtaggtaccag

SEQ ID NO: 159878 - DNA, 465 bp, Zea Mays
aaagttgtcatagaaacacgtccgagggggtgaatttcctctttataacttgatatgcatgggtgtaaaccatcaggccgggtttatgtggacagacctcaccgggctggtgtacacatatgcgaaatttaattatgaaaggagaaaaatttaaccccacagagttgcttctatggactgaacttactgagataggaatgggtacttcttcagctatagcaaagttggcatccctcgggttggcatatttccatcgccttgaggggttcctccctgctggggagaggttgcggatcccctcttggttcagtactttgccgcaggattaggtcccgaccctgggttccctactatgcacgaaccatcggccatagtacttgggcgcctggttatgatgtgcatttagggttgcaacttgacacctgagtccgccgcttgagtccacgtcctcgcgttgtagtggcc

SEQ ID NO: 159879 - DNA, 593 bp, Zea Mays
gcctcaatcgcagcctgcgttgtgccagcatcgacagatccctttacaatcttctcctctgcagcatgcgctgaggtaggagttgacaccttcaccgattctataacagtgtccaatacactagctcttcggccgattccaccctagcaatcttttgtaccttcggcagttctatttcttacaatgaactcaaggctttcgattgttccgctgctatcttcacttttggctcttcggtcgattccaccctagcttcgacagtagcagggtgacttgactcaacagcagaggacccttcagcaggcatcgactcttctattgtttcagtgcgcttaggacgatgcgtcaaaactttaaccttttttggcttcagcgtagtagaaatcatcgaagcaacagctcttcttttctttccctgctttcgcgaaggatagcagtaatctgggtatacgaaaccaataacatcaaaaaccctattcaaccttttcttgcctcgacctccgaagaccgctgtcatggcatcatctttggcccttgagtaggcgccaagcaactcatcgctggttgcgtcaatggcatctagccagtcgtcg

SEQ ID NO: 159880 - DNA, 272 bp, Zea Mays
tgggaccacggtgaccggtaccgactgtcgtccattgccacataaacggccgatactgatcagtgctagaacccatctaccgtccatctcctatggtcaccttgccatgttgagcactcacaactccccaatgcaaccagctccctcatcgacgccacggtttaggtatcacatattcacatcgtcctcgaaccatctcaattatcatttatatgttggagaagcaatgctatttatgtgatatttcatgtatgagactaatgttgttttat

SEQ ID NO: 159881 - DNA, 374 bp, Zea Mays
aaagcatactgcagaggtccatcgagtccttagatgaagtgttcttatttcctctcatcctcaacaacttcatccggtgcatatctggagagctgaatgaatctgtcgcggtactcactgactgtcatgcttccttgcttcagtgatagaaattctttcttcttgatcttcatcagtccagcaggtatgtggtagttcctgaactgagtagcaaactccacccatgtgatagtatcagcagcatcgtgggcagcagtgtagaaatcccaccaatcagcaacaggaccagtaagatgaccagaagcatagagaaccttctcccagtcagagcattgggcaatattcaacatcttctccactgactttagccaatc

SEQ ID NO: 159882 - DNA, 634 bp, Zea Mays
ctaatggccatgatcaccctgagtgaaacggtacgcagattctaatctcaaccgtggggaactgatccaacggtcccggcgcgttcgcccaaacccgacccaagccgcggcggagcgccagctccggcacggcggcgccatagctgcgcagcgttcctagagctcggctacgctattcctcaattcagtaaagcataacgtggaggagggtacggcgaacatgatggggctcgaattaccttggttcacggcgacagcaggtctggccacggagggaggcggacgcgcgacagcgaccctgctccggcgagaaattccccgggctaccgtcaggttcccaccgattaactctccccaaggactccgcagagtcccaccgacgtcctggtacccgcaccggagcacgaaacccgttgccgatgagaaacactggtggcggccggcggggcttgtcaatggggcggatccccggcgaggctaaacaagatgaggaggggatagcgggcgcccgatacttaaattcgcgagcactggtcgtggtcaacagatccgagttttctggggatcgattcccccacggatcggccaaggttgttgccgcggaaggtgggagaatcccctggcaccacgggcc

SEQ ID NO: 159883 - DNA, 443 bp, Zea Mays
atctttggcaagagatgaagatgggacactgtggtcgctttgtcactgtgcccacttgcgccgcgacgtggccacgcaaccatcgccgtcgtgccgtcgttcctcgcggtcatgccatgccgtcaaccatttcaccacgtcgcaatagaccgcagtagatagccagtctatcaccaaagtcattacctcagtgaaagccacgacaacttgcgctagtgaactccctccctcctcggccgataacgcatcttctcaaaatttggcgccaccgctgataaccactataaattgagcgttcggctagctccattaggatgttacgtgtccagtacaccagtcctcacctccaattagccaccgtagctcatgaatttcaacttcccccaattcggttctccacgccgtcgtgaaccacagcgccatggaccgccgtctccagatcc

SEQ ID NO: 159884 - DNA, 772 bp, Zea Mays
aggcaggacaggagacggctcacaggcaggcgaggtcactgaaatgatagaagatgtgagcacgtattagtcacatagtcataagtatatgaaatgtgaataaatacatacacagagtgttatggcacagaaatcgagagatatggcgatcgagaggtcaaacgacgcgaaaaaggtgtttgaacgtgaaatagtgccataggaggtttgaaattgaaaatgaggcatgaaatgatttggaattgagccgatacttcacgaataggtttatatgggtaaatatgagtgaagtgtgtgcttggtttgattttaggcgaagaaaatggaatttgggcactcagcttggaaacaatcgctagaaatgaggatttgtgtaaaattgaagcctgggatatcggattggcgtgaaattttgccaatatgttactggaggtattgtgaaggtgcctgaaaaatttgggatcaatcggagcatttttggctagtttgggcatttcaccgagcacgtggcgtgcggtggattaggttttaggggaaatggccatttgaggtggagaaaccctcccaaaggagctcaagacctgcagggggattcaatagggcacaaggcacctacacaccaactgggattcacaagatttggattggatttgaatttgagaccaagggtggaatgcacaggcttcacttgaaacaaatagagaaaaggagagggaggaggcagctcaccagaggggaaataaggggagcacagggtccagcttggttgttg

SEQ ID NO: 159885 - DNA, 1001 bp, Zea Mays
gctcagattagactaagcgcattatgaacccgcgaacgatgtaaaccgcacaatcgcccgctaacgtacaggattccttggaccgaaatattatcccctggtttaatccgaccccatcataagtcgatcaacggcccacagtgattccttccccagatctaatcccatccctacatcctgaatccaacggactagccgttgcttccttcccccaaatccagacacggcggcggagcacatcccgcggtggcacacacgccggcgagccgccaccgtccggttttggcgcccgattcctactctggacagaccctacacgaagtggagggaggcgaatagcaggaacgtgcacttacctgcgattgaggcataggccggaccaattcctttgcccagcggcaatggcggccatgccgcgagctccaccctcgtgagcaccgatgaacaccacagatcctccacccgaacccaagcaatcagcgctcgaagaagatccgcatggtggcgtttctatctatctctctctctcctccgccctcatgccaagctcgagaccgcgacgccggtgaatcgtccgcgcggcggcgcccaatttccctccgcggtggaccatggcgccccaagttttgcttgggcgacgacaggactagtggggtccgagttaaatagccatgggaggcgctagatcttaaccaaatcccgacacacacggcgtaatctgctcctaacagctccggacgattttgtttgagctcacattcatggaggggacaagtccgaacgcgcgggccaagtccgagtttcctggcggcaggtgagggattcggttgggcggttgttgaagatttgtggtgcccagcttcatctcatcaatggcgtgcgggggcgatgactccgattatgcggtccagtccagcggtgagagcaggaatctagggagcgttgttagtcacaggcaaaagggccccacgagtcagtgtcaacaagggccacaggccgac

SEQ ID NO: 159886 - DNA, 649 bp, Zea Mays
cgggccctaatggatgttgtctgaccatctgcttctgtttgcaacaactttgtggatttcccttttgttttgtaccgtacaaaaactgccaaatgggagatcttgtaatggcaaaatgtctgatgttgtgtttgatagctcttttgcaaatttacattccgttggaaaagtgtatcaatcatgtcatcaaccaggcagctaaactgtcgagtaccagtaggacctgtcaaacaagtgtgacactacaaagaatgtttggcaaaattttgctgtgtatgtatgttagcgtgatgctactcgtcacttgtgcaccaactgctccacatcgccgagctccagctcccgaagttcgtccccatcgccgccgcctccgaacagagactcgatctgctccagcgtcttgccgctggtctccggcacaaacctgtgcacaaagagcaccgagagggccgaaatggccgcgaaggcggcgaacgcgcccgagacggagatggcgcggcagacggacaggaacgacatggccaccgcgccgctggtcaccctgttcgccaccgcccccagcgccgcggcctgcgagcgtagccgaagcgggaagatctccgagctcaccacccagcatatgggccctatccccacggagaagaaggcc

SEQ ID NO: 159887 - DNA, 613 bp, Zea Mays
aaaagactgaagatgctgatccaatgggaggaaaaaatagtagctggatgtgctttctgacaaaagtgaactaacatcaaatatccttgtaaagcaggaggaacatatgcttgtcactgtacgtttcttcaatgaccaccatagccaaaacatatatattagtgttttctagaaatactgagttacattactagccaatttctagaaaacctaagacaagtatccgtcaataatcccattggtcctcatgtacgtgtcttccaaacactattcatttgttcacagtattttaatgtatgctgaaattgattaatgtaaaagtttcgtccaaaaatttaaccacagaagaatgttcatggattagtgccctatcatgctaggaagatctaccaatgggggtgggtttaaagattgggatgtcactactgcccactcaaaaccgataacaaggaaagagaatcatttgcacaaattgtcccaggactgagtagggactgagctcgcctttgctccatcgtcctaggccgccgaatcgcatctctccccactcaagcagccaaatcctaggacgagaacaaacttgtgctcgcccaaagttgtatgcaccaatgtc

SEQ ID NO: 159888 - DNA, 343 bp, Zea Mays
gcgtagtggtcaccctgaattgcatagacatgagcatgttgcaccggcttaagtcgccactgactttagccgattgctccattagtagggcatagtggtcaccccgagttaagtaagcgtgagcatgttgcaccgccttaagtcgattgctccgttagtagggcatagtggtcaccccgagttaagtaagcgtgagcatgttgcactgccttaagtcgttgctgacttaagtcgattgctccattagtagggcatagtggtcaccccgagttaagtaagcgtgagcatgttgcactgccttaagtcgttgccgacttaagtcgattgctccgttagtagggca

SEQ ID NO: 159889 - DNA, 442 bp, Zea Mays
gtttggattttgcttcgtcacaagaagagctttggaaaaaaggttattaatttccaagaaattttcaagaaaatttaaaatcaaatggtcagagtacgctccactgctagtgttgagagtgatggggatgagaccgaagccgctgaaactgttccgatttctgaagcaatgaggcgctctgggctggtttcatcagaggacacacctgctaccgaagcaacacaagctgatggtgaagaagttggttccgaagatgagtacagctgcgggttgccaagtaaacctagtcatttggactttggaatatctaccatctctgaagctggtcttccaaaaatggtgaagctgggctacttcagtgaagcaaaaaaggagctggttcgttttggcggagaggaaactattccgaagccggaaaagaatgaggttgtagtgttcaaaa

SEQ ID NO: 159890 - DNA, 430 bp, Zea Mays
cggagtaccagagtaagctcataggagttgaagggcaacgccacgccgtggaccggatcaatcatcgtggcactcaccggtaaaaccccaaaacttagttcgctttgctttccacattgattatctgaggtttatactggatgtggagcgctagggcggcgtcgggccatgcacatcaaaggcgccgccgcgggaataggttctgccctagtcgctgacatcgtgttttggggaatcgtcgtgagctgtcaatctcttgatcaacacctagtattagatttcgtataatggtatgatcaagggatctacgccattgaccgagaaacgtgaggtgttggtcaggcatcgggtctcataaaactggatccgcccgatatagatctaagggcctagattagatgaggttgtggagcgtagcgagccattgatc

SEQ ID NO: 159891 - DNA, 893 bp, Zea Mays
ataaacaatggttcaaaaccatcataagtctcagttcgaatttttattttcacgattgcgtcatgtatgtgactacacataaatcagagcgttgaagcgtaggcatgttcggttttagggaacgatcacccggaacaatttctaacaggattgtttgcccaatttatataagtttcaatcagctggaatgattttgggggaaaattcaggcacaaacgaacatgctctaagtgaattttgtctaccacttcttagggcatgtttggaaccagttaaaaaaactgatttatgaaattgatgtggtttcaaacatctttactatattaaagcaccagtttcaacggtcgccccgcgtcattttttttttataaataaccccttgtatttcttcaaaatcaaaccacggtctcagattatatctcatctctatcatatttgttcgcacaacaacgtttcttgtagttgtcgctctagcaacaaaccccgtccatcttgcaacaatctctgtctgcttcttccgccgttgcacattgaattttaagtgaaacaaactatgcaattggaaataagtacaaggctctataaaagaaaaatgtttttattgtttgatatgatactttaaatacaagagcaagtatgtatttcagtaagcaagcattagaggataaacttgttgtatttggtatttcaggaatgatcttgttgacgtacttgtgcttttctatgccttaccagttcaatatctggtatatgaacaatatgatcactttgacattaaattcatttattatggtatttttatctggtatatgaacaacatgttcaatatctggtacataaacagtatgttcactttgactttaaattcatttattatgaatctcaagtgtcgc

SEQ ID NO: 159892 - DNA, 733 bp, Zea Mays
ttgtggatgcacgatgtatcaaagttggagctggtctattaagctataattttgttgtagagtgttggtcacgttgctatagaaatctgagaggaatttggccctgaacttcgactgtcaggtgcactgaatcggattttgccatggtacagtgacctgataaggatcagaacgccagcgcaaaatgctcaccgccgacgaccccttccgccgcgattcgtgtcgccggcgtttggattcgtgcgtcgtggtcagtagataagctccgacaagtaaaaaagtcttggcgaaggaccaacttgcgctcggttgcggctaagcttgccgtacccctccctcgtcggccgctcggataactctcaccgccgtcgagctgtcgccgttgcgtgccacgtgcttaagcgctagtcctcatcgtagtgactcactgagtgcatgcccggtgatcaccggagtgactgccacggttaaagccacctatgtcgggcgccgtgttcttctctgtttctggccgccagctctgcccggccaaattgagcgccaccgctgaagcctcctataaattaagcccccggttagctgcgctacctcatcaggaaaccagagctccaatcccaccctcaattgttcaccagagcgcacgaattttgaattccccccaattcggtttgcgccaccgcgaagaacagcttcaccgcggccagcccctttccggtcagctcatcctcctctc

SEQ ID NO: 159893 - DNA, 714 bp, Zea Mays
ctctgtagtctccagagaatgaagaattagaacactagtttatcaagtcaggattcgttgatcttttcatttgtcatctgcagccccagatcatgggcctccaccgtcattgggtggcttggcgagggagatagggctcgctaaatttgtagatcgcgttcacctccagacaaaggtcgcagctagagtagccaattccggcgttcagtcaaggagaggttgggcccacagcttaatgatggaaagagaaaggttgaaggccggcgctccaatcctggcagcacgcactgtgcgggcgtcgaggcatctcctttgggtgtttcggcaccagtgcaaatggctgcgacagcaccaattgatgaaggctccagctggtagggctacacttgtcaaatctgtcctctcagctattccaatttatcatcttattgctcttcaatgccccaagtgggtcatcaaagccattgacaagataaggaggggtttcctttggaaaggccacaaagatgtcaaagagggcactgttttgtgggttggcagaactcagaaggtctgtttgccgttcagtttgggtggtttaggtatttcaaaccttgaagttatgggctggtccttcaatctgagatggttgtggctgaagaaaacgcaaatagagcggttgtgggctgtctcggatgtccaagttcatcccaatgtcactgccctttttgctgc

SEQ ID NO: 159894 - DNA, 816 bp, Zea Mays
gtgaaactgtccaccgaaggggtacacgataatcctggccaccagatcatgagtgaacgaccacgattaggttgggggttttatgaatcggtaagaaatcaggcccatacgatcccgatcttgcggtcaagattcagcgccatcgtaagccgcccgataccgtatctacgctctggattttaaaaaggccgtgatgaatccttgcccacacaatcgccgatcgatggtcaaggcgagatctcctgaagcaatacgcccgatctaaccaacaccgtccgttcctagatcaacgcctcagcgcggttctgccatcccgagcacagacgcggcggcgccacccaatccgtgacgtgccatcaccgacgagcgcacgattctcgcccccgacgcatgattcctcaccgtgaaggctactacgcaacgaaaagtaggtagcgaacttggtccgaggctacataccgattatttggcgcccgaatcggccggccacgacggaccgcagatccaccgcgcggagtactccggcgacggattgaccagaccacgatgatcctcacgcccagaggcttgcttgcagatgacccacacactcccgcgaacaccaattgcctcatctctaaaaccaggattgtggcattccgagagaccgtcgcggctactatcctttctctctctctcccctcgcggtctctctatcgatgctgataatggtgacctaggggattcttggaaccagggtttaggagcgcaaggtccttcgcacggatatgcaaccacttatacgcggagcgagccacccgcagggtgattttcccg

SEQ ID NO: 159895 - DNA, 308 bp, Zea Mays
cgaataacagaaatcagattacataacttatgtctcacgtgcgtgcgtcttcttctctagaggcgatgtccatcgcaacattcgttgagctcacgtcctagtgatcatgctggggctaggggaattaaagtggtatcggaggctccgatcttcggtggcaacgctgcgctacttcgggtacttctccgacgaggtggagcttctacaactacggcgcgacaatgcttctctacgtggaacaccttctctcgctcgttcaggatcaggataagaccgagccggtgaggatgagccgatggcaagactgc

SEQ ID NO: 159896 - DNA, 712 bp, Zea Mays
ccacacatgggcaatggtggcaatgaggccgtgggtagtgaaagtgagcaggtggcagtggcacaacagcataggggccgcacatgctatggagggcgcaatggctgtgtgatctatagtggagtagcaacatgtggttgcatgggctgtggcgacttggaggctcaagagttgtcatcctcgtcgttgctattatgactgatggtttgccgacgatggtccaactcgactagatgtgaatcattggtttctctgcctcccctctgctatgatcgtgctatcaggtgctctattttggccgacaaagctaggatggttgtggtcagggcgaaatcctagatggcgacaattgtagatgtcgcttcctcttaggagacgtccactctgtcctatatgatagtttcattgtgtgaaaacactgtctatttgtgggccgacaatagcaccaccaattggtgttgcaccttcttgaaggtgttgtcttttgtgtctagcgccccatgattggtggtggcaaccacttgtggcctattagaagttggaactgctatgtccaggttgatgagcttgacaatgatggctcaaactcaaagttgtgtttggtttgtgtggtagtggttggcaaggagaaccatgtagactttttatctagtcggttattggacttggtggcatattggtgcttgacgagctctatcgcttgtcatagtgg

SEQ ID NO: 159897 - DNA, 1042 bp, Zea Mays
gcttcaacttcagctatgttttcgaagaccagccttggtgccccaaacctgaggtcagcaggtagcactacctccgaaccatagactatgaagaagggagtgtttccatgcaaaggtcgactaggttgagttcttaggctccaaatcacatacgacaactctctgatccactttcccgcgaacttttcattcttatcaaagactttcttcctgagtgcttccaatatcattccattagccctttctacctgaccgttggctcttgggtgtgctactgacgcatatttgatctggatgctcctttgttcgcagaaataaaagaattcagagctagtgaaattggatcccaagtcagttataatgctattcggtattccaaacctgaatattatatcttgtatgaattccactaccttagctgaagtcagagaagcaatgggtttgtactctatccatttagtgaatttgtcaatggcaaccaggacgtgagtatagcctccctgagctttcttgaagggtccaatcatgtccagtccccagcatgcaaatggccatgtcactagtatagtttgcagttgctttgctggtaaatgctgctgctttgataagaattggcaagcttcgcacttctggactaactcggctgcatcgttttttgccgtcggccagtagaaaccagacctgaagaccttccccactaaagttctagatgctacatgtatcccgcactgtccggcatggatctcatctaacagttgcttcccagtaaccgaaggaatgcacttcatgaggactcctgttgcgcctcttctgtacagtgtatccccaatgagggtgtagtgggctgactgtcttgtgatgtgttctgctgcagctttatcatccggttcctcttcgtttttatattcttaataataggctccctacagtcattagagtctgactctggctggctcaaaacattgcactcttctacccgatctaaggaaatactcgggtgtggtacttcttggatgaaaactctaggtgggacctgggcccg

SEQ ID NO: 159898 - DNA, 560 bp, Zea Mays
ctgggtgcataggttctggcataggttctggaataataaaaaacttagcgaccgcttacataggttttggcataaacaataatttgcatagctgcagcaaaacaagcaggatcacacgcacaagaactggtagaactattagtaagagctggtagaacacaagaaaagacactgaccttttgcgtcgagtgtccttagcttcccgtcgcgcggatggcgtatggcgtatggcgtatggatcgattaggggtttttaaatacatagaagtgtggcggatccgtgggatttgggggcgcagggctacaaccttccatcgacgggatgtaggcgtagctggcgcggctgattttgggcatttggtggcgcaggatgaacgcctccgcggagctttgcctggcgcggacttccatcgacgggcgagacgcgggatgaatgcgccaccttccattgacgggatgaatgcgccaccttccatctacggcctgcgattccccaaatccccgaccttccatcgacgggcgagtcgcgggatcggggcgcggctcgaccttccattcat

SEQ ID NO: 159899 - DNA, 687 bp, Zea Mays
agggaaacgagcaccaggggcactcgactgattggtctgggtgggggcaggagtgggatgaatgaacataggttgtctgaagggatatatgggtgggcgaggagaagaatgatttgaattgaaaggtcggattaccaaccttgtcctcttttcaggtacctaagttgatctttcacccgcatatccttttgactttccttgccccgcatttttggcttcaactaacagtgatgtactgatagccctgcagtatgtgaggtccagacacgttgccatcttgcgctggagtctgtcatttagtcccctcatgaagaaattcttatttttcaagtctgtgtccctttgatcaatggcgtattgggagaggagattgaatttattgagatactacatcacagaatctcccccttgcttcagtgagatgaactcttccagtttcatttgtagcactccttccggaacataatgttccctaaatgccatcttgaactcttcccaagtaacttgatgtcccacaggttggatggcagaaaagtttgcccatcaagtgctggtggggcctcttaactgctgagcggcaaacaggggcttctgtatctcggtacatcggattagcccgaatttttgttccatcagccacacccattcattagccttgaggggttcctccgccttaacaaagagcgg

SEQ ID NO: 159900 - DNA, 580 bp, Zea Mays
aggggttgatgagaggagatgaagcaactcaaaaaggcaataccactagatttgacacaaaatgaaataccacgagaactaagtgtggtcacggccacactttctcaaaaatccaaagacttagatgttatggttccaaacatctaaggatctcttagctagaatgagaaaagatgggattacaaactacatgagggaataaatgtgctcaagagatggtagaatggttcagccctctgtccgatttataatgagttatttgtctttcctgaactaccctaagatacatatagtgtatccactcagcctatggtaaaatggaccaactcttgatatgttgatatgacaaccacaccctttcacaaagttgctttgccttgatagatccttcataatgatgccacgtgtcgccttagattccctctaaaccacgttgtcggattttgaggcccaaacctagcaaaacctgtgaactaacgcgcttggtaattttgaggatcaaccagcgaaactaccgagggtagagtactccacacatgtcctgatgtcctagacacgtgtcccgatggtccacaaccac

SEQ ID NO: 159901 - DNA, 580 bp, Zea Mays
ctctgttcatgccaccagtaaagcacccctcttccaccccttgtgagtcaattcaaatttcctgtgaaatctagtgaaaccaagtggtcatatgtgttcctctgtgtgccttgagtatccttgcaggttcctagctcctttgggagggttttcccacctcaaatagccatttccccaaaaccctaaaactccgccgtccacgtgttcggtgaaatgcccaaaccagccaaaaatgccccgattgaacccaaatttttcaggcaccttcacaacacctccagtaacatattcgccaaatttcacgcccatccgatattccaggctttaatttcacccaattccccgtttcgagcgatcgtttccgagccgagtgcccaaatctctttttcttctcctaatttcaaaccaagcacacacttcactcataatcacccatataaacctactcgtgaagtatcggctcaattccacgtcatttcgtgcctcaattcgaattccaaacctcctatggcactttttatcgttcaaacgccgttttcacgtcgtttgacctctcaatcgtctcatcccttgttttctg

SEQ ID NO: 159902 - DNA, 353 bp, Zea Mays
attgcaagagccatagcccaaaaatagcaaaacactccccactcaagccacttgacagtgttggctaggattgctctaatcacacaagccagttaacaagtagtggcaggagtgttgattcactggaagtaagctaagcctaatgctgcattaaaatgatcacattaaacttattcacataaccaacaaagccattaaaccccaataaactggcagtttctttgcacaccaattaaactggcaggtttcttgcacacctcaatttgtgatgagtcactaaccacgcatactcataagatcgcatcgccctgcacccacatagcacagatcgccatatatgttggatgaataca

SEQ ID NO: 159903 - DNA, 489 bp, Zea Mays
tggcacaagggatttgattcaagagcatatatccttcagggtatggccacttatggaaaactgggaaatgccgaagggagaccaccaccaactctagtgatggtggtctggtccgactgaagtataccttcagatttagggagaagtttgatgagccaaacgacgactggctgaagtgtattgaagctaccagtgatgagctacttggagcatactccaaggccgaagataatgctttgtccgcagccttcggaggccgggggaagaaaagactgaacagggtctttgatgcgattggcttcatataccccgattattgcttcccgctgcgagggcaaggaaaaaagagtaagactgccgcttcggccactgtagctgagccgaagggcaaaaagatgaaggttctgactcaccggccgcgttatattgaaccggccgtggtgcctaaatttatcgaaggagcctcttcaactgctgaagcaagacaag

SEQ ID NO: 159904 - DNA, 454 bp, Zea Mays
aacagagcagctaaaacagctaaaacagagtgtcctgtcaagttgctgcacatttcaataggtgatgtgtagcagagaaatggtgtggaccggtgcagacttgtcagagcaagagttttactgatctgatgtttgattgatgagcatgtatggcagcgagttcccaaacacagaaatctagtgaattaatgataacagaaattgaaactgctgcaacaatgatcctatttggcggcacatgataggtgtaatcgatcacattgggtcctgggtaccgtttcttggagagggtgatggcatagtactgcactactactgaccggtcatagcaaggcaatcgttttctgggtctgatgagtcattgatgaagtatgatcgcagcaggttctcaagcttgggaatccgacaatgtgtgtacataagccacaattctaaattggctgttggagggaga

SEQ ID NO: 159905 - DNA, 495 bp, Zea Mays
taaggcttttgattcggtctcttgggctttcttgttggaagtcctgcagaagttgggttttgggcagatctagtgtgacatcatttgtgggctgttagcctcttcttcgacgagaattttattaaatggtgttcccggggactacatagttcaccagcggggtcttcggcagtgggaccctttatctccaatgcttttcatcttagtcatggacactctcaacttgctaatccagagggcttctgatgaagggctacttcactctctgtccacgaacagtttgcagcaccatttctctttgtatgcggatgatgcggtggttttcctcaagccggtcccctcagacataaatctgattctggaaatccttaggatttttggggacgcgtccggtctaaagaccaatgttcagaagagtaatgtttttcctattcgatgttctgaggatgatcttgcttgtgttcaggagctccttccatgttccattttcggagt

SEQ ID NO: 159906 - DNA, 656 bp, Zea Mays
caggatggatggaaggaactaaggaacttgaaatcatggacactgccacactgcactattgggcattcgcattcagggcaatagaagcatctgaaatccgtttggagaattttgtttgtttattccccattgcactaagataccttggagcaatctgacagtcttaatgggccacagaaagtttgggcaggaaacaaacacttagtggcagatgaaatagcttttgatctggactcgcatccaatagccgagacacccttcttccatgcctgcatggggtcatttagacgccggggaactgcagctgcctaccaaactcttgatcgagctcagcaccagccaccaggtacattactatttaccatttgataacacggaaaagctttttttttaacccttcatccgaccagtccaacaaatcaaacccataatgtggaggaatggaatgggagttactgacacactggaaggtccagattgaaattgttggcaggacatggacgttggatgagcatggggattttcagaaggaatggttcgtgcagaacatgccaattgtcatagagccatggaggtcctctagcggatcaatcaaggccacaaacatgcaaacacaagagtcaaaacaagcacaggtacctttcacaaaagagggg

SEQ ID NO: 159907 - DNA, 822 bp, Zea Mays
ttcgccccaatcgtcgtccaccccacgctcgcagccgcctccccacatccatgtctccatctcccccacgttgctcggtattcaaaagggagacactgagcctcgcacgttcccccactccccaaacgtacaattactcatccatttcccctacccgcacaccacgcagcgccattgccatgctcacgatccatcgtcatcaccgcactatcgtcatccctctcacctcggtaagctttgtcgggcataggaagccatagacacgtgatcgttccctcttcacctcactgtctcgccttgcctccgttcaaccccctttcccctgtgctaaaccggagttgtcgtcaccatcccaagctatggtcgcattcctgtcattgaggagtggccttcgagttgcaccttgaggtaagaaagcacacccgctcctcccgttcactaatttacacccccctgtgcccaatttatcgcaagagtcgtgctccacgtgaccactgcaccctcaccgtcgtgcacccacgtcgacctcatggctgcgacatagcctactcctatcgaatcgactacaccacactagacttgtcccacctaaccccggccacacctgacccctcttgcaaccccgattactcgctaaagctattttcaccctgatagagctgccatgccatcatccacacgatctcgggcaccccgccatgactgggaccctcaccgtcgagctcctcggaccaccctccacctccctagcccaccttacatgcgtcaaactctctggaacacccacatgcctcaactccggtgagccatcaccatgctccg

SEQ ID NO: 159908 - DNA, 509 bp, Zea Mays
ggtcaattgtacagtcattgtaccagagacccgccatctgagttgtaccaactctttgaaaaataagcttgatccgaggaactccattatagaaaagtggagtcatagtgcaagccatagggcgcctcacagtccaatagggcatggactaagagttcacaccaagaccactctcatcaagagtgtggctagcaaaaggttcaagtgaacaatatagccaaccaacaacatccaggtgaagcccccttcaacgccatgattacatcccgcaacaaggctgcggcggggcgaggcaagaggcaggggcagcggaagaggcccccaacatcaaaaaaagctctattgtgtcttccatggcgaagacgtaggcattcaactagagatgcctggtaacaaaggaagccaaagatcgcatggctagagcggtccccacaaacaactagcgagccatagtccacacctatcaccagcaataccaccatcacttcaaaaaggaacacccaccccac

SEQ ID NO: 159909 - DNA, 801 bp, Zea Mays
gctggccatggcgcggcgtcacacggcggcgtagaccaccgatttgggggaaaacctaaattctccggctatggtggctattcaagggcgagggttggtgctctggcttcgtaacaatctaacggagcaggccacacactcaatttatagcatccgcaagcgatggctccgaattcgggaagggtaaggtggcgaccgaagaggatgtgagtcacaggagtcgcttatcgtggcatttactgggcaacggtttacgacgtccactgcctagtctttacggctcgcgacgacgtggtgaaatggcttaaggcatgtcatgaccgaggagaactgcggcacgacgacggtggtcgcgcggccacgtcgccggtgcaagtggctacagcgacagggcagtatagtgccccaagttcatccaccagcgagatcttttcacccaccatggttatccacttcacataggcacgaatcacggcggctagtgtgaatcgcggcgcaagttcactggtggcgacgttcactgaacctgaaatctgattcaggttactgtaccatggaagctccattcagtgcgcctgacagagtaagtttgggagcgatttacttcaaaaatcgtacagcacctggccaagcttggtacaacaaatttgttcactaatgttagggcttcaactttgccatggtgaccctagtcttaactccattgaattagccacaaattgtctccaaagttgaccaaatgtcactaaacttcaatttttagaaccgaagttgtttgatagcctgacttctagggcattt

SEQ ID NO: 159910 - DNA, 561 bp, Zea Mays
tgagttctagtcgactcagccatgccatcacgctcgctgtcggcactcaccacgatcggagcagtcagtggccctcgctgtcgacatcccgcacaacagaaaccccgtcacacactcggatctcccctgcgcaaaccccgaccagccactgcgtgaggtgggcgtcgtgtcctcgctcgtcaagacaggcatcacgcgtctacccctgcgcatgccccccccccgcacggcgcgattcgtagaaccgcacgtggacgatagccccaaaaccacattcttgtagtgcgcactcacgttcgcttgcgcgtagcctgtcgtcgaggctccgatgatgtccgtcccccctcgtacgcgtttgtctaccacccctctacaccctatacagtgttatctacacccctttttttgcgtatgcatagcctcgccatctcatcgttctcaatgtcgcgtcgtcatcctgaggtgagaacgtctatcccatcatcatctatccctagacgtctacccctcgtctaagccatatgaaaaattccctcactgttacgttcactcacgttgtcc

SEQ ID NO: 159911 - DNA, 705 bp, Zea Mays
cgggagtgttctagactttgtgtcctacaactttatagaagtcagactcaagtttgtgtgtcatggagttgcccaattgcattagcgatggtagaggtccaattttttgttctcgttgcaatggtgttgctcagtttcatgttatttgcgtacttctcaatgaagtcggtcttggatacatcgttgtccctattatctacccttacattattggcttgtcctctgatgggttgtctcatccacgacattgctcttgtcgctagagatgtcatattcatcctcgtcattcggggtcgatttccttgagcatgaaaacctcccgactatgatcacacatactcatgttgttgtaggtgtagggctcgatggttgttacttccaagatgtgagtgagaggtgatcttgcttgatatagtagtgccctcatgtaggcaactacgtagaaagaatcagaatagttcccgagtaattggaccactgtttagtgtatgatcttcacttatgacgcgtcggtgaagactaagcctttttagcacctattatcatgactttttttatccctactctattgaaagagtggacaagatggctttcaatattgccatttgatagatagaaggagcattcttgaacccaatcgataataggcttagaagccgacttagaaagcttggccatgttgaagtcagacttgatctattcgag

SEQ ID NO: 159912 - DNA, 570 bp, Zea Mays
aacttgtcgggatgtgagatgcgtatctcttaccatgacgcagaatcgtagcttttctttggtcagccttacacacatcatcctgcccaccttacgcttcgtgccgtttccgtcagcaggacttcggcggcagtttaaaccgtgcctgtgtttgtcgcggtgtgctgctgtggtcctgtttattattgcccggttcagaatgcaaactttagtggaggatttggggattacacaactactactagcattttctgattaggctagctagttatttgctcttgcgtggctttcagaattagcatggatgaaaatatctgctgtacgctaccctcagtcagtgaagagaacctttttgagatgagatactctctctctttttctgatcgattagcactaccagagatgatgtttaaacgagctgctatttaccaactgtagaaatttctcagcttgctttctgatgaattaattcccaactgtagatatccttattattgagttcgtgcaccagatttaatttctgtaagcgacaaggctgtgcagttggttctcatatttcactgtcaaact

SEQ ID NO: 159913 - DNA, 367 bp, Zea Mays
tgtagatgttgcatcgggatcccatcaagtaatgcctccagatctttagagcgtgaactactgccgcaagttccaagtcatgagtggggtaattctgcttatgaggcttgagtgctcttgacgcatacgcgatggctcggttatcttgcatcagaacacacccaagccctgttctggaagcaacgcaatatacatcgaacattttggtgttgtcgggctatgccagcacgggtgcggttgtcaggtgctgcctgaaggtatggaaggcatcctcgcatttctgactccactcaaatttgaatcccttcttcaagagctcagtcattggtttggcaattctagaaaaatctagaatgaatcgctgata

SEQ ID NO: 159914 - DNA, 432 bp, Zea Mays
tgtctcaaaggatcgagtgcaacagattgtgggtcccatgggtgcgctactaaacatcaatattgagtcgtatgcaggactaaaccttggtttggtggtactgtggttgctggtgctcctgctactggcagcggtcacgaccaagtgatggtggcggtggtggcacccgcgtgctatggacccagaagctaccatgtgcctccacccccgcgtttctttgatgcttcacgggaggtcccacgatgagggacccatcgccgtggcacaacctgtgttgcctttcctctgtcccccctggagtctatggggacggagctgcttccttcgagttgcttgcccttgctcgagggaccagggccatgccgctaggccaggatccggatcccacagttgggattacccctgtctctcgaacgttatgcacatgaccgg

SEQ ID NO: 159915 - DNA, 3578 bp, Zea Mays
gtcgtgcatacctacctggtgtgctcttctgcttcgccatgattaatgtggcatcgatcttgctggctacctaaacatggatggcacctgcatgcaccactgcattgccggcaacaagcaaggagccatgacacttgtggatcgagtgtggcaatctgatctgttacgcggttgaagagatttatttggtaagattttggatggaagaagaccgcgcccctgcgtgcgcccatggatctagggggaaatgaacactagccagaggagaggagttaagttaccagctgcttggccaccaccaccattctcatggatgatggccaaaggcatggcggctagcttctcaaacttgcaaggtcgatactacttttggtttagtgcaatggcggatgaaggaggtggaggaagaagatgcgatggcgtgcgtgatggacacgttgcatggaaacgcaccattgggagatccatgctaggatctttggcataattcaattgttcaacttggtaagccttccttcaaccactagttagctcctaccaattcctttgtttttttttcttgtcataatataatatatatgctactattacaagtctctctctttctctctctctgcctcacacggtacatttggtggagttgttatagtttgctgaccattttgatatggctatctaatgctgccaatattgtaatgggtaaagcgggatatgctcatttgcatgctcctgagaaaattaggtcaagtccctagataaagctgatttgttcgctcccaataatgaagaggatcttgaagttcctgcacacgcctcagtagtggatcgggtccatctttttaaaagtttatcctgaaaaatttcgcttgctcttctatatatcttgctgtttgttgcggttgtttgtattataactaatcgtgctttggcctccactggtaataagttaatgccccatttggttggtcttcttattttactctgcgtaatcatcactcttgtgtgctacggaaggccagctagcgtgcattcccagcgcatacatatatatacaccgccatgcgcatatagtatatagtacacatataaaggaaaaatgtatacaaagctagtactctcttgcatgtagctaataatagagaggttccctagctgcctgaggacgaggaggatgtggttcttgttttctgcctcatgtcgagcacaggctacacagaaatagcacgatcccatgcatcagtggctagtgctgcgtgccctaattcctgctcactgtcccctcaagcaaaatcatgggacttctcaaaaccaggcacccctttttggtggccagcctgcagccctgaatctctctcctgttgagttgtcccctctcgtcctatctcagagcaaaagatcattctcttttggatgcgtgtcttgacttgcgtaggggatctttgcgtgttcgtcattggcacctcactcgatcaaagtgagccatgcatgaaattaaatgcagcactagctatagtttggtactacttctagactatattactggctgttatatatagatagaagaagatcttgctccgatccatcgctagcggctccatcattctttgttgcatcacggccactgcattattatttggttggatgaaaagggagagcaaaaaggcgacaatcatattgtctcccttccttccgcttttgagtgccgtttagttccaagcgtaacttgaatccttttttcttctttttttgaacaacggaacggaaatagtattttgtagatgtttcaaagcatttctccacccgaatcagtccttgtgcattgggcagcaaaatttggaaagtcgtggaatataatagaagttccaaattttgtcttttttttttcttctttcaacggtcgagtcgatcgtcgtcatgtttacattattgattcttcttttcgtgacgaaataggaaatagctagggaaaatgcctggaataatactagtttattgcattgctttcttccatcagtatcgcgcctttagttggtttaatttaaaggcatcgccagctttagtttaaccagattaattaattactagctattagtagctagatatcgtatctaatgtagaaagatcgaccggggagatgatttgctatgattcttgagctcacctatttgtttccctcatgattccttttcatttcatctgtaaagccccagcactctggtaggcaacatcgatcgattccaagtcctttcagctggattgcgcatgcattagcaaacgtcacatttcccttgcttttttttttttgtttgattgatggtttttcatgcactttttaggatatatttgaggaattcaattcattatatttgctccggcctcttattctctttcatctatcgatcgagcttattaagtcgaatttctctccgagcaataacaagatgagtcagcaatgtcgtttttcgctttaatggttatatataagcgagtgataatacacagaaccggtaccatatatatacgttatctatatatacatgtattttaaccggagatcgagtatatatggaacgggaaaaattaaagacggcagaaaaataaacgcaagcagcatacagttatcagagctagtacttctcccatccccagctagctagctactcgatttaggtgtaatgttgagatgtaatatcacatcacacacccggcggctccagctaagcctaaacgtagctcgctcgttctatcgacatcatctgcatcgatcgatcatgcaggattattgattattacagagtgagcaaacagtagtagtacgtgcaatacatatccaccgtgtctctcgtgccttgcattcgcttgctacactccgactgtgcatgtagagactacatgtatccacagaaccacctagctagtagggtttgcagtttggttattattgacataaactgttgatggtcttttccctgctagctgttcgatcggttttaatttctgaatcattattatggttgtttaattacatactgatctttgtgcgttttattttaattattagctggtcattctcgtgatctgtcaagacaaccagacaaaattaagcagggctgtctttggtactgaacagtgcgtgcagtctgtatatatgcttcgtttcttatacggattaagcatgcatttgcaggggccggccgggcacgacagccgcatgactgcatgcatgcgctgatgacacccctgaataggagcggacgggatgatacaataacccacgagattatactgtactgcttacattgcattgcattgcacccctcaaaaatgatgcgaaaagagcccacgcagccaagagacaagaaggcaaagtgaggctctgcatgctttggcaccgcaagaaggctctgctcttcctattgatttgttgaattggaatcatgtcattgttctgttgccgtaagcgatatgcgcgcaaccggcttgagcgtatatatgtatatctatttgcttcagatatcgccatgcaaaaatagcatagtataactagctaaattatcgtctgcgcgtttcaaggttca

SEQ ID NO: 159916 - DNA, 963 bp, Zea Mays
ttcgggctataaagcacgcgcacgccaccttccgaggacctgtgcgcgtggcgccaacgccgtgggccaagggcacccaccgtccgcagtggggaattcttgcgacggcaactggaggaccgtgcgcgattctctgccatcgtcgggaattggagcgccaaaacgtgctgggtgatcgctgtctcttgctgcgggtgttggacgactcctcgggtaaggcggtcaactagggtcgtgggaattcctcgccggtgtccgatttgccgccgtgaacccgcatgtctccgtgggcggcgagtcctgctacacgattcacggtaaaatcgctcccatttggttcgacatcccttcctcttccgtttgcaccatttagcgctcgagttagggctatgggggtcggtcggccatgttgccggtgggcgcaccgccgggtggcttctccgccgcagtggctaggattgaattgaggaagacggcgcctcggccgttgatcagcaagggaagggcccagattagatcggcgaaaattgattgtgggccatagatcctgaggcgtgcggcttagatgtaatacgtacttacctcttcgtttcatttaatccgggcggtcgatccaagatcttgcggttagcattgtataccgcttcgggacaagccctagttaatccatgcccttgatatcaaatcctgcggccggggtcgcgtaccctttcatgatctaatcctgaccgcagatcatgatccaacggctagggcttatccataccccttcgcatggcgttcttacttaagagcccctaccctttgccacaattaacccgccatcccgcgcggtgttctctgtgtctggggaatctttcaagttagcccctgatctttttggtatttggtgcgcagtccagaagatagtgaaaatagaaaattaattatagaaattggtttttaatacaaaaataaatccag

SEQ ID NO: 159917 - DNA, 539 bp, Zea Mays
cttcgttatatgactctacctacatacttaaactaaaaacagcaacaacagttcggtaaatgttgttctatggggtgggcaagctagcttattccctggagaacagatctacaacgatggccagtcctctccacagatcttgatgtttgttggcatgcttgtcaagaaatacgcgggtatactaactttgaacttttgaatttagtcctttttgtagttgggacctaatgccctttgttttagatggactgtgcttgtctggcggctcaccctgtaagtggtacattaatcctgatgttcgtgaagcatgtgccctcatggctaggtaatattctgctatgcttgctgcacgtatacgactgttgtttgtcttcgctgtgttctaacttgagcttgattcattgtatgtacaaaccagtgcgaggaaagcacatagtcccattaagtggaacgaggttctatcttcgaatcagcctatgccccatgttcccgaggaacaaaaaatcgcttgtattagagatctgcacccatttgagaat

SEQ ID NO: 159918 - DNA, 564 bp, Zea Mays
cacaactctgtgtgcttgaaaatagtagcgcaacttcctggacgcaacaagtatagcatagataagcttgtgcatctcaaggtacgtggtctttgcctcatggaggacttcgctgacgtagtagactggcttctggatggttcgaacccctgcggttggtcctgaaccataaaactcttgaccttccatcaccatcttggtggtcggaccaccaccttctcctaagggaactttctgactcccctgggggatgttgtgccgtcctttcggcgaccagcaccatgctcaccgcctctgtagccgctgcaatgtataagtacaacggctcccctggctctggagctaccagtattggtagggacacaaggtgttgtttcaactcttgaaaggctcgttctacctcctcagtccaagagaatgggccgaacttccgtaatagcttgaagaaaggtagcgccctctcagccagtcttgagatgaagtggctaagggcggctagtgaccccgtaagcttctggacgtccttgattcaggccggaggcctcattgtctcaattgctttga

SEQ ID NO: 159919 - DNA, 1097 bp, Zea Mays
ccgtccagccatactgctttcgaacgctcccattctcccacgctacggatctccgctccccaacccgtgtgcccaccatcctcacgttctcacaaaaccctaacccgcatccaacctccatcttcaatatcgccgccccgctcattcctcctgtggtacccctcctccgtcgccgacgtgtagcctaagccgtatagcgtcgtcgaggcaaacctcttccgcctcccctccttcaacgccgaaggcgggggcgtggggatgcaggaggagccaccaaatcccccgccggtggtctatcgggatcagatgaatcggtcgaggcaaccttccatattcccctaccccaccagtggcttcctccttgccctcctcttcgtcgcatcagggacctcactccctactctaggaggtttctaccggggaggagcggcccaggtgcgttgtatctaccaacctctccggtgatctcctcctcgagaatagggctcacgttggagaggatggacggtcgtcatgcgtcacaacaactccgccctcgaggtggatccccgcgggcagcggcggtggatcctcgtcgtctgacggtggttccgtttcttggttggagcgcagatctggctccgtcgaggcgaagagcaacggcaaaccggacaaggagaagaagggcggcggaggcggcacgccgccaacccccaaggacagcaagccgcgcaagccagccgtgcccaaggcgagcgccgccggccatggcacgccgcgcactgctgacaagtcccccggctcggggtcggccgaccgcaaggcgccaacgcccaaggccgccgcctctcgcctcgctacgactccagaggtatggtaatccgcgactaccatgccaccgcctgcgggcacgaaaatcctcatgctttttcgcggaattcagagttgtattgatggtttcagaaggggaagcccgcgaagccgccgcaggagcagcaggcgcagcttgccgcgatccgagaagagctcgtgaacgcaaagagcagttggtggagaacgagaaggagaagtgcaaagttcttgctgagctgaagcgtgccaagaaggtggctgatgag

SEQ ID NO: 159920 - DNA, 392 bp, Zea Mays
ccgagacccatggaaatcttaacaaccggtcaaagaacgcctataaccaggccgacgttcatggcggcgaagtcagagtcgtgcgtgcggacaccgcgtcgctgaccgaaggcccatgtgtctgtgagcgcaaatgcacgagcgcgcatccaagagaccgagcattgggtcccgcatgtcagcgtgatgacgcatgcagactggtgcttttgaggtggctggtgtgcagtctccatcggcccgaagcgcgcgcgtcgcggaggggataacccagacaacaaggccccacatggaagtcacccggcgcgcgtggagaggaaaaggaggccgaccaggcggcccacaggtcagccggttggcacgagggaaaggggaaatgggccaaatgtgca

SEQ ID NO: 159921 - DNA, 440 bp, Zea Mays
gccaggcccaggccgcgcaagctcgctcggggctccgtcctttaaccgacccgtgcttcgatccgggagctgaaaagtggtggtgtagatggcacgcgacggcggctggctcctcctccacctcggcacgcgccgcgaggacgaaggtccagggcagggaagcaaagcaacagagtcgagcgtgggcgtgtcggtggcgacccggtctgttcgcggaggggtagcagatgacaggtggggctctgtcggacttcgacttaagtgtgagtgtagcgcggaggagaagtggagaacgcgtcgcgaggaagcccaatgtgcacgggacgcgaagtggaggacgggggacggcacggcagcgggcttcaccgacgaggtgtaggagtaggagggacgttgtagacggatgtcagccttctccgctggaccgctgccgcttgctt

SEQ ID NO: 159922 - DNA, 510 bp, Zea Mays
cgaagaacagcacaccatcagggggagaagatgacgaggatcctcctcgtcccttcaaacatgtcaagggcaagattgtctatcttgagcagcaagagggcagaaagaagaggcacttggatagagccgcacatgcagcacttgcagcggcaacaacaacaaattagcctgagaaaggaggctagctccagatttcttctgatcaaattacctatcgagttcgtcgcctcgcgtctcggcctcactccactactcccccactccttccgccatagtctccactccacctcccactttgccagctcccgtcgctcatgagccgtccaccacacccgctttgtccaccacctccaccactccagcttccactgcccccgctcctgcttctgctccgcctattcctccacctcgcttcagggagcgtgacgagaccaaggtgagatcgcttgctgctgatccatgtctgcttgatctttagcgagccactgctgcccgggtacgttggttcag

SEQ ID NO: 159923 - DNA, 352 bp, Zea Mays
tctgggagagcttcgactacccgacggacacccagctacccggcgtaaagatcgggtgggacaaggtcacaggcttggaccgccggcttgtttcgaggaagaactccgtcgatctgtcctcaggtctatactcgtcgacgatgggccacgacggggtcgccaggatgctgtggaactcgtctgccgtgtactggtctagcacgtggaccggtgggttcttcagcgcgataccggagatgtccgcaggctcccctctcgccaacttcaccttcgtcgacaacgcccgagaggtctacttcacctacaacatcttcgacgagagcacggtcatccgcaccacgctgcatgtctc

SEQ ID NO: 159924 - DNA, 792 bp, Zea Mays
aagaaaaagcagactaagccaatcacgaaaaaccacattggaatgagcacagagggttcaacaaaaccatatcccgttttcttgctcgattaattcagtttaggattgcctatttgatggaaaattctctgccgtggccggataagcaacagaagtctcccttgtatcgttttttccatttgaaaacaacaaacgtagacatgagctaactcgtcctgacctgcttcccattatgcatgtgtccccaaagtaataactgtcttataagcgctcgctctcggttaagttaagttgaacaaagaactaatatggtgtttggtttgaggaataaactagtccattaaactagtccttttttatttagtttgtgaaatggaataagtttatccatcatcaccttatcccccatagttagtactaacacgaagaataagatcattccacaaaatttaagaaatgaactcataatgcaccacttcatcttagatggggtgatttcctcaaaacaaacatcccataataaatcgaacaagtgagttgctccaatgctccatcatagaaatccagaatacaacaaacacacacccttcccccttgtacaactaatgcttcagctgttacaaagaatgtaaccaccacccaaggcctaaaaccacagttaagtgatggcaccaaatacgtgtctgccttgagctctgcttggagtcaaaattttctgacagttctgcttcagattcaaagccatcttttagcctttgctgccgagttcacgggaggtggtgtttttgcacc

SEQ ID NO: 159925 - DNA, 884 bp, Zea Mays
cttcacaggtgtgattgtagaagatttttgctgcacccgacttgaatccgacccactgccatccgatctgacgttgtccaactcatgtttatgaggtcatggagttcggggttcaccagggcacgacagtggctcttgccattgcacagctacacttcggtggtaacctccgtggtgccatcatcctgcttgatggttcgacaacgtcagatctagacattttaacaggtggttttatgccactgcgaacgttgtactcggggtagtgtccgtagaggaaataatccacgaccttttgtagttctgtttatggactgaccgtttcgatattgcgaagtgcatgtgtttcgggtcctcgagatcctggctggtcttaggatttttcttggtcaggggctcttttcgtgcgatttttactcatccaccatactcgtgcgggtcgagcccccgagcctctactcgaagcagatatccatctaggggggtcatcccgtatttttaattttactctcccttatgtatccccttcacgggaatgagaggaggtgagctataccacgcttttctcgatgggttagcaatggcgctcgctgagttacaaattgggaatccaagtgagaccctggttcatttcacaggatccaagcatgtggtccgatggggaccgtcctcatactcctgagcactgactcatatagttgctagttccgtttgactagaaccgacggctcactgcctatctccgcgataaaccatgagtcagaccttcctaggacttcaacacgagctggtgactccctcgacgcttcacatgtcatggtcctggatgctagtgtgcccatcaccagatgtccctcgttcagctttttgttggtgcggtcgcg

SEQ ID NO: 159926 - DNA, 428 bp, Zea Mays
tggaagttggagaagaaggaagcgactcccaaatcgtgagagatcaactgatggctcggcaaaggatcaccacccggagcaacttgcaacgattcagcagggaccaattcagtgacatcagcagaacccaaaaccttgtcatcaggtacgctggcctctaaagcgacgccttgaccaaaggcttgggctgtcaccatgcaaccggagtgtggaggagaagaccctacgtgaacatccatggaagtgcaagagggagaacccgctcggacaccctcgggggctggatcatagcttgcactacccatccgagctggatcatctccgacagcaccctcgggggctgggtagtaacttgcactatccatccgagccggatcatccccggcagcaccctcgggggctgggtaaaggccagcaccgtcattgag

SEQ ID NO: 159927 - DNA, 620 bp, Zea Mays
aaattgattcatttttaaatcaatttttgaaattggaaacttggcaaacggatttttgctccttagatgtgtgttgttgtcagagggactgtcaccaaggattgatgtatgcaccgaccccttagacaatatatatagagttcatgaaacatgacataggagataaggacaaatcattgatgtaaaaagcaatagatgtatcatctctgcaccctaatggaagataaacagagaggtgtccgactttgcctcgtgaaatcccaacatagcaagaaacaaagcaaactagttgtaccaggcttagggcatccgcttaagcccatagagggacttattgaggcggcaaaccaagtccgaatgtgttgggtcgatgaaacccaattggctgagtagcatatacggtctcaaagagcatgccatgtagaaaggcattcttcacgttgagttggtgcaccaactagtcatgtgagagtgccaaggacaacactatgtgaacaatggtcgatttaacaattgggataaaaatctcatcataatcaatgtcggggcgttgagtgaagtcgcgacacacccaacatgccttgtagcgcttcaaggatccattagcgtgtcgtttatga

SEQ ID NO: 159928 - DNA, 1016 bp, Zea Mays
gagggaacaaaatcctgagagctcagttttcaaacccgaaattctaggacctagaagtaatactcttaatgctggggtggactggagattcgtttataaatactcgacgggttcttatgaaaaagaccatggttgaaagggtatccattaaccacacccgttcgatatgcttcctacgaaccagatcagatctgaacccctctgaaccggtacgttacataggcgctaggatcccgaatcaacggccgatcgaccaccacaccataccccaaagcccagtcgtccgatcagatccaaccgctcagatcaaaacatgcgaaggggtacgtagcgttctaatctaagtcgttcatcaggatccaacggccagtggccaacccctaaaccacgatgcctaggccaccgccggcgagctgaggcacggtggcgccatagcccgtgaaggccgaatcggggcaccggtggtctaaaacttgatctaaagcgagctacatgatgtaggggcaatggtgaacatgctagtggcatacataccgcgattgagtttagcagcgggccggcgacggtgtttagtggtgaatcacattccgatgagaaattcccacgcgtgcagaaggacctttcagccgattgatctccagaaacttcccaagctccccggagacgaaccccaaccacaagcacgagcgagaacttcggtgttcttgtgaatccacagcggcagcggcgcacgacttctttggtcacacgggtagctaggtaccgtggggaggagacggaaggcagggctcgatgctcgattttatagtctctcctaggtcagtttggtgcttgaacgagccgcccggagtccgcgcgaggattgcagccgaccctgacggaatcgctggttgttgcgacgatgccgcaggggtgatgacaacacggtcccgccattcagagagggtacaacatatgggtggcctctaggaagggcccacatgccggggtgagacgggcggggcgtggtgcacgcc

SEQ ID NO: 159929 - DNA, 288 bp, Zea Mays
ctcagaactccagggacatatttgcaaggttacccgccggaaagggtaaggaacgagatcggtcgtcggatctacaatgcgcggaccagattatatcagccgacgaccaactcccttataaaccctgagccgtccgatcgagatcgaccgaccgcgatttaatttctgctcgatcctattccaaccgctggattcacgatcaacgccacacaacatctggctaaatagtaactaatcatgtgcgtccaacgatggatcaatagccaggatcgcgtctccttgaccacg

SEQ ID NO: 159930 - DNA, 436 bp, Zea Mays
gaataatatgtttatagcaagtataatttgggactaaaggtgaactttatgctggggtggagagagaagggaagtgggctgttgaagcacattaatcaagaaatcttgtgagagaagaaagtgggccatgtattaatgatgaagtatattcttactgatctactatatggatgggctgatagatgggctatatatttacataaagccagcagtggactgtattattaacttttttaagagtagagacgactatcacattatgtgtgtaggtagggtagagtactctagtgacctagcagtacaatataaaatatgtctttagcttacttcaactcaaatcaaatccgtgcaacctaaggacacatgttcagttgacaaacttttcattcacttctgcttggacggaagccttttggaagtgacgttgcagttgcag

SEQ ID NO: 159931 - DNA, 533 bp, Zea Mays
ggcagaacggcggcgcctcggcttgtgctacaattgcaatgagccctattcctgggggtcacattcgtgtgtgtcgctgtatcttctacataggcggcatggagatcatggacgaaggggacgtggtcggcgaggcgaatctagatgccctggtcttctccctatgggcgtcactggtatgccaatctgtgacatgatgtaggtccgcgtgtctgtgggtgctgcctccttcaccgctctccttgacatcggctctactcataacttcatcaccgaggacgccgcgcgtcacaccagcctggaggtccacctcaacccgcgcctaactgccatagtggtgaatggcgagcgcatctcgtgccctagtgtgctacgtcaggcacccatctccatcgctggggaggacttccacgtcgacctctacatcatgccactcgcttgatataatctggttctcggcacacagtggatggtcaccctcgggcccatagtctgggacttcacctcccggactttggtgttcacccgccagg

SEQ ID NO: 159932 - DNA, 612 bp, Zea Mays
gtcggtggaggaaataatccgtgatctcccataatcttgatttgaggtctgtttgtttctacaacgtgtatggtcattgggtcccttggaccccggttggtcctaggctctttcacggtccaaggggcactattcgtgggactttttcccattcaccatacccatacgaggcgagcccccgagcctctgctcgatgcatagatccgtctagggggtcgtcccgtcgttttgttttactctccttcgtgcatcccttccgcatcgatgataggaggtgagccaaaccacactttcctcgatggtcgagtaatggcgcttagtgagctgcaaataggtaatctgaatgaggccctaggtcctttcgcaggatccaagcgcggggttcactaggggaccgtcctcatacccccaggcaccgactcatatacttaccgactccgttcgaccggactaaacggctcgtggcctctctccgtgataaaccatgagtcagacattcacaggacccaaacacaagctagtgacgccctttgcgctccacacattagggtcttggccgctagtgtgcccatcactttctttcccctcgctcaagattttgttgaggtggcc

SEQ ID NO: 159933 - DNA, 466 bp, Zea Mays
cccaaggcgacctaggaacgagcttcactttggcttgaacactttgagagcggtctgcccacgtgcacggcggaaaccgtgatgttaatcccgtgttcccaatcacttacgcccgaattggtcaaacggatgctacggtgagcattacgtgcctacagagttgctagaacaacactcgagagaggcagagccttaccagagtggtccggcgacggagcgcggagtcttgtgctcaccggtgacagagaaaaggggaaaatgacgtcgcgtcgactctgggtgaaattgggggatgggattaaggctataggaccgtaagaggctgtgctttcatcgcgcgcaatcaatttgggcgaaggtggagagggcagtgcgaatttgacttcgatttagttcactggtgttcgtgatgaccgagcctcgccgtgatccatggggatatttatagccgcggaggtccggcgat

SEQ ID NO: 159934 - DNA, 631 bp, Zea Mays
tacttcgtaccggaatgtaccatgtcatgtcagagacagcgcgctggccaatcaccgatggcatatcatactgcagcacactgtagcagcgcaggaggcagggcatcaaccaatcaccgacaaccgggtaccggatagcgcaagcgccatatttggcggacgagaagtagactgtaaattttagaggacgttgtagcggaccttgctggactcataaaggagacgataaaccgctatatttagcggagacggccgtttaccggctcttgctggagacagtctaacgccgccgccatttgtgccgggacgggatgttccgacgcagcgggaggctgggagggtgagcgattggcagattgcagcggtttggtttcgcgacctgttgggcaccatcagttgacatgccgtgtcaattcagaacgtgaccatctttgtttatttatttatcttttatggaggtaggcattgaccaagctgttggaatttggaaagctatggcctatatgctgagttgccggttgagaaatagaaagcgtaaaggagtgggagattggaggtgcgagtgcgacttgcgagagacaaaccggttactgcagcattggaagtgtaacagcaaaatcaaaaggtcgtc

SEQ ID NO: 159935 - DNA, 471 bp, Zea Mays
tcttctattctgggcaaggggtacttgttcttgattgtgacctcattcagagctcgatagtcgatacacatccttctagtgccatccttcttctccatgaataggacaggggcggcccaaggcgaggtgcttggtcggacgtaacctttctctgatagctcatcaatctgcttcttgagttcaactaactctggtccggatactctgtaagctctcttaaagatggggcggttccaggaagaagctctatggcaaactcaacttttcgctcgggtggcatgcctggtaagtcctttgggaacacatataggaactcggaccaaccttgataacctcaagtggatctgcttcactgctatcaatagccatctgataacaacttcctttccttggctcaggcgggactaactcggtcaccacctcttctcctattgggaacatcaacttaattgtactcttatcacaactgat

SEQ ID NO: 159936 - DNA, 859 bp, Zea Mays
ctcatcttttcctgattgtgtattctaattaaatttgaagttcaaactttatttgaatctatttgaaatagaaaatagaaaataataaaaaagaagaaaacgagcattcctcacttgggccatgcttcacgcatacatgcccacgtcccatgtatatgtttttttacatttctttatttttatggctggacgctgtgtactcgtgacgtccggcatgaggccagcaaccattttttttcgctagcgcgcgtgaccggaggtaaaagctatggccgacgtgtgggcccatacatgcagttctgttcttctagctcaagtcggaatcagccgatagagtcggcttagctgttgtagcgaacaggtcgcccctatattcgcatctattccgtcacccgcataacagaacacccatgagtttgttagaaaaatccggatgcttggatcaggcgcccctgggatatatatatttgaatgtcgtggccctagtcccatggattcgataagatggaagcatcgcgtcgccgccggtgttgagcaggagagcagcctagtgatcgaggggcggagcgatgatcaccgggaccatagggggttgtgcgtagctttctggagcacagggtcgatcgtgaagccagagatttctcgccgaaggcgagcacagccacatagccatgacttctcgcgggcagaaggggttccacactgcaaaactttgtgagtatcagtcttataggttcgtcgtggtctacgctttgtgtatcacttgtccgtatttgattttagttcctgagcgacgtttcgctagtcatcgacgtgatcgccgccgtagagctatggcgtcgtcacggtggcgtgttcg

SEQ ID NO: 159937 - DNA, 568 bp, Zea Mays
gtgtaagactcctctatattgggatcagactggagaaagacagttctttggacctgaacttattcaagaggcagaagaacaagtccgtataattcgggagaatttgagggtagctcaaaccaggcaaaagagctatgctgataatagaagaagaccactggaatttgaggaaggagatcatgtgtacctcaaggtgtcgccacttcatggaatgaggaggtttaaagtcaaaggcaaattggctcctcgctttattgaaccatacatgatctttagtcgagttggggagatggcataccaactcgaattacctgataatctatctgatgtgcataatgtattccatgtgtctcaacttaagaagtgtctccgtgtacctgaggaacagttaccaatggaagagcttagtgttcagggagatttgacttatacggagtatcatgtcaagattcttgatacattgactcgaattacaagaaataaggtgataaagatgtacaaagtgcaatggagtcaccatggagaagatgaagtaacttgggagagagaagaagagcttcgtatagat

SEQ ID NO: 159938 - DNA, 580 bp, Zea Mays
gtccatccatcaatgtaacactcatgtgtttcttcttggggctgggcatccttgtgatgtttcctttttggaatactttgcaattcatcaactgacagtgcattaggtatgagagaatctactattagttgttcagggggagacatctgtctttttatgcaagaaaataaaatctggttcttctgttttgtagtttcactttcatttgcattgatttggcgacaaggaattccatagtactcacaacaacaacatgttccaaggtcacttgtctgttggtttagttgtgcatccttttgtgtcttgaatgtctgttcatcggctgttttatttatagtgttgtttttacttgccaacacaccacattctttgcacttagtgacatcacttgtagttgacattccaaggtctgacatctgtatgggtatggaagaatggaagggacaaaagggttgagcaaagacagattatagagagcatagaaaacccatctttctaaggttttacctagataactgatgccattgtggacaaaagtcacacaatacaccaacaatcatttctgaaagggaattaggct

SEQ ID NO: 159939 - DNA, 379 bp, Zea Mays
caaaagaaaggaattatctgaccacaaaagaaaatttcaaggtcagtctagcaggaacacccgtccgaacaacgctcaaggttcgcagttccgctctggaaatcaaggcggaaacaattatcaagtgcaatgctctagacagcaaagccagagaaataatcagagttagaatcaacaaaggagcaactctcagaccaaccagaggtctggtgggagttcacagaaccgtcaaggtggcgccagtaacacgcaggccagaaacaacgcacctgtccaacccaatggctgcttcaagtgcggtgaactgggccactatgctaacaactgcccaaggcgcaaccagcaggcaccctagaaaaacaataactagagaaatgac

SEQ ID NO: 159940 - DNA, 402 bp, Zea Mays
gttggtcctctcagtctgcccatcagtctgtggatggtaagccgaactaaaattcaatctggtatccaaggactcgtgcaacttcttccaataccgagaagtaaactgtgatccccggtctgacacaatcttcttaggcacaccatgcaagcagacaattcgtgccatatacaactctgccaacttggctcctgaatacgtggtcttcactagaataaagtgggctactttagttagcctgtccacaatcacccatatagaatcatacctagcagatgtgcggggtaatccaacaatgaagtccatgccaatctcttcccatttccactcaggtatcttcagtggatgcagtagtccagctggcctctggtgttcagccttaactctttgacacacatcgca

SEQ ID NO: 159941 - DNA, 385 bp, Zea Mays
atcggtcctatgtgtcccatcgtcctcccctccgttccgcattctcctccgcacaatttcgtccagtggtgtctgcgatggtcaggaacggtggcaactcatcatgcgactccaaaacaaatgccatttgctcttgattagcctctctaccactgtttagttggttactcaccactttgttctaccgcacacaaattctgagagagcaagcgactccaacacaaatgtcatccaagccctaagcacagattgctcctcttcctgcatcgacccaacatctaccgctcaacttcttccttcttttcctgcatcgatcgaaaggtctgtattgatcggcacaatgtttgtcgctagatacgcctcttcttttctttattttcaaatc

SEQ ID NO: 159942 - DNA, 584 bp, Zea Mays
gaatgggatttaccattgaacagtgaactgaagaagatcatcaggtacatcacccctcgccgccggtgacccttgcaccgtgatccacgctgtcgccacgatttgtgctctctggcgaggacataatcatggcacggtaaagatcttggcaccggataggctcaaacccggtcaacagtgagttcgttgtacctacttgggttgcggtcggccgaaatggtcctcgccggcgttggccgcttaccgaccatgtgccacgtgccttagggcattaccacgtcgcagttaaccactgaagcaagccgtccatcgccagaggccttgccacagtgaaagccacggtatcacctgcgccagtaaccttccttctctccgaccgccagcacgccattccaaaattaggagccaacacccttggacactataaattgagaataccattagctccgttaggtaatcacgaagccagagcacccactcctgcctccgattagccaccatagctctctaattcccattttcctccaaattgggtttccgcgcctccgtgaacgccgcgtcatggccagctctctacaggtcca

SEQ ID NO: 159943 - DNA, 636 bp, Zea Mays
gcccccccactctcactgtcgctcagccccactcgtcagtcgcgccccgcctcgctctctcgcgtccgctctccctcggacagatggccctcgctcgtcagccctttctcctctcccatgacctcaccagcgcaaacctcgccgaccaccaccctcttcctgtctcaccgccattactcctacgccagtgaagttaggcaccgctctgcccccagttcactgtgctcgcatcccttcacggcagcccaccccgagccgtctcatctacggtgctatgcaccatcatcgccgcccactgtgccccttgccggtgctagctggtttttggctgtttccctcctcgggcgcctataaaagagaccacctgagctccacctctcctcacactagcctcagccacccctcatcccttcctccggtctcaatcaagctcggtgttgccgcctcactccgctccggtgagctctccctcctttctccagcagcctagagtcaaattaatgtggttcacaagcttcaccatttcaccacgaacacgacgcatcatccttcttcacctatcacgccctgtaagcctcgtcggcgacctcaacgtcgtgggagcccgccacctcaccgtggaccggtcgtcctgag

SEQ ID NO: 159944 - DNA, 548 bp, Zea Mays
tccatgcgtggccttatcgataacacttcgtctaaggttttagtggagtacacacgcagaaatccacctgctgcacccacatggtttccaagcaggtgatgcggacgcgcggcgcgggtcggtgcatgatgagcaagcgcgaattctgcgcacgtcggggatgagttgtgcgtgcctgtgggcgcgcgcgcgcgaaagtatagtacaccaaaaatgtgttgacgctacaaatatctagatcacacgccaactagggttagcatgtccataatcaacacattatcttgaatgcagcaaggaacttagcgaatcagtgaaactggtctagagaccggttaagccaatgttgaaccaattcttggtcggatagactcccgaacacctcctacaaagatccatcggagaggagcacatgtaggttgtatagatcaacaagactacctaaaacaccgttaagtctcatccagaggcatgacaaacaacaatatagagacagaaaatagataaatggataacaaatgtatttttggtctattggtttagatacc

SEQ ID NO: 159945 - DNA, 585 bp, Zea Mays
atttctagcatttttctataattttctaggaattctctagtcctggtagaaaaagaaaaagagaaaggtgctacagtatcgggctcatttcagtccgagacgacccagcaaagacagaactcgcccccgcgcgtgcgcccacgcccgcgcggtctctttttgcgcgaagacccttggttgtttaaataattggtgaagaaaccctggctactatttactgtctcactgacctttgcgaaaaacccccctcctttcagtttcttcaccatgctgggaccatggcggaaccgcgtcgagcaccaggccagagccgcgattctacggcgtgggtgacccaaacaagaggcaataagtacatagatgttgtgtgccagcctatccggtcaaacgccctcacttaatttgaaggattcaaccctaattggagcttgttcaaggtcacgacggtggaatgaccctggtgatcgcgttctgaacaactaacggcatggatgctaaaattgaagctcggggaagcttcacgggttcaccataggctatgtacacgcttggatttggactaaacaagaataggagagtgggtca

SEQ ID NO: 159946 - DNA, 510 bp, Zea Mays
atcagctccagcctggatgacaaataggaaaacacgctcgtccggttcctgcaagataaccgagatgtattcgcatggcaacctgcggataagccgggagtcccgagagaactggccgaacacaaactgaaggtctacccccaggcgaggccgattcggcaaaaattacgtcgtttcacgcccaacaagagagaagccattcgcgctgagctggctcgcttggtcgcggctgggtttattagagaagtgttacatcccgagtgactggcgaaccctgttcttgtactcaaaaagaataaggtggattggcgcatgtgcatcgactatacggatctcaacaaacactgtccaaaggatccctttgggctccctaggatagatcaggtggtagattccaccgctggatgttctgtgctgtccttcttggattgctactctggatatcaccagattagcctggcgaaagaagacgaggaaaaaacggcgttcatcactccatttggtgctttc

SEQ ID NO: 159947 - DNA, 736 bp, Zea Mays
gtcatgatgtcctccattgccccggtagcttgggtggccatggagtatacggctagccagccagccgcccgggtcctgcttgggctcatatttgtcgatgttcaaaaccttgaaattaggcggccactagaccgctcggagtcgagggaaagggctgagactccgcatgtcccccgagccttaggatggttgtcctgggcgtgattgtggtggtggttccgtggtggtgactgatgtcgtgggtcccgtagcctttccagggctagctagcccgatgatgggttgttcgtcgaggctgatgtggagtccgttctcatagcgtgactccacactggtgcgtcatggttctgatcgtgctcctcctgctgcctcagttcactctcatgacagtggtcacgcgaagcgtggatgttgcttcacgtgcctcgcccactgttgatgatgtggcacatgcctctggatgagcaggtgggaggagatggtttgcctcttgggtgaggatttgtcgataaccctctgtgtctagtgtgtggggtaggacagatttccgccaacttcactcggtgtttgcatggcctgagcgaagtcaggcaacaagtttcggggatgaggcgggtcatcacgccggtgcctggcattatgttctgcctgttcccattcgtgatcctaggtgaggtggtggcctcgtcatcggagttccactattcgtaaaacgccatctcattaggggttcccc

SEQ ID NO: 159948 - DNA, 760 bp, Zea Mays
aaaggaaaggaaaacaaaaaaacaaaagaaaaacaagaaaagagttaaacgccgcgtgggccgagttcactccagcagcccacctcactctacctttcgcgtgcgcgccgacccatctccgcacgggaacacgttgtggtgccgacattgtggccccaccggtcagtcgttcagctcgcgcccttctcagtcgtgtcaatgccgtgtgggcctggtatgtcaacccctcgcatgcgcgcgtcgtccgtgccttttgcccctgacgtgtgggcccgcctcgttagacgacccccttcctcacggcgctccccaacagaacttcgttgagaaaaatctggggatgtgggcgtcgatttttcctcgccacggacgctgtcctaggtgcatatacccccctatttcccctgtcgtttgccatttgaagtccctaggccaaactagagaagttgtgcggagcggagatagcgagaggtcgggaggaaggccgctgaagctgttgcggctcctcatcgctgagcagggtccagtgagggccttagggtgaatgtcgggaggcttggtgcatggcgcatgagctctgcagtcgaattactggcatgggcacatggaattccttgccgtagttgaagcttcgccgcggagccacaccattacgcgggtagggtcactggtgcttcataccaaggtaataagtccaccattctgtccatcctttccttggagtggcgtagcgcggtttgaattagggtttagcgccctg

SEQ ID NO: 159949 - DNA, 876 bp, Zea Mays
atgatcttactgtcttttgagaccctttcctattctattgttaagtcgctatctttttggcaatttgtactctcttgatcttggtatgctcgtaccattggaatcttgcatactcttatttttatatatgcttacctttatatcccaatgcctgtttaagacatttcggttaacatgcttttgaccacccttatttcttgatgatccatgagtgaccattctatttcgcacacccttgatgatctcatcgtttccttataacttccctcggtaaggaatctttatttcaaccattctgttgggaccttacctatctcacccttgattgtcttatccacttcgccgcttcgagagtctttccttaactgcatccttggttatgctttcacgatcatcatctttacccttgtcgcctctatatcttaccttgatgcttaaattatacccgccctttaaacccttccctcctacatctcaattttatagttgtattctacctattctcccttggtcgtactctcttccttgtcgcttgtgagtttttaactccatcctttgtcatgctccagttgggtattacctttacctttctcatctcttgatcttacctcggtgattacactatgtctgttctctaaaatctccaatctcttatcccaatttgagagtggtgtttcacttatctcacccttgacaacatcctcttctttaccgcgtgcaagccttgacttatctccattccttactgtacttgtaccacttgctcttatatgccttcatcttttctcttacacccttgtccgttatcgcctttggcccttgcgatatttatgtcttctacctaaatgcttaccttaaacttatcctttaaaaccc

SEQ ID NO: 159950 - DNA, 580 bp, Zea Mays
caaggatgttgttgaggtacattggactaggaagaatcgtcgcttactgaggtgacaggcagagtcgacccattaccgacaatgatggaagaaggtaaagtggggctgtggggatggggtgaagaaacagtaccagggtcaggagtggtgtggtacgaggcgccgcagtcagcaacctagttggtgggagtaacatgagtgggctacgaggacatgtggtggtacgaagagagctatgggaggcacctccacagagacatcgggatgggcgtcgagaccgccagtgacgagcatgagcagtggagacgacaaggcctcgatcgtcatggagacaatctcaaaaccgcggaatacaaacgaccctgtagcttggcggctctcttgaggatggacggaggccgaatggtggtagagctcgacacagtcatggagaactgggttcatgacgcggtcaaaggccacgaacgtgccaaggagaaattggtcgtcgtgaagggagacatggacacgataggaaggcaaatggacgacaacagagcgaaggacgagcgtcaagggagcagacatagggaggctccac

SEQ ID NO: 159951 - DNA, 448 bp, Zea Mays
gggtccggacacacaacttggcttcccagactagaccctacaggtcccgagcatgtatcaaaggatggctagtgtcagatggcgggtcctgcgggtgtactactaatgctccctagccaaagttgtgtgcagtgccaggtcccagtcgaggctacctcctgggggccattgccaactctttcttaggtatgctggtttgcagcctcgacaaatcgagcctacatcccaaggaggccaggtaccaaggaggaatcggttacaccacacacaacagggtcaagtggtacacagataagtgctaatactgcttgataaatagtactcaaaagtaccttacaaaaagcaaaagtattacatccgccttcaagcggagtcctagctccatctctactctacaggtatgaactacctccacaccagtagggtcgcgtgggtagctagctccgag

SEQ ID NO: 159952 - DNA, 492 bp, Zea Mays
gggagggtgagcgcctgctccctgctacgccaagctgaggggcggcctggccgagcagaggtggggagaagggctgatggtgcagggattagggagagaagacccgacattgctgcagctagggcgagctcggccatggcaacagcatgggaggggccgagctagaggttgaagacaatggaggggagaagtgagcacttgctgctgcaatagggagaaaggatggagggggcgagcaccaccattggagagggagggagctcggccaccatgttgtgcttgaggatgaagaagggggtggaggggaggacgccatgggcagggaagaagcttcctgcgccatgaatagtgaggtgggagagttgtgcgtgagaggaaaaatgggagaagagagagtggcgtctagggggtagatggaaaatttccaacttgcaaggggaggcacttctatttatagacatgtgctagggctagggttttagtggggttgct

SEQ ID NO: 159953 - DNA, 670 bp, Zea Mays
tggaaatatgcatactatgttgaggcgggaaagcgagagctgattcaatgtgctttgtgccccaaacaaataaaaggaggtatcaagaggttgaaacaacatctagctggtggctatggagacattgtcaagtgtcctaacactactagagatattgctaaagagatgaatgaagctttgaataatgggaagtgggctaggctgttgtacctagatgataatgtaatggaagatgaagcaggacaagaagatgatgtccaagttatgggaagaaggtcaatgtcagcatcatccaaggcttcctcatgtactgtgccaagttctcgaacactaccaaaagaaataaagcaattttccaattgaagccccacccaattgcagctccaaagaagtccattgcatatatgattcgacgtacacctcaagaggttgtagcagagagacatgcaaatggacctgctcaaactaccatatgttctaccatgaagcctaaggaagaaataaattatgtttgtttggagatagccaagtttttctatgagtgtggtataccattcaatgctgcgaagtcaaggcaatttgaggtagttgtggaggctattgctcaatatggatctgggttcaagcctcctactttccatgagctacgtgagcctttacttgctaggac

SEQ ID NO: 159954 - DNA, 733 bp, Zea Mays
attcaggcggttctgccacaaagatagacctagatctcaattcatcatgctcatctagcaaggtggcgtacttggtctacaaagttgttgtgatgttcgacatgtgtagagtgcacacatcgcattatgtctcgtcagacaccacaactgaagctctagcagactcaagcttcctaagcgtgctctcatcttcaatttaaaatctttcctctcatgagcagcaagcctaagaagcttatcctgactagccaaagcaactgtcagctcctctacctcagcgatgagatcatcggcggaatctgacacctcacacgtagagccatcgctgatgtcctagttgtagctgcccactgcatcatcaccaagggctatggtgcaaaggccacctatggtgttcacgaggaagcagagttcgttcagcttgtcctcaactcgtctgtgggtctcctcgtcactcgaggaagatgttgcatcgtcggagtcgtggtcgaggtcgccgagggaggtgaggaaggaatgctccttgatcttggccttctgtaggtacttcttcttgagcgcctccttatcgaatcctcccttagacttatgcttgcatcttgcttgccctacttgggagtgtactcatgcttgcccttgcgctgaccagagtggtcgcgcagaccagcatcccgcttgccctacttggggcaactggcgacaaagtggtcgggtgaccatagttgaagcatcc

SEQ ID NO: 159955 - DNA, 512 bp, Zea Mays
ttgtgccacataaagccatagcttagttcctcttaagctaaaaagttagaaggcaccgacatcatgtatacaaaccaataaagcatataagcagaacaatctgttgttatcagtcccaactaacctggtgaaggctgagtattactggacaactagttgaatagcttatagaggatctaacaagaaactagatttttgcatgattatacagttacatcactggttgacttgtgctgcagttaagcatttgagagaagcaatcaaattagttgggacaaggatggcatggaactaaatcacactgttacaatgctccaaaaaacataccagatttgggcatgttaccacaatctgtttatccatcagtagggtcataccggtttttgttacctaatattctttataatacatagcagtagggccttccgtactgcttctacaaactgaaaaactgggagtagcagaaaatatagctttcaaggacagaacgacaaactgtagtcatagtccat

SEQ ID NO: 159956 - DNA, 753 bp, Zea Mays
cggcagggcgaatgatcaagttcctgtcgagcaagtctgggagagggggcgaacgaccaagtcctagtcgagcaagtctgcgaggcagggcgaccaaccatgtcccagctgagaaagtctgcgagacgaggcgaccgaccaaagtcccctccgagcggacccacgaggaaggaactcaggccgatgctatcgacccacgacggccgtgacaagacgcaaaatcaccaaccacgtcccgaccgtacgtacagtaccaacagatttctggcagacacgatggaacacccccgtgtgtgcccacaaacatatcctcactgactcgcggagccggtcaactccagtcacgaagacctcgtcaccggaatctctacagtggctcatacaccggaaaggacgagacaataccccataccaggcgtatacctacgcacgcttgatagcaacgcaaggggtatgatggaagacgaagaagtactgaacacaaccctcaactttgttgtaagtccacctcgaggggcccgccaggtacagcaacatcaacatcgagcaagctacagggactcgtataccagatggacaagatggaacgccatactaggggcacaacaacacacgaccctacgggcgacgttagaagaactacaccatccagaggaaacaagtcgagcaccctcccagtagaatacaagtctccactgtaaagttcacccttgagctataaaaggggtagggaaactttcgttctggaacaca

SEQ ID NO: 159957 - DNA, 489 bp, Zea Mays
caaacaacgcgcgacatgcgaaaacggtgcgacgtgtgaatattactaaactatgtcgtatttatactaaacaaatattaaatgcaacacttaaaatggcaaaatcactataataggtatttatcgcatgcatcgatagaactaacacttagttccgattggtttaatactcggttaatcatcgtttaattatgtaacttaattgacgtgagtgattctacgcacgacacactaaagcggggtgcgcagtgcatgcgatgacgcgcgtcaacatgtgcgaacggcatgcgcaaaatgcgcgaacggcacgcgatgactttgaaagtgcaacgcgcgagcaacgatgaggtgagcgacacgaacgtgcacgcgcaggggtggtaggctactacgtcaaagggtatatcaacgggctcggcgagttgaacacgggcggggacgggaaccgatcacgctgtagtcgcgccggcagcgagccgtgctatcagg

SEQ ID NO: 159958 - DNA, 447 bp, Zea Mays
tacgcaagtgatcctggatgagatttcacgacggttctcggagcatgaggctaaatgggatcggcgcatggcggagcaagaatctcgctgggatgtggcgttctctgactttaccaaacgtcaggagcgccgcgttcaggctctagagaagaacgccgacgtggttgaagattagcgtactttcatgaaggagatggtggatgatcttcgattggaagtgggtaagatctccaaacattgggaacatgctgtggtggataattctacttccatggcgggggttcttttccctctctcgttcaattgtaacccctacagcgagcattgatcagcagggtgttgatagtgcaagccgtcaaagactgaatgtagggatgttctgcccgaaccaatataaatcttgcacccaccatgcacaccgtccggagcctgaaacatgcacacaaa

SEQ ID NO: 159959 - DNA, 702 bp, Zea Mays
cttttctcaattcaacaacctcaatggaaagaaaaggataccttaagaaggcccaaacgcaagtatgtccatccataagaattagacatggctctaagtagagatgagttatcatggtggttttgatattcagcagtccaggaagacagaagtttgtcataacaggaggtagctctgagctcatttggtaactcaagtaaatctgtgaagtcaagttgtcttgtgataccaatgtccatcactggattaacgaatttgaaagtcaacagttcccacaaactgtagtcctttatctgaaaaaagataacattaagggaagaagtcgcaatcaccttttggtgatggaaaacaaataaaaaggattgaacaggacccaaatatcgatgatcaactccaaatagtgaacaataaggaagtcaatgcacgtcagcatgaaacagttagcaccctgtcaaaattgcaggtaatatagttgttcatacacaaaaaattacaagacatttttttcgccgtatggtgggatgggggcatgcaaaatcttgacacatttcaacacaatccagtcaaaacaaggcaagccttgcccattgtatcaaccaaattcacgtacgatagaatgtattacaagatcatctattcaaattggaagccaatagcaactttacggcatgcataagatgatctctacttaatataatgata

SEQ ID NO: 159960 - DNA, 719 bp, Zea Mays
atgttcatttcgaggtacctttgaatccaagtgatgctgagataagtgccatgctggatatgttggctgaagattcctctgatgcagtccctgctgaaacactggatgcagcacccatcctagaggctggcaaagctttggatattcagaggtctgatagtgttcacccgaagcgtcctcgccgagccaatcaaccaacttctcctgctaaggggaagaaaaagaagaagagacgtcttcgccgggtgtcaagcttggatcagggtgctggtccttctgctcctgctgctgaggaagtgcccgtgccagtttttgctgaagctgaccccaatgggtgtgacccgactgatgctgaacccaatgtgtgtgacctagatgatgctgaccccgatcggtgtgacccggctgatgttgaccccgatgggtgtgacccgactgaagctgaccccaatgggtgtaccgtccgcattgctgatgaagatgaggatgaaatccctctagttcggaagaacagccgacgctacatagtcagcggggaaagtagtagtgttccttctccagctttggctgccctcattggtctgcaagaattgtctctggcaaaatttgatcagactcttgaagacatggtcccagaagatctgttgtcggagccgacagatggtggaatgatggatatttgtgctgatgtgcctgatgccgggctggagttatctcgg

SEQ ID NO: 159961 - DNA, 572 bp, Zea Mays
aagggcaaaaaggtgaaggttttgcccaccgaccgcgttatattgaaccggctgtggtgcctgaatttgccaaaggagcctcttcaactactgaagcaagacaggctgcttcaattacacagagcgttgaagaaccaactgtaatgccgaagatgcctacagtcgagccagtcgaagctaaagttgataaggctgaagagccaaaggttgaagaaataatgaaaatgccagaaattttgagccctccaacagaggcaaaactgcctaaggtgcaaaaggcttctgccacgactcccaagaggaggaggatggccaacgtgctggatgctgtggtggagactacaaaggccttgagccctgctcctacgaagaaaattgctgaagctgacaaagcgcaagccgaagccgaaactgggcaagcagaagccgaagctacaaaaactaaggctgaagccgaaggtgggccttcagcgcccgtcgcgacgaagcctgtcgcgcctgaggaaaaaacatcagagcagatttcacctaaaaagatcgagactcctgctcccgaagctccgatcgaaaat

SEQ ID NO: 159962 - DNA, 519 bp, Zea Mays
tggagaccaagctcaagcccttgatgccttaaacaaatatcaagcaacaacaaaattttggagagacagagtcgtcgtccctaaagaaatccaaggagacctcatcctcacaaggacgacatggacaaaatcaaaaggcaagaatgaaccaatatgggaaggtccattcatagtcaaaaagatgacgtcgccggactcctacgggctctcgagccaaacagacgcataccttgatcattcgtggaatgttgataatttatgaaagtactatttgtaagaccgacaaggtcttttgcacctttgtaacaaacctcacgctaatcctctgcattcagacccgtacccttttcctcgcaaaaggaggcaaggtttttaacgaggcggagccatgtaataaaacatgagacccccctacaaaagtatgccaatgctgaaagaaggcgcaaaggaaggccttcactattcgacataaagcacattcaccacaccaacaaatcaaagatagtcgtcatgtgcgac

SEQ ID NO: 159963 - DNA, 527 bp, Zea Mays
tggggatccttcgccgcggacgtgaccaaatcggcgccaattgctcgccggagctcggcatccgccgcttaccgtgggcggtgctctctgcacttcgattctaggtaaggaaaccctagaccatttcgcattgatctcagtaccgtgtatcgcgttagaacttgcgagttggggcactggtacgccggttggccgactccggtggagcgccaccgtggggactcgtggcactgcgggggtccggtgtccagaggttgggatggacgcgcgccgtcgatctgtggatggagggcgtagattagataaggaataacgcttggataggttagatcctggcgcttgtttttggatcagacggtcttgatttaatgcatacctcttcagatcgtgatcgttggtcttggatccgaaggccacgagagtgtaccggttcgctgggttgcgtatccaatctgagccatccgcgcaggatcgtgaggctaaaaacacaggataccccttcgccctggcctatttgctaaagagac

SEQ ID NO: 159964 - DNA, 775 bp, Zea Mays
gacgaccttttctcccactgcacccacctaaattctcgggtggaaagcctagagcaacaaatcaaggaattgaaggaagaaaaggcgtcccttcaagaaagtctcgagatggcggaaggcgaagaagccaacactcgtgaggcataccggactctgaagatggactatgctaagaagttaaagaagctcacccccgccaagaagatccggaagcggttcaagagccaaggatgccagactgaccgaaaggaggaagccccaccaacactgcctccctcagggatagaaaacttttcagacgttgaggaggtgtccctggctagccttgacgatcttctcagggagtttggggacaccttagaaaacgctcgctcgtagtgtgatcagtggcaattgtatgcttgtaatgaacttgagtgatgaataaaataatgtgtttgaaaaaaatatggcatatgcatagtagtaatcatttctcccctctggcagatggcttcggataaaaccacgcctaccgcctcagggattggagcaaggtctcccctaggtgctgaaggagaagccagtggagaggggagtgagacccacctccctgcacctctagagctgccattagacttagcccaagttctggccaaccaaaccctactcattgaggtcctcaccagaagcctcgagaaccagcgcccaaatggaggaaggcctcaggacagaatgagagagtttctaaggatcaagcctcccacatttgccagatctagcaacccgctcgacg

SEQ ID NO: 159965 - DNA, 654 bp, Zea Mays
tctcctccttgaatgcatcgacatccactagccttgctccaatgatgattaggtcgtcgacatagacccagaccagcacacgcaatgttgtggcgcccttagtgtacatcccatgctcgctaaagcacttgatgaagccgagtttgcgtaggttgttgtccagctttgcgtttcacgcccgtggtgcttagggaagtttgtacaacgccttatttagccatagaaccttcgctttgtgcctagtagtgacaaagtcgggcgtccgccagacgtacacctcctccttgagctcgccattcaagaacgttgtcttggcatacatgtgtgcacaagccaacccattgccacaacatcaagcagtatccacacatattacatctgtgcgaccagatcaaacacctcatcatagtctatccccggacctcggttgtaccccttggcgagaatctaggccttgtgcctgacgacgatgccctgctcattgcgctccagtttgtacacccacttcagaccaattgggcgatggcctagatgaaggtcgacaagagcccatgtctcgttctcctcaatggatgtcatctcctctatcgtcgccttgcaccagtgggaatcgtctcgagcctccttgaacgtagtcgattcataatcaccgat

SEQ ID NO: 159966 - DNA, 662 bp, Zea Mays
cagctgcaaacgtagcaacaaaagtataagaaaaaaacgcgtaggtacttgatgacattatttatttacaaacgccacacggggcgctacaacaaccaagtagaaaaagggctaagtggcagccgcatcagcggcagcaaggacttcgttgtaaacaacatttcaagtctgtgagccgcacgagccatcttcattttcaatcaggattataagtccatttctagacattgaacgggagacagccacataaagttggccatgtgtaaagacaggtctcttgaggtaaatgccaactcttgataacatttgcccttgacttttatttatcgtcattgcataacacaggcgtactggaaattggcgtcgttgaagtgtgaagggccacttcacatttgtagtgttgagggcaatccttggtattaagacttcttccccaacatttgatcctgtaagcgctacgcagtgcaagatgcgttgaccgagttgagtgacaagaagtcgtgtgccattacagagacctttactttgattcaggttgcgcaacaacatcacaatggcacccttttttagctcgagtttgtgggtagagaaattgttcgcatcaattgagtttaagaattcagtagggtagaggatgtcgaagtctggtatgtgttccgatg

SEQ ID NO: 159967 - DNA, 695 bp, Zea Mays
accatgattagatctgagcgcgagagcgcgtgagggagcgtgggcgagtactgacaagcaggccagggatgtcagcgatcggggagggggacgggctgaccagccgggcctagcggtaggggcgcaagcacttacaggcgaggcccaggggcagagcacgtagacccagccgatatccgtagatccgaacagttggatcagggatggacggttgtgatggggtgcgtggggggttttgcagcttgatgaccagcattgctctctccacggcagcgaagtcaccacaggcgaggcagacgaggtcaccggggatctagggtcgccgatgagggctaacacagactaggaaggtccgacgaactcattggcgggactttggccgtgagaacgggactagagacggggaaacaacgatggggagatgctctgggtgggttgggcaactccggcgaggaatctcggccacagggagggggtttcgagcgcgctaaggcttggactggctttggcagggtaaggggaacactatggaccaacgcaggggtacaacgcgaggctaaatcggccagtcaccatgtagggcacggcgaaccgatgtggtcggactccgccgaggccaaattggctaagaccagatggaaataaggtaaaccaagcacaggaacaagttcctcacctcaaaacagagctcgagg

SEQ ID NO: 159968 - DNA, 315 bp, Zea Mays
gaaagaatcatatccaatttgagcaagtagaaatacatcataaaacattggattgatttttcttttcatgatagattacacgcttccaaagagaaacttattctctacaagtgagactacttgggttacttaaataaaatcaatagtctcactattctagttatagagagagttttccttttataagtgtcctaaggatttgaattccttacataacaccttgttcttttaggaacttgaaatatctctctatatctagaaacatggcaataatagaataacttagcgaaaaacatgccatgtggtacttccaac

SEQ ID NO: 159969 - DNA, 969 bp, Zea Mays
taaacatatagcatcttagaaagttttacccttagcaaggcctcaaaagctatcgaagcaacattatactctgtaactggagaatccatcatcaataaagttttcgttttcaaaggcattcaaactcttgactatcagctgaattcgattcgattggacttgaaatcaacacgcttactcgacttagggtgaccactataccctacttacggagcaatcagcttaagtcgacgacgacataagacggtgcaacatgctcacacttactcgacttagggtgaccactataccttactgacggagcaatcgacttaagtcagcaacgacttaagacgatgcaacatgctcacgcttactcgacttagggtgaccactataccctactgacggagcaatcggcttaagtcggcgacgacttaagacggtgcaacatgctcacaattactcgacttagggtgaccactataccctactgacggagcaatcagattaagtcggcgatgacttaagttggtgcaacatgctcgcgctaactcggcttagggtgatcactataccctactaacaggacaatcgaatcaagtcgacaatgacttaagtcggcgcgatacgatcacatctacctatcttagggcgaccactatgccttactagccagacgatcagcttaagtcagaaaaagtttcaaaaccaaagtcggccttgacgtcggtgacaatgtcatcaggaaccactacgttgggcatcctcttcaagatccgccccgcacgaatggctttgtccatagccttgtcgcgttgagctttaagaacaacgcagttgtcctctgaggctttgatagccagtcggacagtttctagctcctgtgcaacaagtttctttgaagcacgaagatctctaatgattgaatccttggacgataacagctgtccaagccgctgaacttcatcctaagatacttgcagctcg

SEQ ID NO: 159970 - DNA, 924 bp, Zea Mays
agtctgaccactatagcaagattgaagctggattatagggctacaacttggttactgagagattagcaagttctcacgcagaaattggagttatgggtcctgcaagttgatcggacagaggctctgaattggagttctcatggtacagtgaactgaagaagatctttagatacatctcccctcgccgccggtcaccgtcgcgtcatgatccgcatcatcgctacgtttcgtgccctctagtatggagataatcacggccgcgtaaagatattggcgccagataaactcagacccgatcgacgaggagttcgccgcgcccacttggattgcggtcggccgaattggtcctcgccggtgttggacacttaccgaccatgcgccacgtgcccgagcgtcttaccacgttgcagtgggtcacgttaagcatatccggtgatcaccgatgagcttgccacggtgaaagccactaatcgtttgcgccagtacaccctattctctccgaccgccaccgtgccatccccgattcacaacccaccgcccccagagccaataaattgagcacaccctcggctccgttaggtattcaagcatccaatccacctgctcgtgccttcaattactcacaagagcccacgaatttcttagttcccccaaatccgttttccgccaccgtgaaagagtcctcgccgtggctagcttgttccaggtctgttcatgctctctgctctcccgtttcagcatccttaggttctcctaatgctcctcgacccattcgattgagctagactgccctagatcaccaggaatatttctgttcatccgttgtctgcgctgtctccgtggatagggtgatttagagctcgagctatgcaattgatcaaggggaaacactcattaggtgttgaattaggtcttagccaagtt

SEQ ID NO: 159971 - DNA, 316 bp, Zea Mays
ctgcccaagataaaaagaaaatgcatctgagtaatgttgaggaagctagcaagattgctggtggtaaaaaatgtggtcctatggaaggcgaagttactgaaggagtgagaaggtgcagcaggttggaatcgtctgaggaagtgaaaattgctgataaagctgctgcaagagctatggctaaagatgctttcatcaacaaaggtacgtcctacaatcctttctcggttttgaatactgataatgatgttctcatggatgtggctcacaaaattggtgttgatttaggttcttcatttaatgatgcagttgaaaattt

SEQ ID NO: 159972 - DNA, 393 bp, Zea Mays
tgccaacagtcattggctggaggttggttgcttgcaacggagggggcctgaagggaactttgacctagctgactgaaacgtgatggagtgggtccagctggcttgttgaagcttggtcccttgggtggaaacccaaaggatcgaattctctggtgcctgtcttgctgctgggctcggaggacttggaacttcctcttgaggtgacccttttcttcttccctagccctttccacttgtatggccttgtttgagaggtgcgagaagctgaggaagtcttcgctggcgaggatagtcttgagttctggtcttagccctttcaagaaacgggccatcttcttggcttccgtgctaacatcgtcaggcgcatagcgtgccaattctgtgaatttgtgg

SEQ ID NO: 159973 - DNA, 469 bp, Zea Mays
tacccttgatctaatcctatccgttcgccatagatcaacggaccaggtcatgtctcctacctccgccgaaatccaccacggcggcgattcttcctgcggtcgcgcccctcaccggtgttaggtgaattgaaacctgattctatgttccaatacgcgcagatggtacagtgggtcaaggtgaatacgtatgagcatcacgtaccaggaattgcagagtaggggtcccaggcaccgatgaactgcggacgcacgacagatgcgcccgacgggaaatccccccacaaccgatcgcgaatcttccaccgggatgcgtcgagaaggcacagcaccacagtacggaccttcccccagggcttttcggggctggagatatgtgtggcgcgattttgaggccggcggcaatggtgtttggcgaagggccctctccctctaccctatcggtagctgcacagaaatggctccaatgtgg

SEQ ID NO: 159974 - DNA, 522 bp, Zea Mays
tgggcatacggcttggcttcccaggctaaatcctgcatgtcctgttgcatgaatcaaaggatggcagataccagacgatgggtcctatgggtgtgctactaaaacttcaaagcctaagctgtgtgcaggtccaggtcccagcccagtagtaggtattctcaaactgtagagactatctcctaggggtcgaaccaccagttttatctttggtatactggtatccagcctcaacacatcgagcctacatcccaggggggccaagtaacagggagaagttggtaactctacacacagcgatgacaaataacatacagataagtactaatagtgcttgattaatggttctcaaaagtatgttacactaccaaaagttattacaagccgctccccagcgggacccttcccttgtttctgcagatttggctactcgtcatcagcaggatcccgctggaagcgctcggccaccaactccatggtgtcttgtatgccctcccgggcgacgtcttcagtggcggccaccgg

SEQ ID NO: 159975 - DNA, 327 bp, Zea Mays
cccgccgacgcccagcccttttccatccaccgccgccgccccagctctggttcccgtcgcccccatgtcctctgacgcccaagttatagcaggctggcagaagagaagacttgtctcttgtgagatggaagcaaaattgtcttttgtttgatcgctggaagtgttccagcactactgcagccacctggaagtgcttttgtttgtttgttcgctgcaaaagcttttgaacgtgtaactgctagttgaatcagagaacgtgtatctgctatttgaatcagccaaatactgtggtatcaaacaatgctatgtatggacaaatactttgat

SEQ ID NO: 159976 - DNA, 621 bp, Zea Mays
gtaaagatggtcctgcagtcgactgaacaaattctgggcagtccaaaatatctgaagaaatatcctgacccactacctttcccaagtaatcctaggcagtttgcagataagaccaacttgggattagaaagggcatagtttggagtatgttttttgcctatcccagggaggtgactcagttgctggtatgccttgctgtcaacacaacatgagcctccatccttttacctccctgtcctgcatgtaggggggtgattctggttgctcctgtgcttagggctggtgtgggttgttgtgaatgtgtccacgtgcacatgttcatgcactagttggtcctcaactccatcttccctgtgaacatgtggaggcaaatagagtttacccttttgcctccttgccataaccctcaagtctaataaagggtactacagtcatctctgtattcctcaaccaacgtctgattgaacatcagttgctatcactcttgtgaacaaagatgggcaactgaaactatccctccaccctagaatagcccctgccccggctgaaccttgctagtggtgaccacgccgattgtttgtccatctcaccgtggccaacctcttcggtgatacaactcgc

SEQ ID NO: 159977 - DNA, 844 bp, Zea Mays
aagccccaaatcatgggaagtcagttggtgacttgatgaaggattaccaactgaagcaatctgcagagcatcattagggaccaattcagcatcaccagcagaaaccaaaactctagcgtcaggtgcgtcggcctctaaggcgacttcttgacccgaagcacgtgctgcagccatgcaaccagagtgtggaggagaagacccgacgtggacatccatggaagtatgagaaggagaacccgcaatgacaccctcgggggttgggtcatagctcgcgttgcccacctaagccggatcatcaccggcaacaccctcgggggctgggtaaacgccagcgccatactcagggaccgggttctctgtagcaaccacctctaaggctgaaggatctccaaccacttccataggaacgaagcaatctagatcagcctcttgactcttaagaccgcgccccaaagtcgatgaggcacaagacgctgctcgggataactctaacccgacatcaggcatatcagcgcaaacttccatcattccaccatctatcagcttggacagcagatcctcagggactatatcttcgagagtctgatcaaaatttgcaagagacaattcttgcagaccaacgagagcagacaaagctggagaaggaacaccactactctccccattggctatgtaatgacgaatgttcttccgaattaaggggatttcctcctcctcttcctcatcctcgtcaataatacgaacaacacacccattgggatcagctctggccggattgcacccattaggttcagcgtcatcaaggttagatccattggggtcagcatcagccggatcacaccca

SEQ ID NO: 159978 - DNA, 485 bp, Zea Mays
tgattgttgttctcttccaaggctcaatagttttgagaggaatcaattttccttacagaacatgtcaaatttctccatgcaccatgccacgacaaaaaaacatttaggggtgaaatgaagaatagactgaatagtgcagttagagttgtgtcgatgttccactaattgatttcatgctatagctgatttagtgggttacaacagtgctgaaaatgttgggcagtttagtgctacagaacctttcatgtactgataatcgcccatgtttggtctgctgtcctgcaggagacaatgcactgcactattgatttctgaaccaaattatgctgtgacagtagtagttggtgttatcacgtgcattctccttaataacatcatatctgcacctcacattcgcaaatttttagggatactatttacctaccgtcagttcattttgtaagttgggtctgctctgttcactttaaggttctagatccatattt

SEQ ID NO: 159979 - DNA, 510 bp, Zea Mays
gcgcggagcgtggcgaagagccgaagacccttccctcctcctaggcctggacttcgggagttaaataggaatcctcgtgacccgttctctcctcagctaccgtcacgcacgtgcttacttgcgcagaacaccgccgccttcatgttcttcgccgccaccgcgaacagcgacctatagtgtgaattgtacctcaatcggggcagcggaggcttgttcggctcgtgttgaaaccatacgtgggcgcaatcggaggaaggtgaccggagaccgtggaaattcctcgccgaatttgcgtctccgccgtatctccgctctgcgccgtggccagcccctctctagctctcaatctcggtaattccaaccctcattctcctctccatgtccttctcaacatctagcactggtaaattttgggctcgggaggtgttggtggccggattttgccctcgccggcgagctggccgccgcgggagccgcataccgtcgcctgggggcgctcgggttgtggag

SEQ ID NO: 159980 - DNA, 507 bp, Zea Mays
caagaatcgttagtccacaagcagttgtcattaattaccaaaacattaccaaaggggcctagatgattcacacctgccgagtaagaccgcgaggcgaagcagccgactaggtccccgtcgagcaagtctgtgaagcagaacgaccacccaggtcccaaccaagatagagaagcaaggtggaaaccaagtcaaacgtcgcaaagtccacgccaactaagacaagacatgacatcccgggtcatggcgagtcatcggaaaggtaggccgcgcgcacgcgcgagtgtccgctatcgtcatgacagcacctccccaagtacgttcctcaaacgcgctcccatagcctcaagggaccgaacaaccctatacataaagtacctcagcatcggagcttctacattgacccgaatatcgggtagtgcgcaatagatacaccataccgagtgtacgcctacacacgccaacgagtgacgcaggcttgtgacgactgacaaggctgcacagtgcatg

SEQ ID NO: 159981 - DNA, 506 bp, Zea Mays
aaaaattcatcaatctacttctcgagttccaccaattctggtccggacactcgataggctctcttggaaataggggtggtgccaaatataagctctatggcaaattcaactttcctttcaggtggcatgcctggtaactcctcgagaaacacatcagggaattctgatactactttaataacttatgatggctcgatttcctcaatatgggcggtgatctggtgacagcttcctttccttggttcagacaagaccaactccactaacacttcctctcctgataaggacactaacttcaccgtcctcttatcacaactaagacttgcttgatatttggttagccaattcatccctagggtgacatctatggtcgcatctcggttacccattactatcagatcagcggggaactctattctccttatttgaactcttgccttggggtaaaatctatctgtttgggttctcccaccaattgaactaacccgcataggtggatacatggg

SEQ ID NO: 159982 - DNA, 718 bp, Zea Mays
catacatcgaccaaatcatacgaaccgtaaaccactaatctctaactcgaaaccatcatgcgcttacttcccaaatcatgaacacataacacgtattgacccgactcaagatatagaagaagcgatgactactttggcatgtcaccacatctctaattaagccaaaacaatttctacttatattgaccgaacattcgtgtcgagcacaccttatattaccttgtctcgcatacaaccatgttgtggcgtgcactcgagacactaccgattaacttaacgcaattaccactacaatgcacttcaatatacacgtttgacatcacagtgcttcgacagaccccacacttccaatctacttgtcacatccaaacacaccacatgcccactgcattctcatgaccaattttagcacaattatttacgaaaacatttatcgactagacaatgaaacactaaccgatcattcacacatctcatcttaaaaacactaatcacatgtcacataatttatatcttcgatccactctatcctacactacgatgaatacataaaatatttttaacatagacaaacatcttagccgactgcgaaaattaccaagcaggctttacgctttattaaatttaccacaactaacacactactttacgacgaagtgtttttaacaaataactaatacttccgcgaaacaccctcgcgacacgcaatagatccatc

SEQ ID NO: 159983 - DNA, 891 bp, Zea Mays
gagcaagatctaattaaggaacatgagctgaaacttcaagccgagagccaaaccctcatgctggaagtcactcaagggagggcaaagatttctggtgggtactcattctctggtttgtcatttcggtctcttctttttatttcttactttgcatcatgcagagctcgagggcagtctagcctaggaggcgttgaagtctcaaggcctaaagcaggaggtcgactagatctgggagtccatggcgaaggagtgcaacgagcatgagcttcttcgcgttgctacacgattggtgcgcaccttggtggcgccccaagcgaaggaatgagttcgattgttgcccagtttgccgagcttgggagcgagattgtagaattatggggaggctatgctagcataaaacaaaattttcgaccccataataaatagaaactgtcggagttataaatcatgggattaccactagacgcgtagtcacaatggaaattatctcgatgtagacgatcgtgtcgaatagtatcgtgcagttgtcaatgtctttcgcgtcctcttgtggttcaccctagtgaggaagtgtcgcacaactgctaggtccacgacatgtaatggggcgagggcgaggagggtggttgttggtgggtgaactagggtttataatcctaaccatgcctccacccctcaatatataggcattctaatggacttttgactccgaggcccataagcactcctaaacctagtctaattcggttcttatctaaattacgcgtctagccccttaagtgtgtgaccttataggtttacgtagacatagacatggactgagtacttttacttagcctaataattgacagcgacatctagctagacatgttaactcctatgtgtatgtaa

SEQ ID NO: 159984 - DNA, 544 bp, Zea Mays
ctgaaatccgcgatcctcatccaattccggtcgacggcttataaattgcgcccgagttctgcttcttcaccacatcccgcacctcagtgactgagcaatcgactcaatttcattggagcactcccgcagcccccaaatcccctttctccctgttcttaactccgccgtggtcagcgctcttcgggttaataacttctcaattgctccctgttctagctcatttgtagcctcctattactctcagtaccgaccaattgaaatttggccgaagcctttcaccgaaacacgcacctgctctatagaacgccgtcgtgacacccccactgtcgacccgcttttcggttcttattctgcccaaaccaaagcgtgtacgtaaaccctggtgaacccgtgaacctttccccagcctcaatttggtcatccacgccatcgtttggtcggaacacgttcattcctatgcccatccgccctgtcaccgtggactaattgattcaatgccccattgatgaaatagattgaggggaagtgtgcggtaggggtctaa

SEQ ID NO: 159985 - DNA, 445 bp, Zea Mays
gtcagctgccagtcgccttggcatcggggcaagtgcctgcgccgttgagctgctgctaacaaagctacacagacggtactttgtcatgctcatatgcagcgctcgcatacagcgccgttgaaacatgatgacgcgcgcccgctaagactcccgtagtcccgttgcctttgccttcacttcccttttccctttccgatgtggtgggtggcctaacaacacccacccaattacccaaatcgccccatgcaaatgcaacgcgagcatcaccggcagcaggcaggggcactgctcacccaccctgaccctcggcgaccgctatcccggttcgttaggcgttagcgactggccacgatgagctggcagtgggaggctggtccatgattgcacccatgcagtcctcagctaactggctgccggccgcccggcgcacgaacgaagtgacgag

SEQ ID NO: 159986 - DNA, 737 bp, Zea Mays
cacggtggaggacatggcgggcagctggcgaaccctagcttcctggctctagatctggcctcggttcatagaatcgatgcggtggctcctccctctcctctcgctgatgggcctgcagagcaccgtgggcgcgttgtggttcgcgaggcagaacatgtcgagccctcggcacgccgccagcacctaccccgacgcctcaagctccactgttgggagctccagctcgccccccgtgcggcgtggtcgtggccttttccctcctcctctagctccaagaaagggaacagcgggcaggacaagttcgccatccgtgtcgtctcccggcgcgaccgcccatgcccggatcctcgctagctgcctcccctgctcgtgaggtcgacgccgacggatcgaaggacgccagagccgcccctctccgagctccccctatggccaccgcaggcgattgcaaggagaaggcggcgggcgatgaagactccgccgagaagttggcagtggtgttgcccgcacgcaattggaaggccccggggcatcgtctagcccacacccatccaatttaggggcttcttgttgtgttctcaggccccagtaagaaccccaatccctagatcttttttcgtgtgttaagttgtgcttaagaactgctgatgcagacataaggttagggcaaggattttggttaattggaataaggcagcgctttaaccttagttcctcagtttcagctttaacatgtg

SEQ ID NO: 159987 - DNA, 961 bp, Zea Mays
gaagccctgatgcgtgtgctacggtcgtaccctcaatttctgagaggcgagctgacacgccggacggagaccgtggtggcgaattcagtgagcatcctggagattgtttcgagtttggcgtcgaccgcggtgctggttgctctggcttcctttgccgccgcggtggcttcatgggcggcggcggcagtggcatgggcggtgagccggtgatggctatccatatttgttgccttgcactaggcggcctcgctagtttcggaacctagcatcactgataccgcaattgatatggctccttctactgcatgcgcagattgtaggcgtagagggaagaagaacaaggccggagagagttggagcgggaggacgtcgtgctgctgcatggtgatgagcacggtgatcaacacaggtgtgggagcaacttttccattctttattgatagatatcgcctgccatctaatgtagactccagcttctatatgtagccatctaacaaaccggcacccaggctgttttgcccgcctgtcgtttcttagctactatgctgccgccatagtagcctagcagttgtgccagccaagaaactcaacaagatcggtcgtgcatgcgtagattgcagcgtcttgtcatggtttgggggtttacagtaactaagcagaaaacatatagcaatctggccatcttgctggtagctagctcctcatctcgacatatatgcatgggcggtagggcggatcgagctcccgagtggggcggggcggggcgtgcgtcagatgtccaaactggtcgtccagctccgcacgagccgaaacgacacgattaagcccgaacaattatctaagttagatctaacaagtttaattctctgaacgagtctgacacgggataggcccaaccatatcgggtcggcctgttaagcccggcttgaaaataaataggttgtcggcttgagctcgccag

SEQ ID NO: 159988 - DNA, 298 bp, Zea Mays
ctcctccaacggcattgtcttgaggtcgcacaacatctcgatggatgccgcgacttgattgaacttcggtggaacgacgcgtacctcctccacctcctcgccgagctcgcgcatctccgagacgagggagcttagtctcatggcaaagtcgtccaccttctcaccatccttgaacttgatattctcaaagaccttgagcagcctttcggcgttggcctcccgaacacgtgcatctcccatgcgcatgcttctcacagccacccacgcctcctttgcgctcttcttcacagcaatcccc

SEQ ID NO: 159989 - DNA, 313 bp, Zea Mays
gtgagtttccttgttcatctaccaagtaagtcgtgccgtcgggatgtgtagcagggagagaagaatatgctgctggcgccgtgggatcccagctaaagcttcattgctcggcctggtggggatcggggtgcaaccacgtagctaagagaagctgtgaggcaacgttgggtgaaaggaagccatgacgccacagctcaaatcgctcaccggaactgtgttgttgctgcgcgtcgtcaccaagtcactactaccaccatgatcggtatgggatccctcggtagcctcgttgacctctccgctacctatagctctc

SEQ ID NO: 159990 - DNA, 623 bp, Zea Mays
aaaagtagttagacttcacgcaactccaaaaattggtttgtttacatgcacataaatggttttcatagatagtcaaatagtatttttcagaagcaagcatcctgtccacctctactcaaatgttgttgttaatcattaacaacaaaggttgtgctaatatcttcctccaaagatcatttaagaaaacaaaaatagggtcgatgagtcactatcaagcccactatgtagcccaccactaagcttgtctgggcccaccatttcatccaccatcaatctcgatgcctcatccatcgtcaagcctgctatcctctgcctctgctaccccctccattgatgcatactaactccagatctaggctgacttcactagaatcacctactgtcatgacgatctataaaagaaaagatgtggtaagggagatggagaaggaaggaagaaaagaaactcaccttgatatattaaagaaaagatgtcgtaagggacggtccgcctataaatcgaggatggtccgtaataggtactaaaattcaaccaggaacttaacacctttgggtagaaatgttggtgtgcaacggacggtcagagacctgggaccggacagtctgcggcctacgatcggacg

SEQ ID NO: 159991 - DNA, 1305 bp, Zea Mays
atgggcgagctcggggaagtttggcgcggtacagaggaggcaacggggaagatgggcgggcactggggtgggctttatagccgcggcatgggcgtggtcacggggcggacgcgggcgcgcggggttcacgtgcgggcgtgctctgagtgcgccctcgagtgtcagccctcgtcaaacacgtgggggtttgcttctgcagggttcaacggccgatttgagcaccttagcgtgcagatcttggcaaaacccccgtgtacgttctcttccctgcaccaaatcctacctttttgatgtgagttccaagcaaggatacggtcggggtagagagatataggggtgagaagtcggctctgtcaattttgtccacaccgagacaaaagccatgccaagtcatgtcaaatggcttagggttgggttcaaacttttccagggtgttctagggatctttgggcgccattttgtcaattggtccaaaaggttttgagtttgggatctgttgttataggaaaattcagccaaggaaaggcacttgtcccaatttttaccatagtgtagcacacaggctcgcaacatgtcttcgaggatttgattcactctttctgtctgaccatctgtctgtggatggtatgctgagcttctcattgcacgggtcccaagtgattcttggagttgctcccaaaagcgtgccacaaacagtgctcccctgtcagacacaatggtcttcggaattccatgcaaacgcactatttgatcaatatagatttctgcatacttctctgtcttgtgggtggtatgcaatggcaaggaatgagctgtcttggtcaacctatccacgatgacccaaatagaatcatggtgtcgggaggtattgggcaatcccacgctaaaatccatgcaaatatcctcccatttccaagatggtatgggaaggggctgtaaggtgcctgctaccttcagatggctggccttgactctctggcaagtgtcgcattcagataaatacttagcaatttccctcttcattctggtccaccagtacaaagatctgaggtcatgatacatcttgttactgccggggagcatggagaattttgaaaggtgagcttcatccaatattttctttctgagctcggggttcttgggaacaaccaatcggtctccaaaccatagaatccctttgttgtcctgacggaagcatttgtatgtttctgccttttgctcgatcatttccttaataacttgaacacccttgtcaccaatctgtgccatgactatttgctcatgtaaggtgggctccactgaaat

SEQ ID NO: 159992 - DNA, 275 bp, Zea Mays
ctcggacacgccgattaggttgcgttggtaatcggctgagttatgacattagctgaatattgactgcgccttggcaacacgacgcagtatttgtgccgttcgaacttcgctgtgtcatgtgattgctatgtcgcgctctcgctaaatcggatcgctcccgttgagtcggagcgccatcgccgagtcacacatttttcgtgggccctgaaggcattgcatgtgtgtcgtaactattgagtcacagttgcgcttgttgcgcctgttgtgcctattgc

SEQ ID NO: 159993 - DNA, 302 bp, Zea Mays
cgtcaaccaaattagctccgaagcagctatcagaagaggggtcctatcaaatgaaagaaaattgctgtcatctttatctacagtaactgcatttagcaacataggataaccagcatatttgaatggtcccaagacatctccatatctcttgtacaagatgcgttgtgccttcagcaagagtagcagcctccagacttgtggtccctgcaatccctgcatactagcctgcatatagagacgatagacactgtaaatagccaacaatgtgaaaatataccttaatgggtctcgctagtttgcat

SEQ ID NO: 159994 - DNA, 1219 bp, Zea Mays
caattattgagctaacacaagctgctcccagctttaggacaaaaactaatcacgctcaagcgcaaggggacgtctcggtgtctaaaaagatggcgccacatataaattaaatctaaggtaaggcgtgtgttgtggccgtcccggcccacatgctctcccaggctttaagagtagtagtaagtactacgcaaagcctgaaaactgcagcggatgttctatggagggggtctccggttagacgatttcagtcgtctaaactgagatcacttctctaaaagtgcttcatctaaacctaaattttatttcattcgaatattaattcatataggtagggccttggcgaccttcaactcatgctgctgccttttggagtaaagccggaggagatcgcttgccttctggaacacctactttaatttgcagtctgcgcgctagcaggtactattgttgatgcgctgctaatgaagtggtttactgatcctgtgctagctagtacgtatacatgaagttgcattattagggcccggggctatttaggacaaccgctggatgtaataactcgagctggcccaacaagctagctccttagcttagttcgttaagatattgagtaagagggctgcctcaccccgttcgccaacttaagctctatttcatttagctcgtggacactctatttcatttagctcgtggactatagcaaaaaaaaaacatactccctccgttcataaatatatatgacaccgttgactcttttaaaaaaactttagtcactcgtcttattcactaagggctattttggaaactcaaatccccttcaaactagtcctaagataaaactgacaatcactaccggtctccattactgttagaaatcataccaagcgctaccggacacatctgctttacgttgatgtcattacgcgtcctaggcattccaaagaaaacatgccaaatccaaagatcttttgaagtcatgcttctagtataattgtaggttcatgcacatgtccactgtacataccttgtaatgcagacgggcaatttttccacctccagtgcatgtaatctatggacccaagcatacatgtaaaacatctactcccattaactgcaagtaatctagcaatgtcatattcgtcgggctctctcaagtactcatctccaaaaacttgaacaatagttgtgacaaaccttcatagactttcaacagcaatac

SEQ ID NO: 159995 - DNA, 619 bp, Zea Mays
gagaagacctcaaccaaccgggtcggtcgagccctggaccatggcaacacctacaacccatccgatcgaggttgtgcccttgtcggcgcggactccctatccacctcacccactcgagtgtgaactcagatcactcggcaaaaaggagtggatagccctagcaccagcatggccgcaggaacaagactgtcggctataccggctgcttcgctcatgggggagatggccggagcacgggacacgccctaagctctttcttcctagatgtcctctttatccagagaagtgtagaagatgctcccatctataacgacaatcccactgttctagggaggagccccctcagcaagaggcatgccaacgccacaacatttagcatcattacaaggccgaagaacggaacctcgcgcaacctgtatcccgggatgaggcatctgcagcaggagagactcctaacgacagggcactcagcgagcgcctcaattcctaacaccacaatcgtcgccacactcaggagcacgagcgtgaatgagtggagcgtgatgccaggcactgagttgataactcgccccttccccataacctactgtctgacttcgcctgagacctgaacacaatg

SEQ ID NO: 159996 - DNA, 640 bp, Zea Mays
ccgggggcctcattgcctcaatcgctctgatcttcttcgggttcgcttcgatgacccggtacgaaaccaggaatcccagcaacttcccagcggaaatgccaaaaacacatttgtccgggttcagctttgtgcgggttgcccgcagcttgtcgaagaccagggttaagtcctccactagggtcgaccttctcttattcttgactaaaatgtcatcgacgtagacttctactttgtccctaattaggtccccgaaagtgttactcattgcccgcacaaatgtaggcaaggcgtttttcagaccatacagcataacaacatagcagtaaagcccatccactgttacaaaagcggtatgcctcctatcttccctagacatctggatttgatggaaaccagagtaagcatctaagaatgacaataggtcacacccggaggtagaatccacgatttggtctatacgtggcagtggatacgggtccttgggacaggccttattcaggctggtgtagtcgatgcacatccgaagcttcccattcaccttggggacgatgactgggttggccaaccatattgggtgatgaacctcttcaatgaagccagcatctagcagcttccggacctcctttcggatgaagtcctg

SEQ ID NO: 159997 - DNA, 770 bp, Zea Mays
gcatgcaggcctattgcaaccccttccagtgcctgaatggaagtgggaggaaataggcatggattttgtaaccggactaccctggacgcaaaaagggaacgactctatttgggtaataatagaccgtcttaccaaggtagcccacttcatcccagtgaaaactacctttggaggagccacccttgcacggatttatcttaaagagatagtcagactccatggcatcccaaggaagatagtgtcagacagaggaacccagttcacctccaagttttggacgagccttcagaaagctatgggcaccaagctagacttcaagaccacctatcacccctagacagatggtcagacagaaagggtcaacaaggtcctcgaagatttattgagggcctgtgtgttaacgttcgatagaaactgggaatccagtttgcctaatgcagagttctcgtataacaacagtcatcaggccagtatcaagatgtcatcgttcgaagcattgtatggacaaaaatgccagacccctctcatgtggtccaacgtaggggaaaaggcactggaagggcctgcctttgttaaagatgctgaggagaaagttgccctgatcctcagaagattacttgaagctcagagtcggcagaagagttatgcagacaacaggcggagagaactcagatttgaggaaggagacttcgtctacctcaaggtctccccgatgcgtggtgtcagaaggttccaagtgaaaggaaagctagcaccgtgattcgtcggcc

SEQ ID NO: 159998 - DNA, 634 bp, Zea Mays
gccggatgttcgcactccgagctggaccgaatcccccacagaccaggaggtggctgaagcaggggctctgttagctgaagttggattgttgaaagagaggggtctggctgcagaggctgtggttgctgactttgtcttcaagaatattcagccactgaaggatatggcatacccggcctatctataccgaggcctagctgactcaacccgggtaaccaacagaaaaattcctgctgtggacttggtgagccggctcgaaatgatacttagaggcacggtatcaaatgttggcgcccctgttgcgtactcggcctggaacctgcctccttccaaggcctttactcatttcgtgtcaaatcctcctgctggtgatggcggtttgggccttagagtgcgaccctctgccgaagaagttggtgctttggttgcttcgcttgaagaaattcctgatgatgaacgataggttcactttgaggtgcctttggatcccagtgatgcagagataagtgccatgcttgatatgttagccgaggactcttctgatgccactcctgctggaacattggtggtgacgcctctcccagaagctagtaaagccttggatattcagaggcctgacagtgtttgcccgaag

SEQ ID NO: 159999 - DNA, 413 bp, Zea Mays
atgtgcccacggtgaacagcggtctgaggcagccagctagcaccaacgagaaattcctccccaaagcctgacgtccgcgcttgggaggatcttcccagtgtacatcgacccccagcgaacaccagcgaccctacaaccacacccgaccgacaacagacacggggagcagtgacgacttccaattttcgccctactagatcttcgacgatgagcactgggtgcagcggcttcgggtgagtgcgagcatgaccgcgagggccaagttttgtaggcacagaggggtggttgttgcaagcagctaggggcagcgacacccacagcgaggtagagacggcgtaagatgcgcacgatcagttcatcgctcggtgtgaatgggagttgtggacgagctggccccgccatctagtgaccgc

SEQ ID NO: 160000 - DNA, 281 bp, Zea Mays
gaattcgaattgaggtatgaaatggcgtggaattaagctgatacttcacgaataggtttatatgggtgaatatgagtgaagtgtgtgcttggtttgaatttaggcgaagaaaatggaatttgggcactcggctcggagacgatcgctcgaaacagggaattgagtgaaattgaagcctggtatatcggattggcgtgaaatttggtgaatatgttactggaggtgttgtgaaggtgcctgaaaagtttgggttcaatcggagcgtttttggctggtttggg

SEQ ID NO: 160001 - DNA, 888 bp, Zea Mays
gtccagctcaaggaggaggaatttcgggagttaactcaaggagggtgatccgttagtgaatacatccataaattcacagaacttgctcgttatgcacccaatgacgttagcacagaagccaagaagatggcccgtttcttgaaagggttaagaccagaactcaagaccatccttgccagccaagacttcctcagtttctcgcacctctcgaacaaggccatccagatggaaagagcatgagaataagaaaaaggccacctcaagagaaagtttcagattctccgagcccaacagcagaacatgcataagagggtttgatcttttgggttcccttccaagggttcgaacctcagcaagccagcaggattcgctccgtcacgtttcaaccagcctggtcaaagttccttccacacctagtctgttgcaagcagccaacctccaaccaatgcttgttggcaatatggagaccctggtcacttcaagaataattgtccgcacctaacattcgtacctgcctactccaactcggtgaatggccccaagaatgttacgacacccgcctccaaggcaccctccaccagcagccagttaagaaagactcagttccacgcccgggctcgagtgaaccacgtccacacccaagaagctcaacaagcccctggagtagtaatcagttcattcctagtcgaatttacccttgctgatgtactttttgattctagagcatctcattctttcatcgccactagttttgtggaaaagcatggcatccccactacaccattagaagtccatctggtcacccggaccctagggtcagaccttctatgccacctcaaatgctgccaagtcagaattcttttaagtggggtagtattcctggcagac

SEQ ID NO: 160002 - DNA, 701 bp, Zea Mays
ttttgtttcaatagaactacttgttttgtggtgctttgaggtgaggtgttggatcttcttatacattcatctggtgtggatgtttccccattgaattaaaattaattgttgatgcttgtaagggttgtgcttagtgcatattaccccttcataaaagagtgttgttttaggacattgatgttgatgtatagctgcaaccaaattcgatggtgtgaaatcgtagtgttgattgcatctatgacttgctttgagcttcattgtatgttgtttcatgctgaatatcaagttgtgtagtttccttagacaattagtccgaggtagaagttcttgtgttaattaagactaataatggacccatgttttgaatggtggtgctatatggggtaccttggatgctttgcttggagtggtcgaattcgaggatgaattctttttaaggggggtagagtgtgataacccaattttctgaaaagaagttaagcttctttttctcttttctttcatgttcagtggcattggggtttggagtttcaggaggcattcctcaggaaacagtagatcttttggcattttttattccgctggggtcgggagctcaaatgggagagcgagtttgggccattgatctcgatccggtggatgggagccctccctctcctgcctaaccctagctgaaccctctccctctccccaatttgttg

SEQ ID NO: 160003 - DNA, 431 bp, Zea Mays
tttagaattaacatcaatgcactttatgcacagtttggttgtggaagaaagaaaacaaatgatggtgaaaaggatgatctaattaatccaagtaatccaatgtacatcatgaagcttttggttgttcaactttttggcgacatttcgttgcgcgcactacaacatatagccttctatgacgaataccttgtgacaatagatcaaaatgtcataagcttctcctacttatgacgttttgtaggggatgattgactttagtgatgaaaagtaaaactttgtcattaagaccaatgcaaaatcgtcataaatattgaaaggtgtcatatttgtgacgaacactctttcaatcttatgacaattaggtagtgtcactatttcatgacaatgttggtcgtcataattctcatgtgaatttcctaaaaaagcaaaaa

SEQ ID NO: 160004 - DNA, 641 bp, Zea Mays
gctcactccctctgaccaagtgaccccacgggtcagctgcttcgtcgtccgtccgccgtcccctcgccgaagtcacctccagccgtcgcctccgtcctcccctctgccatcctgccgcacagggaagtttggcaccgctccgtcctcctccccttgaccagcgtcctcgccggtaccacctcgccgtagcgtcccctcggcagcgctgtgcgccatttatggcggcactgggaagctcgccggagtccgggagctccaccgccccccttcccccgcgcgcctataaaaagcttcccccgagctccttcttcctcgcaccagcttcggccattcctctcctccctcgtccgagctcaattcgtggaaaggctgctgccatcgtcttcctccccggtgagccgtccctctcttctccctgcccctctgttggtccatcaagcgattgcttggccccctagcctcgccacaccgccacggacgcaatacaccactcccccaccccgattgctcgcccagagctcaccgacggcaaccctgccgcgaagctccgccacctccccgcggacagccccctcccggtcccctcttgccaaattgagcccacctctaggctcgccagcccctccccgtgctaaggcacc

SEQ ID NO: 160005 - DNA, 389 bp, Zea Mays
agtattggtcatgaggctattgcagggattgggtggaggtgggctgagcagtgggattttgcatttgtaggatttgtgtgagggagaggaagagggggcatttttgcatggactacatggcctacatggcgagtaggtgcagcatggtgagagggcagcctctctctagaggtggtgcaggagaagcaagaggtcagattgcttggtgtgggagtgttggagggggatagaggtggtgcatgcatgtgaggtaggtgtcgtagaattgattaaggggttggaaagcatggcagtagaggtttgggtccctctagaggagggagggagctcagcacccgctcttgaagaggaaacagggagggcagtgggacccgaggaagcggggagag

SEQ ID NO: 160006 - DNA, 637 bp, Zea Mays
cttagaggactcattaccatagtcatgtgtttttctctctttttctcattagccttcacatagaaccattcgttggtccacccggttggccatttactgggccttgatgtctttccggtatgcaaaattgtagcacctgaagtttttatgtagcccattggatctagccttcgtttggtagtgcagctcatgcactcggcagaatccttcggcattcgcactattaccctggcttcggagggcccatatgtagacgatgagcctaacaatggcattcggtgtcagctaatgaagatatatttcaaaccttttcaaaacttctcctatcatgtcatacagggtaaatcgtagtcctgccctgaagaaactcctaaacacgacaacatcttctttcggctccggaatcacttctttgcctgcaaagcgaataagtttaccttcatcttcccccaagtagcccaactttttcatcacgtctaagtccttttctattacagttgattttccaaactcaatatgattaagttttgaagggctcataatgttgttgtcctcttcattctcatcatcactcccgtcttctgccacagtctgctcagcttcggcagtagcttcttccgacacaaccagacctgaa

SEQ ID NO: 160007 - DNA, 438 bp, Zea Mays
gcttgtcgtagctgacttctgttttaagattcgtttacaacggaataagcataacaaggtcactagaacaaagtggtggaagcttaaaggggatgtggcccaaactttcaaggagagagttatcgaggagggcccttgggcagaagagggagacgcaaacatcatgtggaggaagatggcgacatgcatctgaaagatagcttcagaagagtttgggttgagtcaaggaaacagaagggaagttaaagacacttggtggtggaacgaagatgtccaaaaggctatcaaggagaagaaagattgctacaaacgcttaatcatgacaagtgtgcagacaacatagagaaatacagaatagtgaagaagtctgcaaagcgagcggttagtagagcccggggtcaagcctatgacgacctttatcaacggttggacacaaag

SEQ ID NO: 160008 - DNA, 437 bp, Zea Mays
cgaacatacagcacaactaaaatagtgcgtgcagtccaaaacaacaatcaataaatttcagctcatatataattcaagaattgccgcattctagagacttgaatcattctagcactttaccatttcttagagttaaattaattaaatgaggactaacaagtagacttacaaattttatccaaatcatttagtgcactaaaattaccacattcatttaacaaacgcattcatcacaatcatcaaatccggcatatatttatatcgaagcgcttttcacccactagtccgcattttaacttagacaccacatgagcactactaatttttacccgcgaccataaccacatgcatttagactacaactagcaattcatcgtgaccacgaacttaacccaaaaccatttaacaggttggtcaatcaaagcagcaacataggc

SEQ ID NO: 160009 - DNA, 495 bp, Zea Mays
cttcagtgaaagcagtcttggtcattggtgttttaggtcgaaaaaattcatcttccatctgacagggtcttatgagggcaaaatgattgatggggacgtctgatttctttcttgatagatacagggtttgaggcaccaaatcgattgggtccgacattccttacaaagactatctgctatgtgttcccacatgagccttccctcgcctttctcctgcctagctacgcttcgatccacacgcgctttgcgatgtccgtagcattagacaacacattcgtcttgatgccatgttcctcagagtggtgctccgagagaccgaccatcatgcaggtgagttcacatttcacttgctcgcaagtgtacaccattttatggatgcagaggccgtgatgatcccacgtggtcctggcatgttcagctttaggtatgtgtagtttggcatggccatgacttggcatagcatggcctcccgagtatggcattgtaagatcctgg

SEQ ID NO: 160010 - DNA, 688 bp, Zea Mays
gcgaaacgatatcggctcccgtgagccgtccgatccaaacggacgcgcgagattagatctaggttttatcgaaacggtacgcacccacggtggttggatccaggatcaacggtcccgatttaatgaggtgtgatacgctctgatccgtccgatcgaacccccccaatggctcagatcgaaacgaccaggaagagggctggtttctaatccgaccgttcatgccacatcaaacggtccacggcacacccgcctccgagcagagccctcacggcggcgccgcccgaagctcggcagcgcatggccggaccgcccactaatccccaccgcaggaccctaaagcttaatccgcgccccccaacatgatgcccagtgaaaagcggagaggatggtgtactgcttacctcgaatccgagcagtgacctcactgtccacgcggctaggcggttcggcggtgggggttgaagtacggtgaggaattgaggtcgtcccgaggatcaatcccgccgaacactagcagagacgtcctcctggtgacccggcgaagccctacgacccttccccaagatcccaacggcgacgtagccgggggtaggctgcggcggcgctctcccccttacggcaacaatggcggcaggggtttcctctctcagtttccttgaagtgtggcgaggggcacggcggttgaatg

SEQ ID NO: 160011 - DNA, 294 bp, Zea Mays
tagggcagcctagggtcgtggccgctgatcgtgtaatggtcggccgagattgggttgtagcgtacctctttgcgagatttaatctgggcggtcagtccgattggacgattgggatttggagtggggcttggggtcggtcgaccgtaggatcttgatccgaggaacaacattgtgtaccggttcagattaacaacaaccaaatccgggtcgtgtgctatagatccaacggccgtgatcctcgcgtgccccttcgaccgagccgttttgctaaggggaccctggctttaattgaaa

SEQ ID NO: 160012 - DNA, 919 bp, Zea Mays
atttgtgcgaggcttttcttgggattctcccccacttcggactctagaagtatctttatcactgtcggcccgggatggctggggggccgcatcagcttgttggcggcgcaagtttagagcttcaccgtggaaggaaagtggagtacctcgatattcctctcaaggacagtattaaaggatggcgtcttgagtggttcatcgtggaaaaccactgcaaatctctccccctgggtcagggaacaaccagatgttcgcacacctagctgggtagaatctcctaccttttcagagataactgaggccaaagtattacttgctgagatctgcttgctgaagaatgggggtttcactgctgaagttgtggttgctgacttcgtcttcaaaaacattcaacccctgaaggacagaatttaccccgcttacttagatataggcgtcaatgattccacctgggttacaaataggaggattcccaatgaagatttgctgagccgattggacatgattctgaggggcagagtctcgaatgttggtcctcctgtagcctattatgcgtggaacctaccgccaaataggccattctttgaatttgtctccaaccctcctgctcgtgacagtagcccgggtcatagagtgcgaccctctcctgaggacattgaggccttgattgctccactttggagtcttcccgaggctgagaggcaaactcactttgagatgccagccagcactgatgatgccgagatggatgtcgtgcttagcctactagctagggaatcgtccgactctacccgcacctagctgatggctatcacgactgggaaataatttggcgaagaggtggaaattcggaaatttgaaggtccccacccaaagcgttcacgccgagtgaaccgcccgaccgcacctgtcgaggaga

SEQ ID NO: 160013 - DNA, 522 bp, Zea Mays
aaatagcgaagagtacaggggctaaaccataagttctacgcagacacagaactcccctaagtggattgtgggtttattacttctaaagcggagggctcttttgcaaattggtctcggctgaatgggtatctcacgccctgggccacaggatcacaaagcaacagcccagatcatgccaccacttaaaggaaatggcgaacgactgtgaccctcggatcatggatccatggcccagatctacacgcgcgaaagggttcgccagattgattctccacctcacatccctggatcaatggtccgcccatcgtctaatcctaaccgcttgctacggaatcaacggccaatggcccgtctcccacctcccggttgcgacaaacagagggcaaccggagcatcgccggcgagcaatgtgccccgaccacatagctcaatccccagtaccgatcaaacaatcgcgtagtgtacgacaacgcgacagagtttttcttaccggaagtcgaggcgtggagatcaccggccaca

SEQ ID NO: 160014 - DNA, 336 bp, Zea Mays
gcacaaaagtagcacaagatatacaaggacgcagtggcgaactaaacaataaaatggaagacaccgtaacaatcacatgttcgctttagttatctacacactatcgacgtccaatattaacacctttaaacagacaacaacattttatttatttacgcaacacaactatgacattagaggtacacacattttatttgtttgaatacggcttttcattagttctcctattgatcgcgcacaagcatcatcgacaacacaaattcaatagaggacatagcgtcaatgtctaaggaactcctatatcgcaccactagataaaggaacatataaaacaag

SEQ ID NO: 160015 - DNA, 766 bp, Zea Mays
gggcagaccagtaggaatacccgtcaaaacaactcccaaggttctcagttccgctccggaaatcagagtggaaacagcaactaccaggtacggtgctctggacaacaaggtcagagaagcaaccaatacccaaaccaacagacaagcagcactcagaccggtcaaaggtctagtggtcaacaacaaaatcgtcaaggaagtgtcccaaacaaaccggccagaaacaacaacacaactaccccagttcaacctaatggttgtttcaagtgtggcgaacttggccactatgccaacaactgcccaaggcgtaatcaacagacaccccaaaagaacaccaaccagaggactgaccagaacacatctcctcgtggatctgcaaagaacaagacttcacagaaccagagtagaggaagagtcaatcttgtgacagcggaatcggttcctgaggatgccgacatggcgtatggtatgtttcttattaactccatacctacatcagttttatttgattctggagcatctcactcctttgtaacaaagtcattcgtggaaaaacataatataccaaactatcccttgaagaagaaactattaattcgatcaccaggaggtgaatttagagccacacgctcatgccttcagactaagattgaaattagaggcctaagctttctagtagagctgataattttggaatcgatgtgatacttggaatagactacttgaccaagtatgatggaataatatcctatgccaaaaggatggt

SEQ ID NO: 160016 - DNA, 485 bp, Zea Mays
cttacacgtggaccccagctgtaagtactatcctcttcatgctactcgtttgttcttccctggatggagtattggacgcagcatatgccgaagccgccatcgtctgaatctacgccgagcgcccattcagccgagcgtgccgcccgtcccctccccgccattaactgccatagacggcctctccccttcatctccccacttgaatccggccatttcttctccccttgctggtgtgcgcgtatggtgcttaagcgccatcaatggtgattcaactcctccctgctcgtgctccattcaatccattaatgacgactgtttcttctccattactcccatcacagcgtccgttactcctccctgctcgtgctccatttaaacggccgtttctaccactgtagtgacgccaataatgactgacgctactgctcctcgacaggcgcctcctcatctccctgcgctctctgcttggcctataaatctgacgc

SEQ ID NO: 160017 - DNA, 555 bp, Zea Mays
gcacaaaaatgattacacacacatttactatagtaatatttatggcacttaatatatacacatgtaacaaaaaaatattgcttacatgtttttcagatcttgagcagttactggtacgttctccggcccatcatgcatttctgatataaaaatcaactatgcaatgctgcggcactcggctatcatgcattgcatcaacaaaatttatgaactcagcatccctaattttgttgcaacgtaaatgttgtttctctgcttcgtcagttatgaactcatggttatgctccaagtttaccagttcaatttttgcagctacaaccattttttttcatcatcatatattttttttaattttattccagctttacattgcgtacgccccgatgacctattcctcatcctaggtgtatcatttgattttggtgcacttttaccttcacgtgaacaatttatccacttactgaatgtcttctctctgtatttcttcagtggaaatccaacttcatatgcataccttttatagaatttatatgcatcatcaacatccttgaaagt

SEQ ID NO: 160018 - DNA, 437 bp, Zea Mays
tgtagttgttatcttgttccaatccatatctcaacagtcaacaccatggctccctacaaaacactaccaattgcccaaatttgtcatgattgaagcagcaacaaattatggatgaaaaataatacctgtcttccagcattaccaacatctcagtgtagccttgcagtaacttgtaacccttttgtcttactgttgcaatggttgccagtgtgatccagagtgttcgtgcttagtttttgcatagctctatcattgctgttagcagcctcaaattttcatcaacgcaagtggctgaacagggtttgccctgcatctagactgcagagtatgttaggtgaagttgatctgttaaagtctactcattagctgtatttcttggcaactaagatttgtatatggggtacttaatttgttaggtgttacaactgatgagaaaa

SEQ ID NO: 160019 - DNA, 587 bp, Zea Mays
gtttgtaatgccccatgaagcagatggaaaaagaagtcgattgaatagaatcagaaaaaagcatctgattgataactcatcatcattgccaagcactatcttgtcctgaagcttgacaacatcaaattcttctttaccaactttgagatcacgtctcagttttgcagcagcatccacttcaccataccaatcggtaaactccctgccccctccagcacatggcagacccaaaataagacaaaccgtctcttttgttatcttcagttccttgccagcccctgggtgtatggtcatgtcatgtggatccaatttatgcatcaaccacctgatgagagatctgctctctaaggcatcagttcgcaaatcaaatatactagaaaatcccaacctagcgactgcatcgcgctgccgatcgctcattatccaagttgagacaataacatcataaggaatgcagcggatattcaatttctaaaagcataaatgaatatgcattaatacacataagtatatatattgttataactaaggatactatatatacatacaagtgatatttattagagacttgtaaataactagtctac

SEQ ID NO: 160020 - DNA, 630 bp, Zea Mays
agctcttgggtcggtcatggtcagtcagccgtttcaaacggggaaaggttggtccgtccacaagtcctatcaccggtagtagtagcaagtagtaggtgtttctctgtgatgttctagcaacacccctcgcaattatacgtaaagttcgcgaagcccacgcggacccgataaataaattcaaatccctgatcacgcgaccgtcatctgacaacagataccgcagcttgccgcttgaattgcatcagactcttccacgaaaagctcagtgagatcaccggactacaatttagtctgtcgttggattacatgcgaaaatacaaatagttaaaaaaaaaactaatacattctattcatcaattgtctctacagttttttgttagaccataattagcccgtgtttagatgttctactatttggcatgcaagacgtggactgaagtttatgttagccaagttcttccgtagatatttttggaccagagcaagtaacctgctccgggtccctttcaacaactgacttgctacagagtcgtcgtcagtgcataatgactgtacttaggacgcaatttctgtgtggaatggcaaatctcaagggtgatggcacttcttccacacttcagcgaaggtgtg

SEQ ID NO: 160021 - DNA, 320 bp, Zea Mays
cacgctccgaggactccaagatacgcaccggacgacactccagagtcaaatcctgctgcacagcaattggttccatctcgatctgatggtccggatcccgcaaaaactttctcaacatagagacatgaaatatcgggtgtacccccgccatggaatccgacaattgcaagcgataagctaggctgcccacccgggccaagatagtgaacggtccaatgtatctcgggctaagctttccggagacaccgaaccgaacaactcctttagtaggtgataccctgagaaggacttggtcacctactgcaaattccaagtcctgc

SEQ ID NO: 160022 - DNA, 873 bp, Zea Mays
aatggcagtccgtgaaacaaacgaagtcttcataccaaaagtccgaaaatacctccatgagcacattattcaaaacggggtaacatatttcgtgccagtccaccgatcagagagtgcaaacggcatgactgctcgcattcaccgcttaccgggctatatagcatgtcctaccgagtgaaagcgtcacaacatttattgtttttgcaccaactgctgcaacaaattcctctgcctccgaagctcttcttcttgtgcttgagccttttcgtagagcttcggcattttgtcaatggccaggtttcgttcaactgccagactgaccaccaaatgtgagacaccagatacaattgagatagttcctatttctgtggtgatgaaagagtcgggtatcattgagccgaaggtcagtgaagaagtaggtgttatagaaacgagtggttccgaagccgaagctagctgcgacaaaaaggtcctagtattcttcgttcaaacaaactgatccacattgagttttgtgggtctattgtaaaatccgaagaccttgatgtgttaaaaaggctttggtatattggcatgaaagaatacgatatgatcagatttgctggtggtgacaccgttttggagatgaagaaagacgaagtagttgtgtttagaatcttcttctgggcagggcttcgtttcccgatgtatgagatgattgctatatttctgaatttttttgaaatatacctacatcaattttcaccaaatgcaattgttagcctcatcatttacatttgggccctatgaagctagtgtattgtcacacttcgatttaagggataaactcgagtgcgtctcatatgtgcgccaaagaacaatacatataatgac

SEQ ID NO: 160023 - DNA, 965 bp, Zea Mays
gaaaaggttaaccctatttccctttcaaactagtatgtgggtatacccccatgagctttcttgaagggcccgatcatgtctagtccccagcatgcaaacggccaggtcacaggaatagtctgcaactgttgcgcgggtagacgctacttctttgatagaaattggaacgcctcgcacttttggactaactcggctgcatcattcttcgttgtcggctagtaaaacccggacctaaaagcctttcctaccagagtccttgacgctgcatgtacgctacaatcctcggcatgaatctcatctaacagctattttctagttgccgagtagatgcacttcatgaggacccctcctgcacctcttctatacagcaggccccctataatggtatagtgggctgactgtcttgcaatgcgctccgccgcagctttgttatctggttcttccttgttttttaagtatttgatgattggctctctctctagacattgggatctgcctctacctgactcaggacatggcattcctccatctgatctatggcaacactcggttgctgtatttcttggacaaaaaccccaggtggaacttgagcccgactggaccccagctttgacagtgcgttagccgctgcattgcgatccctttccacatggtggaattctaatccttcgaacttgtcctccagcttccacaccgctgcataatatttgcttattgagtcggtcgagcaatcccgatctttgtttactttgacttatgaccaccagtgagtcgtcgtacaccattaatttcttgatgccgagtgaaacagcgatgcttagcccgtggaccagtgcttggtactctactgcattattggatgctagaaacaagagctggagtgcatacttggagttgttctcctccaggagcgataaagagaatccctgctccttccagtctcagcgagccattgaagtacatcc

SEQ ID NO: 160024 - DNA, 761 bp, Zea Mays
gttagaaatgccttaccccgtgtcagattggtaagtcttgttagttcgtgctatgtgtttgtcttgtcttgctagctaggtggtattgtaattgttcaaccctctttgccaataaaaaaaattgttgcctattttgcccataaaagacccccctctccaaacaaccttgatttagcaagtgaaatctcttaaaaagaaatcatgcttgtgttgatgttttctaacccttgcgtgttttacccttgaatttacacctgtacaacttataaaacccccatgacttgaccgttagaccaacccaagtccccttgtgcacttgttgtgtcaaaaaaaaattgttgttggtgtctagttgcgcaaaccctatcaaggccatgtttctttccataaatccttgcccctaaaacttcatagcattcctgttgatcatccagctgatcttgttgcctacctctcctttcgcatggacctggtgatctctttccttgtgaatcatgttgtggctttatcatccgaatctctggatcccttaatgattctgccccgtcacctggttatctgctataacctgttctcaagtatcgaatgttgatctgcctaaatctctcaattctaataatgctcatactcgttctccaaggatcacgacgcttgttttatcaacttatctctaaatggcatatccatttggttcaatggatttgattcttgtctttagttctctcatgtctctacaagctcttcaatcttgatctcatggt

SEQ ID NO: 160025 - DNA, 475 bp, Zea Mays
tagatatatagtattgaaatttcaaatattttgaatataaaaatgagaaagctacctgaataggctaaacgccgggaagggcctttagaactcagatgggcccaaatgagaaaacaaatgggccggaaatcgtaggggcgtttcccaaccattttacaacttttttttggttaattatatctgtgtcattacaattttctagttttgatatgtgccactaaactttttaagctttcacatatgccattaaacttctaatccctactactttataagatatgaacgtgggcgtccacatcttcttggtgaagcctccgccgtgcccccgcatgtcctgcatcgcgcaattctcgtcgcgagagccccggatgaccgcccctcgcgcgatgctcgctgcgacagccgcccatcccctccctcaacgccatgcctgcataaaagggaggtgcagtgactttcgcgcacggcaacgggg

SEQ ID NO: 160026 - DNA, 368 bp, Zea Mays
tatggatgaagcctttttaaatgcgacagatagatcaagctaaaaaagtgatttctatagctctctccctctcccggagccacgcatgaaatcgttattgacattgccttgccaaacagttttctaaaccaacctagcttcgcaaagaaaactgttcatgaagccatttttcatgagaaaatagcatcaatagtaaagatgagctgtgccaaatgggatctaataagcaacaaagaaaccatgattcatgccaacaaaaataaactgaaacaaacaaaactgaggtccattaacgtacgatccattgcatatgtcttgattagctacctttctcctgcactagtagaaaagggctcaaagcctgcggc

SEQ ID NO: 160027 - DNA, 449 bp, Zea Mays
cttgtcgattacgtgcgaagcgttgtgacagcggagcataaacatcgttgtcatcgtcgtcgtcgtccacaggagagtgagatggggctggagttggtggtgggggacgagcctccagtacgtccatgcgtttaacaagttcatcaactcgtcaatcaagctgctcataggatgtcgaggcagagtcctggtattttttaaaagcttcagtcatcacgcgcatcatctccttcaattccatctgagagacacactcatcgtcgttaagtttaggccccttgtccttgtccatttgattctttggtcctgtcattgttagcacaaaacagagacaaaaaggaaacaaacaatgtgaaccctacaactatctctcacagtggtggtggtggtggaatacaaattatgaagcgtcttaccccgctcttacaacgttcttaccagcactgcag

SEQ ID NO: 160028 - DNA, 675 bp, Zea Mays
cccgaaggcatcgttcgcacgtgcagttctgagggcctccctccgaaccccctgccatgtttcacccccctccccggaggctgatgacattatagaggtcctagggatctcagctgaagaccaactcatgttacgagcacttcgcatcaaaaacaatcatctgaaaaaaaacataaagagatactcgtgtccaagaggcagcacaccaacatgcaagccaaagtaaggcagatgatcctagaagaagagcaaaaagccagagagctggagcagcaaatcgttgaaatgtaggggaagacctctgccaccaccagccaatcaccatactcaaccataaccttcgtcacccccgcataccagccttcgcactagctgccttcaaggactaaatttccttgacgaacgaagccctcttgcaccacaactccaggcctccccttggcctcaaaattatagagcaggcacttacccaaagtacaatagcagtgcggacccaactcagtacatcatgagctatctggtcgcaatcgcatcatctggggggacgacgccaccatggccaagttattcatcatagtccttgagggcctagctctcacatggtattcaaggttgccgctgttatgaattgattcacggaagacactccactacaaattcctattgaagttccaa

SEQ ID NO: 160029 - DNA, 738 bp, Zea Mays
tcgaaaagcccatacttctggccatctcctggcagacggataattctttgttgtctaggaggcaatacaaaaaatcatcttcatccgtaccattaaacactaaggccccttccgggtacttcagttctcgggcatagtgtttagcttcaaaaatttcttcctcagataatctttttcccgaagcatgtcgaataacataatcaaggtcttcggaaggtgcttcgggagtaggagcggcagatttttcaggcaaagtctgttctatagcctcttcctccgctgccttctctccaatttccgagggtttttccttagtaggctctgaaggcccagctttggcactagcctggctcattgcagcttcagcttcggttagttttgttttggcttcaatttgcatttttgaaaccttggcaattttccctggagtagagcttgaagcctttatcgtttctagcacatctagtacacttgccatccttcttcttttgggagtggccgcaagacctttttgtatcttcgacattgttacttccgccgaagggcttaaaacttctaacatttttgttccttcagtctttggctttttggcctcatctttactagtctttgcctcaacttgctcggctgagggtgtattcggtatggtggtcggttctttagccttttgcataggaggaattggctccttcgaatcagcagctaaagaagtcttcccgccaaactcgggcaccacgg

SEQ ID NO: 160030 - DNA, 703 bp, Zea Mays
gtgaactcatacagtccatacttggtgatgaatgctgtcttcagtatatctgaaggtcggattctaagctgatggtagcctgacctcagatctatcttcgagaacacactggctcctctcaactgatcgaataaatcttcaattctgggcagggggtacttgttcttgatagtaacctcattcaaggcttggtaatcgatgcacatcctcttcgtgccatccttcttctccacaaacagcactgaggtgcccaaggcgaggtgcttggtctgatatagcctttctctaacaactcatcaatttgcttcttgagttccaccaactctggtccggacacttgataggctctcttggatataggggcggtgcctggtataagctctatggcgaattcaactttcctttcaggtggcatacccggtaactctttgggaaacacatctagaaattctgatactacattgatagcctctgatggtttaatctcctcaatatgggcggtgacttggtgacaactccctttccttggtccaaacaagaccaactctactaacacttcttctcctgataaggacactaacttcacggttctcttgtcacagctgagactggcttgatacttggtcagccaattcatccctaggatgacatctatagttgtatcctggttacccataactattagatcagcggggaacgctat

SEQ ID NO: 160031 - DNA, 878 bp, Zea Mays
tgaggagcagaggtctgcctatgataagatcctatctgtcgttgacaccaataacggtggtgtgttatttgtggatgggcctggtgggactggaaagacctatctgtataaggcgctgcttgcggcactatgtagtcagtacaaggttgtagttgcaacagctacatctggtgttgtgacttccatattgcctgggggaggactgcccattcgcgcttcaagataccacttactattgatgacggtgatgtatgtagcttcacgaaacaaagcgggatatcaaagtttctacaaaaagcatcgctcattatctgggacaaggcatcaatgactaagtgacaagcaattgaggcgctagacaatagcatgcgtgatgtaatgggacgacctaggctgccctttggtgggaagagtgtagtgttcgggggtgatttcagacaagtactccctgttgtacgcaaggggtcaagggctcagatagttgctgcctctctacggagttcttacctctgggaatccatgtgccacctaaagcgtgttcaaaacatgagggcacagagcgactcatggtttgctgaatatttgttgcgcgtcggaggtggaactgaggaagcgaacaacgatggtgatgttcgtcttccaaatgaggtatgtgtgccatatactggtaatgactgtgaccttgacagactgatagatagcatttaccccaatctaaatgaaaatatgtctaacacaagctacatcacttcaagagcaatattgtctacacggaatgaatgggtggatatgataagtatgaggatgatcgatcgtttccaaggggagcagatgatgtacatagctttgacaccgcggtggatgatcctaataactat

SEQ ID NO: 160032 - DNA, 1246 bp, Zea Mays
aaggtacgacaatattgtcattttagtctgactcccctataaagcataattatcctagacaaacggtgaaacattgggatgtagtacaatgccgtcgttcaagccccacttgacactcccttcatgatcattagtgttagccaaatcaaactataatcccaaacttcattcaattgaccaaccctcttgtcaaccctttgtgctgcagattggacaattgcaagcttccttgtttgaatcatttaggacatcgaggcctcttcctctcgtgcagatcacgtgctttgtagtaccatcatagacctccatacaattcaaggatccttctgtgggccacgaggaaaagcaaccagcagctgatggaggttgcaaaggcattaatcgaaacatcaattttgggtcacattttgcattcaaggattcttttgcaagacatgttgaggaacatggactatcaagataggatcatcgtattttagtcatggtaagatatgttgctaaacgtagtaataacaaatccatggagagtgcataggtaacataattgtcttgtatcagtggtggtaatgcactagctacaccagaagatacactgatgtccaagtttgttccaagcccaacaccccgctcctccttgctcctgtcgagattagctcctcctttcgtgaagatctttccaatgtgggcaaatatcgaggcaatggaagttttccatagagcgtcaccatagcgaccaaacttgcacaagtgtcagcagcacgttctagaactccatgaaggggtggccttgggtcttgtgctctctttctccaacctggtagagagcgtgaggaggttgtgtgtcgaggatgacggtacaatgtttataagaagatgaaggacatctctttgttggaagtctatgggttcgacatggagcacatgcggtcgtggctagagacgttggtgcacataaagagcttttgcaataggctgtagtatgcggttgaagatttggagcagaagaggtgatcgagtaggaggcacacacatatcaatgtgttaaatatgacggtccgtcatctggaactacaagcgtacctccgccgtccgttgtatccacagacttcgccaccggggcaggcaatgacaacgacgagagctagtgggtgcgaaatgggagagggagtggtttcggtgttgcacggaacgactccgaagatgatcatgctcgtctgtccccacatgcattgactccggaggcgac

SEQ ID NO: 160033 - DNA, 947 bp, Zea Mays
agttaattgcatgaataactacccaattgcccatggccacggtgaccgtgcgaatgattcaaagaacaatgcgttcacggcgaacggtggcagtctaattcaattgggtgggtcggtgagtatcaaggacacatgaggatgttagaacaagactaaagacaacaggatcggacctgaggagagcttcccacggtgagcttgggttcgcggtgttcttcaaccgttttgggggaaatcccaaattgggaaactgtgggagacgatcggagctgagagtgggtttactgactacacaattccctagcggaacatgctgaggctccaatttataggctgctcaagcggtggtgatcaatttgactgaatcgcgctggcgaccagaggggaaaagggctctagcgcatgacacaggtggcctttcaccgttgccggtgctccggtgatcaccggacatgcaccgcatgattcaccgtgacgagagccagcgctaaggcacgtggtgcgcaacggcgatagcacgacggcggtgagggttatctgagcgaccgacgagctggggggaagtacgtcatgcttagccgcaaccgagctcgagtggatcagacgccgagatctttactaggctgtgcttatccatggccacggcgcacgaatcacggcaagcaatcgatcaacggcgacgggccaccggcgacgagatctttttggcgctggcggtctgatcaccaatagagcactgtaccatggcgagtgcttcttcagtaagcctgacagccatagtttagggccagatttcttccaaatttctgtggcaacacatccagatctctgcagcaatattgtagtgctatgaaccaactacaaccttgctatattgtgctcccacaaaaagtcaatggatcttgcttgaaattgagcttgaagttcatgccattccactgttagtc

SEQ ID NO: 160034 - DNA, 791 bp, Zea Mays
cgggttgtctgagaggaatatgtgggtggacaaggagaagaacgatttgggttgaagggacagattaccaaccttgtccgcttttcagacccctgagatggtccttcacccgcatatctttttggctttccttgtcccgaatttttggcttcaactactagtgttgtgcaaacaactctgctatacgcgagatccagatacgtagccattttgcgctggagtctgtcattcaaccctctcatgaagcaatttttctttttcagatatgtgtccacttggtcaatagcatattgggagaggtgattaaacttgttgaggtactacatcacggaatctcccccttgcttcagacatatgaactgctccagcttcatttgtagcaccccttccggaacgtaatgttccctgaacacatgtttaaattctgcccacatgaccagatgtccagcaggctaaatggctaaaaatgtttcccaccaagtgctggcaggacctctcaactgttgagcggcgaataggggcttctgtttttcagtacatcggatcagcctgaacttttgttccataacccgtacccattcatcagcttccaagggttcttctgccttgacaaaaaacggtggacgggtttcagaaaattccatgtaagtagtgtctcgtggcccttgaggttgacctcttcctccgtgttgttgaaattgatttcccgccaattcacataggaaacgcgtgttgtcggcggtagcgttgactaaggcagcgatagcctcagccaatgtaggaggtacagg

SEQ ID NO: 160035 - DNA, 647 bp, Zea Mays
caaaatttatagcccattgtcagccctacgcacaggtttgtccggggaacaagaatcaatgaatgaatgtgccagattgggcaaccttatgctagaactacgtcgaaaaagaagagtgatttaatatattaaaatggagacacgagggcagatagcaacagtaaaatggaggaactaagcagttgacctagatccacgtctttggtgtctggcgcgcggtgtgcagagtcgactgctgagcccaccacctacttcacttcggttaggacgacggagggagggtagatccggcaacgacaacgaaggagaggcacatcggcggctggagtgacaacggcggctggagcggctgggacagtactgggacgtctggagcggtgaaaccattaaggcgcatataggttgattgccaaccgccagtgtaaatatcattagcactggcagttttctttagcatcccgccagtgtaaataacattagcaccggcggtttgcttaagaaaccgcatgtggaaacatgatttttcacaagccggctgtttaagacaccgcttgtggaaacattattatcactggcggttttctttagctgcctccagtgtaaataaacatgatttttcacagacgggctgcttaagacaccgcttg

SEQ ID NO: 160036 - DNA, 641 bp, Zea Mays
ataatttttaaaatgcggattatgtgttggggaatgcatcgataggtgtctacatgaaaagtgtatttgttttatgcatgtgatcggtgattgtgatagccgatgcgaatgaggagtatgattaatcctgttggagtcactggtgcggttgatgtcttgtgcgtagtatggggacacatatgtgcgtgtgtgccgtggtgtattatggtagtggtggtgtaagatatttgtttgaggtgtgcgggtatatgccgtaatatggttatactcgcgacggggaaagatgtatgtattgtgtaacacgacgtttaggttgctgttgtataatcatgtgaaggacgcgcatgatggtcatgtgactaaagggtggtgtagtagcaaagcgagaagtaagtttagtatttttttttaaaacgattagttgatagcatctatcggtgttgtcatgctttctgttgtatggcggatcgatgccttgctttgtcaatcattgcattccatgcccattggataaataaatatcttgttgattgattagaggtcttatatgaacgtgatcgcagcccgataattattggaggcgagtagcgttcataagtcgatccttgttaaaattgaagaacaatccgataagatatgca

SEQ ID NO: 160037 - DNA, 867 bp, Zea Mays
aggcttgaacactaatcaaagaagcttgaactgacctacagagggctggccacggcgaagtgttcacggtggcgcggaatgatttgggggaaatgtgaaattgggaggctctggtggatgctcagaggtgcgagctggtgcattgggtgcgtaataacctagcggagctcactggggcagcaatttatagactccatcggtggtggtgtccaatttgaagaaggcgcgctggtggccggatagaggggaggtgcactggcgcgggttatcgttgctttcaccgtggcaaagcctccggcgatggacggacttaatactatggttcactgcgacatgttaaagctcctaggcacgtggcacacggatggtaagcggccaacgccggcgaggatcatctcggccggtcgtagaccaagtgggtacggtgaactatccagtgaccaggtctgagccaatacgggcgccaagatcttttactctcctcagttatccactttgctgagcacgaatcgcggcgaccggcgcgaatccgcgcgcgaagttactggtggcgaggttcagcgcatctcagatatttctggttactgtaccatggcaatcatcatcagaagttctgacagcacgacttgaggggccctgttctccattttccatgtgacaacttactaatatgtttgtaataaagttactgacctataatctagctacaattcaactatagaagccttgagtgaattctgattaaaacacatagaattcaatctccaaagttcatccgagctcactgtcagtccaaccctaacccctgatcctactgacattctaactttgagtccaatttactccaatttttgtacaacaccaatg

SEQ ID NO: 160038 - DNA, 778 bp, Zea Mays
cgacaactcggtttgctgcgcatatgataactagccagtagaaaccttggccatgaccttggcggcgagggctctaggtctcgagtgtgaaccgcatgttcctctatggacttcgcgaaggacttcaatgccctcgaccgcagcgatgcatttgagcataggttgacttattcccttcttgtatagttgtccatctactgttgtgaagtcatgacttctgtgcttcaatctcttggcctcagcctggtcagcgagttgatagtgaccttggagatataaggttatgggtgcgcgctagtcttcggtcattattagatttacaattctatggccttggggtcttgtgtgatttgtaggccttcgaggttccttacagcctatgtgccaatgaagtggaaggacacatctaatggcaatgggtctcctttcgctgctgcttttgccagcgtgtcggccactctgttcttgttccactctatgtgcaataatgtgaaccaccttgaactatttttccaggcttcgtatggctgatagaaatattgcatgaggactggctctttggctgaaaagtatttttcaatttgcccggcgatgatcttggagtcggttttgactatacatgtctccacccccaaggctctaaatttccgaagtccaagggtgatggcttcatattctgttatgttgtttgtgcatttgtctgattcaagcgtgaagctaacaagcacagtgtatttgtatttgatgcctatggttgatgtaatgattgctgcaatac

SEQ ID NO: 160039 - DNA, 1042 bp, Zea Mays
tgctgtaggcgcaaggaatcgacgagtggcttaccgtgtagctcggtctacgtgcgacggcgaccggttgaagtccgacgacgtcaatctggcgcctccggcgatgtgaagttcggtccaagggctcggggagcttcacggaggtctggggaggctagccgagggattggtttgggtggaggagggctggagtggctggtatatggtggcccggggctcgggcggccgctggcacgccgtgcgcagagggaacgccggtgaactggcgctcgggcggggttgggagcgcacgggggtgtacggtcgaggtcggtgttggatttatagccacgggcgcgcctggggccgagcgccggggcgtgctctagcgttgccagggcgcgtcgaacacgtggccgtgttaatctacctgagttcttgcgcctgctgagcacccaaacgtgcgaatcttgccatatgacttgtgtaagatttcttccctgcacctagagctatctagttcatgtgagttccaaggggagatcgggtatggcttggaagatattgtggcgccatgtcttgtttgtctgcactgttcatctcacgacaaaacagatgtcaaaccgtgtcaaacaaccttggtttggtttcaaacttttcaggggtgtgccttgggtagtttggctactctttttatttggaccatgtggttttggtgccagcaaataagtgaacacttctgatctttagattagggctgattttgacttagagaaaaatggattgctctagggtgctctccacttgggtgcttggtttggggtttttgtaggacctttttgtaatactttccttactatattttgtaggtatattaatgtacttcaactttggtaaagggttcaagtcatgaaatgattgtttgcttccccttctcactaatccaatgcttgggggttttatggctcaagagggggaactagtgttttagaacctttttcataggtgaagatacatgaaaagctagggtattcctcccatcatgatcatcacttagttaaac

SEQ ID NO: 160040 - DNA, 520 bp, Zea Mays
cgttcgctttgacgaattccggtcggtgaacgctgttggtcgcgctcgggcgaaacatcccttcctaggcgacgagccgcgccgcccccttctctggctgctcgctcgtacaggagtgtgtcctcgtcgtgtcgtcatcacggctaagcccggccgacgagcctgcgtagatggctgtgtgccgaacaccagcttgcctatgccgtagtgcgtgccatcgtccacaacctggaagaactgctcgtgggccccactgatgctatttactctgtggtatgcatgcagccaactaggaaaactgtccctaatcccctcgcgcatatgcacgacagagcatgcaccctccacgatttccttcatgcgagcaaccaatagaaatttaccgtcacacaagatctcaagactttctacggctgtgattttgtagccctctaaccggccgtgctctgaccaataaaattacgccacgtcatcttaatccacggtttattatctatgcaataactttcgtgctataaat

SEQ ID NO: 160041 - DNA, 400 bp, Zea Mays
gtgatagggcaatcaaataagttcattctttttcttttctcctttcagcttcggtatattccattcactcaatatcagaaataccccataggctaagaatttttgcaccagatctctactggcgatctgctcagttacaactctaaattctgccacagcctgttggcatggtgaccccgacgacatacgacacaggggcctagtcaacccgtagctcaaactcagcgggctcagtactaacgtctttagcttctcccttttcttctcatcagctttaacatagaaccactcacttttccagccagttggccacttggtgcggtagcttagcaccggggccttcatatccttgtggtaagcgaagttgtaacagccaaaattctcatgaagcccatcttct

SEQ ID NO: 160042 - DNA, 761 bp, Zea Mays
aaatgactgctcagtgattgacatcacgctgacagtgccctgcgaagaggaagaagtcactagctcccatttgagcttcccattgggattcctcctacacaccacatccttgtgatcctggttgcatatagagcacctgccactccactgacactcggcacggcgatgcgcttcaccacaacgaaaacacaccaaccccagcccgggcttaggaacagtccgatacctctgagtactccctcctgaagtaccccgaatcaaaggattttccatgataggggtggtgacgctggtgttgcgactttcccctcttgtgggctggacccctagtgttggccctcctcgcgtcctggccatgagactgatcaacacctgaagacttctgagattccatggtatactgatgctgcatctccatgcccaatgcctgctccacagtagtacgaaaatccaccaacgaaaaggcccctagagcatgcctgatagaaggttttaggccctgacggaactggctcgccttctccaattcattgtaagccacatgaggaacaaagcggaccatcttgttaaagcccacttcatactctgtgacagacttcttctcttgcttgaaagactgcaaatcaatcttcattttctctaggaaggtgactgggtagaatctcctctcgaactgcctgatgaaaacatcccaggtcaggactcctggtgaggaggagtgagctgcctgcacgcctctccaccaaattggagcctccccc

SEQ ID NO: 160043 - DNA, 317 bp, Zea Mays
tgcgtggagagctggtcacgccgtcgggggtgtgtgtgcggactgaggggcaccggcgggtggtggcgaggcttgccgtagggatcgggcacaacggcgtgtgggacgagatatctgggaagtggggagcgaggtgggtgtgggatgcaggcgcgagatgaagaaaggttgttggcgagggagaatacgtccgctgtgggaaggacatatatttacgtcctgtgtgttgcactcctatacgaatttcatttaaatttataaaatactaactctcttggaagctatattatagccttaactcctatatttaaaaatag

SEQ ID NO: 160044 - DNA, 605 bp, Zea Mays
gtgaatgacgaagtccttcttctccaaggcagcctcgtgatctttagctttatgttcaagttcttgaatgtcgaagtcctttttcttcaaagcagcttcgtaactttcgactttattttctagatctctgatggtagcttcgtttttcttgtcttcaagatcttgttgcatcctcaacactttacttagtaatatattctggcaaaacaaccttcatcagaaaacatcttaattcaaaaaaaaattgagaagtttttaccttgaaattagcgtagaacaggctaccggcgatatgctgtcgctggtacctgcacaagtccgcttcaatcttcggcagcccaacattctttgagaaagtcctaacaactttagcctcggttcgattccgaaggcatcttagtttcccttaattgactccgccaaatagcagagcccctcgtttgtatccacaggatatagcatatttctttagctcttctttttcagtttctgataactcttgtccaagtatatcttgaaaattaaagttttcttcttccaaagtgtcttcaatttgctctttttctttctcaatcgtcgtgtccaccgcgaccgcagcagcttcc

SEQ ID NO: 160045 - DNA, 461 bp, Zea Mays
gcataggatagcaacgtatctcggctgagacgctgcaaccgatatacgcacgcaaaaaggtatgtggaaatgtgcataactcatgcataaatggaaaagtttctgccacgaatcacgggaacgaatatttgcatgtgcatgccggtttacgattgcataacgctgtgagacatgatagcgtaaaccatgcaacatttaaaatctcccaccggtttgagataaggaaagacgtgctcttcgtgcgcgtaaataaaaccgcagttacgggaggaaacaaatacaaggttagctcgtccacgttcgctcgtccacgtctttatctcaggtattggcggcggttagcggcggcggaagttagaggtacggccggcggcgagaaaatgtccagcaccggagctggcgatgacatgccacctgtagcatctgtaaatacgccagcaggtacgtctatttcaatggac

SEQ ID NO: 160046 - DNA, 484 bp, Zea Mays
ggccgccaataggtgaatcatgaagggccgaaatgatttggcgttgtatatccgagctactccccagccacacgcgtcctttataatgaatgattccctgagatagggtgtatggagcagcagcagttgtggatatagacagtttggtcaagagttcctgcgcctgcggatcatcactgtagcttgcaacaaccccttggatccacagtggagtactctgagaaatatgcatgacttgcccctctgtcggaacccgagagagagcatcagcatccatattatcgcagccctttttataaatgatgcgatattgcaaaccagccagcttaacgtataacttctgttgccaaacagtatggagccgctgttcatttaattgcaccaggctttgatggtcagtataaatatgaaactcagccagctataaatatgatcgccactgcgtcactgcaattagaatggccaaatactctttttcatatgt

SEQ ID NO: 160047 - DNA, 330 bp, Zea Mays
gcgtatctcatctctctcctggcgcaactcctggcgtatatcttctctttcctgacgcatttcctggcgttcttgctgcatctgggcacgcatatcagccatagtgtccgccatttgctgcatcaccgccatctgagcagcaaccagtgggtcaactccgcctggtggaggattaggaggattcatctctgcaggctgtggctgtggttgtctatatatccttcgagtgtgtcggttagggggcaaatcaattccaccaccccgcctggtattgaccatctgagttagatacataaggtaagagaatagtagacaaggcagtaattacaa

SEQ ID NO: 160048 - DNA, 390 bp, Zea Mays
atggattccatctatcatgacgactcagccaactgtgtgtttacgttggtattagacgatttttaccaaaacgattctcacaaaaacgtgctgaaaggctagtcatttgcatcgtgtttggttagtggaatgctgccgtgcagaattgtccgatccagaaaccgaacctcctcaagttgtttggtttgtgtcatggattcacttcgtttgtcaacctgtagtactagttagtaataccacagtgagacgagttcatcccgcaaaaaatgtcagaccaacccattctgattgaacccatgccgcatgaaccaaatccgcaaaccaaacgcactgttggcagtccgaaacaatagaaacgtgctgaaataagcgaaggctgccacaggggct

SEQ ID NO: 160049 - DNA, 749 bp, Zea Mays
gagctggatcattaccggcaacaccctcgggggctgggaaaccgccagcaccacccttgaggactgggttcttcgcaacaaccacctctaaggctgaaggaccctcagccacctccatgggagtcgggcgatgatgactaacctcttgacattgaagactgccctccaaagtcgacgatgcgcgagatgctgctcgggaggcctctaatctcgcatctagaatttcagagcaaacatccatcatatcaccatcattcggctctgacaacatatcttcagggaaaacatcctcgagagtccgatcaaaatctgttatggataattcttgcaggctaacaagagcagatagagccgaagaaggaatatcactactccccccactaagtctataacgccgactgttcttccgaatcaatgggacttcctcttcctcttcttcgtcctcatcaacaatacggactatagacggcacaggatcacacccattgggatcagctctggcagggtcacacccattgggatcagctctggcagggtcgcacccattggtttcagcatcagcagggtcacacccattgggttcagcatcagcagggtcacacccattgggtttagctccagtaaagatttccaccggtacttcttaagcagcaggagcagaagggccagcatcctggtccaggcatgacactcaccgaagccgtctctttttcttcttctttccctcggcaggtgcagttggacgactg

SEQ ID NO: 160050 - DNA, 763 bp, Zea Mays
gcttcgtgtcgtaatccatcttcagggtttggtaggcttcacaagtgttggtttcctcgccttccgctatttcgagactctcttggagggacgccttttcccttttaagtttattgacttgttgctctaggctttccacccaagagtttaggtgagtgcagtgggaggaaaggtcatcatattggttatcgagagtgtggaggtatccagccatgtagacgatggtggggtcatcctcggtagtcggtaggatctcttcctgacagagcctgaagtcttttcctccaggcaggggtatttttgttgctgggtggaaagtagcgaaggggggtttcaaagaccactctgctgtagttttggcatagctgtcggagggcttttcgggcaacattttggcaagtgtctgggaagcggtgtccggtgaaagtgacttggaaaggagggtggtttgggtagtttcggctttctcccaggtagactgccatagagcacttctccattccattctcgagatattccttccagacatattctggcttcttgcggatccccatgcgaagcgcacaacttcgcaacaagtgtgggaacccctctacctctaagcagtaggatgtcctaatgaccagagagtcttccatctggaataggaaaagaagggtctgttaatatcggggaaaaggagagaagatttttcttggggtaagaggtattttcttttaaggcaaacttttaaggtcagggctgcgacctacgaccagtccta

SEQ ID NO: 160051 - DNA, 467 bp, Zea Mays
cggtaaaaactatagttacataaaattcaagttccatatctatcaatataacatacaagttcaaagaagcgaagcaaacatacaactaagttcgtcctgaccgaatcaagtcgtgcgtacgttgtcaaatatcgatctcctcgaagggtgggacaccgagaagaggcgggtcagatgatgtctccagctgagagccagggctcgctggttcgtcaagctcgccagttgtggtgtcaaggtcaggcaactttaggcgtcaggaaggaggcgacggtgttaagaatggagcacctggggggattggccccggcaggccgggatgtaagaagaaatgggacccgatggatagatgcgaggactagaccaaagaggatggaagttgagagaactgctcagggcaattttagcctatccaaaccttatttttatatactttacagtaggttaatattaggtataagaggtta

SEQ ID NO: 160052 - DNA, 872 bp, Zea Mays
tacaaaagttggagttaaatggactcgaagtctggctgtcagtcagctcagagtctgaacttttactgacactgacatggggtaaactttgggagctcttttgaagataatccagtgagtgtttgagcatggttactatagcaagattgtaactggattatagggctacaactttgatatagagaggtggtccagtcactacatgaaatttgaagcaaattgacttgcaaattgctctgtcagaacaactgaaacaaccctgatggtacagtgtctgcagaaatatcttaggttcagcccccctcgccgacggtgatcttgcgctcggattcacgccggtcgccgtgattcgtgcctagcacgtagtagatatccatggggaggtaaaaagatctcgcgggggcgcggatttggtcgcggcagaagcttatcaccgtgcctatagccgtgcgacgtggccggaccgccggtgtcaccgtggaaactttggtgacctcggttatgccacgtcgtggctcgttactatgcggtagtaaccgtggcacatttaggattaaaatctttgagccgttgcaccggtgaacgccacgactaagccaccagtgttctcacctctctccgaccgccagcgtgccatctcaaattaacgggccaccgcctcgggtcctataaattgagcgtgccatcggctccgctaggtagtcacgcacccaatacaccaacccgtgcctcagatcgtccaccagagctccccaatttgagatttcccccaaatcggtcaagaacaccgcgcgtgtgagctcgtcgtggccagctctcaacaggtccgatcatgccctcctcgctcttgttttagcatccttgcgtgcttg

SEQ ID NO: 160053 - DNA, 1015 bp, Zea Mays
attctgtgccgcggactgcgggttgatatttaaattcttcgggggctctttagaaaaacgaccagggccgaaggggtatcgtgggatgctagccgtctgatcttaaacggagcgcccagattagatcacgctttaatcaaaccggtatacgattcaagcccacagatcaagatccaaaggccaggattttattaagacgcaaaccgatccgtgccctccaaccaggatccaacggtcaccaccctccattccgaaacgttactcgggatctaatcccagcccttgattcaaggatcaatggtccatagcccgtcgtccaaatcgtgcccacacgcagcggcgccgcccaacaacggcgatgcaccatcgccggcgacacgccatcactcacccagatgcctcattctcgaatccgaagcgctcaacccgaattgaagtcaaagtgagtaggttgagactgctattaccggtattcgcgcaagggtgagccttatccacgagaaggggcggatgcgcggtggcgcaggagcgacgacgaggaatcgacggcgttcaggtgctcccccatgcctccaattgccaccagagggttcgccatgggttggtgatgctccaaaaccatccaccacgcagcagccgtcctagctggcaatggtccacggcggcggcaccaatggcgctttgacgacgaattcatggttccccaattgtcctccgacggcgattaggctatggagatgaccggtgagtcctagcgaacccttggattcactcatcacggtccagacgacagggcaccgcgagttcaacggcggcggcaatcttctccctttctcctccgtcgaaacaccggtgcacccgtccgcccatggccaaggagggtcgcaggggcatgcttatatgcactgaggggttgcgaaacaaccggaacgatcccgggtcttggcccgccatgctcgggatgaggttgacggggaaggacggacggagtccgcgcgcatgagaccgttccgag

SEQ ID NO: 160054 - DNA, 681 bp, Zea Mays
ggccattttagtgatttcttcctctctctttgcttctgggttggccgttggctcgaagggctctgagaaggagatagctcagctgcgatagaaaacgtaaataagtccgaagtcacaaaaataaaacataaagttaaaagttattaagcaatacctatccgcctttcaagttccgcagctttctcagctgcctttgtcgcttcttttgcatcatgagaatctttcactcttttttattatctcgtgcgccatctctcggccgccattctcccagatgtcagtaaagaatttcctgccaactaagcttgcttcggtcgaggggtcttttgtatcttcaatagataaggcagcttcggtttgagccaaagctttcacgtgatcacagcctgatttctccaaaatagtcgcgattcccttggcactgagaaggcgcatacatccccgcgaccactcaaaacttcttcaaaggcttcagcttcgttgctgatccaatcaattgggccttcaggatcgccccttacgaagttgtcctcgctagagaatgcgccaacattggcgaagctagattttattttttgcacacattctatggatttttcgtagcatttctcttttgaagaccgaagttctacaactgtcttctcccaataatttttccaatagttactggcgtctcggtca

SEQ ID NO: 160055 - DNA, 487 bp, Zea Mays
actgttaaataattaaaatgtacaagtttgaaaacatgatgaggctaataaggaagttacaacataaatgcacaactcatgatttgtttagaacaagagggacacacaagtcaagagtatttgcacatgttgtgcttaagcagtagcaggaattgtgcatcggtttgtttcaaacttgtacattgaaatgatactctctagcaggaatgatactctcctggttcaaacagaacatgtgggagacaaaaaaatatgtcataaaatgttgcatacgaatatgacattgaagtagctacaaatgtttatatgtaatcacacaagtaaccattcaattatgccggcagacaagaacagagacaactaaatgtgccccgaaatctatggtaggtattatggcggttgtcgtactaatcaccctccacgcatcgtcgaccacattaatttacacttatgtgatgagtccatgaactgtcttctggaaacccta

SEQ ID NO: 160056 - DNA, 811 bp, Zea Mays
ggcatgtgagaaagcttaaacgaggaagcaggggacggggactgaccggaaaaagggctggcgacggtgaagcttgtttcacggtggcggaagctgatttggggaaaaacggcgattctccggctagaggggctaatcgagggggagagtgggtgctatggcttcggtatgacctagtgcagctggccgggggctcaatttataggaggctctgacggcggccggtgaatttggggaggacgcgcggcggccggaaatggagaagaaggcgggcgcggtgaattcgtgtccagtggcatggcagttgttccggcgatcaacggggagcgagggtaagtcgtggcggtgcggtggaaagtgagagccacgcggcgcacggccgggaggcggcggttcaccggcgagcctatcgctccagccgcaaagcagaggggaagtaccggggaggttcaccggagtgccgtccagcgcatggcttttaccgagcggccatatctggtcaccggcgacgtgaatcgcaacggcggcggcgtgaatctcagcggagatcggtcgtcgacggtgagggactgtcgttctgatctgtccgagtcactgtaccatggcgcgtacttcttcagtaagcctgacagccatagtttagggtcagatttcttccaaatttctgtggcaacacaaaccaaactctgcagcaaagttatagatctactaaccagctacaagtttgtcatagatgccatgggcagattcatgctggaccatagaggaatctttgctcaaagtctcagtggttgcactgtttctctaaaaa

SEQ ID NO: 160057 - DNA, 899 bp, Zea Mays
cgttgcggatgggtgaagatgttcccggcgatccctggcggttcggttcaattaaaggggtcggggagcatcaccaacatgtaaggatgctagaacaggaacaggaagggaatgaacagacctggggaaggctggccgcggtgaggttagttcacggtggcgggaacccgaattggggagaactagaaattcgcgcgtgctggtggataatcgagggtgggagcgggtgctatagctttgggatgacttagcgcagtagcccgagccatcaatttataggaagcttcatcggtggcgcggaatttggccgggccgtgcgggtggccggagataaggaagaacacgggtgcggtgaatccgtagctaacggcgtggcaacctccctggcgacgatgggacagccctagggagtcacggcgacgcggtggaaaggctaagccacgcggcgcacggccgggaggtggcggttaccggcgagcacatctgttccagccgtaaagcagaagggcggccatggtgagtcaccgaagttaacccagggggtggcttttacctggcaatcatatcgggtcatcggcgacgcgaattctacagcggtggagtgaatcacggcaagggtcaccggcggtgaagatttctttgcggcggccgatcctatccgatcagttactgtaccatggcgacaactcattcagacagcctgtcagccaaacttggagcattattttctcttaatttctaacgacaacactagtcaagctctgcagcaaaagtgtagagcaatacttcatctacaactttgtaatatgatgatgccacaaaaacccattggatcatgcttgaatttaagcttgaagttgatggcatcaatctgttagtctgattttcagacttattca

SEQ ID NO: 160058 - DNA, 359 bp, Zea Mays
tagttgttgttattactaaactgttgctggtggtgtgcggctagtttgtttcgttttattttcctatgggtggctgtgtccttgtttaattatatattacctacagtattagatactagttggtgtctactcttgatttcaacgctctagctctttctcttcggtgggtgatgtggtggggagaacatgcatctatatctatcaagtgctcctccatttttgttttgttgttcttggacagctcgcctatccaaagaactaaaaatgtttatattagcttagtattttccctggagctatgaagttgatactggaagactatgtaatatgttttgtctcattaagtttcacagacccta

SEQ ID NO: 160059 - DNA, 473 bp, Zea Mays
tttaaaaggaatagccacccttcccccattggactagtcttttggagtgattgggcctttccctgtgttgggtgtgcttaatgaaatgttgggctctgggcaacactaatttgttgggcctcagccaaccccacctgggctgggtgtatcatctggtatcagaactagggcccattttaagaaggtgggaatgatgaggacatcctccactattacccgttggcaaagacgcaattggcctagttggcccaattgtagtcggacgacgaccgtgtgagcctcagaattatcccaccttgcttaacttgggaggaggaagccactttaaaagggagagccacccttcccccattggactagtcttttggggtcattgggcctttccctgagttgggtgtgcttaatgaactgttgggctccgggcaaccctaatttgttgggcctcgaccaaccccacctgggctgggtgtatc

SEQ ID NO: 160060 - DNA, 439 bp, Zea Mays
aaagttcctctctgcgatatggaaggtatttcgcgggtcggcggtgatggaatgaagaagatgaagtgcactcgccgtggacagaggcaccgaaggatggaccgggaggatttgggagcacctggtcgggtctcatcgatggcttcatcttccttgccttcggtggtgcacccccctcgttcgcatattcttaggcgttcaaggttgctcgaccaggcggaggagaattttcatcgtgcattgatcgtcaatgttcttggccaagagggtcctgactgcgcccttgtgattttggaggcactcgcctcgaagtatggtcttgaggctgatgcgctccaaatccgacgtgctgcgtccaactcgtacctggctttcttcccctccgtggaacacgttgttcgcgccttggctggtggacattccatttccataccccccc

SEQ ID NO: 160061 - DNA, 772 bp, Zea Mays
catagtcaaagctttttcactgcatttttgagcaagccaccgttttggattagcttcggcaaaagagggagcttcgtaaaaaactataaaaacatcaactttgtaagaactacaagaaattcaacaccagatggccagagtacgctcgactgcgagggtgacccgtgacggagaggaggttgaagccaccgagactgctctgatctctgaagtgatgagacaattgggactagttgtgagagagagccattgaagaaggtgcacctgctgccgaaactgaacaagatgttgaggaagaaatcgctgatgaagaagaagaggattatagtattctgatcccgtcaaaacccaaccacttggattttgaaaaatctgctatttctgaagctgatatgcccatgatgatgaagctgggctacttcggagaagctgagaagaagctgattcgttttgccagggaagaaaccactctgacaccgaaagatgatgaagtggttgttttcaaaagttttttcagagcaggactacggtttccgctgaacgagataattggagaaattttggataattatgaaatatttcttcatcagctgacccctaacgccatcgttaggctcagtattttcatctgggcccttcgaagccaggggatggacccaaatgctgaagctttttgccgagtgcatgagctacattaccagacgaaggccagagaggacggactccatgaaaattttggttgttataacttcgcgtatcgcaaggatacgaa

SEQ ID NO: 160062 - DNA, 636 bp, Zea Mays
gagtggctctgttctacctttagtagtgttcaattgagggaatcatggaacaaagtggctccaaaaagagaatcttcacctaatatgttgaatccctccgctcccaaaaactataaaacattttcacttgtgagtgttcatgtccaaagaaccttcctcaaaaacattatgagcaccacccgtgagtcctaactctcgacctcccccgatttcacctccttctgtgtcgctaggaggcaatctggctaccaatagcgagctccttctcgaccacatctagatccaccaacgtctgtccttgatgcaccccctataggtttgtccatcccccttcctccctccttctcctttagcatggccatggcatccctctatctccatggccatgatagcatgatggccaacctctccacctatgtcattttgtgccttgtccatgccttcagcacgaccaggggttgggccccaatatcagtgccccatggcggcccgtcgatagccaaaacaatgcttcccattctcattttgtgtgcatggtggcaaatccaatagttacttatcatttcttccttccttctttatgtaggacaataaatttgcatattttgtgtgttttctcatttcctttgcaggaac

SEQ ID NO: 160063 - DNA, 365 bp, Zea Mays
gtgacaggtggattcgacacaaaaagggtgaaggctttgggaggaggcaggttccaggccgagtatgccactggggcaccaacatttgacaccttgcctcttaggatcatctcaagccggctcaccaagtctgcagagggaattcttctgttggtaatccgagttgagtcggctaggcctcgatacagataagccggatgcgccttgtctttcagcggctgaatattcttgaagacaaaatcagcaacaacagcttcaacagtcagacccctctccttcaacaatccgacttcagccagcaaagcacctgcctcagctacctcctgatctgtgggggactcggtccagctaggggtgcgaacatc

SEQ ID NO: 160064 - DNA, 1053 bp, Zea Mays
ggtctgacagcggtggagggaggagcacgggcgcgcgagcggagatgggccacgggagagaggagagaaggttgggctggaattcgtcccagccgagggggagaagattttcctttttatttttctatttccatttctatttctatttctatttcttttatctcctttttcttttgaacaaatatttagctatttattctttggtgtcaaaaaaatattctatgtgaggtgctactaacaatcatggtgtatgcacatgatgaaatgtcttatgaagtggggtctaggggataatcaagggggctaggagattagggtttctaacctagggattaaattttgggatgttacaaacctaccccacctaaaggaatctcgccctcgagatttagactgggcttgagaaaaggtaagggtattccctcctcaaagagtcctcactctcctaggtagcttcctcttctccttctctgctccactgaactttacagagtcttacttttgagttgcgggtatttcggacccgagtcgagaatctttactggcttttctcggtactgcagatccttctgaatctgaattgtcccttcttcgatgcgactttccggcactttcaggcatttgcgaagctgggatacatgaaacacattgtggatatctgacatggattctggcaattcaaggcggtaggctgcgggtcctaccctgccaatgataggataggggccgacgaaccgcggagctagctttcctttcacttgaaaccttttgactccatgcattggggagaccttgagttagacgaagtctccttcctcaaacctgagttccctctacctgttgtctgcataacttttctaccgactctgagcttcaagaaatcttttgcggatcagggcaactttctcttctgcctctttaacgaaggcagacccttctagtgtcttttcccctacgttggaccacattagaggggtctggcactttcgtccatacaatgcttcgaacggtgacatcttgatactggcctggtagctgttgttatatgagaac

SEQ ID NO: 160065 - DNA, 331 bp, Zea Mays
gagaggttcggatagcaagcacatccaaagactcgaagctgctcatatgtgggaggtgtgttgtacagggcagcaaagggacaagaggcgcagacagttttggtgggaaggcaattgagaagataagtgactgtatgaagagcatctacccaatagcgaggtggcatggacgcttggagcagcaaggtgcggatcatattgttggtggtgcggagcatgcatttggctttaccgttctgtggcgatgtataggggcaagacatgcgaagcttcacaccattggtgagaaagaaggtccgggtagaggagttgtcaaactcccgaccattat

SEQ ID NO: 160066 - DNA, 503 bp, Zea Mays
gttcagtagctatatttggctttcatttgatctctatcgatatcttctttctgtcttaacacattcattgcatatattgtatggatgtgactacttcagaaaatctattgaaaattcttggtcgtcccccacccaatgggtgttttccaatgggtgtgaccaagggacgtcttggtacgcaaagcgtttagcacattgtcttggagtagtaacttgacctgaccactgggcgtaatcatattgcccaagcagttgaccttagtccaaatggtgtcgtgttacgcgaagcggcgtctgctgcctgactcgcctttaggcaatttgaattgcttattgaatacttgcgactgttcggtgggcgtggtaggagacgaacaattgccaccggcctatataaatagcctgtttgctcctctgttgttttcgcacatcctctgatcgttcgttgtttctttctaaaccttctcttcttttccatctagccatgggcaaggacaagaaag

SEQ ID NO: 160067 - DNA, 619 bp, Zea Mays
tgcaaggctatccgcaaggtcatcctttgacatggcggcgaggccagtttcaagctttggaaatcccatacttttggctatctcccagcaaatgaatatttctttgttgtctgggagacagtacaggaaatcatcttcgttcgtgccattgaacactaaggcccccttcggatattttagtttctgggcatagtgtctggcttctaagatttctttttcggataatcttttccctgaagcatgtcgaataatgtaatcaacatcttcggacggagcttcgggggcaggagatttagctttttctaccatgtctcgccccactgccatgccggtatccgaagtttgttgctcagctatatcctcaggtgcggcaggcttcgtctcaatgggcactgaaggcccagcttcgacttcagccttgactgtgacagctttggcaactttcttagtaggagcaggggtcaaggcttttgtggtctccataacagcgtctagcacgctggccatcctcctcctgggagttgtggcaggagcctttgtcaccttcggaaaaactgactctatcggtgggctcaaaatttttggcatcatcgctgttttttccaattttggctctttg

SEQ ID NO: 160068 - DNA, 646 bp, Zea Mays
catttgtcctgaagtccgggagttgttctttgcgagttctctccataagacctgttgtctcagtgtccaggcgttgagccttgcgtatgaggtcttctagtattggcttgacttctagactgccattgtctcctacacaagtattcatttgagctgattctttcttccagtcttccaagaagttggtttctttcttcccgaaaggttttcggctgagggcgtctgctaccatgttggccttcccggggtggtagtggatctcaaggtcataatctttgatcaattccagccatcttcgttgacggagattgaggtctggctgagtgaaaatgtacttcaggctcttgtgatctgtgaagatgtgacatttgttcccaatcaggtagtgcctccataattttagggcatgcactatggctgccaattccaaaccgtgtgtaggataattctgctcatgcggcttgagcaggtgtgatgcataggcaatgactttctcattttgcataagtacacaccctaaaccttgccttgaagcatcacagaagatgacgaaatcctgatggatgtctggcagtgtcaaaacgggtgcggttgtgagcttcttctttatgatttggaagctttcctcacacttcggggtccatac

SEQ ID NO: 160069 - DNA, 768 bp, Zea Mays
gctggcatgagaaatttttttgtccatgaatcgtgatatcgatcaacttttagaaagtgctagcatatgagctagaaattggaatgctagtaaaacaaacaaacaggaggagcaagcatttacacttttgctgatacgcttgcattgtcgacattggccaagaaaattaatcgatgtgctcttcccctgtattgcggttaatcccctcccagcctgggtatgtcatatctaccaacacacgcgaggacggcgaggcttgggagcggcgagaggacgacgagaacggcaggcgatggaatggtgctacaggcgtcaagggctcaagaggggtgacggtaggagggaatggctaggcggacagactcggcaaaaatacctaacaatctggatgggatggtgagcaggatacaatagcgagcaagaaagagagtccgttggatcggattttaatcctaatttttctgtttttgcgtatactaatctatttagctaggtttttggagttgctctaacacttactctttagactaactccagctgatctcgagcgcggacgcgaaaaagcaccaggccgatggggaggagcgcgtcgcggaaacagacacgagttcctcgcgtaaagaggagaagaagagagaggatacgttggtttgaccgtttgaggggagaggaaggggatgcctttttttccaaccgcatcatccggtttctgatggacgccctatagtgacgctcgccacgaaaaaaacccatccgtgacgcttttcg

SEQ ID NO: 160070 - DNA, 949 bp, Zea Mays
caaggcctcgaaaggtgccatattcaaactagactggtagatgttattataagaaaattctgccaaggaaaggcacttgtcccaatttttaccatagtgtagcacacaggctcgcaacatgtcttcgaggatttggttcactctttctgtctgaccatctgtctacggatggtatgctgagcttcttattgcacgggtccatagtgattcttggagcttctcccaaaagcgtgccacaaacagtgctcctctgtcagatacaatagtcttcagaattccatgcaaacgcactatttgatcaacatagatttctgcgtatttctctgtcttgtgggtggtatgcactggcaagaaatgagatgtcttggtcaacctatccacaatgacccagatggaatcatggtgccgggaggtattgggcaatcccacgataaaatccatacaaatatcctcccatttccaagatggtatgggaaggggctgtaaggtgcctgctaccttcagatgactggccttgactctctggcaggtgtcgcattcggatatatacttagcaatttccctcttcattctggtccaccagtacaaggatctgagatcatgatacatcttgttactgccggggtgcatggaaaattttgaaaggtgagcttcatccaatattttctttctgagctctgggtttttgggaacaaccaatcggtccccaaaccataggacccctttgctgtcctgacggaagcatttgtatttttccgccttctgtttgatcatttccttaataacttgaacacccttgtcaccaatctatgccatgactatctgctcatgtaatgtgggctccactaaaatataacttaaagcatcggaggaaacgacttctatttttaacttgcacaactcatcacatagggtggtgattcttgcatccatagtcatacaattgcac

SEQ ID NO: 160071 - DNA, 628 bp, Zea Mays
ataaaaaaggggtttcaaagatactcagtttgttcacgattgacttgcattcttacttaactcggggcgaccactatgccctgctaacggagcaatcggcttaagtcggtaacgacttaaggcggtgcaacatgctcacgcttacttaactcggggcgaccactatgccctgctaacggagcaatcggcttaagtcggcaacgacttaatgcggtgcaacatgctcatgcttacttaacccggggtgaccactatgccctgctaacggagcaatcggcttaagtcggcaacgacttaaggcggtgcaacatgctcacgcttacttaactcggggcgaccactatgccctgctaacggagcaatcggcttaagtcggcaatgacttaaggcggtgcaacatgctcacgcttacttaactcggggtgaccactatgccctgctaacggagcaatcggcttaagtcggcaatgacttaaggcggtgcaacatgctcacgcctacacaattcggggtgaccactacgccctattaacaaaagcaatcgacttaagtcagcagcgacttaaggcgatctgacgtaattacaattactcatataaggatgacttctatatcccgcaaacaaatt

SEQ ID NO: 160072 - DNA, 436 bp, Zea Mays
cgtcgtcttccccacgtacgacgccccgccgtcccttcaccgtcgtcccttcaccgtcgtcccctccatctccgtcccctcgtcgcacagggagagttcgacaccgccccgtcctccccccttgaccaacgtccttgcccggtaccgccccgccgtggagtctcatcgccggcgctgtgcggcattaatgccgccgctgtgcacctcaccggcgcccgccgagctccgtcgctcccctcccctcgggcgcctataaaaaggctgccccgggcacctccttccctgcaccggcctcggccactctcctcctcccctcgcccgaacgcaattcgcgaagcgccaccgtctcccccctctccggtgagtccttcccccctcctccctctccctctccgttggtccagcgagaaattaagtgagccgagcagctccctca

SEQ ID NO: 160073 - DNA, 802 bp, Zea Mays
aggaacaagacatctctcgtacacccccttctggattgatccaaacaatccagcagggcgtctgaggaaagccccctccagctctcgtggacatgctgctgccggtccctcgcgttcctctcctggtcgcggatctcccacaccatgtggtcgtggtcgaggtcgtggtcgtgggatgggagctcgactggcccatggtattgcaaccttcttttccatgtgcaggaacatatcttctgatgtgcatgagctggcgaggcgtcagcgggagactgacgacaaccttcgtcgtcaagcctcttccatgggtatgccatttgctccccgctcacctgatgtgcctcttcaccctcctccactagaaatcaatgaatggcaccagtagacctatggggtgcccttcatgtccgctgaagatgaagaagaagaggaagaatattttgatgatcgtgagcagtttgccccgcctccccaccagggggatccgggtcaatcctcttcatatcctcccccagctcagcctggggaagaaaactttgcggctaacttggcgactcaattctttggtccgcctcctcctcagtggtgatttgtggttgatggttctctccatttttggtgctagttgccaaaaagggggagaaggattgccagcttggcgtttttaatttttgtaatgaacacctggtttgtaataattttattctcctgactattgtgatgcatgtggtgatggcctagagccattaacattttaatgatgtgatgtcctctattgtaattgccagtaccatttcatatc

SEQ ID NO: 160074 - DNA, 526 bp, Zea Mays
cgcccaacccctaagcccagaatcgtggggacaggagactcgaggtccattttatgtaaaggatgatgtaatctgggaaaaccccgccctaatggcatttatatgtgcattccctcatttattgcacataggggagtgacttactcgtgccctgcttaggggtgacatagcccaaggcctagtatgttggtgggttaggcctgcttcctcgtctgtcgggtcatctccgctggcactgagctgcagggttttgcatggcagcctttatttagtcgcgctgctctgcctatcttatctaccttgctttcggctcccttgttcctcgtcttcctcgcttggcctatccttatctcactcgggtcattcgttgcacatccttatggcaaactggcaccaatccttgacgagccagtggaaccttcgattcgctcatgccggcgtggtctggttgacaatggcggatggctgaccccaggcacaaaggaggccccaaacccgcctcttggttatgtggtttcgtttgttc

SEQ ID NO: 160075 - DNA, 1175 bp, Zea Mays
ttggttaaagcagggaaaatgaagacaaagatcttaggacaacacacaaaattagaagcattttgagtaacaccggaacctctaagagaggatgtagaaatcgtgaaggaatagaatcgaatttagattttacaaaggtgaaatagattactatttttgttgtacagtaactaggcgacaaagttgctatgtcccaaaaaagacttcctgcaacaatctatgagcacgaaaaatgttttgtgggtgaactgaaacgcaagcaatacacgcatcctaaaatggaggaaacaaatcatggattagaccgagaagccaaaattagagaaaagcctagacccaaatttttttagggaaaattgaggaccagagacattcggagttcctatgtcctcaaatgagttcatgcagcaatctatgagcacgaaaaatgttttgtgggtgaataaaacacaagcaatacacacaccctaaaatggaggagaaaaatcatggattagatcgagaagccaaaattagataaaagcctaaaccctaaaattatggggggaaattgaggagtccaaaaaagcatgaggttctccggtacaagaaaatcatagcaaaaggatgctgagcatgattgaaagcacgaatttggaaacaaatagatgtccaccgaatcgaaacggacgatgaaagataaaatatcaaatttgagcaaacaatcggagccgaggaggaagctagtcgagaggaaacttcagtacgaaggcggagtcaacgaggaacctaatgccgacaaaaccgaatgaacagagagaagaagggataatcaaaacctatatctcagcaaaacaaacggagccgagtaggaacccgcggcagatgaagcgcatgtgttgatccagaaaggactaaagtgatgtaaagcgccacagttgggagaagaagcgagaagcaaggaaggagaattggagaagtggtcggcggatttctctagaaatcagtcggccccctttttgaccaaaccataagatggtgcaacaggagcaacacgagcccttgctttgtaatccaacggtgtacaatttaacgatgacgtggatagccccacatgcgtcgttttgaaccgactttgttataagagaaattagaaatagtcgaacgacgttggatcgacgaggatacctatttcg

SEQ ID NO: 160076 - DNA, 2152 bp, Zea Mays
tttgtatttatcgctagctgttcttgtttcaaacgcttctaggtggtggaatctggggatctgcgggtgtttctagtccgagtattgttgatcgttaatagatcactcgaaccatttgctactgcaactcatcacggaattctcgtgggctattcattatccagggcgagtcgtttgcgtttgctcggggctaaaaatggcgtctcgtagttcataactccctttccagcgccgcggcatgtattttatgtaatttcagcataatgttggcggttttggagagattaagcaagccgttgcctttgaatcgttctcgtagtttaatccgatttctatgttttttcttcgaaaaaaacgagctaggaattcataacttggagaatctgcttggattggggctcgtgagcggcatgaattgcagctgataattggtacgggaaacctgcaactctttttagtgccgaaaattcccggtgctttttttttggctgtattaggcgattcctttgattccgagagaaaaggtcgcaatactcgagtccggttatttttttccagacaccgggttaaaaaaaaactcgtcctcatcttttattttatatccaaaatacaatcatatcctgctcttgccactgcagtttcgtcttgtattatgtgggcgcggattagttaatgaacagagcttagttcccactctacgcgatggatgtactaagcgcaatcaagcctcttaacttgttcgtaatcgtacctgtgccggcaattaattttaacacgccagtattactttaatccctcgttagatgtgctctcgcgccgtaacggcgacggtgcttcagacaacagaccccgcaataactgccaattagaaaatccttacagcttcggtattaccgctagggtttcgtccgtcgccgcatcgttattggcggtagacttcgaaagtctgcgtgccattaattgctaaacgccgattagccgaacctgtccatcaatgggcacattgatgggggtggaattaaaaagttgccgcgtacacttgacttggaatcccagttgcaaatgcagggtacggcagtacacacggggtttttttaaccgaacaggaataaccagcgcgtggaactgtcagtgtgaaacggtggggaagggggatttggtttcggtctttatagtggtggtatggtattaatgcgagtgggtggagggaattgaattggagaccacccgcacctaaccggggcatcgcaggtcaaatgccggtgggcccggtagtttagtggcaggcaggcccctcgcagtccaccacggggcaagggcagtgacagtgagaagggtggtgctggtgctggttgcgcctatgcgttgtatcttttcccgatacggtcaggtcagccatggggtgctgctagtgctaggggccagcttgctaccacaagtgcgcctccactccctagtgctttgattgctatccagcgtctgggctttggttggcttcgaattgatctgtggatgaatgggacaacgcgggtgtgtctgctggtactagtgtggagacgtcgctttgctccccgccttttaggcagggttcttggaatcttggtgcaggactgcgggccgagtgcgatggaggccttgttgaatggtgggtgttcttgtcggtctgccgtctgcgttctgcacagaggttgttctgtggaattttttgtgtttggattgtgacaacatgataaaaaagcagctactttttggccagaatttttaaaaaggctgatcaggaattgggtggcagagggggtctgattctgatttttttaattctttctgttcttacttggatttgtcgattaaaatgaggtggcttacagtgacatggtcctgtgttatcatgtaagttcagattggtcaccaagtagacaggttactatcgctggtcattgtatatttggatggtttttatgctgttagtactgactgctgagtagggtggtttctacaatcactttggacattgggtcaacaaaatgttaggcatagtcaatgattctcatagcggactatctttggtgtttgggggtggcggaggagggcgggatgggtttagaaaaagtttgtctggagtatcacagaaagtgattcacctggttggagg

SEQ ID NO: 160077 - DNA, 670 bp, Zea Mays
caatcgcggtttcactacctcttggtaagtatcacgaaccagcctccgattgtaccatcttttgcttgtatttgtcagacacttgtaagagcttggtaagatacattagagtgtgttcctgtgttccacttgagaggagcgtgtagtgaaattattagggataactgtcaccgtttgtttcctgttttgtgtttcgatggtaggcgacaacgaagaagcaaggatcactacagacttcgatgaatgtgttagccgccaagatcttgaggcaaacaacaagctcctgaaggagcaaatggaggagacggtccacaagtcagtgcatgatgctttcattgacatgaaccttagcaagacttacgagaggctagatcgacgattgtccgagatcgtcgacagacttgtgttggagacgcaacaacaagcaccgccaccaccacctactcgtcctcgtcttcccaataatgcaatgtttgatgaagaaggtaattatgatgaagcggccaccagagatttgtgcctacgtcaccgtcttcatcaaaacacagaaggtatgccacaccgccagcaaggtaataacaatcatgctcctgacgacccttgtgctaagattaaattttctataccaactttttcggatcattatgatgctgagggatgtcttgattgg

SEQ ID NO: 160078 - DNA, 333 bp, Zea Mays
gtcggactgttttacccctaaactaaactgttgctcgttctgtctctagtcgctcgttctctgtctcctcttcgttctcggcccagccgtgcctcggtcagcctgaagttccttccagttgtctgcaagcttcgttctgtctcaaaacttcgttcgacttactgttagctgcatggagttgttctgcttgctgttcgctgcatgctgctcccatcaagttatcttgtcgttttgtttgctgctggtctgcatgctgttcacatcgcgcttcgttctctctgtctcctctcgctcgttctgtcttctctctgctctctgaacgttccacggcgc

SEQ ID NO: 160079 - DNA, 792 bp, Zea Mays
ggttgccacgccgttggccacgtaactgcgcgccaggcttcttccccgtctccggccgccaacacatcgcggtcaaattgagagccaccgctttccctcgctataaattgagtgcccccgccactccgtaggatagttacgcatcagttgcaccaaaccttgcaccggattatccaccagtgactgagaattactcgttttccccaatcacggtttccgccaccgtagaactcaactccgccgcggtcagcccgattcaggtccaatctcaccctcggtttccttgtttcaacatccttgcttgctcttgatgctcaccgacccgttaaatcgaattagaccgccatgaatcgacgggaacgcactcatcggtccgccttgtccacggtcgtcgtggctagaccaaaccctgtgaccattagtgaaattatgttgggggaaatggtcggggtagtgctaatttcgtgtccgctgctcagagaaccctgccgttgccccaatcggccggtgtaagtgctcgccagagcatggccgcgcttgaacggcgtcggggactttaaacgcagaataggtagaagaggaaggacttttgtgcaaacagtcagtgacttggttaaacagtgaaataactcgttctcagttagtaaaaacttcagggccctttctgcaaagccgccagggcgcgggcgcacgcgcgcgttttcctctctggactgggccgcctgggctgaatccagcccattactgttgaaaccttttcctttttctttttcagcagagctttagaaatat

SEQ ID NO: 160080 - DNA, 501 bp, Zea Mays
tcttcttgttcatcttttgccctaaaatttgttgataatacatgcacatggcctgaatccttgcctcgtacaaggcctccttcaccaaccgataggcatttacttgaaacaccttctcggcgtggttcgcgtcatccccgtcggccaaccgaaaacgtgcctacaaaaagaatgcaatgttatctaactttttaatgattgcttccatataacacacacaagattacgtacccagaagtcagcacgaacaagcccctgggcatcgccataagtgacatcgaccttcagcttgtaatcgtcccaacatgagaggaggaccggcacagcgtctgcatcgtcggacgtcttcaccagaccagggtagtgaaacttcaggagcgaactcaacacagagttcacctgcttttgacgaccctgggccggtgaaagagtagtcccaccactctcatgcaaaaagacgggcaagcatcaaacatgcttacatttgatgaatacagctga

SEQ ID NO: 160081 - DNA, 653 bp, Zea Mays
ccattcaatcgttctcgattgatcacacctctaacgtcaaggatcgatcagaaaacatgcatggcactagtaattcagcatggatgagtgtgggaaggttgggccttaaataggctgctactggaccgaaccaaagtggggaacaaccggagctaaggaagaaggtggtgggggaaggtgtggcaaccgcccctaaccgatcgaaagcatgagcatcaagataattgcacgataacgatctcatatcgtgattcattcattaggctagtactagtagctatgctatctcgtcctagctcgttcacgtgtgtgagcaggtctatcgatgtatatgtcactgttggtgggcccaccatgccagtccatttcatgatgtcatatggcccacggacacttgcctactcggtcgccggagaccagctgggcgtgtatgcacatgcagttgctgtcggctcgcctatatgaatatcgggcggcgggttggcatatgtgggctcaacttcagagtctatcagagaaccaagtctagggcccagcaatcattgaacccacgtaatgattaagtcgacgtgggtgtatgatttcactgtctaggtagacgtggtggataaagggcccagcacaatagggttttttaccccgttttggaagca

SEQ ID NO: 160082 - DNA, 321 bp, Zea Mays
ggtctattattacccagatggaatcattccctttttgcgtccggggtagtccggttacgaaatccatgcctatttcttcccacttccattcaggtatcgggaggggttgtaataggccagtaggtttttggtgttcggcttttgttcgttggcagatgtcacatcgggccacatactgagctatttctttcttcatccccttccaccagtatctggtcttgaggtccaggtacatcttggtagttccggggtggatggagtaggccgagtcgtgagcttccttgagtaggacttctcgggcctccccttttggtacacaca

SEQ ID NO: 160083 - DNA, 416 bp, Zea Mays
ccgtcttaagtcgtcgccgacttaagccgattgctccgttagcagggcatagtggtcaccctaagttaagtaagcgtgagcatgtcgcactgtcttaagtcatcgccgacttaagccgattgctccgttagcagggcatagtggtcaccctgagttaagtaagcgtgagcatgttgcaccgtcttaagtcgtcgccgacttaagccaattgctccgttagcagggcatagtggtcaccctgagttaagtaagcgtgagcatgttgcaccgtcttaagtcatcgccgacttaagccgattgctccgttgacagggcatagtggtcaccctgagtttaagtaagaatgcaggtcgacaatgaacaatttgagcgctcttgaagtcttcttattgacgatatatttcccagtttataga

SEQ ID NO: 160084 - DNA, 500 bp, Zea Mays
tcttaaaagactctctcttatcttgatagatccatcttatcttaaaagatactctcttatcttaatagattcatcttatcttggaaagattttatcttattctaatctgatctagatcccacctaatctaacatgatctaatccaaattgagttacttaaataagttggataatgttggcgacataaatgaggccctaattatataaacatatcttaccctaaattaataccttggactaactcgtccctaaacaacaacctaacctacaccataggttgcctaatccatttgttccaaaagcaaactaaaactctgttcaaacctacctcgtgtaccccagctattcgaactatatgtccttgaccatatgtccttaactacgatgacaactccaagaataaaggccaaagaagacaaaccacgtcaaagaaggataagcatcaactcaagtattcaaagatcaagttggatcgccagaagaatcaaggtccagagttt

SEQ ID NO: 160085 - DNA, 795 bp, Zea Mays
atcgattcgactcgagagttgaaatcaaccgggggtgttgcaacggtaacggagatgcagtgggggagataagcgggttgctgcattggcggctcgctgttgcttctgagctgagtcatggatcgttgtggtggcaccaatatatatctctcagacgatagcccttccctactggctagcttgttcacgtcaaccctgctcacttgtatcgaatttacgcactgacggttgtggttgcacaatagcactggcctaatatataccgtaacatgtgttttttattgtagtgcgttgttctgatcatagtagatctccgcttcattatcatggaacccttagcttgttgctctattaacccagaactgacataaagatgctcttcacaatcacagatttgtgcagagtgagagttgctgtaaggctccggccgaagaattcagaggatttagctcatggtgctgactttgatagctgtgttgagttgcagcctgaggttagcttgtccaccccatttaaccttttcattttttaccagtaatcactatttttttctgcagctgattgtgttggtggtcttgttttctgtagtccaagaggctgaaactgaagaaaaataattggagctgtgagtcctacaaatttgatgaggtcttcagtgaaagtgcttcacagaaacgtgtgtatgaggcagttgcaaagcctgtggttgaggcaagtcatgcattccagatgccactaattaatttagttgttgcaaaatagaacaaattgaaagatgtagatttgctagtgctg

SEQ ID NO: 160086 - DNA, 429 bp, Zea Mays
ccgtacttgttgccacagaccgattgaccccccgttagtggaatcgaataatgaagtgcctcaccgtcgttgaagcggagcagctgcagaccatagtggtcgccagaaagacgacaggccggctggatcccaatccttctatgcaaggagcgtgatgccatggtgcctattatccactaccatgccccttaatctcgcccccgccgtccccatcgccttgctaggattgcagattgaagttgcctccgcctccgccgttgtgcccccttgaccttgtcgtcgccttccccatcgcgcctcgctagggttgccgggctgaggcggcgtggggagggaggcatagagctacaagccttgtatggatattgtgcagctcagtcatcttatactccacagtgaacttctccatcttcatggatccatcaaaat

SEQ ID NO: 160087 - DNA, 539 bp, Zea Mays
tgatgccgatgcgtactcggtccctgccgacgaaccaaccgtccacagggagactgcatggcacaaaaccatggccgtccatcgcttaggccttctttggctgcattgaatcttgtatgtaattaatattttcgatgtgactcattacaaccgaggatccgtggcgcaatggtagcgcgtctgactccagatcagaaggttgcgtgttcgattcacgtcgggttcaatttcccgatccaaacggatctctttttgctgaaattgtttgtaatttgtctaatgtccaccgttacggtcctttttttgctgaaattgtttgtaattcgtctaatctccaccgttcgtctaccactaaaaacatccccaacagccgatcctctttttcgctaaaatttctgtaaggactagtctgcttacattaatgggaagggcttttctttatgactaggaaaagtctcatctgatagtagaacacgaaatgcgcataagaaaccgaaacccgtatgcagaaaggtaaccacgaaagtcattttaggtca

SEQ ID NO: 160088 - DNA, 600 bp, Zea Mays
aagctgaacctggaagttgtttccccaggtgacttaagttatatctctgtggaacccacattgcaagagcaaatagtgagggcacagattgaggataagggtgttcaaatgattaaggaaatgatcaagcaaaaggcagagaaatacaagtgcttccgtcaggacagcaagggaattttatggtttggagaccgattagttgttcccaaggaccctgagctcagaaagaagatactagatgaagctcacctttccaaattctccatgcaccctggtagcaacaagatgtaccatgatctcagatctttatattggtggaccaggatgaagagggaaattgccaagtacatatcagaatgtgacacctgccagagaatcaaggccagtcacttaaaggcagcaggccccttgcaaccccttctcgtaccatcttggaaatgggaggacatttgcatggacttcatagtgggattacccaatacctccaggcaccatgattccatttgggttattgtggacaggttgaccaagactgctcatttcttgccagtgcactccacccacaagacagaaaggtatgcagaaatttatgttgatcaa

SEQ ID NO: 160089 - DNA, 444 bp, Zea Mays
ggagaaaaatgtgcgcgctcggccatattcgcgggccattgtaaccgccggggatctatgcccttggtcggactccaactcgggttataaatcattatcgtggccgccgcgtaggagtcgtgcatggtgggagggggcccctgcagccggggtgctcgtggatgccgtcgtcgctgggctctgggtggggcaatcgagagagattgtcgagcttcatgaggtttgggcgcatcgtcagggcgtgttgaagctgcggctaccagcgaatcggcgtggttggctactgaaccttggcgatttctcgccggtcgccatggagccgccgtgtcacatgggcggcattgcggtcaccccgatacgtggtatgatgccttctctgaggtttgcgcttgtatgaatcacgttttgctcgattcctagtcatgattacctcaccaatgcggc

SEQ ID NO: 160090 - DNA, 880 bp, Zea Mays
ccggtacgtgtacgctatccctcggatcaaaatcctacggtcatggtttaatgaatcacagatctaatctgggccaagggatcagagatccacggctcagctcagtttcatccaaacgctgccgaacttttaatcgtggctgttggctgggatccgacggtgagcaccaatctcctagctacagccgaaccccaactacagcggcgtgcacacgcccacggtggaggcatcaccggagttcccaatccatgcctacaagcatttagttctcgattccctagcgtacgtgcagtagagatagtagcgaactcagcagaggtcttcttaccgcacttggggcagggttgaacgctagccacggcgagcgatactccgcgacgagttctcagttccgatgagcagtcatcatggattagcgccctcctacgatggattggtgaacaccgtagcatcactatgtcttggtgatcctctccaaacccccatcgcagactggacgacggtgtaccagcgtctccatggtagcggccagaatccccttctctctgcacgccgttgtttgaggaggagcggccgcagatttatacccaggcggcgccaagtccgagccggggcgagcagcgaggatctcggccggggaggttggagatcgaatcgcggacgtcgttggccaaacctgcgatttccgcgcggactctgttccaggacgcgctctgtccgcggggacgaagcgcctgaccacatgggtcccgctgaggaggtccgagtccggcggcgagggtttcaggcggtgataacggtgggcgagagagcaagatgcgcgcggcgcccgtacgaacggcccgagcttcgcggagccattccacgcttccgctgcaca

SEQ ID NO: 160091 - DNA, 504 bp, Zea Mays
ggcgaagctgcgggagctggcagcggcgtcgggccctgcctcccccgtcgtcaggaagggctgcaggcgtgggagggggtgaggcgaggcggcggtggtggaggagaagagggatggacagtgtgggagtgatgggaacctcggactgcgctgtgcgctcagagctcgattggatggagtttttgggtccggggcattgaactcacatttggattccgatggagtgaatgaaaacacgtgtctgcatctacgcgtcaacaacagctgaggccgagatcgcgtggagtgcggagagcgtttgaaaaggggtcgtcttttaataactctgatacgacggtgttggagaaaaccgagctattattgtaagctatgaggtgtctttaaataactctgatacgacggtgttagagaaaatcgagctattgtaagctatgaggtgtctgtttggattttgtaaactacagtttttaacaccacagtatcctcaaaattaaaccgtagtat

SEQ ID NO: 160092 - DNA, 344 bp, Zea Mays
cccagacttaggttaccccgcagtggacgacgggttggtttcgagaaatcataaggactcctatgctaatgtgtctggacgaaggggtaccgactgccttgagccgtccgattacgattgacaggcccagattagaacatggagcgcatgcaacgccggccctcgaattagggatccacggtagagagaccccaacgcgcttagaccgtccatcactagatcgaccgcacagattcaatcactcaaaagggccatcccacgatctcatcaggaccgtccatcagaagatcaatggctggtggttatctctccaatccggctacgaccagccacggcggtgcctg

SEQ ID NO: 160093 - DNA, 660 bp, Zea Mays
gttgagcctcgtggcggctaagcccgccgtccttcctccccagctcatcggtcgaacggataaccttgccgccgtcgagctgttgccgttgcgcgccacgtgcttaagcactagtcctcatcatggtgactcacggggtgcatgtccagtgatcgccggaccagcgcggctataaatagcgcatgatccgcgacaaggtatgaacatcacgcacaccgtaagttgatccgaagcaaaaatttgtgctgcctctgtcccctcctcccaaattggttgtgcacagtaaagctagaaccccttatggccgtatagccccaagccccgcccccaattccactcgtgaacaccgcggcgccattttcccccaaatcggtccgccacaccgtggagaacagcccgcccgtggccagcttgttctggtaagtcgcggtccaatccacatgttgttttcatgcctttgcatgcttgcgaagcctacggtggtgcccgtttgcttgattccgctatggtcgtgtgggaacacaagctcgtagacacggtgtccgccatgcacgtgagcagatcattcttcaagtattcaagctaaattcgcacacgttcctaggccgccttaggtcagtgatgcctccccggttgttggccgtgacaaccatcgccggc

SEQ ID NO: 160094 - DNA, 284 bp, Zea Mays
tccactggctgagacaatggcgtgtgggccccgtttgcagccaaccgcgggaccccactggtcagctacctcctgcgtactcagccctacctcacgcacgcgcgcgcttggctggtcgccctcgcgcccgctctctgacttctggggcccactcgtcaggaccactcccttctcccccgctcggtcgcaaacagaagccgcaggccgccgcgctcctctcggcgcgcatggcgggtgtgccgcgagctgcagaatccgttgacgccatgccctggattccaggc

SEQ ID NO: 160095 - DNA, 817 bp, Zea Mays
cgggtcagtcggtcgcggggcaggcgtggcagtcggcgtgaccaagggcggaccgacagcaattacaccaacgaacgcgcaaaaacagtgaatcaatcgccaaccaaactttggccccacctgcaggctcgtgtcctcccctgaggcgggcccgggggccactgtcggtaccctgaatcaggggtaccccttactacatacagtatgaagacacggtgccagtacgtcgatctctagccgcacggtgaacagcacccgggcccaccgcgtggacggttcgaggggcaccacgtggcgagagaagatgatacatcccaagatgtatcagttggaccggacctccgcaagaaagcaccggaccccccatacgcacaactcggacccccgattacggtccaggactcccaaataagcatgccgggtcccctagatggggtccagatccctccgagtaaggtccgggccgcaacgaggtcccaggacaggggataccctagcgtaagcaagggtccggtactgacacgtgttcaggccttatcctgtgcgcttgcgctccccgctcaggcggagtcccgatgctgccgcgtggctccttgcccgtgacataagccagcggacggagcctgacgtaaggcctctaggccgcgcggtctccacatttattgcggaaaggacgcgccgcctgtccaccctgctgacaggcgatgtgccccctcaacatttaatgcgacctgtccaagcaggtgacgccagggccatcctgcagacggcgtgcctgtccagtccgctgtcaaacagtacgcccgggctacgcggc

SEQ ID NO: 160096 - DNA, 341 bp, Zea Mays
attttaaaggctggtataagataaacatcaaggtaagatataggggtgataaggataaaggtgataatgatgaaaagcataatccatggacagagttaaggtaagactggcaaagtgacgaagtggtgaaaacaatcaagggcaagataagtaaggttccatcaggatgatcgaagtaaagaagttcattaccgagggatgttataaggaacaacgagattagcaggaatgtgtgaaataaaatgaccgctcacggttcattaagaaacaagggtggtcaaggatatgttaactgaaatgtcttggacagtcgttggggtatgaaaataagcatacatagg

SEQ ID NO: 160097 - DNA, 323 bp, Zea Mays
cagaccctgaggcccattgttcagcgagcgcactgggcaaatacctctggcaactggggcctattagttagttggaggagataggtaacacccaccttagaggcactctcttccggatgaaccccgcagcaccaagcccgaggccgggcatggcagaacctgacaagggggttaggcgtgccgaagggaaaccactcgagtggatcctgcgcatggtcccaaactgacatgtgataaatgaccgcccacattagctacacctagcgtcgagccgcagcagaggcgtcagtccgcctcccagtcatgacctacgaacccctcag

SEQ ID NO: 160098 - DNA, 766 bp, Zea Mays
gcggtatctggccttgttcgagaaccatttcagcggggcgatccctcccaccatctccaacctcacccagctcgtagagctcgagctgtcagagaaccggttcagcggcctcgtgcctcgcgatcttgggaggctgcaggatctgtggaaactgctgctggacgacaacatgctcgaagcgggggacaaaatggaggggtgggaattcatggagtcgttggccaactgcagcaagctaaatcttttcggtctgggtggcaacgatttcaccggagatcttcctgcttcggttgctaagctctcgacaacacttgagtggctttacctagaaaaccttgcgatctccgggagcatcccctcggagatcggaaacctggtcggcctgaaagtacttgttctgacggatactgacatctcaggagcaattcctgatagcatcgggaggatggagaacctggttgagctacacctggacaacaatagcctgtcggggccggtaccgtcatcggtggggaatctcaccaagctcatgaagctatcggcgagcggcaacagcctgggaggatcaatcccgaggaatctcggaaagctcaccgacctcaccagccttgatctttcaagcaaccacctgaacggctcgatccctgaagaaacattccagctgcagtctctttcgctgctcctggacttgtcacacaactccctctccggaccactccctcccaacgtcggaaggctggccaacctcaacacgctgagactgtca

SEQ ID NO: 160099 - DNA, 393 bp, Zea Mays
gtgttcaaaccaacattgcactattcaacaggattggttctggggctaatttgaagcaagatttaagtctcatgaaaggagctaatttgaagcaggatcttgtttccatcattttttgtgctatcaattgtctgtagttgtggatgcttaaagttagtgtgcatatattaaatttagtgggcaactgaatcgcttggctaaatgattctaacaaagagcttcacatgaataaaaaaacaaacaaactgaatcactttagtaatgcaaaaatgattcagttataagccacagaaaaagttgagactacggccaggaaaggaccttgtgctagcaaaatccctaacgctactgcccctaccaactgccgcaagccaacctcatcagcaagctacc

SEQ ID NO: 160100 - DNA, 1030 bp, Zea Mays
cacaagacgagtaacttgatcaagagattgataacctcgaagcaatccaccagcagttggagaagcacagggagaaggtgcttcatctttctgaacttcagaaaaagattgacgaatcaactaaataaatgtgcaacattgaagcgtaagactagaacaactatagggaccagaattacgagggcctcaatcatgacaatctttgtcatcaaccagtcaacttccaagatttcctctacgatgaagcttccccactaacaccagagctgcaggcgacaccctagccaccgctatacaggcctgcacactacaaatgtatgatggcctaactgatccaaagcaattctctatgaggtacgaagctaccatatcttcatatggtggtaactcagcagtcatggtgaagtccttcgtcatggcgatcaggaatgtggcctagacctggtactcgtcgctttgaccaagaactgttacttcatggcagaaattgaaggcaatgctcctcaccagcttccaaggcttctagtcaaagccagtcactgcacaagctctgttttagtgtactcaggatccagacgaatacctttacttgtttgtttgaagattccttcgtcttcgagaaaaagcaccagcagtccaagacgacattgtcatcgaagccatggttaaggggcttagaccaagaccagcaacccaatactttgcaagaaagccttcacattctcttgagaaatcgctgtagaagagggacgaatacataagggctgacaatgatttccaccagaaaaaggaggagttacatagatacaccgaagcagccagaggcttcgggggaaggttccaccgtaggcatgttcaaagcattcacaatccgatgcagggtgaagaaatgatggcccagtcgtagggtcagtagggccagtaggaagcaagccctcagcagcaatgaagctctcagcaacaaccttcgcataacacgtttcgtccacctgctccgagaggcagaaggggaggtcgaagtttcagtggc

SEQ ID NO: 160101 - DNA, 1143 bp, Zea Mays
aaatctgaaaaacagtgggaatgagccaaatttggatctctatatctcttgatccatgaagggttttctataagtcattatgacaaagttgtagagctactatagtagtacaaatttgattaagtgatctggccccgaaactatatggaacttggaaaaaagtgccctggaagtgaagctatcagttgaggggaagttcttaacctagaccgacaatggtaagggtctaactttgaagccattttgtgcttgatccattgagcgaatgaccaggatccttatgacaaagttgaagcccttacattggtgaataaacttttttcatgcagttagacctagtgtcgtttgaatcttggagaaaaaggcttctaaacttggtctatcaggcaaagcgatgaagcaattcagtggtgaacagtggactgaagaagatcctaggttctcggaaccttgtcgccggtgatctccacaccacaatttgggctcgcctgggagattcacactacgatagcacggacaacgcaggggggtaaaagatctcaacgtggaggggagctcaagccttatcatcggactattcaccgcgccacatgtcacgcgatcggccgaggtgccatcatcggagtccgccattcctcgcagtcatgccacgtactagagtgtgctaccacatcgcgataggtcatggagggtagctagttactgccctaggccatgactcaatcatgggccacggtgaatgagctccagtgactcatcccttggatgctgtgagctcaaccttgcccaaatttgtagcaccgatggtcaacacctataaattgaagactctctctgctcctccatcttgctacagacccagcgcaccgctactcacttcattttatcgaccatagcctgagaactccaaatttccctagaatcagccagaacgccaccgtgatacacctcgacgtggctagagaataccatgtcggttcatacttctatggtctgtgttctagtatccttagggtctcctgttgcttgtaaacccaaccgattgaactctaccatagtattttgatgagaacactgcctcgccgtctttaagcgccatcgtggccctccttagcgtggccggctaattccatcttctttccg

SEQ ID NO: 160102 - DNA, 765 bp, Zea Mays
tgaagaactactgctgatatttctggtgcatgcatgcactggtccgagaaattcaagtgaagacaaatacattaactttacgcatgcagtggccccaaccgatgagttcagcagcatcacattggatgccggcggcggtctcagtgatcaaaaactgaacgctatcagcagacgaagagtagatttattcaagactagagagcacacgcgcgagcagcagcagtgcgtaatgtatgtgtgagggaatattctgaacaagctgttatcagtcaatcatacaccagagaccagcagtccagcacacgctaaactcgatccactggcgcatgcatgcatggtgcggagtaatggagacagtgcggtgcaagtggcgagtgccggccttgatggtgagataaggatgccaaggttggacgccatgatttgagaggcagcaccagcagcaccatggctgtcttctcgtttcccatgtatctttctcacccgacgtgtagtaaggctcttgctgggccgaacgaggagggaggggagaggaggggccaccgccacaatgcccacccgtcatatctactagtgggagtggggcactagtgggaggctcgacggcgaccgggggtccctggtactgcacggctccggcgcccgcgggcgcgcgtgtggggggttgaagaaagagccgagatcaggggcggaactgcagggaatcattgtgctggctggctgatgcgtgcccgcccctcccccggccggtgcgtggacggcgac

SEQ ID NO: 160103 - DNA, 497 bp, Zea Mays
gggtcgagaagcattaagggcatacaagagtgctaaaacaagagctaggaaggcgtgatcggacctatgaagggctgaccgcggtgagctcacacacgcggtattcttgaccgatttgggggaaatctcaaattgaagcgctctggtggaggatctgaggcacgggctggtgtattgggtgcgtgactacctagcggagccgatggaacgctcaatttataggaaccgagggcggtggctcttgaatatggcatggcgcggtggcggccggagagagggactgagtcactggagcgatgaccgtggcaaggccttaggtaatagaagggatgtgtattatgatcaattgtgatgtggtaagattgctgatggcgtggcataaccgcgaggaacagcggcacgaaggtgatggtcccgtggccacgtcgccggcaagtggatgagcgacagagcggctactgtgctccaagttcatccacggcgggatcttttcaccc

SEQ ID NO: 160104 - DNA, 389 bp, Zea Mays
gacaatgacttccgccaaagaagggaggaggtccaaaaatatgcaaaaatcgccaaggacatcaagggagattccacccgaggtatgtccgaagcattcacaatctagctcaaagtgaggagaagacagcccagtctcaggggtaatcaagccagcaacaacagtcaagcactcagtagcagtccacttaaagcacattccgctcaccggatttgtgaggggggagaggaggctgaagctttggtggtaggtttaacgcacaaccaagaagacattatgtgtattttgtggcaaagataaaggctacacaagaaggacctatcaacacaccatccacaagcaaaaagagtttgttgttgcggttgctcagccatctcagccgaaggagg

SEQ ID NO: 160105 - DNA, 432 bp, Zea Mays
gccacaagaaacgtacccatcataaccggctctccctccggtgtagtggccacttgtgtgtagtatattcgcccagtcttctttatattcttgcccgctgcattatttgtcgtgtttcccttgccttggcctgaactccttgggttctgctgattattggattggttctgcctcggatatgggcagtctttgataaaatgtccagacttcccacaattgaagtagcccgttgaggaactagggagggcagggaaacgagcactaggggcactcggctgagttgttgaagtggggcagtgacagggcagatgaagacaggttgtttgaaggggtaggagggtggatgaggtgaagaacgattttgattgaaaggtcggattaccaacctttgtcgcttttcaggtccctgattggacttttcacctccgaatc

SEQ ID NO: 160106 - DNA, 511 bp, Zea Mays
attttctacttcgatatcgtcggcgcccctcgccccgtccgcaccggcgttggcgttcacagtcgcagagtattccgcgccgccgcgttacgttccttgaccagtcgccgttcaccaacgctcactaggactaggtaattgctttcttctccgcttgcggtgctgctatactgactactgaggtcctgtcctctccgacagaacttcgccacggcctcccgcctcgtcgcacccaaacccaaatgtgaggtaccaccacgggccacttgccagtgatggaggccccaccctccgccctcccgtggtggctcgccaccactgcctgctccgcgccgccgacgcccgccgcgtcctccgtcgccggccgcctcgccttcctcttcctctccccctgcctgcagcgcgcgctgctcgccgcgatcgacctcctattcctcgtcgttgcgctcgccgtcatcctacgcgcccgcctcgcccggagcaacgatggcctgagcctcggcctcgacca

SEQ ID NO: 160107 - DNA, 443 bp, Zea Mays
gccggctgagggacggccggccctacgtcggcgacctcttcgccgggaactacatgttcctgcaggtggcgccgtcgccgatgacgatcacgggcagccacggcggcggcgctgtggtacccttcgcggagtactactacggctataaggccagggccagggccagggcagcggccgtgcagctgcaccgctatcctactggggcggtgctctacgagacgtagcgacgtgccacggatgacttcgtcgctggcctgtgttgtgttgaaataatggtaaataaatgttgttattcagtttggatttggaattttgctcttgttggcgaatttttgtttcgccggtgcttgtttcctgtcctgtttcactttgttgacccatcaaaatcagctacgccatgtccagacatgttcggaacatgcgttctactagcatgcaagctg

SEQ ID NO: 160108 - DNA, 659 bp, Zea Mays
cacactccacatgccaaaggtgattcttgtcgtttgtgagcggacggtgaaccgaaattgcgcacggactgaccgggagattgtttggagttcatcaaccatgtcttcatctcggtatttcaaatctcatggaatatgtctaatttattcaaatttggggattcataggtttttctctctgatctagaattaggcagtggaattacaattttgattggtggaattgctcgtgttactcattgtgaatatgatgcaaaaatttgaatggatttggatggttattttctgtcaaatcaatgattggatggatgggggcggctagggttctagaaatcgcctctggacggtcacggaccgtccgccaagatggcgcggacagtccggccccctagcgcgaacagtccggtccgtgacagaaacttacacttcctttctctatgttgtgacatcatcaactattaaccagtggatattcctcatatatattgcagtggtctgggtggtcttaagaagaagcttgcaggccgttttcagtcaaagcgtcgtcgtgcagatgatgcagattataatccagctacagactctgaggcccaatcatcagctgggggtagcatttctatggacacagaggatgctccacacgctcatccagattatcc

SEQ ID NO: 160109 - DNA, 356 bp, Zea Mays
ctgattaatcgacgtaggtagagataaatcgatctgattatctagtttaccctacccggcgttccatcggttaggaccggctaatcgactccatttaccgattaaccaagccgagttgccgattaatcggctagaaacaccgattaaccgacaagccgagtaggagctaggttatggggatttccccttttcgtttgcaaccttttaaaatagcagctgcacttacaatatatggtaattacagttcatgttgttgttatttttagggatgtcggaccagctcgatctgatttgggaacacggggacaacatatatcccggattcaaatgcaagtattgcaagaaacaatggaagg

SEQ ID NO: 160110 - DNA, 691 bp, Zea Mays
gcaaatcatggacccgggaccaacaacaggaatacccccatcaagaccacggtcagctgcagccccaggtccacagcatagctaaccaacaacagggcagtgccccctccgcaacgttacccttaggagaaaagccgcggtggaggcgggccaagaggtagaggccgaggtccgcataagcccaagaaatttttactgcttcttccacgacgaagacttagaccatcccaccagggactgcccggataccaaagaaactaaagagcgtatggccagggctacccctgcaaacaaccaacgagccatcgcacatacttatcaaccccgccaataccataatcctcgctatggaaacgaacaccaataccacacttagcatcaaaattacaatcagagggctccacaacacccatagctccagtaccaagaaagatcgacacttccacttccacccccaccacctcccccaacaaaccaacaagtccgccaaccacccccaccacccccaaagtaagaagacaactacatcaaccctccatctagaggagtaattcacatgatcaccggagggtcaagctcaaacttcaaaaaataatcaccaaaaagagatcattttcgaagagtcaaccacgtcgctgtcacaggatccgtcattcaaacgaagtggtcccacgttccacttaccttcgat

SEQ ID NO: 160111 - DNA, 650 bp, Zea Mays
ggttataggtgtggtggtgatttggttggggtgggtttgcaacgttaaaactggtgggttatatatgggtatagattatgtatgtttgtattgcatagattttgtttggtaatggttgcctcgctcatttggatgcaatcacctcctccatgtgaaggtgtgctttaactttaactacattacccctatcttgaactcatggacgttctacaagctatatatttcatcaaacactagttaggtgctcgtgtgttgctaggtttctacatatcatataggcagatcttgtttaaataggatagttgctcaaatacgttccaagcctttacaataatttgtgttctatttaaactagttggtgtgtctgatcttaacgtgtctacattgtagcttgcataaatgtattttatatgccaagtgataaaccacaattttaatctttgtgttgtctcctgtgagatggctcgggcaacattaaaccctagccgtcatcgttgtcccttcatcatcccctctctatcttgccgccaccatagtaatagctaaaagtcccgagtggacatggtttagcctagcccaagcatggcctgccacgttgtccatcgagcccatgacatgttggatctcaggtgtggcacgacaaactaggc

SEQ ID NO: 160112 - DNA, 524 bp, Zea Mays
tcatcaagtacataaataaagcgagtgcgtttgtcaatccgaacgacatgtctgtgtactcgtatagtccgtacttggtgatgaatgctgtcttcggtatttccaaaggtcggatcctaagctgatggtaacctgacctcagatctatctttcagaatactccatctcctctcaactaatcaaaccgatcttctattcttggcaaagggtacttgttcttgatgatgacttcattcaaacctcggtaatcaatgcacatcctctttgtaccatctttcttctccacaaacagaactggagtggcctaaggcaaagtacttggtctgatgtagcctttctctaacagttcgtcgatctgcttcttgagttccaccaattctggtccagatactgttgaatctcttggaaatagtggcggttccaggttcaagctttatggcaaactcaactttacgttcgagtggcatgcctggtaagtcctcaggaaacatgtcgcgaaactccgacacaactctaatagcctc

SEQ ID NO: 160113 - DNA, 788 bp, Zea Mays
ctgcggttagttttgggtaagtggagggtctcttttgaaaggttgccttggccgaaggggtatgaggtgtgttctggccactcgatcaccaatgtagggttcagattagatgtccatttacaacgaaccagtatttaacgcaacccgtccaatcggagatctatggtgaggatctttaaacaacgagatcaacttaggtccgatcattcaccaatcaacggctgggatcaatcatgccgaagcagtatgcgctttctaatcgcgaccgctctcggccagatcaacgtctttgtgtggttctccctcgcagcaaccaataggtgcggtggcgcgctggccacccgcggcggaccatggccgtcgaacgcggtttcgcgctcccatgcccaaaactatgacctgatcgacgacaagtgatgcgggggtgacggcaaacatcaaggtaacgatcttacccgcagtggggttggcgacagagctagccaccacagttcggatccattgccgtgtgcaactccgacgaggaattgaagatgtcccgaggaacacccctttacggcgtagccccggaaacatcccctgcatcatggcgaagctcccaagccaattcatggactccggttatcgacattagtgggggaacgatgtctgcggccaactcacccacctctctctgcttgaatccctcgcctacagtacggagcacacaagctggtccccaagagtcttgggtggattattgagggacgatgaccgactatttatgcataggacaagggggaaacgac

SEQ ID NO: 160114 - DNA, 473 bp, Zea Mays
aaaccgctccttagtcctggctcgtcaccggtgggtctgccacgatgaaggccacgaatcaccgtgctagtgactcagttcccctctcgaccaccagcgcatttcttccaaattgaacaccaccgctcaagcacactataaattgacggcacggtctgctgcgttgggtcatcacgaagcctgagcatccgctcctgccgccgattagccaccacaactctccaatttcccatttcccccaattctgtttccgccgccgtggtagagccctcaccgtggtcagcgtattccaggtctgttcatgctccctactcttttgtttcagcatccttaggttctcctgatgctccccgaccccgccaattggactaggaccctttagatcgccgggaacgcgttcgattgcccgtggtgaccactgtcaccgtggacagagcaagttagagctccactagtgaaattagttgagggga

SEQ ID NO: 160115 - DNA, 316 bp, Zea Mays
cagataacaagaactcagccgagcgcattgccagacagtcggctcactacacactcattggggagacattgtacagaaggggtgcatcgggcgtcctcatgaagtgcattctctcatctgctgggaagcgacttctggaggaggtccatgctaggcaatgtggaatacatgcaacatccagaacactagtcgggaaggtattcaggtcaggattttattggccgacagcgaagagtgacgcagccaagttagttcagaggtgcgaagcttgccaatacttgtcaaaacaacaacatctaccagcacagcaactgca

SEQ ID NO: 160116 - DNA, 939 bp, Zea Mays
agtcccactgctgggcccaagctcaccatttcggcccaccagaagatatacaacgcgcagcccatctctgcgtccgcactgcgctgacaacacggacccgcgcgtcagcctgggcgccttgctctccttttcttaccgcgcgacttacaagtgggaccagcctgtcatcgttgccccagcaggtcatggccgaaccgaccgattcttccgccatggctgttgatcgcgccctactccacggattccggcttcggccacgtcgcgcccatatagtgccccgcttggttgccttggtctccgtgacatagaacccgcgtagccataatcgaacatcgccgcaccattgttccaccgccaccgcagtggattctggcgtgcgtcgtcggcgtgaacccgtgaagccatacaggcaagaggagggacgtccgggagggtatatccctcagaatcggggtgcactgcgcgccggaagtccgggaatctctcaccggagtgggagcacagctgttcgtccgcaccacagcgcctatcgatcagtgtgagttgtccgcgcctgtaagaattgctcccttcgattcatcatcaatttagttacgcttagaacctcgggttcgggaatttggtgcgatattgcctgggattgcgttcctccggcgatggtccgccgtgtgtggggggcggcgccgccgcgtttggctgagggatagtgagtagcgccacgggccgtcggatgatctcttgacggtcttgatcaaaccagagccataccggttgggtggaatactcgcagcccctggatcgtgatcctgcggctcgggatggaatcgctcgtgattaagtgcccatcgttgatccttgatctagcggaccagattgcgtaccggttcgatgtcgtcccaatgtgatctgggccctccacatctaatcgggcggtcgaaa

SEQ ID NO: 160117 - DNA, 669 bp, Zea Mays
cgtcgcgcccggctccacgcgcgcccctgcccctgcccctttccttgtcgcagctgccgcgtcgccctgtcctccgatcactccgatcgcgccccaacaggatccggccgagccggcctctccccctgcgttggcatcgacctcatccacctccctgtcgaaccctaccccggcggtcgcatccctctaccctggcttcccttccagcgcactctccctgcccgacgcggccctctttcgctctcagctgttggcatagggttttccccatgtcccgctcgacatgccagttggggaccccatgcgtgaccgtccaccgccgctgactgtctacagctagccctctgccatcacatcatccctgcgtgctcctttggatgacgccgccaccctcctcgtcgccacctgggccgccgttacagcgtctcgctagcgtgcccaggacgccgcccgtgatcttgagcaggagcagacggttgttgacgccatagagcgccagtacgccgagacccaccgtcgtctcatcggctctcacacgtccgctcgacactacgctgacaccttcgagcttgcgccctcgcccgccctagcctcgactcttcgcgcctctcttcatgctcaggcggcggccctcaccagcatccgggcaaccgtcaccgacgttctcgc

SEQ ID NO: 160118 - DNA, 295 bp, Zea Mays
gaccccagcagaaaaaatgccaaaggatctactgtttccctgaggaatgcctcctgaaactccaaaccccaatgccacagaacatgaaagaaaagagaaaaagaaatttaacttctttttcaaaaaattgggatatcccactctaccctccttaaaaagaattcatcctcgaatacgaccactccaagcaaagcatccaaggtaccccatatagcaccaccattcaaaacatgggtccattattggtcttaattaacacaagaacttctacctcggactaattgtctaaggaaac

SEQ ID NO: 160119 - DNA, 571 bp, Zea Mays
gacgcttgccactgcatcctacaaggtgtgcttgccagcaatccaaacacatctagctgcatatccttgctgggcaaggcaaggcaagctttgccagaagatccaaactgctgcattatcattgacatgttgtgcagccttgagacgtagacatctaagcgcatttccatgtatctgtaaaatgtaacaacaaatggagacacggcatggtttatttagctgtctgttttgctgtcagttcatgaaatcgttagtgcttatatctccccatgactatgagcctaccttgtcctgtcgcccatagatttgtgcactgtttggcaagtgcatgcgagacattagaatggctgtttttaatctagtgatggattcaagcttttccttcaacttggttcctaaatcctaaactccatcctcttggtttactataagtgccctgttttaatgtgtgatgattaatcaaatctggccaagtatattttcccaaattcatagcctagttgcactgtttactaaacaaactaattctcttttagcttgttcatggaatcatctcttcttttatgttctt

SEQ ID NO: 160120 - DNA, 278 bp, Zea Mays
aggagggtggggttttgtggctagagacaatgctggaaattatcttgatggtggttgtggtaaccttcaacgggtggccagtgttagagtatatggattaggcccatgtggctaggcccatgaggcccatgtatgaactatatacagccaccctcactagggttggcccaattaatcattctctccaacatggtatccagctagggtttggtcttctcccacccggccgccgcccctggtcttctcccacccggccgccgcccctggtcttccctctc

SEQ ID NO: 160121 - DNA, 512 bp, Zea Mays
atgttgtaattggagattatatttatgagctgaaattcaaggttgaattggtagtcgatggcgatcagcctttgccgatggatatggatgactcgggggtaaacgatgatgatgagtttcaggatcaaaacaaggaaggcagtttgggtgaaaaagggagtaggggatcggtgctgctggatcagtcaaatggttctactggtgctgttgacatggcatcatctgcacagcaaaacaacaaggttgggactaaatctgggagagatgggggtccggttgccactcactgtcttgctcgggtggatttggcgcagccacaggagaccgggtctgatgttggcattgtcagcgttgaagctctaggtggtattcaggaagtgacaggaattgtgcatgatctccgtcgcagtaagcatcgcgccgactcggtgagcgaacactcgcttgatcgggcggaaaaacttaaggcgggaaacaatctggacgatctgccttctaaaggtaacagtgat

SEQ ID NO: 160122 - DNA, 2695 bp, Zea Mays
gtctgagcgtcgatcatcagccacttggaagaacattcagactggaacaaaactcggtaaagattgtagacgtcagaccctttgtgaagatgtctgcatactgagaggtagtcggcgcatgaagaacacgaacagcccctgtggcgaccttgtcacgaacaaagtgcaaatcgatctcgatgtgcttagtgcgttgatgttgcactgggtccgtcgagagataaatagcactaatgttgtcacaatagaccagagtagcacgacgtattgggtggcgtagttcatccaacagctggcgtaaccaagtccgtaacaggagagcggtacaactgaaggccatgatccaaggtgccacgaatataccgaagaatgcgtttgaccaaggcgagatgaggctcacgagggtcatgcatgaagagacacacctgctgcacagcatatgcaatatctggacgagtgaaagtcaagtactacagcgcaccggccaggccacgataatgagtagcatcaacaacaggagcaccatcagaagagagcttagcgcatgtatcaaccggagtactgcatgacttgcagtcagacatccctgcgcgctcaagaatgtcctgcatatattgtctctgtgacaaaaataaacctccgttgtgctgggtgacagatacacctagaaaatgatggagattgcccagatccttcatagagaactccgttgtgagagcatcaataatacgacgaagtagcagtgtagaagaagcagtcaacacaatgtcatccacatagagcagaaggtatgttgtgtccgtgccgtgtctgtatataaacaaagatgtatctgaacgagcaccaacaaaaccaagagtccaaatgtgagaggcaaaccgactgtaccaggcacatggagcttgcttcaagccatacaatgacttgttcaggcgacagacatgatccggaagggcagaatcaacaaattcggagggttgctcacaatagaccgtctcagtcagcgtaccatgcaagaaggcatttttcacatcaagttgatgaataggccaattatgagataatccaactgatagaacagtgcgaatggtagctggcttcaccacatgactgaatgtttcaccaaaatcaaccccaggctgctgagtaaaaccacgaagtacccaacgagctttataacggtcaagcgagccatctgaatgaaatttggggcgataaacccatttacctgtcaccacgttgacacctctagggcgcgaaaccaaatcccaagtgttgtttgcctgaatagtagtatactcttctatcatagcatctctccaatttggatcagcaagcacacctcgatatgtcttgggcagcggagacagagaggagacctgaaggttgagtttattgactgggagccgaaagccagtttttccacgagtttgcattccatgagcattgtcaacttgaacaacggggatggcacgagcaagtagagtagtctgtgtagtatccatcggtgcagtgagtgggctgctcaagacacccactgtagcagtcacgttgccagcagtgacaacatccggacactcttgggtgtcagcctcctgcttggcgcgaactccatcctgcagcaagacaggggcagcaccgccagcagcatcgacgagggagactccgtcttcagtagcgcctaggacacttgcagcaacctgaggcacgtggccagcaggggcagtgtccaggcacaccatgcggttgttagtaggggcagtgttcgggcgctcttcatttgtggtcgcgcctgggatacttgcagcagcctgaggcatgtggccagcaagggcagtgtccaggtacaccatgcggccagcagcagaagtgtccaggcgctcttgggcggtagtgcgacgtgccacctcctgccgtgatgggacgggggcagcagcactggatgggaccggagcaataggacctgtagaatacatagtaccaacaggcaaagaagtgcaatccaagtccaaaagaaaatcaaagtgggatgaaggtgggttagaaatttcagcaaaaggaaaagaggactcgtcaaaagtaacgtgacgagagatgataattctatttgtagtaagatcaagacatttatatcctttgtgttctaaagggtatccaagaaagacacatacggtggaacgcggagcaagcttatgaggagctgttgccgacaggtttgggtaacacttgcacccaaaaacacgtagatgggaaagatcaaggtggatgcgaaacaaggcaaagtacggtgtagcaaatgatagtgtttttgtggggcgcaagtttagcaagtaggttgctgcacgaagagcctcgacccagtatgtggtaggaagactagcctgaaacataagtgttcgcataatatcatttgtggtgcgaataatgcgctcggcgcggccgttttggggggagatatgcgggcacgacatgcgcatggtggcaccatggctaagaaagaatgtgagagaactggagttatcaaactcgcgaccgttgtcacactgaatgcttttaattgtgcaaccaaactgagtacgaacgtgagcaaagaaatcagacaaagcttgaaaggtgtcagatttgagacgcagaggaaaggtccatgtaaaatgagagcaatcatcaagaataataaggtagtatttaaaactag

SEQ ID NO: 160123 - DNA, 638 bp, Zea Mays
tggtcaggcgtcttcaacaaacccgctaaatcaccggagctgctccttacgctggccgtggcagctccgatcgcctcggactcgctctcccccatataacctggaacgtggggcacccccttgatccgtttcatcgtgatccgtcgttagccacctgggattagggctttttcactccagtcaggaaaggggcggggcgggtttcagccgccactgcaatttcgcgtcggcagtagaaatctggcgcattggtgtctgctcggtggtagttcgggtcatatccaagccgtcggagggattaattagtcagcgaatcaccacaggattgggaattgctcgccggccattcaagctcgccgcggattcgcctggtaccgtagccaagcagcaccgccttacattcgcaggtaacctctgtcctatttcattcctagcgctgtgtgcttcgttttgtagccatcaatttgagcctcgggccctggcacggcgatttgggtgctcaccggatccgtcaccgccgccgtcaggggggaatagtcacgcgcttcagaccggggtaggagacagtgtagtgaccgtccgatccttctcggtcggctgcgattagaagtcacgataactcttcacttcattaaatt

SEQ ID NO: 160124 - DNA, 445 bp, Zea Mays
cattattatagattctgactccatcgatctatggatctaaatctatgcgggtcctgcagtctggggtaccatagtcgaagcgaccacggggcggtgaacggtaagggtgctgaatcccgataggggcgggagaaccaccatcaagatagtggcgtgccgagcattcagcatgcaattccgcaacctccgcctgaaccttgcccaacttgtcaagggcgtggtccaactctgtgttgaggatgacgaccatgttgaccatgctgctcagcctgggattgccctcaccaactggcgagacaatccgatggacaaactgaagtcataaatcgtagtttatctaccatgcttagggctattctgaaacataacatcaaattatgggaagaatgtttgcctcacattgagtttgcttataatcgttcgctgcattctacaactaaactat

SEQ ID NO: 160125 - DNA, 415 bp, Zea Mays
agggcctcccaacgtcgttgttcttggagttacgctccagtctcaacatctgtcgctaatagagtttcgactgtgggaggaggcgagggggtgttagagtgtattgttcctattgggcctaggccttgtatccatcccactatggggcttttatttgtacctacacctatgtcctgatattgtattccaactcttcctctccaatatcttgccttggcatgggcggatcctctcctatatcttgccttggcaggggcagagctatttgtactgctctgggtgcggctgcacctacacccaaaaaaataactttggcaagaatcaatttattactatatttgcagcgtgcatgtgccacaaagcaagcgcaccctctctgatttgctctagctccacccctatgccttgacctgga

SEQ ID NO: 160126 - DNA, 653 bp, Zea Mays
gagatttggtggtgatggtcaccactgttagtgtctgcacggcattctggcctcctcatcgaaacagagaggtagagagggcttgagggtttgtcttagatgctgagggatggcatgacatagtgagcaggccaagagctcaattggaatatatatacagattcagattccttctcttatcacctctttctttaactagggtcaaatacatgagctgcactggttggggttacactgggggctttcaccgtggccaactggggttaaattgttcctctatatcaactgcaggcttcccacacagagccaagcatagaggaaactttacttctgcttttgttgcatgttggatagcaagacaaatagtgaagaagctgagtcactatggccaagattcttattgccttgctctgatccatgaagtggtaaagctgggacaagttatcccccctaggctacaagttccttttgtggcaatcactagaaacctccagagcactggttgagatggatatgtttcttagatttttgcacaaacctgaactacttcagtcgacaacagtaccaacctcattccctcctttgctcccttctccaaacaatgatagacctatattactcaagcaattttgttccctaactataggtccata

SEQ ID NO: 160127 - DNA, 413 bp, Zea Mays
attgtgacaaacttgggagcttccttgtgcctaatccataaggttttgaactgtggtgtatatagtggagttgaagcccatatgatgttgaacaagtttattcaagtgagtttgacatgatcgtacacagaaattggagaaaagagaattgcaaaactccgtgtcaggtttaaggtgtgctgtttcaaataactgaaaccgaaaattcagtacatagtgccaaattcggagctctgttgtggtcaatctatatggtgttggactaaaggttctatggtaaatatagagaccaaataaagggaacgaattccttgagaagagttggatttgctgctgtgtaaaaaatgggtaaaatgtctcaaaacttccactgacaggtatatagtttcagtcaagctgaaactgaaacttta

SEQ ID NO: 160128 - DNA, 614 bp, Zea Mays
gcatgtctcacgtcctcactggcgtgtgggcccgggtagtcggccgcatgctccctgcactctcgttgcgatgattggtgggtccgatcgctcaggtgtctcctacctcccgagataggcgcgacatgggtggactgtgcgatctccacgaatccgccgcttgaccaccatctccgctggcgcgcgcaattccagctgaccaagcgcaaaccaaccctgactcgacctcgcctggagcctcacaaatgcgcgcaactgcaggaccgcacccacgccgccatggtcaggacctcccttgcgaatctgccgctgtcgcgtttaccgccgtccggattttgcgccaactgaccagctcgatgggggcaataagggctcgaccacgtgtaccgtgcaccatcttcgcgacctcctcccctccttctacctactcgcgcgtgtttagctccccagaaccaccgccgccaccagtgccgggcccgccatcgtcactttgagccgtcagcatcgctcgtgctccgagagggagtccaggtacttcgtttggcactatggatgctcaccgagcaccgagcaccgagcgcgacaacggatcgattgcaccatcggcaatttct

SEQ ID NO: 160129 - DNA, 603 bp, Zea Mays
ggtgggagtccaccggctctctggtctaacatgggtgtggttgtttggatattagtatgttgtttccctccccacaggcttggatattgaggtgtattagtacttgccctatgcggctcatatgagtggtcattcctcttcggccttctaggaggggccggaaagaactcgccccgcgtgtttgggaagttatattatggtgttggggcattgtaggatgtgatgggaggtttagctgggatggatgtgcatttggataataatagtcttcatagggttctatgtattctacgcggacggtccggttagatacgctgacggtccggctgtgtgagcggactatccagtcatatggctagaccatctggtaatgtatttagactgtccagcgctatacgcggacggtccgaatgggtcgtttagggttcacgtggtacgtggcgactcgggtgcatgtcttggtaattcgcttctaaaaacaggatcgaccgaccttgacccggatggttcggccgtgcgcagatcgacggttttaccaccgatttgcaaaggaggttgtggttgtccagggtacatatctattggcattttgtaaaggggttg

SEQ ID NO: 160130 - DNA, 354 bp, Zea Mays
gcgaagatgtggcagagatagtgagcatatggcagctgtcgccgggcacgtagaccatccagtatggtgtcctcgatctcacaaataaggaaggcaacaacatcaaactctgagtgagagaccagggcaccaagtagccagagctggatatgagtggcagcctccctgtaacccatccgtggcagaagcgtccgtctcatgagctaatataaaaacttggccactgtagtgaaatctgctggagaacgtcgcgacccatctgagaagggtggtcggaacaaagccgtgacgtgagttgtaccaggagcaactccgtcgtgcgggcgacgaggaggatcagaggtgtcgtagcac

SEQ ID NO: 160131 - DNA, 614 bp, Zea Mays
aggatataggaagagtgatttgaaatttagcttttagtttctaattagttcaaaatcaagagtctctctttttttcattagtaagtgattaggagagcatgggtatatatatgtatgtccactttattatgtaggatagaagatgtctttagagcatagataggtttggttaagaaagtgtagggtaagaaaagactccatccagggtggtaaatcttgaatcatctcgtgatctgatttgactcctattcttccatgtcgaggttggtctcctccttcttgctctttggcgtctccatccgggtttgggacaagaggctaagattgatctgttatgtaggtcaagttgttaggtatggccaagttgatttaggtcaccaatttaagcttaagtggatttggagtatggctttatcctttgtaccagcattaagtaacttacgctagattagatcataatagattagatagaatctagattaggtttgtacgaatagattaaactagttaagatctcattattttggattaggtcccggttgtttcgttaggatgagttaagtaaagtgattagggtaagacaaatctttcaagataagatgcatctattaaga

SEQ ID NO: 160132 - DNA, 535 bp, Zea Mays
tggggtagattggctcatccacatttacaagtactcggatagacataaattagtattagataatatggatttcggtctcaaaggtatgtttctactattaacagtacatgcaggctcaatatataaaacttgtaagtcgttatagatcagctgcaatcaatttatgaataacaaatattaagtactagatatagagcaattgcaaaataattagctgtataattgaacttgttagttttgaggctacgtcttttcacttttgctcatgtcttactttttccttcttgtgtcgagtttgtctgctatactgagcatcgtttatgtatgtgtgcagcgactattttggtaatcacctgtgctataaatacatatcatggttcaaattttatcatttttgcagttcacaagactgtaaggcccagctgaagctttcacctccagacagatagtccctacaggacagaggtacactttagaactcactctctctcatttcaatactaaatgaataactgctatggattggtaaaaaaat

SEQ ID NO: 160133 - DNA, 873 bp, Zea Mays
ttcctgcaattaatttattactaaaattctaattccaaattaattttccctgattttctaatcctctggactgggcctcaaatactgaaaactgcaggggctcactgggaaaattccccagacacaggcataaccccgcggtggatggcgggttattattattaaactttagggtctcttttgcataatagcatggccgaaggggtaaggtaggttctcggtcgtccgatcctgatccgatagatccaatataacggtgaaggggtacgctctattgaccactagatcaagatctggtggtgaggatttcaccaacctaaacgctatattgcgattaaatcctgagcgcaggatggccgatcaacggtcgagagaagccttggacgaatcaatactccgatctaaccacagccctcgcctaaagatccaacggccaggaggccatctcccaccactgtccaagccgagcgacgacgccaggagctccccacgacggagctgtcgccggagatagccatcccgcgccccgagaccttcccacactgcccgactagcgctacacgaactagagggcatggcgaatccagagaagcaaatctcaccgagtttggaggtgtggaattccctgcccacggagaggcgcgaccgtggcagacacccctgctctggcgagcaattcgttgcgagccgcccgccgcttgcgtttggtgagtccacacgcaccctcccgcagacgtggcgcagcacccggcctactcgattaggtcccaacagcgtcgtggggatggagacgacggtggtggtcagctttctcctctcggtgatgaccgccgctggcgaaaactcacacgatgggaggtgtaggtggttgag

SEQ ID NO: 160134 - DNA, 545 bp, Zea Mays
tggcgagtgctgcaggctgcagcaccggtccaagcaacaaaaactcttacaaaatgctgctccaactagttggcaccacaacatcttatagttagaatcaagacatactaggactagcagtgtagttagcatcttcccttgcctgtgttttggctccgcccctgaaaacaactatcatgtatgaaatattatgccatgaaagatgagtatacaatgcgttaacatgtacaaactggtctggttaggctggatcctgtgcaactggtccttatcgactgccatgtcatatcaatcatactaccaaccacgctatcaaccgtcatcagcttttatctaccacatccctcctatgcctagtctatatcatcaccctacagtcgccttagcaccatatccgcttttcttttatagacttttatttaaaataaaacataatgttttatattgaaataaaaattcatccgagtacataactaagtagataaaaatcacaattcattaaacatatataataattatataatttctaaagctaacaaagtaca

SEQ ID NO: 160135 - DNA, 625 bp, Zea Mays
cgacgaggcacgggatgacctcaacccagcatcgggcacggcatcacaagcctctgttgcatcatcacccacaggctctgacaacaagtcctctgggaccatatcctctagagtttaatcaaagttggccagagacagttcttgcagaccaataagggcagacaaagcaggagaaggaactccactacttccactgctggcgacgaactaccgactgtttttccgagttaaaggagcttcatcttcttcctcttcatcctccacagcggcaacgcaagcagcactcccattgggatcagcaacagtttgggcacacccattgggatcagtgtcagtaagaccaattgcaggcacttcttcagtagcaggagctaaggtaccggcgtcctcatcaaaactggatactcgccggaggcgccttctcttcttcttttgctcatcagcagaaggctcgggctgactggttcggctagggcgcctcgggcgagtactgacaagtttcgggacatccaaagttgtatcaacctctggaaggggtaccactgccaatgtaccatcaggagcagcatcggacgaatcctcagctaacagatcaagcatgtcatttatgtcggcatcactgggg

SEQ ID NO: 160136 - DNA, 281 bp, Zea Mays
ccagtgtatacgatggagattgggtccacataacatttcggccagagagattctagccgttcgatcgcattatctgtgcattggatgtgattctggtttcataggatcctggccatcggctccagatcatgtggctagcgctgcgtaccggttcgtttgagccatgatttaatccgaaccactagaaccagatctgacggcccagatttaggcataccccttcgccacaacctctttgcacaagagcccctgtcttttctttgtataaacatgtcatccac

SEQ ID NO: 160137 - DNA, 371 bp, Zea Mays
tcgttatgtaatctcaaccatctgttttatcattatgattttcagccgtccgatcccaccagccgtccgatcctgcgacccaccctcacagttgtacccaatccctaacctcccccgcagtccccgaccctccgcggctccgatccgccttcgccgcctcccgcttcccactcgtgctaagcccgacgatgaggacgtcgacgaggcccacgtgacgatggcctttgcggttccaatccacctccgtgtcgccctcgcaccccgcgaaccccgcccatgccaagcccgaggaggacgaggagggtagagacaccaaggtggaagggacgagcagcgcccgcggttgctatgaaatcaccgagcagggagat

SEQ ID NO: 160138 - DNA, 454 bp, Zea Mays
cggggggccgcgtgcgagggggccaagggccacgccgccaggggccagggcggccacgcgcgaggggccaggacgaccgcgcagggggaagaagcaggggggcgcgcaggtaagggaaaggggagtgagagggagagagagagagaggaggggggagctcaccttgggatctaaaaaccggcgataaccgtcaccggatcacctagggcaaagaggtgggagaggggtggaagaaagggagagggagagggagttgctgcacgggaaaatcaaatgagagagagatagtgagggggcgcatcaagagacatagagacatgatcattgcaagcatcaatagaagcataacatgagggggtgcatcaagttgagcacagagtttagcaatattgtcattcaactttgaaatcatagagacatgatcattgcaagcatcaatatcaaaatccttaca

SEQ ID NO: 160139 - DNA, 589 bp, Zea Mays
ggacaatgtgcgctaagggacaagatttatactagttcgggaagaacatccctacatccagtatttggctacttgcgctactggcaccattgctgatcaatgctcgtagtaggggttacaagcgggcgagagacagagaggagaggctcccaagtctcttgttgtggagatggttatgctaagggctacaaagtggagtcctaactaagtattggcttggcggtggggctccggcctcttggtcctcttctgtgtgtcctccttcttatgttggtccaccgtctttgcgtatgggtgttagtctaggcctgttcctttgtcaggagatcggcctcctccttttataggccaagaaggggtcggccagcggtggcttcctcgagaaggagtcaccgggtgatggtaaaactgagcgtctaccatggggtgaagccacgagcgcccatgggccctagggtcacctagttgtctagcattctttatatcggacgacataagtagtgtggggcctgagtgccatcattcgaactacgttgacccatagcctctgtagcatggggctcggtgcggcttgttgtgcccggcaagc

SEQ ID NO: 160140 - DNA, 1311 bp, Zea Mays
tgtaaagtctgcgcagaaaaatggcacaaggggcataaatgttcaactgcagttcagttacacgccgtgcaagagctttgggatatctaccagcatgaggacacaaattcaccccaagtggacgaggactcttcttctcaactttatatgacactatcctcagcagcttacacaggatcagttgctccgaagactgtgaaatttctgggcccagtgcagtctcagcaggccttaatattggttgacagtggcagtactcactccttcatcagttctgccctcgccgagtcattgcagggactatccccactaaccactacactcaaggttgctgttgctaacggcaattctctacattgttccactcagttggctggctgcaattggtccacacagggcgtcaccttccaaacagacttcaaagttatcccccttcaatattatgacatcatcgtgggtatggattggcttgaaaatttcagccccatggagatacactggaagaacaagtggatgctgctaccttataacaataccaaggttttgctgcagggcaatcttccagagcaccctccgcatacagtagtccaactccttccactcacagttgcttgttttgctgttgatttttcacaatttcctgaagacctgcaagcagttctatcagaattcagtgatctgtttcaacaacccgaagggctaccccccagtcgagcctgcgaccatgccattccacttattccgggagccagaccagtgtctattcggccataccgttacccgcctacactgaaaactgagattgaaacacaagtgcaagccatgctgtcttctggcatcattcagcacagtacaagcgagttcaactcacccgtcttaatggtcaagaagaaagataattcctggcgattctgtgttgatttttgtcacctcaacgcaatgacggtcaagaggcaatttccaatcccggttatcgaggatatctttcaagaattagcaggcgccagttggttcacaaaactagatttatggtctgggttccaccagatcatgcttcaactgggggaagaacacaagacagcattctctactcacgagggccatttcgaattcagagtgcttgcctttggactcacgggtgccccagcgacattccaaggcgctatgaacgccacactcaagccccttcttcgtcggtgcgttctcgtcttcttcgacgatatcctagtctacagcacggattaccaatcacatctgctcaacttgcatcaagtcctgtccttgctagcagctgaacactggaaaatcaaa

SEQ ID NO: 160141 - DNA, 698 bp, Zea Mays
ttggctatgaggtgtgggtacaccacgatgaggacccaccttctcgtattgtatcgaaagttcagtccgatgaagaggggactacgatagaatgtaagagattcttggcgatgtacaacatgagcctctacttgtggatttcgagaatcccactcaaccccccgattttgaggatcctcctacgcctgaggttttgaagttcttcaagctccttaaagctttcgaaaagccattgcacgagcacacgaaagtgaccatccttgttttcgtgactcagcttatggctattaagtccaagtttgcattctcaaacaactactataaggagcttatgaacttgatcagtgatgtacttccggagaatcacaagattccaaaggatatgtattagtccaagaagttgttctcgggtctcggtatgcattatgaaaaattgatgtctgtgacaataaatgtatgcttttctggaaggagacaacgaatgagaagaagtgtacaatatgtggtgagcctagattcgtagaggttgaaaatgatgatagttcaaccataaagaacaaggtagcacgtaagcagcttcgttacatgcctcttgtacatcggttgaaacgtttgtttatgtcgaaaaatatagctagacacatgagatagcacaaagaaggcgtacgtgacaatcctgatgtcatagcgcttctacc

SEQ ID NO: 160142 - DNA, 723 bp, Zea Mays
gcaagctaaacctagaggttgtttcctccggtactttaagttatatttcaatggagcccaccttacaagaacaaatagtcatggcacagatgggtgacaagggtgttcagttatcaaggaaatgatcgaacagaaagcagaaaaatgcaaatgcttccgtcaggacagcaaaggaattttatggtttggagactgactggttgtccccaagaacccagagctccgaaagaagatattggatgaagctcacctttcaaaaatttccatgcaccccggcagtaacaagatgtatcatgatctcagatctttatactagtggaccagaatgaaaagggaaattgctaagtatatatctgaatgcgacacctgccagagagtcaaggccagccatctgaaggtagcagacactttgcaaccccttcccataccatcttggaaatgggaggatatttgcatggattttatcgtgggattgcccaatacctcccggcaccatgattctatttgggtcattatggataggttgaccaagactgctcatttcttgccagtacataccacccacaagacagagaaatatgcagaaatctatgttgatcaaatagtgcgtttgcatggcattccgaagaccattgtatctgacagaggagcactgtttgtggcacgcttttgggagcagctacaagaatcacttgggacccatgcaataagaagctcaacata

SEQ ID NO: 160143 - DNA, 640 bp, Zea Mays
gggctctcaaagctttacttaggatcaaaccctaataatagaaatgtatgagaacacaacaataaaaagaaaatctataaacataacttattttacaacaaatatatataccttcaagctattataagcgaggttgtttgctagttcatcattcgacattgcagataggccaacctctagcttcgggaatcctatattttttgccatctcccgacaaacaaatatctcattattgtccggaaggcactatagaaactcgtcttcatcagtgccattaaacaccaaggatcctgggggatacttcaaatccttggcatattgcatagcttcggcaatctgctcttctgatagtttttccctgccgcgtgacgcactataaattccaatccctcagtagaagcttcagcagcagggaattcagactctttgctagtttttgtagcatctgaaggttttgcttcagtattcttttcaacaacctccgtaggccctgtttctgcgggaactgaggacccggcttctgttccaacctgagtcatgacggcttcggcagtttccttcgtattcttttcacccatgttaggtacttctgcagaagcaggagttagtacctttgtcgattccatgatagcgtctaata

SEQ ID NO: 160144 - DNA, 722 bp, Zea Mays
gcgtgcaccacttgctcatggcctctagctttgtttatactgttcttattgtgcttggattggatcattggcacggttgaccacttcgtttgcgacaatttctgttcatgtttttttttatttgggtgggatatcgtggtaaaagttgagcaggcagcagcagtgattagatttttcctacctaattgacctgcctgcctgttggtgaattcgtgaccctttcgctttcttgctgccgcgtcgaaattttgggcccctctttgtggcggttgtcatggtaaaaaaaaaaaaaaccctggaccaccagggttcgttgttacttgtcagtgacagacattgctgtctcgcgctactttggttcaggatttgtaccaatatataggagcacagaaaatgatttcccattcattgtcgattgatgaacagacagctgatgggttctcccagttcctgtgctcaaacagtggagcttgttcatgtagccgctaataatctcatccttccataagatgatcttcagacctcacccactggccactcataagatgccgctgctactgccatgccagcacctttttttttcactgatgatcttgattgggtacgttcttctttctccgatttccaaatcatgcacactaaaagagggattgcatagtgctcgatcaaatgatgattgcatgagaaagccaagcatcggttccattgaaaaaccgtatgag

SEQ ID NO: 160145 - DNA, 1857 bp, Zea Mays
tgaaaaaaaataaaatctaagtgaggtgcttgtgatcaaacaaggtgtatgcataagatgaaagaaaatctaagggagttcttggaattagaggatgaaaaaggggagggggtagtttagtgtttcaaacctaggttaggatttttgggatgttacaaacctaccccacttaaaggaatctcgccctcgagattcagacggggctcaagaaaaggtaagggtattccttcctcagagaatcctcactttcctaggtggcttcctcttcactatctctgctccattgaaccttacagagtcttacttctgagttgcgggtccttctgactgctgagtcgagaatcttcactggcttttcccggtactggagatccttttgaatctgaattgcatctgtctcgatgtggttttctggtacttttaggcatttgcggagctgagacacatggaacacattgtgaatatctgacatggattctggtagctcaagacggtatggtgggggtcccactcggctaatgacggggtagggaccgatgaaacgtggcgctagctttcctttcatttggaacctttttacaccacgcatcggggagaccttgagataaacgaaatctccttcctcaaatcggagttctcttcgtctgttgtctgcgtaacacttctgtcgactctgagcttcaagtaaccttctgcggatcaaggcaactttctcttcggcttctttaacaaagtcgggcccttctagtgtcctttcccctacattggaccacatcaggggggtctggcatttccttccctacagtgcttcgaacggtgacattttgatgctggcctgatggctgttgttgtatgagaattcggcgtacggcaaactggactcccaatccctgtcgaatgtgagcacacaggctcttagcaaatcttcgaggatcttgttgactctttctgtttgaccatctgactgggggtggtaagcggtgctgaaatctagtttggtgcccattgcttgctggaggcccttccaaaattttgaagtgaactacgttcctctatctgacactatcttccgtggaatgccatggagcctgactatctctttaaggtatattcgggcaagggcggctcctccaaaagtggtctttactggaacgaagtgggccaccttggtgagacgatcgattattacccatatggaatcatttcctttctgtgttcggggcagtctggtcacgaaatccatgcctatttcttcccacttccattcaggcactgggaggggttgcagtaggcctgcaggtttctggtgttcggcctttgttcgctgacaagtgtcacgtcgggccacatactgtgctatttccttcttcatccctttccaccagtatctggctttgtggtccaggtacatcttggtggtccctgggtggatggagtaagctgagttgtgggcttcattgagcagggcttcccgtgcctctcccattggtacacacagtcggttcttgaaccagaggactccttgctcatctgtcctaaggtccggaagttgctccttgcgagctctttccataagtctggttgtctctgcgtccaggtgttgatccttgcacatgagatcttctagattgggcttgacttccaggctaccgctgtctcccagacatgcatttagctgagctgattctttcttccaatcttctaaaaagttggtccctttaatcccgaaaggttttcggctgagggcgtctgctaccacgttggccttcccggggtggtagtggattccgaggtcataatccttgatcaattcaagccatcttctttgacggaggttgaggtcaggttgcgtgaaga

SEQ ID NO: 160146 - DNA, 489 bp, Zea Mays
aaaccatgcggggccataggcatgggtcccagtgccgtcatctcgggtaagaacctttggcatccattagttttcgcgtccgcatggggtatcttcatccagattaggattttagactgggcgcgacgataggccgctccggcgaggtctaggcctcgcccgccatgtgtggggagcgggaggaggatgatagcgcgtcggccgtccgatcagtggctgacggatggaattagatcgtgtccagtggtgatccggtgcgtctaattgggatcgtgcggttgtgatgagtatgagtaatgcccccttcgaccagattgaatctgaatcgttggatgcgaatcgggcggccagggctgtgtaccggttctagatttaatctggtgcgtcggatcctgatcgagcagcttggggtgcgtgcgcgttctgctgccgaccataattgctaaagggcccctgaagatcatgcgaattaacccgcggtccactgct

SEQ ID NO: 160147 - DNA, 532 bp, Zea Mays
cacgcgcaggcgcgatatcgcgggtgtgtgctgacagacgaggccctccaggcagtgaccaagagtggggaaagatagggggaggctgacgggcgggtcctccttgtcaagaccgctgtctacctcggcagtgcgcatggcgcgagcaccatggctggagccggtgactccgcgtgggcgaacagggcacggggcggctgcggttggccgggcggactcggttcgatggtgcgggaccagaaccgatgatcaccggcgactaattgatggaacagaggaaatgggggagagagaagagaaagttcggcggggaaattcacctcgggtggagcagggatgaggacgaggctaggcgtaatggtggcagagcacgatcgcggacggcggccgagctctaccggcgacgaattcgggcgcaggaggcctggcgatggggaagctccggtgggcttgaagaaccagcgcgcgtagctcgggtgagtgggcagaggtgaaatgagcgaggcaggggggaagtggggtgtgcggggac

SEQ ID NO: 160148 - DNA, 705 bp, Zea Mays
tcctcctcctcctccatcagctcaactctcgccattttttcctgaatatatcttgcatgtgcctcatcggccaaatagtttacgccacatccaatctctgcaaatataatgagaaaaataagttagcaaagtcaggataagtaaattgtactaacaaaattatagtatcatttttctcactcacttcccttgagacgatcagcaagattatccaacatttgtttctcggctcaagccgcttcccattcccttgcatcctgtgctctcttctcatctgctgccttcaacctcctaaactctgcacgcttcggactatcataaaaggcaaatttcgcgtacctacgcatgtcgcatatgcgatcgttaatgtacgaatcgacgagctgagatccacaacgcatcttctgtcccattagtctcttggactctattgtgcgcatcacctctcctttgtcgtcgtaactctcccaactgcatttcctcgtctcctacaaaaaacagtaagtatcggtataacattacagctggtgcaaaaaaataaataaataccaatctcatcgtaatcgaccatatgtccataaaaatatccaacatcaagctcagaaggaactattccatacttagcttcaataccacatttgcagagtactggatcaaacttcaactcttccgcccactgattttttttcttttcctttacctctg

SEQ ID NO: 160149 - DNA, 468 bp, Zea Mays
aacgtactctccaatcttgaatggaactttcaccttataaccaatcttgatatctcctgattcattcaaccattggacatgatatggatgagggtgtcgctgcaacttcagaccaagcttttcaaccatctcatgacttacaagattatggcagcttcctccatcaatgatcacctttactactttgtcttgcactttttgctctcatttgaaaaagatatgtcgctgtccaatttcagcttctttcatttgaacactcaagatttgtgtaaccacaagagcagtaccatgctcaaattcacatcttgtatgttcttcaactttatcattgtcatctacatttcctgcttcatcttcctcttcactagctgatgtatattcgccgtcatcattcacaaggatcacacgattatttggacactccttaatgacatgaccacgacctccacacttgaagcactgaatacc

SEQ ID NO: 160150 - DNA, 544 bp, Zea Mays
gcgcactgttcatctggtgttactattcatcacgggtactgttcatctgttgttactgttcatctggtgataccaatggcccgacatcgcccaagcgccggtgtcctagtcctagaccgcaaatctaccactcattatacctttgtaaccctaatcctaacaatctggtatcggaagacctcaccgatcctaagatgccaggcgaccccctatccttttgttcccccgatgatgggccccatcacgacgacctccagggcagcagccgccactaacacgtcgcccactatgcccatgttgtaggactccttcatggcgttccagcatcaggtgtaggactcccagacattgatcatcaaccacctgacggcgttgattgcccagttgggggcgatcgagatccagctcgcatcggcctcgactgtgatcgatccatcatcgtcgtcccatgtcttcctctctgctgcacaagattacctctacggccttcctagcaatggaggcatccccaccgccccgctgtggtgccctccttgcccctggc

SEQ ID NO: 160151 - DNA, 443 bp, Zea Mays
cttaggtgaaggaacctttggaataggcttgaagatattcttcgtggtcctgagtgcactggaagaggacttgtgccgtgattggtttggtttggaagccttgaaagcttgtaaggagcatgtctttagcttctgccatgaagtgatagtccttgaccgaagagatgaataccagatttggaccacacttctgactaccatgacaaataattttgccataactgttgtgttgccaccatagaaggatatggtggcttcataactcatcagaaactactacgggtctgacagaccatcatatactggcaacgtaggagggctgtagagtggtggccatggtgtggcttgcagttctggtgtcaacggggaagatttgtcatacaagaaatcctcaagattgtatgcctcaggatgaaggtcatcatgatcgtgacccttgtgtc

SEQ ID NO: 160152 - DNA, 499 bp, Zea Mays
cgaaatcctaaatcctactcgcctcttctcttcctcggtctctccgtctcgaccattgagccctgactggccgaccccaaatcgttgtggctcctatggcctcatcgagtccctccaccgcctccaccgcctcaaggctccagtgaccggtgattcggacaacggtgtgttgttcccctccctccgcaatggcatagcgatgattcccctcttggcctcccccatcccacagcggtacaattgctatccagacttcgacgtggtattctcctccctagctatcttccttcgctaccagtgtggttcctagcttcctacgctgcactttcgggtctctctcttgtggtctctcccatctcccgaaaacctaaccctaatccagatgtggtctctcttcctcattcctctcgacccaactgcccatggttctctcatctgtgtgtcgtggacgactctggtgctctggtgcgcaacacatgtaaacaatggtggcctaaca

SEQ ID NO: 160153 - DNA, 301 bp, Zea Mays
agaaaacgctttccggtggtggtggcactcgttttggagctgcttactggtgaggctagctaagctgaacgtaattccgaaccaattcctctcctgccaataattgttctccttaatcctatttgtagttcacttgcctgcatatttaaattgccgttcgttgggggcagattcatctgtgcaccgtgcgtgtcatataagaaaaggcaggaaccgaatgcaatctttcagacctcagaagtgcatgtgaaaagtctgcagtcatagtggctcaagaaatcaccagttccttgcaacccgc

SEQ ID NO: 160154 - DNA, 998 bp, Zea Mays
atagaaaggcaggcatttgcaatacaactttatttctctatatttccctctttttattgcatgaaaaatcatgcagctgattctgcaatttctgcaaacagtgatggaaatttctaggagagatcggcagatcgctaagtgtgtggtaggctacgcacgtcagtctctcggttagagaaagttctaaccaactctagctgatggtggtacctaccgctcatgagcataacttgctccaaaggataagtatttcctatttactgttaagagttgaaatattcaatgatggagaacaataaatatagaaagtgaaactaacatctttctccatcccaccagcacaccatggcttcttcccacatggttaactcatggatgtagtgcatgacaagtaatttctaattatcatacatactactgcaggaactgctgtgggacccataaccaggaattgtcaatcctaaatccagtttaacaatattctctttgcatgcaaactatatttactgctatgtgtcaccattacaataaataaatattacacaacagattgttgtacaccacagaaaccaccattgcgtaaagctaagactacaggtttatcgaacaaacatttttgagaagttttgtggcattgaaacatcctttccatgatgtcatcttccatgaatggtcaatctgattagatgaaaagggcacaaacagtgcctcccgagccaaataaaattaaacttgaacagctgtgctatcaataatgtgacattgacattgacatgtggggctcacttgattgtattattgttctggctgaagtagaaatgtcagtcataatttcttccagaaacagaatggtattggtattagagttcctgcagttattacaggatgccctagagagaaagttctagcagcaatgcattatgacttgtgccccgtgtctcactcctagcgttttgggggatcaaccacactactgcgccttttcacattagtatagg

SEQ ID NO: 160155 - DNA, 478 bp, Zea Mays
catcattacagtgcagtgcattggaccacagcatggcttctatgagaagggctttactactcttgctagctcttcttgttcaacagctccacacagcattaataatactctcgagccacgcccaccatgctcatggtgatagcgttacagcttatcatcacttgcccatgccgttccattgccatccagaccaagcaaagcagctcctcaagctgaaggactcgttctccttcagttattcgacgaccaccacgctttcgtcatggcgagatggtaccgactgctgtctatgggaaggcgttggctgtgacgatccctcgtctggaaatgtcaccattcttgacctccacaaccgtggcctggtcagttatggcttggaccctgcagtcttcagcctcacatctctccgtcgccttgacctcagcatgaatgatttctctggagctgcagtagatgacggcgacctcagcatgaatca

SEQ ID NO: 160156 - DNA, 665 bp, Zea Mays
attgggacgataatgtactctgtaaactaggaaatataccatcaataaaaaggattcaagagcgctcaaattattcattgtcgacctgcattcttacttaactcggggtgaccactataccctactaacggagcaatcggcttaagtcggtgatgacttaagacggtgcaacatgctcgcgcttacttaactcagggtgaccactatgccctgctaacggagcaatctgtttaagtcggcaacgacttaagacagtgcaacatgctcgcgcttacttaactcagggtgactactatgccctgctaacggatcaatcggctaaagtcggcaacgacttaagacggtgcaacatgctcgcgcttacttaactcagggtgaccactatgccctgctaacggagcaatcggtttaagtcagcaacgacttaagacggtgcaacatgctcacgcttacttaattcggggtgatcactataccttgctaacggggcgatcggtcgaagtcgttaacgacttagatcggctcggtaccttcacgactacttaacccaacaccaagcgcgtttacgactactcgtcttaaggcgacctctatgccacatagagaaatctcaaaaccatcatactacattcacctcaatgattgtaaatactgctgaatcctaa

SEQ ID NO: 160157 - DNA, 1026 bp, Zea Mays
cagaggcacctcgtgatctcagctgaccagccatctcatcgaccaaagcctgatattgaaaacaaatgagtgtagagacagtattttgcctggagtatagccagatcgggaaaagccaaattacctgaaggttggcgaagaatgaaggaaaccccaaaacatgagaagccaggtggtggctcgacgaaggaatatcaaccggggcaatctgaagagcatcgtcagggatcaactcaacatcaccagcaggaatcaaaaatctagtgtcaggtgcgccaacctctaaggcgactttctcgtttaaagcatgtgttgttgctaggccatcagaatgtggaggagaagatccaacatggacatccatggaggtatgagaaggggaacccgcctggacaccctcgggggctgggtcgcagcccgcactgcccatcggagccggatcaccaccggaaacaccctcatgggctgggttgcagcttgcgctacccactcgagccggatattaccggcaacaccctcgggggctaggtaatcgcttgcaccatccttgaggaccgagttctctacagcagccacctctaaggctgaaggattctcagtcacctccacggaaattaagcaaccttgaccagctttttggctccaaagaccgcactccaaggtcgacgaggcacgagacgctgcacaggataactccaatcctgcatctagaatgtcagagaaaacgtccatcataccaccatctgttggctcggacagcagatcttcaggaaccacatcctcgagagtctgatcaaaattcgctatggacaactcctgcagaccaacgagagcagacaaagctagagaaggaatatcactactctccccaatgactatgtagcgccgactattcttccgaattaaggggatttcctcctcttcttcttcatcctcgtcaacaacacgaacaatacccccattggggtcaacattggtaggatcacacccattgggttcagcatcgtcaaggttacacccattggg

SEQ ID NO: 160158 - DNA, 796 bp, Zea Mays
ctcaaccctgatatctgatactggagctagagctggaaatgtgtcctcaggggctgggcgatagaaaccaaactgcagtcgagaggcctcgagggtggcctagaactaaggaggctagatcagctgcgcaaatatgtgacagagatagtgaccgtacggcagctgacggcgagcacggagaccatccaaaactgtgtcctcaatctcacagatcagaaaatcaaccacgtcaaactccgagtgagatatcaaggcactaagtagccagagttggatatgtgtggtggcctccctatatcccatcctaggtagcaaagtgcgcctcatgatctcgtataagaactttgctgctggagtgaagtctgctggagaacgtcgcaacccgtctatgaacggaggtctgaacagggcagcgacgtgagcagtggctggagcaacatcgtagggagggcgatggggagaatctgacatgacatagcataagttgtggagccttgtcaacgacccaggaaatccaaacagctctcggatctaggtagcatgcaaagtcacatcctctcgctcaaacctgaacctcagccactgatgatctggatctatccatactgtggcataaaatactctgaccaactcctcaatatatctaccaccgaaggtcagaagagagagtaaacctggcagataggagagatgatcctttgactctacaccggcgactgacagaaaggcgggaagatccaaaagccagtgcactcgcagggcaatctaagcaggcaactgcgccctgaagaaagac

SEQ ID NO: 160159 - DNA, 686 bp, Zea Mays
aacatctttctttgcatctctgtctatagtctgccccattattccaaccaaaagcaacacaaaaaagagcattagctgggtcaatgaaacatctcttggtaaaacacacttcatttctggctctccataaagcccataatactgctgcacaaccggcaatagtcagttttttttccttttttaacaaacttgtctaaccaaactccaaacatagtgttagtatttttttggaataaccattgcattgaaggcaatgttgatcaaccgccaggtgaaaaccaccaccgggcactcaaaaaagatgtgatcggttgattctatcaatccacaccacgagcaacttgtattcaccatttggccagaaattgtttcagaccaccattccatgaaagccgaacgggtccctatcttgaaaaaggtttagacatcctgttatattttctttctttggccaagtcaaaagttagacttggttctgctgagtttagttcctgtttttgcgaagttcaagttattacccaactatttgcatgtctcgctcatctttatttgttgcagatttattaacagtgtttctgctaggaaaatggatcgatttccatttaccgttaaattttggtgtttgataaccaatataacaatttagactaatattatttgttagtgtctttggatataattcaaag

SEQ ID NO: 160160 - DNA, 448 bp, Zea Mays
aagaatagtaaagttgagtgtttctagttcttctttggaacatgtatctatttgcaatggatgtaaggattttgacattaatgcttgcaatgatcatgtctctatgatttgtgttgggggcctatattaccgaaggtcctttgattagttatgttacatgattgccttaagggtacaaggaaaagctttgccgaagatcacttcattgcagaggatcacttgtttaacatctggcttcgttgttaactagtgcatttcatgaatgtcctcattaatggacgaagctaaactttgacaaaaaacagcgcacaaaagcacttcgtctatatgcaagcaacaaaggtaatggccgaaggtggtgacttcggccacaagacaaaaggaagaagtggctgattgacgaaggatggaacttgtggagccaagaatgaagaaaagcacattactg

SEQ ID NO: 160161 - DNA, 498 bp, Zea Mays
agcttgttggggaaaaaaatgtgtatttctatctccttgaatagcccaatctttcttagtttattattgactcttttcctacggaattctgcgtgtttggttggagtatcatggtgctgatgtgtaagatgagcttcagttttatgaccttgctggttgaggggtttggtttgtatggcagagttggctttctctattgctgacttgttgtgagctgtcatcttttgaggccaaaggccaagaatttggttttcgggccctagggttttaccagtagatttgctctaactctcttttgccaccttctagaaatattgctccgtaatccaccagtttccaaagtggaaagacattctagttcttggttctgtggaatcgagtacttcaagtatgggtatgggagcatgatcgcttcgcatcattggcaagtgatagataaattttagtagcgttgcgatggtggggatcaccatggccacacaagattgaacaagctag

SEQ ID NO: 160162 - DNA, 428 bp, Zea Mays
gtggaattgacttgcctcctaaccaacacactcgaagacaacctcagccacaacctgcagggatgaatcctcccaatcctccaccaggcggagttgacccactggttgctgctcagatggcggtgatgcagcaaatggcggatactatggctgatatgcgtgcccagatgcagcaagaacgccaggagatgcgtcaggaaagagaagacatacgccaggagctacgccaggagagagatgagatacgccaagaaaggagggcgcaacagcagcttcaacaacagcaacagcagcaacaagtgccattgcctccaccaccaccaccagttccacctcgtgataagcaccgggagttcatgagccataagccacccacatttgcaagctcacctgatccactggacgcagacgattggttgaagtcaatt

SEQ ID NO: 160163 - DNA, 1118 bp, Zea Mays
taaaatttgcgtgtaaatcataatcttcataaacatctagaagcttacaagttggttcatatggataatgtagtaagtattcacataagcacatgacaatggtggaggaagagtaatgtttactccattcatatttgttcattgttttaccttgttatgagtgctattttttgtttgtcatgataggaatttgtggagagacatagcaacatgtttatagcatattaatatttactttgttctttttgtttaacatttaaacttcttaaggtctagcttcttcagcaccaatagtgctccaactgctaaaaagtttcatggcggtggcagacgctgcttatggggacatccaggctcaggcctcggatctggtggatctttttttattaattgtttgtgatagtttttaatttatatggcaaagcagtaaggcatagacacaacaatctttggctcccactttatccaacttctgttttcaggtataaggatggcgactaccgacttgttttcaagttgttctcaaagctgcttgatgatgaggtatgtttcataatcccaccaacaattccatatagtcatttcagttaaaaatccctactactaattaagcacggagcgtgggcgcctggcgcggccaatgcccccgcctcacatctccatcacaccctgccctgtggcccagcctccacttcccctctgcgtcgtctcctccgcatcaccagccatgccgctgacgcgtccaggacccctccctcgcatctccatcacaccctgccatgtggcctagcctccacttcccctctgcgccgctgtttcctctgcataaccagccatgctgccgacttgcctaggacggagcccgcccgaccaaccatgctaggtgccacgccgtcccctccgcgtcgtcctctccgcggtgtggccggccgtctcggagccctcgcgtcccctagcccatgcacctgtctcgtatgccccaactgcccgaacgccatgcccccacctcgccgtcccctccgcgcagctgcgcagtcgcggtgtgaccgccgtggaggagccctcacgtcccctagcccaaccagccatgggcccccatcgtttccccttccgcgcag

SEQ ID NO: 160164 - DNA, 530 bp, Zea Mays
gtaagagaagctaattaatccgctccgaaccatgtttcgagttgcaatgtctaaaatggtttgctaagttttatactgcgttagccaactcatgtaagtaggagtcgattgcgtaagtgattgtgatatatatgttgtgtcttggattgcgataataataggcaaaccgatgtgtatggtgcatagcggcctaggttgttgcttgggttaaccaacttgttagatgtctttagttaagctcgtggtcacgatgaattgcttgttgtagtcgcggataaaaagtattagtgctcatgtgatgtctaagttgaaatgcaaattattaggtgaaaagcgctttgatatacatatatgccggatttgatgattgtggtgaatgcgttgttaattgcgtatggtggttctagtgctcgaaatgacatgtataaaaatttagtaagtctactgattagttctcacttggttattttaactctaacaattgtcaaagtgttagaataattcaagtctctaaaacatggcaattcttg

SEQ ID NO: 160165 - DNA, 493 bp, Zea Mays
tgagtctcttgttttgattggagcttcttcggactcatgttgttgaatcttggcaaatagttgatgatttgtcatctcctcataatcatcacgatctcgaataattcttgccaaactcttgtccttttctttgtaggctctcatgaatagcctagtgacctttgagtcgcttcaatcttcactacccaacacccttattttattgaccaataccattaaccggtcaaagagtgattgaagagattcacccttagaccagtcatatctagcaagttcgctttccaaagcttcaattatgtgtcttttggctttgggatctccttcatgtgactacttcaaaatattccaaatgtcacgtgcatcttctcttccttgaacttttcggtactcttccggacaaaggcttcctttgattatgctcactgcttgagcattgcgatgcacctcttgcatcatttccgatgtcatctcttctccttgggtaggcttatgc

SEQ ID NO: 160166 - DNA, 530 bp, Zea Mays
gccgaatgaagctgtcgctggctccagtcagggtggcttagtttatcttaagtacacctttcagtacagaaatcaatttgacgagccaaatgatgattggctagacgctatagaggcaacgagtgatgagctccttggagcctactcgaagatagaaaacgaagccatgacagttgccttcggtgctcgagggaaaaggaggctgaacagggttttcgatgttattgggtttgtttaccctgattactgttttcctgtctgaagacaaggggggaaaagcaaagttgctgcttcaacctcttttggttcgccgaagccgaagagggccaaggtcttgacacgtaggtcgaagcctattgggacggccgaggtgccgaagcttattgaaagtgtagagagtgccccctcagccacagaaacagttcatgtgatgtcgatcgaagctagtacaggcccgataatagagctagaatcagaaaagacagtagaacatccaaaggtgttgagccctctagctgtaacagggctgc

SEQ ID NO: 160167 - DNA, 781 bp, Zea Mays
ggcaactggccgaagctaaagaaaaatgcacgctcgcagaagctaaccgagaaatcagcgaatattggaaaaatcatttagagaaaaatgttgaagaacttcgcacatccaaggaaagatgctttgaaaaacccttggactgtgtgaagaaaataaaaaccagttttgccaatgtgggcgcctactctaccgaagaaaacttcatacgaggcgaccccgaaggcgttattgaatggataagtggggaggccgagagcttcgaagaaatcttaagtaatcgtggggatgtctatgcattttctgatgcacgggggatttcagctatcttggagaaggcgggatgtgatcacatcaagaccatggcctaggccgaagctgccttcttcgcatacgacatgaaggatccttcagctgaagcaaccttgatgggcggaaaattctataatgatgtctgggtgaatggtggccgagagatggctcatgcaattataaagaaaagtgaaaaagacacccatgacgtctggatagaagcgagacaagctgaagaagctgcagagcgcgaaaaacgtataggtaatatcttttgatgttcagcttcgacatttgtttttatggcttcggactaattaatttttcctacagctaaattatctccgccaccggaaccgttcaatcccctagccgatccagaaacgaaggaagcactggagatcattaatatggctgaatctattgttgacgaagtcgtcaataaattgctaaatgaagttgcggagaaaat

SEQ ID NO: 160168 - DNA, 471 bp, Zea Mays
tttagaatagaatagttcgatcatcattgagggcaaataaatgacatgaagaacaactatgctagttcgaaagtgtgatagtctaatgtgtgtgatcatcaagtcactacaggacacaagatactatacctctacaaataaattaagctactagaagtctgatttctcttcttttgttgcagcatggttccagttaaagtctttatgaacaactttatgggtagaactgaagttattttagtgaaccattttgattttatatctctacaaatgaagcaacttaaaatagcccttggaacatagagagctgcaacaaaccgccaatataaaagaacatttttattgacttcagtttaagaaccaccaataaaaacctctctcatccttagctagttcgttttatacaaaatctactaaacaatccgcacaatctgaaaccacaaccaatggcatataatcctacagttctgc

SEQ ID NO: 160169 - DNA, 1317 bp, Zea Mays
tcgtacagcttgaggaggacctaaagacgctagaacaatcgaccagagtgtatgaacgaacctagaataatctggccgcggttaggatgattctgcggcggcggagagtcggtttgggggaaattggaaattggggagctgtggggaatgatcggagctacgagcgggttctctggacgcacgattacctagcagaacgggctgaggcttcaatttataggatacttaagcggtggtggccaatttggtcgagcaacgctggcagtcggagatggagaagaacttggcgcggtgaattcgtgtccatcgccggggcgagctcaccggcgacgattggacaaccgtagcgagtcacggcgtcgcagtggaaagcaaagccacgcggcacaaggtcgaacggcggcggcgcgaatcttcgcgcaggggggagtcaccggcggcgagcaagctacgctggcattctgatccatttggtctactgtaccatggcgatgatgctgaggcactctgacagaccattttggagcgcctatttctcccaattttgtgtggtgactaagctagctctctgtacgaaaattatagcctgacaatccagctacaattctatcatagcaatcttgatcaaattctcaataattcaagcttgaattcatgcttaaagtttcagtgattacactatctgtctgaaaattcagacattggcaccctgacagcccaacttcaaccttaattatctccagatttttctcaataacatggcttgcactcttaagcaaagttgttctccttagtttgctctataattttgatgtggtgacctagggcagaaaccctagaatttgaaagatacaaggctccaaagttgagcaaatatcactgaaaatcagacttaagcatttgagaaaaagtgtggctcttttgcacttaagtccaaatctcagggtttagattgcaaattcacatatgagtgacccaaatgacttaagacacttatttaacttggttttttcactttagtccaaaagtggactaattttgcacataggtccctagggtttggttttagggttttccagggttccatttagggtttttggtatcccaggggtataaatgtgattcagctttgttttttgggacattttatgactatttccctaaagcttttaggttttctcaactgaggttaggttttacccctttaatccctatttagggttaagttccctatccagggtcctatttgcaaagtactataacaatacaacttgtttgaaatttttgcctagtgaatgcactctaggtgtatcaaac

SEQ ID NO: 160170 - DNA, 467 bp, Zea Mays
gcgagagagtgagaaacaccaagtctctatatgttgtttcactctcttaggttcttctttgttgcctcggggtcatggggttgtggtgcttgttgtgtcttcgtcttctattcgggtcctaggggacgcactcggttctgtctcgggtctctactctctctctgaggtcggcctataagaatttatcttagcttttttcttgaacaaaataatggttctcaacaacttaagggtatttggttcgcacctcctaaactttagtgacgtaagtttagtcacttttagtccataaaatatcaaatagtgtgactaaaataggtctttcaaatagaatttctagggattatagtccctaaagtttaagaaggtgactaaaggaaccaaacaccccataagtcctaaaatggagaggatagagtggcttgagctcctagagtcatttggttgtcccttttatcttgccaagc

SEQ ID NO: 160171 - DNA, 1320 bp, Zea Mays
caccagtttaattttgtgaagctcgttaattcgatcggattgtgagattgtgtatgatctcacagttataatcgtctacactattatattgtaacctacatggaaatggatggagcatagcccaacactaccattgaaatacaggacgatgactctattccatagtataatgagttaaggcagaggctggtctaagaaattaattcacttgtgccaccagtaaattatcttgctaaaacattagcctataggattattatttgcatagcagtagggttacagaggtaattcctcaaatcactgatgtcacagcctgaaaggacaccactgagtgcagtgtggatctgcccctaagttaaggtgttgttgtctcttttttctttttctctaaaatgacataggaaatatctcatttgccgactatgttgggttccactggcttggctttattttcgcataatgcctccatatccatatgtgcttgtttcaactgcaaagaatatgtagatatctaaacagggctaggaaatgatgatagattcacttgaactatgttatgtaaatgagatggcctacatagtaaaaacctaccttcagaattatttttctcatcattgcttaagtacctaccgatgcagcataagtaaaagtaaaactatgcggaaagctacgaatgtcctctgaccacagtttaatctgtaccatatcaaatatttgtatgttaagaaaaaacaccgctcaacaatggttgcgagtgaaagatttattttggttaactttgcatgtgtcgtatacattcccgtatacaatttggccttgatgacaatcaatcactttagagttaaatggttgtgaaatacaatgaactcagatgccaattcctttttggtagatggaacatgacatatggaatatttatggagtcacattcttgtatttgttgtttgcagcctcaagaaaactgaagtttgaacacatgacaattgatcgtgcttgccttttgtgaatggactaggctgttcgcttgacttttatagatgaagtgaagttgcgcttgtagttttctaaggtttatgtatataattatgtggattgcattagccccaatataatatcatgtatatacctcccgctgtggtgtctgtccctaagcacatcacctaacataggcttggatcctgtcatcttattttggattagtttcctatatcttcatcttattttggattagtttcctacatcttatttttgattagttttctgatgtatcaagtttgatcattacgctatgttacacctctatgtatgataacttgtgct

SEQ ID NO: 160172 - DNA, 665 bp, Zea Mays
aacggacaaccccagatcaaatcctattcgtcagttgcaaatcggacggacatgtttccccccttttccaccggactcaaaacacggcggtgggacatggtcgtggcggcgatgctcgtcagagcaaggcgtcggccaatccagtgctgcaacactcgaatggacaatgcaacatgtctagtagtaaacgacgaactcaatcataggctactcaccggcgatgaagatgtgacgaagcctgaccacaaaatggagcggtcggtggcgattttctaagtccgatgagaaattcatcattgtccgaggctcctccacacatggcgaggccacatatgtcttccttgcaagctggtgaagctcctgggcgtgactctaaggtcatggcagcgacgagcacatgaattattataatggctttctccgctctaggctgatgctctctgatgctggatttccggtggttgtcaaggggggagtgttgcgttcttatttatgccacgaggacactacataacaacctagggtgaccctgagattgctatgaaggcagagtttgttgtaccgacaaaggtccctgaacagctcgaccgaagataggggaagattccgaccgatgggatccacacgttggtcatagataatgagagcgcaccgtggtgaagggt

SEQ ID NO: 160173 - DNA, 1139 bp, Zea Mays
acccagagggattacaagtaaccaacgacgctgaaggccatcgcatcgtcaacctcattatgactgaagattggcgggccccaataacactgtttctgcaaggatactaccactcgagtgacgtcaatgaggccaagcgcctcaaacaccgaagcagggacttcatactagtcggggaccagctatacaagaaagggatcagtcaacccatgctaaaatgcgtcaccgaaaccaaaggcattcagatcctacgtgaagtccacaacggaacttgcggctcccactcagggcccagggccctcgctaccaaggtgatctgtcaaggattttactggcccgctataatctgcgccgcgaatcgagtcacgaggtcgtgcgaagcttgccactggttttctccccgcttgggcaacccttcgcagttcaccaagctgattgttcacacatggccacttcaacgctgggggctggatattgtcgggccactacctatggctcaagggaacctcaagttcaccttcgtcgccgtcgaatactttaccaagtggatcgaggccagggcagtatccacgataacattgaagactgcccagaatttcttttggcaaaacattgtttgccagttcggagtctcgtccgagctcacagttgacaacggcaagcagtttgatagtcaggacttcagggacttctgcctatccatcggcaccaagctcgccttcgcctctgtgtaccacccgcaatccaacggcgtcgtcgagcgcgccaacggcaagattttcaccgctatcaagaaaagacttcttgacgacaagaagggtaaatgggctgaccaactacctgaagtagtctgggccctaaacacgaccgaatgtcgggcaaccggattcacacctttttgtctgttacatggatcggaggccatgacgccgcaggaaataaagcatggatcgccccgaacaaacacatcagcaatccccgacatcgacaaaccaaaatctaaagacctcatcgatggagaccacgtcttcgcccctgtaggccctcaacaaataccaagctcaaaccaaggcctagcacgacaacgcggtcatcccaagagagttcaacacaggagacctcgtactcgtccgaaccac

SEQ ID NO: 160174 - DNA, 1241 bp, Zea Mays
atgttacaaacctaccccacttaaaggaatctcgccctcgagatttagactggatttgggaaaagataagggtattccctcctcaaagagtcctcactctcccaggtagcttcctcttctccttctctgctccactgaactttacagagtctcacttctgagttgcgggtcttccggactgctgagtcaagaatttttattagcttctctcagtactgaagatctttctgaatctggattgcctcttcttcgatgtgactttcttgtacttgcaggcatttgcggagctgggacacatgaaacacattgtggatatcagacatggattctggtaattcaagacggtacgctgcgggtcccactctgccaatgatgggataggggccgacgaattgcagtgctagctttcctttcacctggaaccttctgacaccacgcatcggggagaccttgaggtagacgaagtctccttcctcaaatctaagttctctctgcatgttgttcgtataacttttctgccgactctgagcttcaagtaatcttttgcggatcagggtaactttctcttcagcctctttaacaaaggcatgcccttccagtgtcttttcccctacgttggaccacaagagaggggtctggcattttcgtccataaaatgcttcgaacagtgacatcttgatactggcctgatggctgttgttatacgagaactctgcataaggcaaactggactcccagctgctatcgaacgttaacacacaggctcttaataaatcttcgaggaccttgttgaccctttctgtctgaccatctgtctgggggtgataggcggtgctgaagtctagcttggtgcccatagctttctgaaggctcgtccaaaacttggaggtgaactgggttcctctgtctgacactatcttccttgggatgccatggagtctgactatctttttaagataaatccatgcaagggtggctcctccaaaggtagttttcattgggatgaagtgggctaccttggtaagacggtctattattacctagatagactcgttccctttttgcgtccggggtagtccggttacaaaatccatgtttatcttctcccacttccattcgggcactggaaggggttgcaataggcctgtaggcttctggtgctcggctttcgtccgttggcaagtgtcacaccgggccacatactgtgctatctctttcttcatccctctccaccagtatct

SEQ ID NO: 160175 - DNA, 1117 bp, Zea Mays
ggcgtttcgacttaaaccgattgttctgttagcagggtataatgatcaccctgagtcgtgtaggtgtgagcatgtcgcaccaacttaaggcatttccgacttaagccaattgcttcgttagcagggtatagtgatcacccagagccgtgcaagcgtgagcatgtcgcacctacttaaggcgcttccgacttaagccgattgctcctttagtagggtatagttatcaccctgagtcgtgtaagcgtgagcatgtcgcaccgacttaaggcatttccgacttaagccgattgttccgttagtagggtatagtgatcaccctgagtcgtgtaagcgtgagcatgtcgcaccgacttaaggcatttctgacttaagctgattgctccgttagtagggtatagtgatcaccctgagtcgtgtaagcgtgagcatgtcgcaccgacttaaggcgtttccgacttaagccgaatgctccgttagtagggtatagtgatcaccttgagtcatgtaagcgtgagcatgtcgcaccgacttaaggcatttccgacttaaatcgattgctccgtcagtagggtatagtgatcacctgagcgtgtcgtgctgatttcgagtttagcccgacctagttcagttgttgatcaagaacttgtatgccttgtaaaatggaagctttattgataatgaaaccttctgcttacaaagtacaacttgtcctcaaaacttttaaggcatttctaggggtagaatttcctgaggtgctcaatatttcatgaatcccccactttggtgccgtccatctgagtgagccggtaggatcccggtcgtgtgacctccgcaacgatgaatggtccttcccacggtggtgacagtttgtgtcgtccctcccccgtcagcactcggcggaggaccaagtctcccacttcgaaggatcgatgtcgcactgctttgtcgtggtagcgcctcagggtctgttggtatctagccgactgaattaccacatttagtcgttcttcctccagtacatcgatgtcctctagcctggttgcttctgcttcgactatgctttcaaaggttaatctcggtgctccaaagatcagatctgctagtagcactacctccg

SEQ ID NO: 160176 - DNA, 730 bp, Zea Mays
gagatctgcccctgcacctagctcgccctgttctgggttcgccgcagtgtctctaattcgtcggttttgctctttgctgcacgtgctactcatcggagactcctcgccatgaggccctgttgttcgtgaatttcccttaccgaagcattattcgtgaagccatgccgtcgtcgccgtttgtcacctctgcgccgcgtaagctgttgcccgccattgctgcgtacctctgcttgccaccgtgctgcgcagtacctcgccgaaactcctgctgcatgcgtcgagaagtcagccacctggtttgttgtcgcttgacactgttgtaactactcgcccgacgtcatcgccattcatcgttcaacggatttcatcaccgcgcaacgaccacacccttcctgctgctgttcgctgcgacttgaccacctcatcgacttccgtgttggtgccctccttattgccgctataaatccatccccgtcgccgaaccaaggtagaaaagatgaacattttaccagctaccctcttcatatgtatgtttaattgcgtgtagacacatacgataggttccatattttaaatacgtatttaaaacccaaataaaataaatattgatttgttagcttcataaatttgtgatacacatttaaaattagtgtttgcaacattttacatgtttcgttaatatttgaattatgattgttatatttttcaaacaagaaataataagaattat

SEQ ID NO: 160177 - DNA, 915 bp, Zea Mays
cttgccaggtcgttgaagcggcgcggagaaatcggctagggatcccggtgctccctcaaggctatttaggcggagcttcttgcctctactgccccggtcgaccattgcgaaactaggtgtccacaaacgagaagtcgagccctgcccctaaccaagctccagatcaaaacagatagagaaacacgctgtcactcggagagagagggagagagaaaattgttgctgccgcgaggtgatctacgaagctgtgttcggggcgcaagttgtggctggcgtgaccgcttgccctggtcgagattcggagctcgccgctgggtcgctgctcgccgtggaagaggaattgggggccgccactggtggggaaatcgccaccgaccgcctggcgctgcgttcgtgcccctctctaccgataattccctctctccagctgtgtcacctcccttggtcggtagaagttcaccctgcgctcgaatttgactcgcgtagtccccgaaatttctcgtcggtgtggtgcgggccgccgtgcacgggaattgggtgttctcatcactcgggtttcagggagccacccacctttgtgtccgaaatctcctaggctaggtatagcacctaacgttctgtgaaatcgtgcaccgagggccgatttggagtttccggccatggcgccgccgcggaagcacaggcgccgccgcgtctggccaccaggaagggctagggcatagtggaagcgcgtgggccgttgatcttctaagcgacggtcgcgattagatagagcgataccccttcgtgggattggatctgggccatcgatcggtgatcggacggccttgtgcgctcgcgggtttataatgacgagatccgatcctggcccttggatctgatttgaacggtccgaatcttcccataccccttcgc

SEQ ID NO: 160178 - DNA, 442 bp, Zea Mays
cctcgctctcgctcacatgtatcacatcacgaatgagacaatctcggacactctcacaccgtccaccgcctccactactccaccacatgttgactggagcgagctcaggccggtcgtcggcatccgttctccgcgcgggcgcgaacaaaaattcacttttttcccggtgatgctacagcacatgcgctgcttaacaacccggagctaatggcgattaacaaggtagctaatggtagagtagagtagagtagcagcatgcgctagttaattggtcgattattaattagtacatggcggcgccgactccggcaccggcggcggccccctcgccgtcggccttgttggccgtcatgtcgtcgtcgtcgtcttcgtcatcctcttcccgctcctccacctcgccttcctcctcgatgctctccgacctctccctcccgcctccgcc

SEQ ID NO: 160179 - DNA, 468 bp, Zea Mays
aggagtatgcattatgacacagtagctagctagtgactttattatattatatgttgatgtgatgcctaactgtctcacatttatagctgaatggacgagcggatttggcatgacttatgtatttacgcggcagtggttagtagtgtatagctttacctctgttcccccatcctgttttggaaacttttatccgtgcctgttctgaaacgatcagccgggctttcctggtgagctagctgttgccgacttgttttcttgtggacgatttacagcgcaagtcagaatagtaactgataactcacgagattaactctaaatctctaaatatgtagcctatactaactaccacatattctattatttattttcacctctttcctctccacacccaatgggcagccaataggaagaggaaagagattattcagtccaccacagaaggtgcactagctgtgaagttcctgagag

SEQ ID NO: 160180 - DNA, 805 bp, Zea Mays
caagcacatgagcgtggagcactggttcagcttctgaataaatcttcttgagattaattattcggagtgtgtttggggtttggtcagggaaaatgcaacacacacacacacacactagtgcttattggacgattcagttgttgaagtttactcgtagttctgtcagatagacaacatgaatgagagctcgatcgggcctgtgggttcgtcagttcattcattacgacttatgctccattgttgagtctagattgcttgtccaattttccagtttttcgccaaactgtttttttttttctcaattactgtactgcagaccaaaactgtctgtctgtctctgcttatttgcttattattgttccagcaacagctgtcatgctgagagtctaaagcatgcatcgatcacgctggcattacgttacctaacccaactgaagtaaattgctgaaatgaatagggtggatgacattggcattattcttgattgagcaactaccgtgaaggacgacaatagagggtgccatacttgatctagtctgaaactctggatacaagttcttcccttcgctttgccatgaacaccacttttctctttagtcattctagatcacactctaaataaataaacttgtttctggtttctggttacaagttcttcccttcgctttgccatgaacaccacttttctctttagtcattctagatcacactctaaataaataaactctggatacaagttcttcccttcgctttgccatgaacaccaacacacgatgaattgctaacagtagcacacaccaactgc

SEQ ID NO: 160181 - DNA, 574 bp, Zea Mays
atctcttgccatacggaatttttttgcaaatggattgtgatcatcaagcatttttatcaacccattgactataacagggtccaaaccaccatcatttctgtcgttattccccaaagagttcattctattttgaatctcatttgcagtatcgtagatgtacagttgaatgaatttaggtgaggatccatctgaaggtaatagagatcctatacgatgatgaacctgtccacatattttgaatagcggtggaccacgaccatcattaacagaattatctatctgagcgcccattgatgtgaaagcaaataagcagttgtattgtcttatgtttctgataattttttttgaggttatgtcaccatcgaaccttgcaagagaagatagaggttcaggcctaggtctatacggaggtatgataatcttgccacctttacaacaattgttatatacaatagatgagtctcgttgccgattacgaactctttcagcataccaaaaaatagcatggcagtgagagcactcatactcaggttttccgaggtgcgatctgtttggatatgaggctgtgtttgat

SEQ ID NO: 160182 - DNA, 715 bp, Zea Mays
ttcatattaaaaatccatttctaaatcatttattcgatttaaaacagtactgggctgggcctcaaatccagagaaacccagggggctcggggtaaaaatttgtagacacaaagcgcagtggaggtggatggcgggttctatttataataaacgcaggggcacgattgcaaaactgtagtgccgaaggggcatcggaagaatcggaccatccgatcaaaattggacgccccagattagatctggatcacgctgaaccggtatgcagcgcgatccgtccactccgcgatcaacagcgcggattttaattctctccgatctcactagtgtcgcccgatcacgatctaacggcacccaaccaatgtggcgaaagggtacaccaagttctaatcctggctgttcgtcacccgatcaacggcgcgcctaagttcttcctccctacgccctcctatttccttttctctctccatggctgaccggtggcgcgtgagcacgaccgtggcggaggccatggccagcggccggccccaaggctccccccgaggtagctatacaaagtggagacatacgcgaagctggggaaggagttcttaccaagattcgcccgtggtgaagctctgtccacggcggcagacgagtccgcggcgtcccaattgcttcggtgagcgattcctcacggaagccaatgcgcgatcccgattccctactcgcgcgagtt

SEQ ID NO: 160183 - DNA, 364 bp, Zea Mays
gctgaggaagtatctgtgcctgaatttactgacgctgaccccaatgggtgtgatccatctgtcgctgatcccaatgggtgtgctccatctgatgctgatcccaatgggggtgttgtctgtgttgctgatgaaaacgacggggaggaagaagatgaggtccctttgacttggaagaacaatcggcaatatgttgccagtggggaaagtagtggagttccttctcctgctctgtctgccctcattggtctacaagaattgtccctggcgaactttgatcagactcttgaagatatggttccagaggatctgttatcagagccagcggatgatggtgcgacggatgtttgtgctgatgtgctcgacg

SEQ ID NO: 160184 - DNA, 1007 bp, Zea Mays
ttatctgttaaaattagctaaacatcaatttgggtccttgactaataagtttagcaaatgtctcatctaccgcccaactgatgattagctagttgatgattttcagatgttgcatatcaaaatattgataatatgattagctcatttcctcacactcacagtaaaagttctataatcgagcatgtggagaagctatgaaaattagcattgagaaagaaaagatgtgtcaggtgtttcaaacctagctccgacaagtgaatttgtttgtgcgcggtccaggtgatggatggtgtgcttagagggcgtaaagtttatactggttcgggcagaacgtccctatatttagtctttggtggctcacgctaccggcaccgttgttgctcaatgctcatagtagggattacaagtgggtgagagagggaagaagagctcacaagtctcttatgcgtggctagacctaaggactatgtgactagagctctctgctaagccttggacgtcgtggtggttcgttctggcctccgtagtcctccgggtcttctggtccgtctgtgtttcttatgtgtattcgtgtgcgttgtgttctcctttgtgtccatctatgaccctcccctttaatagaccaaggcggggatcggttatcggctccttatcttagaaggagctaccgagccggggtaaaacgagacattctaccctagtaaatcgtgcttgtcgtcttgtgccctagtcgtctgggcttccctggctacgtcctttatggtaggcggtacaagtggtgtggagatctagcgccatcattactacctctacgccacaccgacccttggcctccgtagcctgggtctcggcgtggctcatcgtattgcgagtcctgttgatggtcggcgtactcagatctaggttcaataggttatgagtgcaccgcaggccgagcgaaacataggtcatgtgaaagggaaatgtgccattggaccatttctagatgttttggtgattaaatgctc

SEQ ID NO: 160185 - DNA, 318 bp, Zea Mays
ctatagtttatctctattctctgttcttgcggtccatatgaggatgaggtctccttctttgaattctttagggtgtactgctatgtgccttcacgtcttcgtcgttgcttgatacttgtttaatgactggagggcttgctcacaattgctgtctaggagatcttttggcattgcctcgtctatgtcgggcgttgaatcgggtgctgttcatggcatcatgtgcttgagttccttcggggtcatggcttcggccccgtacatgagtctaaaaggtgaaaatcctattgcaagggactctattgtgttgagcccctaaag

SEQ ID NO: 160186 - DNA, 783 bp, Zea Mays
atcatttcggctctcaaaaactacatctaaaattatcaaatttaaaatgtaaattttgccaatggcctcggatgggaaaagtgtcaaaacaaaagttgtagaactccaaaaagttatgaaactttgtagttgacaatttttttcgtttgagttcgtttacagcctcaaacaatcaatttaaacttagttggttataatatgtggtcaacaaaactgtaatatagaaacaaagtaagtgatatacaaagtggtagatgggttatacgcgagggcgaggtcgtatctacgtattttgcgtgaaaaatattgtgacttgcgactttaatagacggggtagtgaggcctcctaataaaaatattttttaaaccctttttgtatgttttttgaaaaatattttcgcctatagttttattacctcgaccaacatatccgcttgactggaatggataggcttctgcagcgctggaacttggcgtgattcctcgccaatttccctctccatctatctctagtctccatcccatccatccatctatctatctaggaccaaagtctgtggtgcaatgtggggagccagaagaatatcgcagacccctacatgcctacacacatgaggctttgcagggtgagtatcctgctttcagttgagcatttgtccatggctgatggcttcatccaaccttgtcataccaaataggtttacaaccttgtctcgctggactggtggtccgatgaggcggtttaggatataccacggtccaactgaaaccattcacgagata

SEQ ID NO: 160187 - DNA, 724 bp, Zea Mays
aagaatttggccatggttgccataacaagattgttgttggatcatcagacaacaactttgttactggccaatcaactggttgccatagaatattgagagagatttgaccctaaaccttggctgtgaggcgcactgaagaagaatttgatggtacagtgaagggatcaggtcgccagctcagcccctcgccgccggcaatcatgcgctcggattcacgtcggtgccgcgattcccgcccagctaaacacggataacgatcctctggagaaaagatctcactgtggatgatcttggagcacagtagccactctgtcgctcatccacttaccggcgacgtggccgcatgtccatcaccggtgtgccgccgttcttcgcagttatgccacgccgtcagccatcttaccacgtcgcggtcgatcgcaacacaccgtccttctattacctaaggccttgccacggggtttgccaccaatcacacgtgccagtgaactttccctcctccgaccgccgcgcgtcatcgttccaattctcggccaccgctctcgcttagtataaattgagcccgtcgtgagctccgcaagatcatcacgcaccacaccacccagtattgcctccaatcttgcaaccgagagcttgaatttcgaatttcccccaaatctgctctaacccgccgcaagaacaccctcgccgtggccagtgcaattcaggttagttcaaaccttct

SEQ ID NO: 160188 - DNA, 659 bp, Zea Mays
cttggttaaatcgcctgcgcgtagggatgcccagcacgacatcaattagacaggaagattctggtggtgaccagcacaatggggatcacaaaggacctgttcggatgtgggaccctccccgtggccggatctctcgtgattgagcgggctctgaaactcaggcaagaactctcatgtgcttccctgtttccttcacgtagctagtagtatttggtttggctgtgggagcacttgaagcaccgagcttgagctctggtaatggcgacttgaggggggggaggtctcccacaccagcgtgttcgacagacagagggttgaagaagaaccgtgggccactagatttcgcatcggtggatgaggttgacctttgagcgtacccccttgtggcctgtatcttggtcgttgatcggtattcaacagccgcgatcgcgtcgcgcataacccttcaggcgggaaaatcagaaccgtggattgcctgatgggcggcccagatcgtataccaattcgggtgtgattcaatctaatctgggccactagttttggatcggacgactgtcatgcgcaaataccccttcgtcgagcctttatgcataagagcccttcaacttttacaaaactaacccgccatccttttccgttgaagctaatcacaagcaagt

SEQ ID NO: 160189 - DNA, 510 bp, Zea Mays
gttagaattcggcggaggacgaggtctcctactgaaaagaaccgttgccgcacagccttgtcgtgatatcgccttagagtctgctggtaccgtgctgattggattaccgcattcaccgttcttcctcaagtacatcaacgtcctccaacctggtggcctcggcttctgctatgctttcaaagatcaaccttggcgccccaaatttgagatcagcaggtagcactgcctccgacccataaaccatgaagaaaggagtgtttccatgcagggctcggctaggttgggttcttaggctccaaacaacataaggcaattctcttatccactttcctgcaaatttttcattcttatcgaagacccttttcctgagtgcctccaatatcatcctgttggctcgctcgacctgcccgttggctcttggatgtgctacagatgcgtacttgatctgaatgctcttttgctcgcagaagtcgaagaattctgaactggtgaagttagaccctaagtcgg

SEQ ID NO: 160190 - DNA, 321 bp, Zea Mays
catcttcaaggagctaatcaaatcaatcccacagcaagctcaataaaaatctgttaggatgtaacagtgacatcaagaatcaggaacatagaggggagtgaggacgcacctgcagacctgcttcggagttccctgatctgggtggcttgaattcgtcgttgatgtaattctaggacaggaaaggctggacaacagaggggatctaacctctgaagctctacgcgttctgaagtgccaaagatgtcatcttagagaggggaacaaagtaagcgtggccaggacagatcacatatgcgcgggcgttgcttaccatggcagctt

SEQ ID NO: 160191 - DNA, 403 bp, Zea Mays
tatcagaaccatacataatccaaatcagaacgaagacaaaaataatcacacttagggacaacaaaattaacctcaacctataggaacccaacaacaacaacaatcaaaaaataccttcacaccaccggcccaagaggtggaagaggaggaaggagttttgaaggaagattcaactttcaaccaaggaaaatgtcctgccttttctgtggagaggacaaggggcatacaacaagaacctatcaagtcacaatctagaagctggagcacgccagaatcaaccaaaacaaatctttcacactgcttcatactattcttcatacattccagaatatgttcgtaaccaatagccaagtccacaaccctcaggctcagttgcttcggctcattggattatgcctcagcc

SEQ ID NO: 160192 - DNA, 274 bp, Zea Mays
ggccgtttgcttcttggatttccaggcaataggagaggatccaagaagaatacagtaacatgtagtagaacaacggtcaatagggtcacttgcccaagtggcatcagaatacgcatgtagctgaagtggactatcagaagcatagagtaaacatatggatcgtgtcccgcgtaagtatcgaagcacacgaagcaaatgaccataatgaactgaggttggtgtggatacaaattggctcaacatatgaatagcatgagcaatatcaggtctggtg

SEQ ID NO: 160193 - DNA, 661 bp, Zea Mays
cacccgctgttgagatcaaatctgaaccgactctctacctcgcccctccgatctaacattaacggtctagatttttaattgactgagatcatcatggacccgtccgatctggcgccaacggttgggatttaaaacgtgaaggggtacattgagctctaatctcacacgtccgctaccagatcaacggtcaatgcagtcttctcccaccaccggtcggtagggcggtggcgcttgcatgcccacggcggcgttctcgccagcgacagccaaaatggctagctggcgacctatcccccacccgagacgacccatacaacgtgtgtacaatggcgagcatagtgaggtgacttacagagcgcccgaaacaatgacgggagcaggccacggtgaggtgcggcccacggcggtagagggactccggtgagaaatcaccggtgccccggttgtccaacgaggtccggagctccatgcgcatgttctagggactcaggcgcagcgcggacgttgtcgttgttcaccgatgacaaggcattttctacctcagaagctcgattatggtggctcgagaatagcggtgtgggttgagggagctacgacgtccaggggcccggttttatagagccgatgtcgcggtctaggccgaagagaacagcggatcccg

SEQ ID NO: 160194 - DNA, 650 bp, Zea Mays
ttcagggcctagtgaaggttttccctaaattaatatcataaacaactataccaatgtctctggccatggtgagcgcgcggatgaactaacaatctacacgttcccggtgattggtgagctctcagtccaaatcagtggttcggcaagcatcacggggttatgagaatgttcaaacgagggagcagaaggcgtaggctgacctggttcacgctggccgcggcgaggtacactttgcggtggcggagacttgatttgggggaagtttgaaattcaagagctctggggaacgatcgaggctaattcgtggtggctgggtgtgtaatgaccttgcggggttggcaggggcttcaatttatagggatcaatggcggtggccgagaattttagtggggacgtgcggcggtcggaggaggaagaagagtactggcgcggtggcttggtgtccagcgccgtggcaattgctccgacgatcaacggggagccactaaggcttacgacgatgcggtggaaagttagagccacgcggcggacgccggtgatggcttaacggcggtgagaatccttatccacgggttcggtgagcaagggggaggcacggcggcgagtcaccggagttatccttaggcgcatggcttttacctggcggcctt

SEQ ID NO: 160195 - DNA, 498 bp, Zea Mays
tgtcaggctgtctgaaatgagctctgatggtacagtagtcaaaatggatcaggatgccaacatcccgtgctcgccgccggtgaccctcccccgcgtaaggattcgcgccgccgcgttaagattaatgctcactggtaaccggataacgctgcggggtagaaagatcgtcgtcgccgtcgagctggaagccaccccgggcagccgcaatactcctccccttactcaccaccgtgaataaagctgctcaccgtcgtcgtgccctcgccattgtccatcgcgtgtcccaacctcaccatcacgtcgccgtggctctctctaaactccccgtcgaccaccggagttactgccacgccggtgaacacgtgttcgatgcgccagcgttcttcctcactcccaaccgccgtgtgtcccgtccaaaattcgcagccaccgcccgtcctccctataaattaagcccgtgaccagctctgtagggttgtcagctaaccagctacctcc

SEQ ID NO: 160196 - DNA, 560 bp, Zea Mays
ggcccacttggctattctcccgatggcttctttgttgtgaagaatatcccctattggaaacccggtgactactatgactttatggtcgtcaaagtagtgacggagtttacgagaagttagaagtaccgcgtataataatttttgaacttgaggatacttttttttagagggccctagaacttcactgatgaagtagaccggatgttgtacagatatgcatgcccttcttctgcccactcgattactaacgcgatggtcaccacgtgagtcgtgcaggatatgtataacaatagatcttctgccggctgatctaacatggcttggcatggcggctttagtactggtggcatggtcaagaacttctttagtgcatcgagagcttcctgtgcttttgtggtccactggaacttgtccactttcttgagcaatttgtagaatgataagcctttttctcctagccttgatatgaacctgcttaaggttgccatgcatccagtaagcctttgcactttcttctgtgatcgtggtgcttccattctcatgatagcctcgattttttc

SEQ ID NO: 160197 - DNA, 630 bp, Zea Mays
gtaaaataaaatgttcccttttatgagttcaccatgtggattatgtttttttacttcgatctgttgtacaaccagggggatccatgttgggcctaactatttttagggaaccggatcattgaaaaataggcagggttttatggtggaattatttaggagggtacttaaccatgtttgagaaattgtaatgttgcttttatttggcacaattatcaaataggaaaatgaatttgagattgacacaataaggatctgttcagtttcctatttgttgattatcttcatctcctcctttgttagggtcctttgatcaagtagggtgctgtttcgggagcctaagcaatagttgcctcctttgttagggtcctttgatcaagtagggttttctggatatatcttagctatgaagtagagcttgagtttttagaatgagaggctaccatttttgggcagctgaaagggaagtgtccagtgcattttttatatcctttatgttggaacaatgcttcacattttgggacaaactccacaatttatttactctatgcatgattctccttgacgccattatacagagtctgctaatatttataaatgtataatttactgtgatggtcttagcatttaaat

SEQ ID NO: 160198 - DNA, 636 bp, Zea Mays
cccaggttcggtgctacatgctcacgctaaaccagaaaagggtacctcaaaacccttcctacggagcaatcggcttgggtctcggtgcccgacccaggttcggtgttacatgctcatgctaaatcagaaaagggtacctcaaaacccttcctatggagcaatcggcttgggtctcggtgcccgacccaggtttggtgctacatgctcacgctaaatcagaaaagggtacctcaaaacccttcctacggagcaatcggcttgggtcttggtgcccgacccaggttcggtgtcacatgctcacgctaaattagaaaagggtacctcaaaacccttcctatagagcaatcggcctggcaaaccgacactctacgtctttgctatactcggaattcaaacatggagctcactttacgccgcaccattgactcgggggctgggttgtcacccgcctcgccgactcgctactttgacagctcgggggctgggtcgttgtccgcctcgccgacttgctacttcgatagcttgggggctaggctgttgtccacctcgccgactcgctacttcgacagctcaggggctgggtcgttgtccgcctcgccgacttgctactttgatagcttgggggctaggctgttg

SEQ ID NO: 160199 - DNA, 308 bp, Zea Mays
gagggtggacgagaaaaagtgcgattttgatttgaaggtcggatcaccaatcgttgcttcttcgcctggccctgattaggccgctcaccaccgaatcccttattcttcccagaatttgtgtatttggcttcaacagataaggctgtgctgacagcctttccatacgtgagatctatgcatgtggccattttcctttgtagccgatcattcagtccccgcataaaacagttcttcttctttaaatcagtattcacctggtcgatggcatactacgacaggtgattaaatttgttgagatattggttgac

SEQ ID NO: 160200 - DNA, 793 bp, Zea Mays
cgtcaatgtacgtgtcaggtatcgtaattaggggtatccagaatatgcatctaaaacccgcttaacacctaactacccaaaaaagatcataagacacatcccccaaggtcaagaaaggttgagccacgattcactcgagaccccgctcgacgatcgctcaaaaccccgcctcatccgggcctgtccttaggcaaaggcagcgctcgaggaaatcctcgtcccgcccgaggtcccctcttcacggaatgacaatttccacctcgcccgagcccgtctcagataggaggacaaccccgagcccgacctcagtcaaaggtgataggattcgtggagatatgggcatttaatgcgaatacctaccccacgtgacgccgcagacggacagggagcgacgggaccgtggtcccatccactttcaccaactatgatggcacacgagttggaataacgaccactgctcccccatgacgtctgttgtactcaagcaactctgaacgggacatgcgtatgttagggcatggtctcaccctcgggagagaattctgccttgcccgaagtcggcctcagcctcgaagaaaactctgcctcacccgagatcggcttcggccaactgctccggcaacaactccccgcgaatcttgcaggaggccactccgacaactgtgctacctcctccttgtacgactgcatgccccaaggcaagctcggccaaggcctcgagaggtacctttgtcttgcccgagcttggcctcgacctagataacatcgctcaaagaacgtcacctactactcc

SEQ ID NO: 160201 - DNA, 645 bp, Zea Mays
gttccctgcatcctactcgtaggcaggcaggggatccgaccctcgattcttcaagggctctggcattagcatggagcatatcgtacccaacggtcgatatcgaccccatcgattgttacagactacctgtcacaacgtattatctccttgattcacgtcattttgactaattgaagttcaataaatcatagacctaccatttagatagaggaggatgtttggattcattcataccctcaccctccaatttgcttgtctttcttttatattggagtctctcactctatttgaatatgcatcttcaccgacttgctcaacgatcaatatccacaaagttccgagatccctgccggtgtaggtcacgtctacttcgatgatctttctcctgtacatcgtgttgggaggatgtttctgaccttccccgttttctgagtctgcaacctctacttccatactggtctcctcctctctatcctccgaccatgtgtggatgctcctcctaataaaaactctaccaccgacaatcctccttccaacactaaggctcctaccacatatgctccttcttctcaacctttcaattatccatatccttctccatacgcggatgggtatccatatggtgatcctccatatggatcattg

SEQ ID NO: 160202 - DNA, 551 bp, Zea Mays
cgcgttggcatcaccgatgttcgctgttatctggcctggctacatgcctcaacgtttcaccacgtcgtagtgaatcactgtaagccactggttcgtcgccggtgaggccgccacggtgaaggccacgaatcaccacaccagtgactcattccttctccgaccgccaccgtgcccaatccaaattcactggccaccgctcatgcctgctataaattgagcatgtcgtgagctccgtaggataattatgcatccaaagcaccagtaattgcctccaatcgttcaccagagaccgcgaattgctcatctcccccaattctgtttccgccgccgtggtagaaccctcaccgtggtcagcaaatcccaggtctgttcatcctccctgctgtcttgtttcaacatccttgggtcctcctgatgttccccgacctagccaattggactaggaccccatagaccaacgggaacgcgcttgattgcctatagtgtccgctgtcaccgtggacagtgcgtgttagagcgccattagtaaaattggttgaggggaaaccctt

SEQ ID NO: 160203 - DNA, 822 bp, Zea Mays
ctagcaacccatattaagtgttgccacatcctaattaatcaacggatggtgctagcaacacatattaagcgttgccaccaccctaataacttaatgtatgatgcttgcaacacatattaagtgttgcccgctaatttcttacaatgcataaaaccatgtgttgctatgaatgcgttgctataggggggtttgtggtgtagtgtgtcaagcggccaaggcctgtcggcctcacaaaacatgagcgccatttgacatgtgggtccgaaaaccctaacagtcttctcctcctcgcaaccacgcgacgtggtccgagcccctcgccgtggaaaacggatctcctccctgcaaattcggcctcaccgttgcacccttgaccgattcgggtgtatataaggttcacgcccttccgtgcacgttgtgtcccctggatcgagaaccagcaccgtgctatacagagaaggaggaaagcggagagtgagggagagggtgtcgatccacgccaccgccgtagcctcacccttggccggcttcccagtcgtggcggtctgtcccgggtgcaccagcgggctccgccgcgtgtgttggaccaaatcccaagtcggttttgcttgcccgtcgatggaaattgctcgccgtctttagcgtttcgcctggaatccacgactgtcgtggactactcgcctacgcgtataattcctggtatgaattactcaccagtacccgtcttcattgccatagtgagtggagttggtcgaattagagtttgatacactcaagccatggattaaaatgcgtcggccatggcacgccgccgcggtgacc

SEQ ID NO: 160204 - DNA, 602 bp, Zea Mays
gtcggcggggtcccggcccccttttgtcggatccaatctcgcgaggttgttgggatgtttcggcctccatcggggatataaaagtctaggcctcaccccttgaatcccatgccgcggccatggtcccgtacgggtagagcgaaccgagagagcgagagaagagagaagagagaaattgatcgctggctgtcaaacaggactgggcgggatctgttggccttcacgtggcaccaggcgcatagcagaaggcgcgcccaggcggctgagtgacctgggagggcgagatttctcgccggggttagatttccgccgagcggtcgctgcgcgatgcgggcagctccaccaacgcatcgaccttgggtaagtgctcctccagctgactccctttaccccctggaacctgtaggaccttgtggtagtgtgtgagcgtcgtgtgtctgccgaccattgctcaccagagatcctttatcagtagaccgccgtaactcgagtattgccttgttctcctcaccgttgcgagcaatatgcacgtactgggtttcgcatgatccctcccatcgattaggaccgatagtagattggttgaagcaccaccctgaggt

SEQ ID NO: 160205 - DNA, 694 bp, Zea Mays
ccaaattcagattcttcattgtcatcatttcttcgattctgccctcttcctctaccacgtgcggcacctttattcctcctcccatgttcacttgctcttctagaataatttccttcaccttctcccccgtcttcatcatggtttgttgcaccatcaggggtcgacgacgacctctgatttcagccataagtgtctgaagatcttgtgccaaccgatcttgcttgtcttctatgctttgtttgagctcattgaattgtatcagggtgacacattcttcaatctcagcgttgggatccatcttcctgcgaaattagtggcgacaaggcaaaaaatacaggtggaaaatgaagctatatagaatctcacaacctcaccactcttaccaaccaaagctcttatgaggtccctgcgggttgcaagaaaaatgtgtggtggtaacaataaagtgatggttaagcgaatacaagaccagagtaccggttacgatggcttatatgtggagcttggtggggaataataaacaagggatgcaatctgaatcctagttgttgtaaagttaaataaccatccaactagaagttccctgcctagtgctgaccacaagatacaagtgatgtaagtagatcaaacacacgcgcaaagaatttttagatttgatgcaaatcaaggagtatggttggaatgcaagtgttgc

SEQ ID NO: 160206 - DNA, 1265 bp, Zea Mays
cttgagaattacagaagaaggtccaaggctttgatgcagtctatcatgattgtgcatgtgaacaaggccactcatagcaccgttcagcaacttaagaacaaagtatctccttaactccaatttgtatgctcgatcgaaagggttccagaatggcgtccctccagatttttccttcaattgccttgcactagttacatttgcatagtctgcagcactatatctcccgtcatcacggaaggcgagccactgtcataaagctaagtcagtcttgcatgcattctgtggggagcctggcaacgaggtagttatgagtaatatacctgttctccagttgctgtctcgaaggcccctaaaagaaactggatgttctcgcatatgtcactagcatcactctgtaaatagaggccaaggaatagttttgtgtgcgtaaatatcatgtgtaagataatagttcaggcttgcagtttctattagcagtttatggtttacgtaacctgaagaaacgcatgagtccttaactcattcagtgccatcaaatcagcttcagaagcatcagcacgggctccagggtatacctttgtttcaaatcctatgtcttagcatattaagactgttaatatattcatgtacctatggcagagaaaggtaccataataaaatgaagacaaattgaaaggtcaaaagtgtatatcctactacaaataatcttttcaaggcactgtagaaccaaatttcaaggcatggcattctgctgattactaaaggacactatgcaactaaacttagcaaagtaacaaatctacacataccttaaatacagcccgtgtgcccctgaatggaccttgaacaactcttccctcataaagtctggaaaacaggatgatcaatgaatgatgggtactcctttacttcactatagtaaaaagtcagtatcagtcagaaaataacctaattgtcacttctccttctccaatatcttggaccctcaaccgttcgatctcttctggtgaatatccaagaccaaggtcttgaataccggcaacatttgaaggctctccaaattgagatgatgagtaactgattcacatgacaggaagtcagaaaaggtgattattcaagaaacgctgtactacacaaagaaaaggaaaaggtctgtgaatattgaagaaacggtttgtatttttttaaatgcgaagtaagggagcagggccctttgtttatactatatagtataatggcaatccacaatttacttcaaaaaaatg

SEQ ID NO: 160207 - DNA, 862 bp, Zea Mays
cgcgtctgcacctcgccctcgcctataagtgcccccagaggccttagccatttgcactcgtccacccagagccccgcccgagccagggatcaccggagtttgccgtggaaagcgagcgccaccgcccaccatcattgcccaagcacgaccgttgtggccagtcttttctgtcaacccccagcctcgccctagcctctggatagcttcctagagagcctgtggagcttctccaagcttgagccgatgcattgcctcaccgaagaagcggattcaccctcgtcggagttgtaatccccgccggcgcgcgtggccacgactaaccggtaagccattttccaattcctcatgcctatgtcttccctgacctctggtgaagctctctggccacttcaattgaactcaaccaccctggttaggtcggagtcctcaccgccgacgagctcgcccgccaacgcgcgtggaccgacctactctgaccaccaccggagatgatccgcacatcagcgtgaccgtcaagacctcccctacgccctcgaccacctcaccggagcaatctcgctgccggtaagcccctccgccctttcctctgcctcgattactatttatttgggggaaggatcatgggttggatttaacagaactctagggtgttttctgcgcagtcatagactcatgtgaatagtaacccgaggacccgtctgcaatgaaacttagaactttcgccagggaccccaatgtaaaaccctttttcctttaactatttctgtttattcttttaaaataggcagagaacgtaggaaatttatattttgagaaatatttaaccaaattgagtcaaaccaattttactggattcagaata

SEQ ID NO: 160208 - DNA, 556 bp, Zea Mays
cccctcgtctgcctgtcccgacgccgacgccgacgccattttctccgcttcgcctgctcagcggcgccagccacccgtcgcacgcgagagcttcggaagcgcgtgcgctgctggatcggctgcgacacggctgccactggcattggcgttgcgctgctgcttttatttatatacacaaaggggaatttaagcgcagcgcagcgcggttggtcaatactatacgatcaagggaagcgtaccgacgatcagacgactaattgctgcaaataaattactgactaatcgtggcctgagcaggagatgatggccactcgcgctgcacgatttcgtcaataaacaacagcggaagtactgccaaatggaaaagctagtggaaacaccgaaagctctacctttgccgcctacgcatttcctactgtcgccgggaggaagaagaaaaaaaaaaacctgcgcagaatcaatcgtcgagaattcggaattcacaagggccaagaagaagaatctgcgtacgccctagcaagtgctacgtgcaaaaccattcatgcatcttcttaac

SEQ ID NO: 160209 - DNA, 562 bp, Zea Mays
tgaagatttggtgtgagttccctcattggaaatcctcccgtccccccttctgacaaggttggttaagggttttagccctcaagcggtcggggcttgggctcaaatactcactacaatcgtagtgacccccacgcctaggatggtgaacatgcggtgcttcaggttgctccctcagcgtcacgcttggccttctactagtgtggggatcacccttaagggacacagccatgccgaccttcacggtggacatgccctgatcggaacttctcccatgtcgtctagtgaggagctccacgtgcttggccaaggcacactcaaagagcgggtgtgtttccttgcttgttttgggggagagatggttactttcctcatcaatggagtaaaatgactcgtaagcaaggaggtcatatataaattcgagggcatgcttggtcatacccacgaactcgatgttcgcggggagtcaccatgcatgcggctctcggagcaggaatgagctagggatgaccacatccttcattcgaggactccatgaggacatttacaacatgggccaccagac

SEQ ID NO: 160210 - DNA, 275 bp, Zea Mays
tggttggctatgctgtgctggtgtgattatggtcggtcttagcgcggatggtttgatgctgtcgcttctgcttttgttgtactagtttgactgcgcccttaggcggcttctgcgcggagtctttgcgagagacatcggaatttttcgcacttgatgtgtttagtccggctgcacccttaggcgacttctgcgcggatagtcttcgcgatagacatcggaattttttcgcacttgatgtgtttagtccggctgcacccttaggcgacttctgcgcg

SEQ ID NO: 160211 - DNA, 688 bp, Zea Mays
cgaagctattggggatccagagatgacattggcattgagggcatgtgagcaaaagaggatgaagactatcatgacattccaatatgattagaatgatgaaatcattgctcagtcttattctactctgtggatcaagactgctgatgaggaaagtccatataactttccttatctaaactttttcattgaaggaagctggtacaaagtgagctacaggagatttgctcacattttgggatttactgatgaggatatctctagagacaagatcaagatccatgactttcgccctcccaccagggctgaagccagggatcttcacatttctgagtcagatgaatactggaaatgaacaaatctgcacaagtattataggtacctcaactctctcttcaggatgactctcatccccaaagggggaaatcagatgaacatcctgggagaaagtaaagttttgctttccttcatgaagccaaatagcactgagagcttaaatgtctttgacatgatttggcaagagattatacatgcatcttgctttcctctcaagggatgtctacatgcccccttcatcatgaaaatgattgaagtggtgacccaatttggatatgaaaagggcacaagacatctctcatatacccctttttggattgacccaaataatccagcacgacggttgaggaaggct

SEQ ID NO: 160212 - DNA, 557 bp, Zea Mays
gagacacctgtccccgtgcccaatttcccttaatgcgccatgtgctcggccaatttcgccttcgcctgtgctcggccgcggtggtccaccgtgctcgcgcggtggccggccgatttagcccggtctagttccccggagtaggtccctgtgtcacccctgcctctgctgaagctagcccaggccttagcgcgccttaagccccctccccgtggccggaatggctcaccgtagttactccggcccgcccgagaccttctcaccgccgttctcccttctccgcccgtggattcatggcctcttccccgccattgagttcaccgtggtgccctctccctctctgcccaactccgatgaccctggaccccctagctcatgcctgcctcaactccggtgacctcaccgccgtggaaaggagcggcgccgcctgtagccgtctgtttcccctggtctggtcccctccgtccgatcctgatcgcacggcctggatcgagggtaccgcttcgtgcacgcgcgccctgcgcccttggcctacctctgatcccctccgtccgatcctg

SEQ ID NO: 160213 - DNA, 964 bp, Zea Mays
ctcggcggcgtcgccagaaacgcttcgccgtcgattcgcatggatccataaaaggcttggctctcccatccgtcgtcgccccatcgcgttgtccctagagaggaagcaaggcacatgaccgccgtctccgggtgggacgacgagtctgtcctcctcgatgtgatggtcgctgaggccaccctcgcctgtgagtcccatcgcaagaggcaggcctccacctgctccaacgatgacggcaccggatccaacaccaaatacggagatacagttgacaggtgcgtatgttagctgttgtggcatgctggtctgattttaggccaccgtctgcgcctggtttcaactttcaagtcatagatcggtgcttattctgacgcctctcctacagcagggctcctctcttccacgatgcgaaggtgacttgtaggtcctcttctctcccttagattgcactcaaaactagactctaattcctatgtaccggaaatagtataatttcaaatttcataattactgaagtttttttatcacactttaatatttgtcaacaggtgtacttagcaatggtgcaaatcatgcccatccacgagatcttggcctcatcgccgattgagaagatgacgttgcaaatatttcagacttgtagagccctcgagcacctccatctcttgttcagttgcttatattagtcatatgttccctatgtttaaatttgatagtagattgaggcaacatataaacttcaggtcaaaataagaagagataaaggaagaacaatcaaatgagaaaccttttcagtcagtatagaatgacatcttttttctttcagttcaggttcagcgacacatgcatgtaagaatacattgcagactaatctttgttgtggcctgagtgtgaattattttatttttgaaaaaaaacagaccaccaaggagccaccttcctccaatggtgtggtgcaaaaaca

SEQ ID NO: 160214 - DNA, 685 bp, Zea Mays
gtgacaactccatcaaggcccatctattccaggtttctgcatctttagcttcactataggattctgcatctacagcgataccaggctttttcagcaaggattcaacatcatcttgtgcaggtgagttctcagcatcaaggtcttccgcaccttttccgtcgctcaatgatggttccagtgatttctttgacaaatcatttgcgtcagtattacccagagaaggatcaaaccaaccactccagcctcctgtttcagtctcttgtgaattttcttgcgtagacaatttttgtctactctcctcgtcttttgctaaccactcagaccatctaagagccccatcttcccctattctggcaccaccactgttctagaagtgttcaaagcgcctttgtttactgcttgtcatcagatacagagctaaaccaaataagataaactccatttttgtctgaaatagcccagttgctaattcccgatgtcctgtctgccacttaaattgccacaggttaacaaatatatccactaaccccacttctagctgaactaaagaagaagatttcaaatccatgttttcattatcctgtgtggaaaaaaaacgagaaaccattagttcataattcttaggggtataggaaacagacaaagtaatttacaaagaaatattgaatttaaacctgcatacata

SEQ ID NO: 160215 - DNA, 1125 bp, Zea Mays
gagcaagcacaacaacttcttgatcaagggcatcctcctgagggaagttgacagcttgcgggataacgatatcgttgaaaagacccacagattcatctgaaggaaggtcctcaagaccggagaattggtaactgaattgttcctcttcattgttgactaaaggaacaggagcaggcggttgttcttgctggacctgttcaaccggccaaggatcccaaccatcatcagcattattggcattggcatcctctaattcaatttcaccattggggggatgttgaggtcaaaatggaaattgggcacaggttgccccaatccaaaaaattccaccggaagttgatgcccattatgagggtacggaggtacaggttcttcatcctcaggcatgttaccaagcatgaactgctgcactacgtcgcactaaacagtccaggaaaccccatgaaaacctttagctactgaaaacacaataaactgtggaacctcctgcagagaagtcacccgtgctctaacaagcaatctagtagcattagaaatatctggatcccacatgagcacccgaccaaaagaaccaatagcattctgaatgtgctcgtgtgaccagaaatccaagggaaacccaaggagcagcaaccaacattcatgattaaaaaataatgctcgttgattccaagccgcattgtgcctaatcacagtgaaagtaaagcccaaagcttgctgcggacccatggccacgagattgtccctatcaaaaatgaatcggaacctcaccaaagcctgacccaagtgggagcgctaaacactcctaatctgaacatgtctaatctccaaaaggtactctcggacaatgtcagcaaaaaattggaaattgacctcatgctcaggtagtggttggaccaggacaattccccaatcatcatgagcggacggttgcgggcgagtgacagtacgtaccataatctcccgatgatcaatgggttgcgccgtgaagccatgagggagaaaagggcccggatcaacacgatggaaagccattccctccgagaatccagaggtcgagtccttttggctcaccgcacactcaccacgcaggcgagggcaaagcaatggtgggattgaccgcgg

SEQ ID NO: 160216 - DNA, 344 bp, Zea Mays
gtggacaatggtgatgacgtgcagggaccaccatcattgattcctccggtgcacctgcgagatccagcctcgcccaaacgtggagggagttcaaccatgcaaggagaacaggggatcaaggttagttgtgtcgacactcatgtgatcgtcgctagaggtggctaggtctttaccaccgtcgtcagtggccatgcaatggatccatcggctttgagggagcctgctgtcatgtatggttgtgtggtgtggagggtgcgagaggaggagaagatggagatcaatggtaaagcaacaaccaacattagcatcggtaggacagtggcgtagacaaggggccatccccc

SEQ ID NO: 160217 - DNA, 540 bp, Zea Mays
ccactctcgaactgagacgtgaaattagagattttagataatagacataatgtaatcacaaggtaggatagagtgatgagaagagtaagggagatgacaaacaaaacacaacaaaggatagagttaaaaaaacttgcaggtaacaaagaagagggtacgaccaagggaagagtaggtacagtacaatgatcagattgagatggaaaagagaatattctaaagaccggtataagataaacatcaaggtaagatatagaggtgaaaaggataaaggtgataatgatgaaaagcataaccatggacagagttaaggcaagactgacgaagtgaagaaaacaagcaatggtaatataggtaagattccaacaaaatggttgaagtaaccgaaattattaccgagggaagttataaagaaatgatgagatcatcaacgatgtgcgaaatagaatggacgttcatggatcaccaagaaataagggtggtcaaaagcatgttaaccggaatgtcttaaacaagcattgagatataaaggtaagcatg

SEQ ID NO: 160218 - DNA, 307 bp, Zea Mays
tggcgtcaccaagctcctgtaaaaatttcatattttttggacacccgaacgaaaagttatgcccggtttaaggatggtacctcaagttatgtttttgggaggcacgactagaaagcggcggttagggcaaaacttccctatctgcaattacagcggttagggcaagtcgattaatggggtggatcgacttgtgatctgggtaatggtggatgggatagcggcgaaggtgcagttgaactacgacgaagatacaacctaaaccagcaacacgactcgaccacggacacgaactgaacaaagccaaact

SEQ ID NO: 160219 - DNA, 588 bp, Zea Mays
tgggtcgaggagcattagtggcatgtaagagtgctgaaacaagagagcagagggcaagaacggacctgaattgcactgaccacggtgagagcttattcacgatggcggaaaaatagaattgggggaacttattcaggggctctggtgagtaattggtggcatgagcgggtggattgggtgcttgaatacctaacggagccgagggtgtgctcaatttatagagcccatgagcggtggccagtgaatttgaacttgcgcggtggcggtcggagagaaggaggtgcactagcgcacgcgattggtggcaattaccgtggcaagctcaccggcgatcaccggatgggctaacatgagtcacgacggtgtggttaaagtgccgaggcacgtggtgcaaggctgcgaggtgtataactctagcgagtgtagatctgaagcggtcgtgagctaagcgaacacggcggccagagtgaacagtggccggagttcatccactaggtgatatttcttactccctctgcgttatccaactgcaccgagcatgaatcaccatggcgggcgcgaatccaggcgcacggtcgccgacggtga

SEQ ID NO: 160220 - DNA, 709 bp, Zea Mays
actttgtccagttggctgtagagatgatcaacatcatgttctctcggttccagttaatagtgaacaagacgcgcgcaaacaaggcacaactgacctatgatgatcatgagagagcactcaagttactatatgctctagatcggagggttgggaggtaaaggtctcagtgatcatcaagtcgcccaattatgagactctcaccatggatgagctgttcagtaagctcaagtccactaagattgaccaccagactcgagccaagattgagaaccttcgtgcatccacaatggccctggtctctggaggtggttcttcttctaatccttcacccgctttgtttgctttatcttttttgttgaccatcatagaggagtaggtggagagccttaaggatgaggagctggtgcttgtggccagcaggttcacgtggtttcacaacaaccgctagaacatgtggtgtggcgagtacaaggatggatgttataactacggtgaccctgaccacttcatcactagtttccccaagaatggtaagccggaggctagacagtgcgaccaccactctggtcgacgcaagggaaagtgcaagtacaccaccaacgagcacaagtccaaggggaggttcgacaaggaggcactcaagaagaagtacctctagaaggccaagttgaaggagtgtgccttcctcgcctcccttagcaaccttgac

SEQ ID NO: 160221 - DNA, 523 bp, Zea Mays
gttatattcgcggcgaggaaagatgtatgcattgggtaacacgacacttaggtcgttgttgtataatcaaataaaggatgtattattgggcttgagtcaaaatgtggggtactagtggtacgctaggcaggcggtgtccaaataaattaaccggttgatgtggtagttgtcgtgcgtgatttattgttagtgagtagtgggattacgagttatgtaaggattatgttagaaactagtatgcggcgtgtaactgtgttcgtgtggtgaatagtaggtcagtaggaattgttggtgtcagtagaaaatgtagtcttatggagttttacgccatgtgtaaatgcctccatgatagacccctaaaaatgtgctatttaggtgacttatgtgttaactaattcaagttgagcaatggttgaaaaacactgatcaatctgctccaacccatgtttttgagttgcgatgtcaaaaatagtttgctaagttttatactatgttggctaacttctgttaagaaagagtcgat

SEQ ID NO: 160222 - DNA, 1044 bp, Zea Mays
gtccaggctggttcaaatacaactcacccaattcagaatacgtaatactgcctcatacgtgtacggtatacacacgtacacgtatggtacgccacacatctagacccactctggccctcggacgcggctgttgacgtgccgtttgcgtttgcctcgcacgcctgtgtcttgagtctgaatgtgatcttcttctccctctggcaaggctgaggtagtatctgtagtggtaacattcccctccccttgaaaattcgcttgaccccaagcgggtgccattggaaaacattggcgcaaggcttcgcggtcttcccaagttgccagatcacgaggtaaaccggaccactccaccaaaacctattgcaccaatctattacctttagtaatgccacgtgattgaagaatctgcaagggaaaactgtgctcaggtattgtggcaggaatatcagcagaatgggtgccatggaaaccaacagcctgttttagctgagatacgtggacaactgggtggatacgactggtagaaggcagctgaagacggtatgctactgccccgacccgagcttgtaccatgtaggggccgaagtatttgtaactcaatttctgatgagcacgcggcatgacggaagactgaacagagggttgcagtttgaggtacacccaatccccaacagaaaaaatacgttctgaccttttcttatcagcttgacgtttcatgcgatcttgggcacgaagcaggtgctgacggaccaggttctgcatagtatggcgctcatgcaaccaatcagataaatcagatggtgttgtggcatcaactgtcaagccaagtgagcgtggtcgacgaccataaagaacctcaaagggtgaacaattgagtgctgaatgatgactggtattataccaaaactctgcagtaggcaaccaagacttccacttctttgggcaagcattcacgaaacagcgcagatatgtctcaaggcattggttaacgcgttctgtctggccgtccgtttgagggtggtaggaagagctgagcttcagatcagt

SEQ ID NO: 160223 - DNA, 497 bp, Zea Mays
gagggacctaaagcacttatgtgcatatgctatcgaattgttctccaattttaaccaggactgacttatgaatgctacttgcttccaataattattgggctgcgataacgctcatataagacctctaatcgatcaacgagacatttatttatccaatgggaatggaatgcgatacttgaccaagcaaggcatcaatccgccatacaacagaaaccatgccgacacagatggacttttactagactcatcatgcgcataaccttgtctcgcatacaaccatatggtggcgtgcactcgagacacttcaatcaatgtggcgcgaccactaatatatgaactctgatactcatgttttaataattcatcctctatgcaactagcattttctaaactactcgtcacaccaataaatatactccctatataatcatgaatcccatcacattgcataaaacaattatagttttcgcataaccacatatcgatacatttcccaa

SEQ ID NO: 160224 - DNA, 366 bp, Zea Mays
tgcaaaacacaagttaaacaactatgactaaccttagaaaaggctgaccacatggttgcactgctcggcggcgctggtgaccatcgaggggggaaaaccggtgttcttggctatcgaaggtggaacggcggaaacaaagggtggcttgggtgtgtaatgaagaggtgggactgagcgtaggctcaatttaaaggaagtcaccatgatggtgggtaatttgatcgatgactcacggcggcgatgatatcccgaggagctccacgttagcctcaacggtgtccacaggccagtaacgtggcggacttactgcgaaccctttacggcggttcaatacgcgagcctccaactagctgcatggatggccgg

SEQ ID NO: 160225 - DNA, 428 bp, Zea Mays
gcccgtggtccccgacggtgcacggcgcggcagagctccggcgagcgcgtagaccggccgaacagggcaacggctggcgctcagcttcgacctaaaccaaattcattacctaacaaacgtttcccctaatttaattgtgcaaatggtggcctattctatcctgcccacgagaaccgcgaaggccatgagcatttgatcgcgttcccgatgattggtggtctctcagttcgaattggtgactcggtaagcatcacagagctatgagagtgctcaaacgaggaagcaggggacagggactgaccggaaaggggctggccgcggtgaagctattcttcgcggtggcggcgacaaatttgggggaagtttgaaattccagagctcgggtgaactattacgggtgggagtgggtgctaaggcttcacgatgac

SEQ ID NO: 160226 - DNA, 564 bp, Zea Mays
ccttctgttgatttggtaagccgactcgaaatgatcctcaggggtaaagtttcaaacgttggtgctccagtggcatactcggcttggaacctaccttctcccaaagctttcactctttttgtgtccaatccgcccgtgacagatagcaatttgggtcttagagtgcgaccctctgctgaagaggtccgttccttagttgcttcgctcggggagatacctgatgatgaacgacagatttattttgaagtgcccctgaatcctagtgatgcagacataaatgacatgctcgatctgctagctgaggattcatctgatactgctcctgatggtacattggcagtggtgccccttccagaggttgatgcgaccttggatgtctcgaaacctgtcagtactcgcccgaggcgccctagccgaaccagtcagcccgagccttctgctgatgaacagaagaagaaaagaagacgcctccggcgagtgtccagctttgacgaggatgccagcaccttagctcctgctgccgaagaaatgactgcaactggccttgctgacattgatcccaat

SEQ ID NO: 160227 - DNA, 416 bp, Zea Mays
tgagcatctgcacatcgtgctttagcgactgcacgatcattgtctttatgctaagttgtctaaatgtgaattctggctgaaggaaattaaatttttgggtcacacaatatctcaggatgggatatctgttgatcctgagaaggtacaagaggtaatgaattggaaacccccaactacagcgaggcagattcagagttttctcggattggcagggtattatcgacgatttattctggatttctccagaattgccaaaccaatgactgaactgttgaagaaaggagtcaagtacgattggagccagaagtgtgaagaagcctttcatacgctaaggcaatatttgacaacagccccagtgctggctcaacctgataacaccaagccctttgaagtttattgtgatgcttctggtactg

SEQ ID NO: 160228 - DNA, 546 bp, Zea Mays
gttggaaatgtcaattctcagctggggctggctcgcgaggtgctgcacaggttggagatggcgcaggacagcaggccgttgtcctcagatgagctatggttgctgcagaaattgaaacaacactgccttgtccttgcttctttggaaaggacagttgcacgcttgcattcccggttgcactacttgagagatggagatgccaacacaaaaaaatttcacctacaggctcgcttccgcaagaagagaaattttatttcccatttggagaatgaagggaggacagtcaccagccatgaacaaatgcaggaggttctggatgattttttctccaatcttttgggttctaatatccagagaccatattctcttaacctagctgcttgccacatagacgctattgatttgagttccctggaggcacctttctctgagaaggaggttcgcgacactattggtgctctcccatctgataaggctcctggtcctgatgggtttactggaaaattctacaaatgttgttggcatattattaaatcagatttgttg

SEQ ID NO: 160229 - DNA, 518 bp, Zea Mays
gcttttgtttgagcttggtatctgttgagggcctgcagggcgaagacacgatctccgtcgatgaggtccttcgaagttggttagtctacgtcggggacggctgaagtgcttgtccgtggtgacccatgttttatttcctgtggggtcatggtctccgatccatatagcaggcggaaaggagtgaacccagtcgcccgacactcggtcgtgttcagcgcctagactgcttcaggtagcaggtcgacccatttgcccttcttgtcatcgagaagcattttcttgatggccgtgaaattttttccgttggtgcgctccacgacgccattggattgtggatgatatactgaggcgaaggcaagcttggtgccaattgagaagcagaagtctttgaagtcctggctgtcaaattgtttgccgttgtcaactgtgagctcggacgggactccgaatcggcaaacaatgttttgccagaagaatttctgggcagtcttcgatgttatcgtggatactaccctcgc

SEQ ID NO: 160230 - DNA, 986 bp, Zea Mays
tgcacagtagctctaagttttttcaattctctttcttgactatacatccatcggaactgcactggttctcctaccaatgcttcataaggtaagtgcactagcaaatgttgcatcacattcataaatccaggcggaaatactttttccatcttgcatacaagcaccgcgatttgtttctcaaattgaatcatcaatttctttgagatatgcttagcacatatatgtctatatatgtaactaagttcagcaatcatcttccacagaggaggcttcaaatagccacagaacattaccggcataagtctttccatcaaaatatggtaatcgtgagccttcaaaccatttaatttattagtgtcgaggttaacaatacgttttatgttggctgcatagcggtctggaaacttcaacattttcaaccatcgaaatacttcttttcgctcttccggctttagacagtatggagctcatggtgtcctctcctttccattaggatttaatttgacctcaaggctagggcgatcgcaaagattagctaaatctttcctagcattgatgttgccttttgttttacccttaatgtttagacacatgcttatgatgctttcagcaacattgcgctcttggtgcatcaaatctatgttgtgtggtaaaatcaataccttcgcatacggaagttcccagagaaaacaaatatgagtccagttgtgatcttgaccatagccttcaaactcatgaccttctgcagccctttgaagggcacggtgttgtatcatgatatcttcacccattaaacgttttggtggaccgtctttaacttttatgcctcttctaaatgacttcgtatcatttcgaaacaagtgattggatggaagaaaccgtcgatgacaatcaaagaatgagacctttttaccatgctccaatcgatatgcttgtgtgtcccccatgcatatgggacaacacaatcgaccgtggacacaccagcc

SEQ ID NO: 160231 - DNA, 1136 bp, Zea Mays
caggtggcatgtcgggcgaaccttgaagcccggtcgtacgctaggatctgggctgttgaccaaggtactggggcccactagccgtctcaggagcctcctagctcctcgtgttgcttgtcatctctcgccagtgggtttcgggtggcaacacattttggcacacccggtgggacttctatgtcagcatcttcaacatcaattggccaaatggcaaaccctcagacaaacactcctggactggtgcaagactggcccatcatgtatgcagagctgcctccataacaccaagcgaactatggctcttttcgaagccgacctcatcagctcatttgagaggacccgcaaccatggcatccgatggaaggggttcttgcctaagggcactgtcaacgaggtgggtctctcggtgccctcaaaagagcgcaccaaggctctgcgtcaggaagtcaactatatggtgtctcattcgctccattgccactcttagagtttgatgaatgcattcgaacgtgtggcaatagtactcttaaacacgctcggttctaggaagtcacaaaggggaaatccctttctgaaccaggcggcccctgccatattcagtcgcctccctagaggcacatccgctcgcttcgccggcgtatgttgtttaccagacaggtggtggtcctggagattgtcagttcttcaatgagtcgcctaaccacatcccacacaggtattcgtgcatgtatgttccatatcataccggcacaacacaaccaatgcagtctagcgtagcagaagtttctagagtagacgccgagaaggcatggttggacaaatatgctaccaggccgagtcatgagagcttggccccatgagtcgctactatagatcagatcaacattattttaagggatcaatttagaatgatctcgaggtggagggcaattagctacaccaagccatatcccaatgagtacgaccttatccctccaccacccaagtatcgactccctgagttcaccatgtttaacggatcggaaggagctagctctattgagcatgttagccgatacttgatgcagcttggaacagtctcaatatcagatctgttgtgggtgaggttcttttcatagtccctcacagggtcggcc

SEQ ID NO: 160232 - DNA, 319 bp, Zea Mays
cagccttcgggggtcgaaataagaaaaggttgaacatggtatttgatgccattggcttcgtatatcctgactattgctaccctctacgcgggcaaggggtaaaaagaaagattgctgcttctggaaaggttgctgcttcggccatcacagctgagccgaagggcaagaagatgaaggttctgactcaccgagctcgttacattgaaccggccgtgatacctgaatttggcgaaggggctttttcagctgccgagacaaaagaaactgttctgtctgtgcagagcactgaagagccggttgtaatgccaaagttactttc

SEQ ID NO: 160233 - DNA, 445 bp, Zea Mays
gtctttatccctttatcgggattaacaaattttggtgttcaactcagactttatttcttctagaaaggttccatcagggaactgtaatctcaactagtagatattctctctacacttgagaatggtcattcatcaggaacgcattattcagtatgagatttatatgttgcatatttataattcaagaatatgagtcctccttggatctcatgacagatcttctgaaccctattaactgcatagtttaattcatgccatttgccaaatatatattacatagcggaacagtgtttattcaacacatatgtgggaggggtctctcacaagaccacttgaaccatcgcattcaccacacattatttcatcagtgcccataatgtccgaacttcaagctcgtgactttcactttgcgattattggttcagcctcgattgcatttatcaat

SEQ ID NO: 160234 - DNA, 568 bp, Zea Mays
ttgcgaggataggcggaggcgctaggattttgcgcatctggtcctaggccagcgaaggaggttgctgctgcttcgcggcccggtggcagaggtcggtcacgtgctgaacggcgagaaacagaaggaacatggtggagcagcggccgtcaatggtggcagcgggatctctctgtcgtctcgtctcttcggtgctcaataatggcatccccgcccatggcaagcatacccctaccagatcctatggccagggaagggtgcgactggtcctatttatacgcccagagcattcagttggaagggagcgtgcatcacggagcatgctgatgatcccgggttccgttttgctggggcagacatgggggaagatgaaggacctgacaggggtggaccaactgcagtggaacaggcgcgctacgcagggggaagaaatggatgagaaggggtcccgcgcgtcagtcagtaaagaatacctgctgtttccgccgacgtgcgtgatgatgagctatccagtgggcccaggccgccagcggctgaccagtgcgcacaagccgagcagtgggggtggttg

SEQ ID NO: 160235 - DNA, 414 bp, Zea Mays
gggggagttgggtcgatgacgtggaaacaagcaggggtgacgacgtggggggagtggggtttgcatgcgtggggaagagaacaagcgagggtggatgtgtggggaggagtggggtttgcaaacgtggggaagagcagggaatggggggttgaaggtgtagccttgtgggggaggagagggagacatcgtggagaggagtggggttgatggcatggagtcgggtagaggcgacgacatcgagaggagcggggctatagacatggagaggacagaggagtagggtcgtcggcgtgggaaggagcggcggtggtggcatggagatgagcatggcgacgacatggcgagtagacctgacatgttgtctaatttgacttttagttttcttagtccatatttcaaggaatcagagagtag

SEQ ID NO: 160236 - DNA, 1446 bp, Zea Mays
gttggtggagcataaggttttaaaccttgaggttgggggttcgagccctacaactcgcacagattttttttatcttttaaataactcattttttaaataactcattaggtatatattatttagaatgcaggattattatataaatcaatacatgaaatttgtagtctcaccaatttacttttataaaaaaaacatgtgaagaaaaaaaaaactatttccatttgcacgaaaacgaacgcatgtgttgcgtggtatgggtgggatgggtgcacgaaaatgaacgcctgtgctgcgtggctgtcttccgtgccatcctattccccaatctatagcgtagtagcaggcttgcatccatgcattgcatgcacacgcggtcggcaggtcgaccagctagcagcaggctagtcgtgttcatcgcttgcccgagctttcatctattctattgcctggattattgctatcgacggacgatacatggctgcggcggcatgattaagaggccacgcgagcgaggaataattagcaacagcgctgctcagctcgagtgcgcccgaccgggtctttaagcggcttcggagatctggggattttctatcccacaagccagcatgtggggtgctcggttcactgcgcttgttcgttctagtgcaggagggggtgggaagggaacgggaaaagagggcgcgcttcattgaattcagccagcggccagcgcggagctcgcacgtcatggcctgcctgcaggcgcaattcattcccttgttgccctcatgcaaggggcgaaatgatgatgataagctttgcgaccatccatggattgggacacattttggtgtttggagctgtaggctgtagccggggaaaaaccttgcttggtggagcagtggcgacacacatgcccactttgagagcaaatgcatcctttgaaaagagagagagaggtggtggtgagtgttctctgtccatcttgactcagtgatccagagcttattatgccagttaggctgttactgctctggagactatgcgagtgatgtgacgacgacaatttttagagtactagtgtatactagctagctcttattaacatgcatcacgaggtcttcctatgctagagctggagctgagttgtgttggcagcagcagcaggtgattagtttattactggtaacgtccttgtttggccgaggtgctccatcatttgactggaggctcgtgcatgtgttggcgagattcctcctgccgacgacgagatctttgccctgctgtgcacgaaaattcatgtattgatttatataataattctgcattccaaatagtatacctaatgagttatttaaaagataaaaaaaatctgtgcgagttgtagggctcgaacccccaacctcaaggtttaaaaccttatgctccaccaactgatctagatggctttgtgctacttctttg

SEQ ID NO: 160237 - DNA, 550 bp, Zea Mays
actggcaggcagcacctgctcctgctctggcacagtgccgccgccctgtctctacactctacgtaccagcgcagacatggtacgacactgacacgtaaaccgctgcactgcatggctgcatcgatctgctgcatggaggtatactatgcattttttcttcctgctgtccagtgtttcactgtacgtacacacatgcatggttccaatccatctttgctgtgtgtatagtagtattagttgcgttgtacagcagcacagtgccgttgttgtcagtgtggtcaccggctggccgtgaaccatccccacacacagccacacgggcagagagactcatccacccacccatgcatcctctagtcagcagacagcaccatgtcatgtgtgctgttccgcagatgccaccgggcacctccgttcacctgcctggctctgcctctcgctgcctgcatccactcgatcttgcatggaaccatcagccatgcagcgcatttggttgaagtgcgtggcattagcatatcacaactctctgcatgcatgttgtgaagttgcc

SEQ ID NO: 160238 - DNA, 468 bp, Zea Mays
ggcggcgcgaaaaactgatttgggggaaatcccaaattaaggcgctatggtggacgatttgaggcgaggagcgatgcactgggcgcgtaacaacctagcggagcacgctaaacgctcaatttatagtgatcaacagcggtggtgcccaatttggggaagacacgctggcggccggagagagggggaggtcgctggcgcgagctatcgtggctttcactgaggcaatgactctggcgatagacgagctatctactgcggtctactgtgacgtggtgaaatggctgacgatgtggcatgatcaagggaaacggcgacacgatggtggtggtcgcgcagccatgtcgtcggtgcaagtgggtacgtcaaggctggttctatcctttcccccattgatcttttcacgtctatgataatatcctgcctgagctaagcacgaatcgcggcagacttcatggatcgtggtgcggc

SEQ ID NO: 160239 - DNA, 723 bp, Zea Mays
gctcattctaggaatatataagaatatcatcaataaacaccaccacgaacttgtcgaagtagtccatgaacacactgttcatcaagtacattaagtaagccggcgcattcgtcaaactgaatgacatgaccgtgaactcatacagtccatacttcatgatgaatgttgtctttggtatatctgagggtcggattctaagctgatggtagcctgacctcagatctatcttcgagaacacactggctcctctcaactgatcgaataaatcttcaattctaggcaggggtacttgttcttgatagtaacctcattcaaggctcggtaatcgatgcacatcctcttcgtgccatccttcttctccacaaacagcactggggctacccaaggcgaggtactcagtctgatgtagcctttctctgacaactcatcaatctgcttcttgagttccaccaattctggtccggacactcgataggctctcttggaaataggggtggtgcctagtataagctctatggctaattcaaccttcctttcaggtggcatacccggtaactcctcgggaaacacatctggaaactctgatactacattgatagcctttgatggtttaatctcctcaatatgggtggtgacttggtggcaatttccttttcttgatccagacaagaccaattccactaacacttcttctcctgatagggacactaacttcactattct

SEQ ID NO: 160240 - DNA, 763 bp, Zea Mays
cagttaaaagctacggaaactaacatgaactacataatacatatgtacagtatgtagcgcatatcgcatgacaaccgaacactacatgccacagatgaaagacagatagtgtcagtaaagaaacagacggtaaagccaatttgcagagcaaaggggccagataagtggcgatctttgcattgaaggttggccacaacgaactgcagttctccgtgccgctcagatttctctgttttgtgacggcctcgaacaatctgctacatggtctcttatctgtgatccaatttggtttttggtcttttttccatcctagttaaaatcaaacatgatgaactatactaaacattacgtgtcgcatgacattggctttgaagcggcagttttaacagatgaattactgctcatcattaaagaacgagttaatatcagtaaagaaccgagtggataaatcagagcagatcagtaaagaacggttaactagggcccgttccaatcgcaactgctctttggtgcctagtaccgcagtgtggtatttaattatggttgaacggtatttgattatggttgaactgaagaggtgattgttatcgatctatgagtttgagaatgattatgcacacattgaaacattgattttcaagaatctacaactgaacaaaacataccctaatatgctgtatcaaattacgagggatactcaaatcactgatgctcaaaatattatgagggatactcaatttcaagcataactcactttatacaa

SEQ ID NO: 160241 - DNA, 353 bp, Zea Mays
tatccagatggtcccagaccaaacggctcgcaggtggtcacgaactgggttgtaaacgaagcagccggtagggtccgtttttatcaggctttcatgctattcggctggacttgcagaggaaggaacacacggctcaccctttcctatccacgtaacgtacagctaactacagtgaggggaaatcagaagagtgcgctgagattttgacagagaagcacgatttcagctgagtcactggtttggggagattttcttttcttcttttgacgccaccgtcttcagaggttgtaccgctcacccttatccctttcccaaatattaatacatattcacatgctcatttcgcatagaaa

SEQ ID NO: 160242 - DNA, 835 bp, Zea Mays
tgccggtagatgctgctgctttgacaagtactggcaggcttcgcacctctgaactaacttggctgcatcactttttgttgttggccagtagaaacccgacctgaagactttcccaaccagggtcctggatgctgcatgcactccacattgcccagcatggacctcatccagaagttgctttccagtagctgagagaatacatttcatgaggactcctgacgcgccccttctgtaaagcgtttccccaatgagtgtatagtgagctgactgccttgcaatgcgcttggacctgagtccgactggaccccagcttagataatgcgtcagccgccgcgttgcggtctctctccacatgatgaaattccaaaccttcaaatttatcttctagtttctggatagcagtgcaatattttcccatggaatcattcgagcaatcccattctttgtttatctgacttatgaccaccaaagaatctccatataccatcagtctcttgatgcccagtgatatggcaatgtttagcccgtgaatcagagcttcgtactcggctgcgttgttagatgccgggaataacaattgaagagcgtacttgagttgttcgcctctgagtgcaataaagaggatccctgcacctgctccctgcagcttcaatgatccgtcaaaatacattcgccatacttctgcggtttccgggttatccggtacctgttgctcggtccattctgatacgaagtcaaccagtgcttgagttttgatagcagtgcgaggtcgaaattcgatgtcatgagatcccaattcacaggcccacttggctactctttcgatggcttcttt

SEQ ID NO: 160243 - DNA, 401 bp, Zea Mays
gttagtttgtcaaatgtgcagctgccctttagccatactactccgctgtctacacacgcgcgatcctaagcccttagatcatcatcgaaccacccaaaacacatcccgaaccggtatacgcccctgaccacatgattccggatcaactatcagatttttatgaagcccggtccgttacatccctcggatccaatctcaatggtctgtgttcagtccaagcgaaggggtgtcttattctaatctcaggcgtttatctcaattcggacggcccatgctcatcttcaacctcacgcacacctacggttccttctctcccattctttcccttcgttctctcgtctaccctcagaccggccatggtcctcggtcactagcagcaacccgccggtgatacgccagcg

SEQ ID NO: 160244 - DNA, 444 bp, Zea Mays
gggaaggtctagttaggaagctaaaaagaagaatcagaggagtacaaaagttatgtctgccactgatcaagccagttcggaattgagttgtcgtatttccctctcgctctgtatacaaccagccgtaattccttgatgaattcattcttgcagtgttgtactgatgggtctttgttttcaaatagccactcatttcggtatttcaagatactccatgtcatgagtatattaatcttcatagaaaaaggaacactaagttggtgcttgaggttgccgaggcctcctccggatgagtaattctaggaggggttatgctaattgaattccagcatgcttttgcaaaattgcatctaagaaacaggtgataaagagtttcctcccttcaccatatacagttctcacacgaatatgactccagtctcatgtttttccttctcagcatat

SEQ ID NO: 160245 - DNA, 507 bp, Zea Mays
gccgtgcttgcctcgccggcccacgcggtgatgcgctggaccccggcacggtactctgcctgaagatattcaagggccttcctggtggcctccaccgcctgggggcccggtgccgcctgagccgcgttgaactgccggatctgctcctccaacttcctctccctctcttctgcttcgagctcgtgctcggccaacatctcgcctcgccgggtgagcatttcttcccggaaggtgagatacatctctcgccttgcgaggtctgtctcccgcctgtccaaggactgctccttcgccttgagtttctcctcggcgagggcggcgtcgctggccttgccctcgagttcttgctgccacttttgcatcctctccacagccttggtctgctggacccactgggcttcagggtctggtccagggcactcagcttggcccggaactctgttgtgagggcctcccgctgagacacggcctcctccctcctggtcaccttcttctccctccgggatg

SEQ ID NO: 160246 - DNA, 471 bp, Zea Mays
gaggaagttccggtggacctctctcgcattcgagtggagcatggagtcatcctggaagacagctcggaggaacttctaccgacgcacacccctttggcggagtcactggccttcgcagctaggtcatcgacctcagcaccgcctgcaccagtcattcaagctcctgcacccgtaggcgacgacctagacgactctggggacgacgatgttggggatgaaaacgacaacgaggacgaagaggaacaagtcaacgaggaagccaactatgcccagaagaactacttcatggggtttgggtctgtcaccgaacattacacattaatgttcaatacggggcacttccccaacctgctgcaagacgtgctgcacgcgttaggaacctacacccgacccttgtacgagacaaggcaagtgagcgagcctccccgggcttgctactacatcactcgcattcacgtcagggtgatggat

SEQ ID NO: 160247 - DNA, 536 bp, Zea Mays
taagtttcatcctcactctgctggaagtagggctttcttacgctcgaaccaggataaacgacttgtgtcaacttgcatcacacatctgggccagggcatgtaacatcatttcactggttggtgagaccctcggatcaagacactgacagttggctcaccaggtaaggggtcgctgcgtgtaaaacatcacgttcccatcaaggctccagatggccaacctccagccccctttgaggctcgacactgtgattgtttcaggagtctggagttcatgtcgttcggcatcgagtacgacatggtgctcctcccacctagacaccaggctgacgctcaggagcaaccagacatccgtccccgtcctcctcgccgcacgaggcggagacaaaacaaccgcaatcgcaccacgggtaacgcctcatgccccgtcgacaatcctggtctggctaacgacgcagactccctcgcgagggacctgacgaacatcagcatcatgcctagagcgtcagcggcaacacgcgtcaccccagcaccaactc

SEQ ID NO: 160248 - DNA, 860 bp, Zea Mays
gaaacttttggagtatcggcccgcttcatcagtgagcgaaggtctcagcggcctatgagtattccacgcccagcacgcacatgggtcgacttgtggtgcagcaatagccgggtgcggggatagactgagccgataagttagataggcccgggtcaggattttcctgtaacaccccaggtgttacttagggttttcactcaagactacactaataaacccatcatcacatgtggtttaatttgagcaaaatacaccaagcatgggaatcaagatcctaagtaagtgcaacccatcttagaagtcatgccttggctttatcatgcacatatagtgaggaaatgccgaaaccctaattcaaacccctttttggacaattggagccctagaagtgagcatgaccaaaaggctatgaaaaccacatgatcatgacttgggccaattataacagttgtagtacacttaataccctacaaaaaatagtaagaaagtgaccccaaaaaggtttcagaaaaaccccaaaaaggttcaccaaagagttgagcataaaaggaaaatcagaattttcctaagtccaaaaccaaccctattccaaagatcaagcatgttcaccctttttcaaacttcaaaaccatttgacccaattgacaaagtggtgcctaaagacctctagaacaccctggaaaaatttgaacccaaccctaagtagtttgacatgacttggcacatgttttgtctcggtgtggacagctctgacagagccaacttcccacccccatatctctttaacccgaccacatctccccttggaactaacataaactaggtagctctaggtgcagggaagagatctctcaaaggtc

SEQ ID NO: 160249 - DNA, 1196 bp, Zea Mays
caatttcctagaatttatttggctctggaagaaaaagaaaaagaaaaacgaacaacagtactgggccactttagcccaggcggcccagcaacacagggaataaggtcacgcgcccgcgtacgcccgcgcgcactggcaactttgcacagaggccctcggattaatatctaaaccgaagtaggttcatttactattgtactaagtcgctgacacattgcaaaaatgccctcaaatttctatttcttccccacgagtacccctggccacggcgtgcttgccgccgagcaccatgcgacttgttccagccatgattggcggtggctgtctaaaatggctacggaatggacattcccgacctaaggcgatccgagaacaaccttcaatttcgactggcacaccaagaaagtgttctatccacgctcttggcggaaccagggacgtcgagctcacgttccgagtcgatcatatcctaatttaccaattggctgctacgatgagcaccaagggtactcatagttactaaaacaatgcttgaatcgggcagtgccttaccagagcgggctggccacggtggagctgttcttcgcggtggtggcgacaaatttgggggaagtttgaaattccagagctcgggtgaacgattaagggtgggagcgggtgctaaggcttcacgataacatagcgcagctaccccggccttcaatttgtagccggctaaggaggtggcgcgcaatttggtcggacagtgtgggtggccggagaggggaggtgagctcagtgcgtggaaaaagtgactttcaccgtggcagttgctccggtgatcgtcggacatgcatctagtgagtcatcgcgatgaagtccagcgcttaggcacgtgcgcaacggcggtagctcgacggcggtgagatttatccggtcgaccgacgagctggggaggaagtacggcggtcttagccgcagctcaatccgggcgccagatttttacgtggtcgagcttatctgctgcccacggtgcacgaatcgcaacgagcaatcgaccaccggcgatgagcagggagtgaatcgggatcttcttcagtttagaacttactgtaccatgggaatttcagtcagatgaacctgacatccaaacttggagctaaattttctctcaattcttaataacaactcgtacaaagctctgcagcaaaattgta

SEQ ID NO: 160250 - DNA, 570 bp, Zea Mays
ccgatacgaagtcttgcacagatcctacgctgctagggactagaggtggactcatgtggcctgacttgagttcacatgatatgcattctgttttcttcattttcttcatcacgtcattaatagccttttgtaccctttcgtcaatagtctcttcaagggtccttttcgacttctcgtgtttcctatatgacgccgcatactctggaaacacctctctccacgaaatcttagaagagattccccgagcccgtctagtgtgttcaagattgcctagtgctgcagttagtatgtcattctccctacgaggattaaattcgcccttctttctcttttctgcatattcttgaatttttgtcgaaacttcgcctaccaattctggatgcaaaagtttgccgtcctcagtcaaacctgcccgacctaagatccaacgaatagctcgctcatcgatatcttttaatattgggtccaaagtgccgttagctatagcttcctcgattatcctattccactgcacaactttatggtgatatccggttgaccccaggcgatgggggtgtttgttcatcttcg

SEQ ID NO: 160251 - DNA, 601 bp, Zea Mays
agcgagcattcggcgacttgaggcatgctcgcgggagcgcgtggagtggcggcttgatggagtagatcacgaagctttcttatgcagagcgtgatggcgtgatggagcagagcacaatgcgcacagatgggaggttgttcgcggcttcaagatgaggattgcaggcggcatgggcctatgcggctagcgacggatgggggtcgatttgttcatggacggatgaggctgttggcggcagatggggaaggggtttgttcacggatcccgaatgagtctgctggcagcggatgcgcacatggggtgggagggtggatgagtcggcggttgcgttagaaggagtggtagcagctcgggctgggagacggggacggtgattattggtggatcaggcgggtggagggccgaggcacgctgatggacggtcctgatttgatggctatatatggtcgtgctagattcatggaaggcagaacaaggaggtggcagactacccttgcagccttaatatagtagtatagatatgaggttgctatcaagtctctgttggcttttgttgtttagcatgctgctactataaccatgactgttttcgagcttcggc

SEQ ID NO: 160252 - DNA, 579 bp, Zea Mays
attatatttgagagttgaaattggagagaaagaaaattcaaacagggatttgaatctgaattggatatctaaaatttgaaatagaaaaggaggactaaaggatcagggaagtcacctgcgtgggccaaaacctattaacccggcccaacaccccctcctaattcctctccacggatggcccattactctttcccccgtgactgcctaggagcactagtgcacgcacgcttgctcctctcagtcactgaccaggtaggctccagcatcagattcgtctccctagaacgaactcccacacctatcgtcgagtctgtagcttgctccgtatgtagccgctgtccgcgagagaagtggagtgtgtgggcacggcgcaaagccgaaatcagcgccggtctccgcgtgtgttgagcggccccctcaaccgaattcctgggatcattaagctgggcgttggggactcggttcctccctttctctctccccagtgaccctatcagccgtcgcgggcaacaccaactcgtcgacatcattcgcttcaccagggctgcggtcgaagccttctctctctactcattccta

SEQ ID NO: 160253 - DNA, 583 bp, Zea Mays
gtgctatataggatatatcttttgaatcattcatgggtagctctttcatttgttatatccacaacgattaactctcttggtgaatatggataaacctgcaactttttgtaagtcatgctatgtgcaattatgacattttgtttagtccatgttcacatgattaccctagtttggtactgtgtgaatttcaaatccatgtcgtgcccttttgagctatgaggtgcatgagcaaaaggagccctgaattggtgataacaagtgctctcataaaggcaaaggtatggaaaatggaactgtgcaattttattgaatatcttgaagttccattgatagtgatcatagctgtgttcttgcattttcattggtagcatcgtggcttagaagacttataccttaaaatgatgtttcttttgatgtacctaaagaatcttcttaactttgatgtgcttagacatgatcatgttgtttttcaattagtatatgtgatgcaatgatagttaagtatgaagcatgtctaagctgcgtgtaaatttatacttcctgtgagtattcaattggcttaggtgccactgaggcatgcatt

SEQ ID NO: 160254 - DNA, 477 bp, Zea Mays
gtgagcctcctcccgatcgaggcccaacccatccccactgcgaagcagaaagctgagttctactggcccaaccacgcggcatggttgctcgccgcgatcgacgcgctcagcgacgcgaccaaggaggagctggccggtctgatccgcctcttccacgcggttggcgctgctggtgtgcaggctctatggggtctggatgtcccctgcggcttacgcgtcgccactgtggatggtctctgaacgacagttatgtacgattttccaattgttggaagtggagattatcagtagggagaagacgatggtgcagaccagattctttgtaatggaggcatgtgaagtgatcatggggttgcacagcgaggggctggtgttggggtgcctcggaccctcggtctggactgtttctgcctcgttcgctttggagtttggacactgtctgcttgatttcaatcaggcgatggccttgtactggaa

SEQ ID NO: 160255 - DNA, 644 bp, Zea Mays
aggaagaatcaaatcacaaataaagagtaagcacaaagaacatgagagatttgtttcccgaggtttgactccagagaacatatgtccctgttgaggagtccactatggacggtcttcttcaactgtttccctctctcaaacaatcacagagaccgatcaaggtttcttctcttttccggaggacaccaagtcccacaaggacctccacacaaagaattggagtctcttgctaacttgttacaatttgagaatgaggttgggaatgagaaatagactcaagaacaactacaaaatttgcaacaaccgaagaacacaaggcactaagtctctctaactcaaatcgatcgaatatgacacttgtgtggctttgaatgcttagaagatgatgaaatcaatgtatgggtgtttagtgtagctcttgtgtcttaaatgagctggttggggtgtatttatagccgcaaccacccccacatagttgttggagtgaagtggataaatctgcatagttctacatcgcaccggaccttgcaaagtgacggttcggtgacgcactggacccctgtcagtctgctatagcaaggagccattatgacaggggtaggtattctcaagggcactagaccagtccgacgtgccaacaaacc

SEQ ID NO: 160256 - DNA, 652 bp, Zea Mays
agcacatttgtgcccatttcttaagtctgaaaatagcaagagagggttgactttagggctctgtaaatccaaaaatatagagaatttgcctagggtcaccacatcaaatctatagagctatgttaggagaacaactttgtttaagggattaaacattgttgttatgaaaactttggaaaaaatgtgcccaaagtcgtgctgtcagactacctaaagtctgaagtcagactaacagtaggatttcatgaacttagagctcaattctaagcatgatccagtaggaatctgactagtgatgctataacaaaggtgaagatggttgataggtctacaactttggtgcagagggaggatggagtcgtcacataaaatttggtgaaaatccgccctgaaggtgcttggtcagtcgttctgaagaaactaggcgatggtacagtatcccgattagactgtcagctcagtcagctcgccgccggcgatccgcgtccagatttgtgctggtcgccaggattcgtgctttgcacgtagaagatttctacgagaaggtaaagatctcacgggggggatggataggatcacggattggagtttatcatcgtgcctatagccgttgcgacgtggccggactaccggcgtcgccgtggaagcgccg

SEQ ID NO: 160257 - DNA, 739 bp, Zea Mays
gttctggaaacaacctccagcatatgttggtgaatgagggcttcacagcaagttaaatttttaagaagaacgagaagctgaattatgtaaacatgtggcaagtagggatggcaaaaaaactcatggttcactagcttgctcgactcgtggtcaaattagctcgactcgacttggctcgttaacataacaagccagcttacactagcatttgagctcgttacgttaatgagctagcttgtgagccagtttgtgaaccacacgaccaagcatacgtacacacagttcagattcttctatgtttctctcacattatctcccatctaacttgagcaaggcaaatgccattgatgactgatcaccacacccatgtgagaggcatacttacatttttaagataaaaacattaggacttttcctctgtgtgacttctctactgccatccatgttcccactcatatcttctcactctcacctcaagaagaccatacgccgcctcccaagttccaagtctaacacgtgccaggtcaccaacatgcagggtcgcaggtgatgctctccatcctatattgtcttgcataagtggtgcacttagccttagctcgatcgcatgtcttctctaccttcgtcgtctgttacctatctgcatgttcccaagccgaagacctagaaatatcgagcatggatccaaggatgtcactgaaaagactagcgacattatcttcggcacgtccgatacctg

SEQ ID NO: 160258 - DNA, 801 bp, Zea Mays
gcaccgcaagtgtttggccctgaaagtgaaatgagcttaaccattttctaggtggcatcaaactcctgctgctgtgtagtacaaaggtggcaaggagggcactagaatcgaaggtagaggccttgtcaaccatggtgagctcctcaagtagaagctcattacgaatggtctaaaacagtgggaacgatgtggtgcacttgatgaaggtcttcatgtgctcgaaccacttattgagactatgaaagaggttgaggacaagcgtatgatcgggcatgacttcgacaaggttctctagggcattatccatgcccttcatcttgtggaagtagtcactgatggagatatcaccttggatacaggcgcaaaaagtgtgttgagatggagggcatgagtctcctggttgcctaggaagtggtgctcggtggcgaactaggcatcctaggccatgccatcatcaaggagaaccatatcttgtatctcaaaggtgattgtgccaaagagtaaagatagtacaatgttctccatgcaccataatacaggagtggaggccttagcagtgtcaaagtggatgtggttgtcaagggcataacgttttagggtgaggaggacgaggtcgcgccattgagggtagttggtggagaggggttcaggacgacaacgacctcaaactttaggacaatagtggtagattgttccttctctagggctttggctatggcgaggatatagccatgggcgtcagcagaagatttggcaaccaagttgacgctctcgttctcagcggtggtggcttactccttg

SEQ ID NO: 160259 - DNA, 415 bp, Zea Mays
ttggtgtccaacaccttgcctgttttccattgtcgccatgcacattcagatattccaagcaaattaaacaagtcgtcggagcacaggaagagtcggtcatttacccacctccaagcaatggatcgatgtactcctgccgtggtcctagtttggacggatcggagctcagctcgatggttaactagcaggagatggtgacacaggaggacatggactggcatgcatcttagctctttgcaccaaacatcccaaacacgcgcgttgctgcttgacttgcgaggcccatttttgtccagttatgtgcgcattggcctgcactatgacattccccctctccatgtagtgttgctgcttgtctccatgcagtagcacgctgcacgcggaaacaactatgctgtagcacatagttttctga

SEQ ID NO: 160260 - DNA, 528 bp, Zea Mays
gggaggacccaaacagatagatttttccctagagcaagagttcaaatatgggggatagagttccccactgatctaatagttatgggtaaccaggatgtgactatagatgtcatcctagggatgaattgggtaaccaaatatcaagccagtcttagctgtgacaagacaacagtgaagttagtatccttatcaggagagtaagtgttggtggaattggtcttgtctagaccaaggaaaggaagcggtcactaggtcaccacctatattgaggaaatcgaaccatcagaagctatcaacgtagtatcaaaattcctagatgtgtttcccgaggagttaccaggcatgccacctaaaaggaaagttgaatttgccatagagcttattcctagcaccgcccctatttccaaaagagcctatcgagtgtccggaccagaattggtggaactcaagaagcagattgatgagttgttagagaaaggctacattagaccatgtacctcgccttgggcagcccaagtgctatttgtg

SEQ ID NO: 160261 - DNA, 539 bp, Zea Mays
actgcatatatttctggacggggtactattgtggtaataaacggtggcaaaacagaccaagggcggtactcccgactcccgtactacaaggctacaaacaatgaaacagtggcaaaagaagttgagttcaaaatcctgagtaaggcaatccagagacttcactcgtaaatttcaggccatggaaagctagttccaggcttcaacaggggcagagcaaaagaacaggtcctgcctctcctgaaactttggccggttttaatatgggcaaccgcaaaaagaaggataccaattcacagatctctggccccctctcgataaagttgccgtcaaataaacagaagcaccgcaagggcaaggcgagtttacagcaaaaacgcaacggcgcttcgccccatcccgacaaactcggattcagaaaccgcaatcacaaagagcggcagctagctagttgggaatgggaacacacggaacaacggcaatcacaatcagaaacgcccgaacgaacgcattgcaccatgaagatgaaggttacggagtcg

SEQ ID NO: 160262 - DNA, 471 bp, Zea Mays
aggaaattcatgaaagacaacagcatattcggagagtattggagacttgccctgacgaagcggacgttgatacaggacatcgggtaatatatacattcccatgagatttttacgcatcatacgtacattgtttgcatatttctcttttagctggacacgaaccacaatatttgtcaacaggatttctgctttgatgttcgaaacaacatgttgaggaacacaaataccacacctcaacccacatcagcttgcacctttacgagatcaaatatgtcgacccgtttgccgatatttgacgtgacaccgcaaaaaaatgtttgtttagcagtctctgtctcatgttatacttccattttacaattacattagtacaataaatattacataatctactaagcatatacctttgagtagagaggtgaaatggcaacagatgacatggaacacaatgacagtggaccagtctttgat

SEQ ID NO: 160263 - DNA, 1141 bp, Zea Mays
ggcaaattcagaagtggtccttctagaccatctggtgatgttcatcagcattcagaccattttcatcaggtattgcccaaacttccatttccgagatttgctgagggtgatcctgtggtttggttggacaagtgcttggagtatttttctgtctaccaagttccagcatctatgtgggtgtctgttgcttcgatgaatttggagaatattgttgtgcagtggtggcactatcataaactgaagtatgggttgggtggttggcatgaatttgctgcaactgttgtcagtaagtttggtgccgaggcttatcctaagcgttgtgaagactgttttcgtcgcgtcagttaggcacgctggataactatgttcatgaatttgagcaggctcggtatggagtggcggtgcataatgctcaatatgatgaaacattctttgttacccactttgttcgtggcctcaaatttgaactacaggatgtggtgcaagttcaggttcccactacggtggatcgtgctatattgctagcacaaattcaacatgtggtgttgccatatctgatacagcaacatgcacttccaaaaggggatgataaagggcaacaaggtgctgatcttactcgagaaagacaacttagggacttcaggcgtctcaatggtttatgttatgcttgtggagaacagtttgagctcgggcatattgctaaatgtgcaaagaggggttcagctcagttgaattgagtagtggatgaggaggtgtctgaaattttgaccgatgagattctacatcagctagaaaaggaggatcaaagtgggaattatgttgtcatctttcttttcaggcagtttctggtactaacaatgactataacatgagagtgcgatctattatgggtaaacatactatgttgatgttggtggattctgtgagttccatcaattttattagtcaacatatggtgcaaaagttggggttagctgtgacatcttgtccatctgtttcagttaaggtggcacaatggggagtccatgatcagccaggctatggcgaagaatttggaatggtgggcacatgggcatttttatcacactgacatgagaattctacctttgggggcttttgatgctattttgggttatcagtg

SEQ ID NO: 160264 - DNA, 517 bp, Zea Mays
cggcgagcgaaggatgcgattgcgacgaagacggggccattcactctccatcgtacctgggacgcggacgtggcggtgggccatcgtacgttgtacgtactgcgcattaaaatttgtgacgggaaacgggccgggaggacagcaacagcagcatgttgtcactacctcacgtggggggaacggcgtggaatggaaaagccacacagccacatgcggaccgtgacgcgtccgtgacttgtacacgacaggccaagcttgcgatggtatataagttgggcgtgcatatgatatagtagaataaagcttacatgttgaatgatagctgcaaatcccatcggtgtttaggtggggtcacgactggtgctgcaacggagaattcgattgtctcatagtcgcctatatcgtatgatcctgcacactcatcctcaatgactatattatgcagaatgatacattcacgcatgatcaaacttagtaattgttgattgaaagaatggtatggggttgcaagaatatg

SEQ ID NO: 160265 - DNA, 719 bp, Zea Mays
caaatcgtttgtggccacggcggtgttagtcatagctagcgtgtcactctaattgacgttaacggtgagagaaggcaaaacgggctcaaattcatttattagaaatttgcaaaccagcctttgaattcaactagtactagtagcttcttagggctcctttagaacacaggatttcagaaacacgggaataggaaaaactcaggaaatagaatggatgtattttctaatcctataggatttaaaaccagaggaagatgatagaaggcttgtttggctacagcgtaggaaaaagtaaaggaagtaagaagtttgaaatatcattttttttaagtttgaaactagccgttgttgctgcgtgctcacgaggctccctagccgttgcgttactgcatacaggtgtatatatatatgcgctcatcagcttgctgcctctcactctctcatgccaacaacttcatttccacaacagcaagcaaatccttctacaggctacttgattgtctatatatcttgcattcggttgcacaaaggttggttcgttactgtcttatgtgactacgctaatgtatttctaatcaaaattttatatttccacctttgtattaattatccattttgggatttcatttatcttcagtacccatgaatccaacgaactatcgtagatcacaaagtgaggatgagtttgtcttttttgttcttcctaccttacaagtaga

SEQ ID NO: 160266 - DNA, 750 bp, Zea Mays
cactttgtcatcgaccaaatgatttcctcaaaggaaggttaaaatctctgtcctccagtcttcactatgcgtagaggatattgttcgtcctgtgagcctggaatctattcagcaatgaaatctgctaatgcttgggattgaatcgaggacttgtgaatgaagtttatgatgaactcgttgagttctgctgcccactttccaattttgcctaaagcgtatctattccttatgatatccttgagacgttgggatgatggcacagtaatgtcgtagattggaggtaatgtcgaagctttcttgaagccattaggactacatataggagcttctctgtcttgtatagtttcttttagatgggatcaatactttggatatgaagtaggtgggcatatgccttttcacaccttcgcttacaatttcttgaaccaaggcggcacttacagttgactgcgaagctgatacaaagagtaaaagagtagcccctagcgaaggtggagaaagtgttgttagctttattagatagtcctttaactcttcaaaagcttgttgccgaggaggaccccattgaaaaacctctgctgattctaggacctcaaagaatgacaagcttcgttcatcagatctggtatgaatctgtttaaaaaagccagcctccctgctaacctctgagccccttttcttgacttttgtggctctatccgaggtattacttcagttttgcttggattttcttctatgcccttcgttgac

SEQ ID NO: 160267 - DNA, 576 bp, Zea Mays
gcccaatctagggttaaacattgtaccctagggtttcactagtaacatgtcacatcaatacaacttgtttgaaatttttgcctagtgaatggactctaagtgtgacaaacacaggaaatgccaatgcttatgatgttatgatcaagttttagtaacagtaacactaggggtgttacatccttccccccataaaagaatctcgtcccgagattaaaagtcctagggcaagtaatggaaaaggaaacacgacatatctttatttccttatttttggtacaaggcaggggtggtatggggctcattcctttattacaacaattgtatacactttacaaattacatgaggctaaaaaacctaggaaattcttttctaaaaagtcttgagcttcccaagtagcctcatcttctgtatgttggttccaaagtatcttgtaaaacttgagagtttttcttctggtaatcccgtccttttgatctaagacacgaatagggggtgttctgaatatgtcaagtctggttctaaagcaacatctgttacttcaatggttcgatcaggaatccgaagacacttcttca

SEQ ID NO: 160268 - DNA, 347 bp, Zea Mays
cacccacctcgggcgccgtctacccctacgggatgccgcaggacagcacgacgcacaccaccgcgcccgcaccggcggtgtccctcggcgacgtccccatccaggagatccagttcccccactcgccgtccccgcttccgctgtggctcaccgacgtcgcgcagccagtctactcctctgcgccagcacgcccgtcggtccattcgacccctcacatcacagcgggcttcggccatgggggcgttccggcgtcgggaacgctctatggcggcgttgacggcacaattctccacggctccactttctgctccgcgccggctgcagctccagtgatcggcggggcgccc

SEQ ID NO: 160269 - DNA, 791 bp, Zea Mays
tcttatgagcagcaagcctaagcaacttgtcccgaccagacaaagcaactataagctcatctacctcagcgatgagatcatcggtggaaagagatacttcaccaagtgccatgttttagagtcctcctgcattatcaacaaaaaagcagaggatgtttagcttggcctcaacttgcccctctagcctctcatcactcaaggaagaggtagaagtgtcgtcgaagtcgtggtcaaggtcgctaagggaggcaaggaaggcacactccttgatcttggccttgtggatgtacttctgcttgagtgcctccttatcaaacctctccttggacttgtgcttgccagaggtgtgctcgtgcttgcccttgcaccgaccaaagtgatagtcgagcttgccaaccttcgggttgcccttgatattggggtaattggtatgaagtggttggggtctccatagttgaagcagccatccttgaccccgctgtgccactgatttaggctgttgttgtggaaccgcgtgaaccgactagaaacaagagcaagctcctcatccccaaggctttaaacctgctcctatgtaatagacaacaaggaagacaaagcaaacagagaaggtgaagggttagaggaagaacctcctctagacacaagggccatggtgggtgcaccagggttctcaatctttgcccaagtctagtggtcaatcttagtggacttgagcttgctgaaaagctcatatacggtgagggtctcatagttgggtgactctatgatcgcagagaccttcacatccc

SEQ ID NO: 160270 - DNA, 852 bp, Zea Mays
tccataaatttacagtagctaataggttattccgttgcggtaaccttttactctatatatctcagctttatatcattagagtatgttagggacatcgacccattgtgtctaacggcccatgtcggtccaagtagctaagggaaaatactataaaggcgcagtggaggtcaggacgaagggacatgagagaaaatatcagaaccttttattattcatcttcctactttgtctagcgctgatcttcttccccaactctctcttgtacccggatcttttagaacattatagcatcttccttttagctgtgatttccctacttgctgtttccttcccaaactccatctatccagcacttgttgcttgagttatgctttgtctggttcagtgattgatcatgttctatcggtgagggttgctaacaagtggtatcagattcatcggtcctcggatcctcgttccatggcgtcttctccatccatcggcaccaacatcaccgtcacccaggcgctggatcatcaaacacgcgccctcctctcggcgttggacaagcgttttcaggctcgcgacagcaaatgggatttccgcgtcgccgccccggagtcccgcgtagcggattcgaagcgcgttacgttccttcggacaacggcggcgggggagaagacgctggacacgtcgttcgtgcgcgaggacagaggcaaggcgccggtgatgtcgctcgcgggcatcgacgacgcgcaccggtttgagatctgcgcccgcaaggtccacgacgtcggagctctggagtcgaggtcaccgatctcggagtccatggggcccaacctgcagtccgcaatccaggaacacacgaag

SEQ ID NO: 160271 - DNA, 541 bp, Zea Mays
gttcaaccctttttgccccaaccagcaaaaaaatatattgttgtttgttttgatcgtaaaagatccccctccaaacaaatttgagtttagcgagtgaaacctcttaaaaaaatcttgcttgtgttggtgttttcttgtccttgtgtgtttacacttgaatttacacatgcacagcttatagacacccatagcttgacccctaaatcaactaaagcttccttgtgcacttgttgtgtcaaataaagaaaaacaaattgttgttcggtgtctagttgcacaaaccctatcaaggccatgtttctttccatagatcttgtcccgaatcttcataacctttttggtgctcatcctaatcgatctcatgtgactacccctcttttcacctggatctagtaatatttacctttatgaatcatgttgtggccttatcatctaaatctctggatcgtttaatgattctcccctattatctggttatctgctataacccgttctcaagtatcgaatgttgatttacctaaatctcgcatttctgatcatt

SEQ ID NO: 160272 - DNA, 677 bp, Zea Mays
tacacaaaagaatgagttacaactcaaagcacaacaaaaaaagagagagaagagaacacacacaagagcaaatgcagcaacacaacgcaagaaagaagatcacaagaccgcaatctctcaaaattacaagaacaactcagaacaatgctcgaaactcactaaaaccactagaatgcgttgtggcggagtgtaggagtgatcaagtgctcttggtatgcttgcggtactgaaggaggttgccaaggggtccttttatagcccaaagaggcctcctagtaattgctccttccttccaaagcttgctaaaaaatctgctatgctcggcggcaccagaccgggaacataagttccttctccgtgacctaactaggccctttccttaactgactgacaccggaccaatctggtgcacctctggatcgtctgccacgtcagctagtcgttggctagcgcgcggctccgaaaagtagccattaccagcggtccggtgcacaatgaaacttagtgttgttcaacgtccggtgatttttataaataaaaacccaagatttgcgagttcgtacggaggcggtccagtgcaccatcggacctactcggtgactcgcagattagcacattgaagtcctttttcggcaaaacttggttctttcgacttcgactttcttgtgagctttgct

SEQ ID NO: 160273 - DNA, 714 bp, Zea Mays
cacacccgaaggtagaatccacgatttgatctatgcatggaagtggatacgggtccttgggacaagccttattaaggttggtgtagtcgatgcacatccgatgcttcccgtttgcctttgtaatgatgactgggttggccagccatacggaatgatgaacctcttcgatgaagccaacatcaagtagcttccggacctcctcacggatgaagtcctgccgctcaacggactatctgtgaggtttctgactcactggtttggcgtcagggtggatcttcagatggtgctcaatcacctccctagggatcccaggcatctgcgacggttcccatgcgaaaacgtcggtatttgcctggaggaaggcgacgagcgtgagttcctatttctcctccagattgcccgcgatgcaggtggtccgagaggagtccgtgctgatctggatggccttgacgggtccaccgtctgctccagatggctgcacctttggcaccttagaaggcgccttggtaccgaaagtcaaggggtccctcccactgtcattcgggcgagcagtctctgctgccagggcgtgcagcttctcgaaagccgcaagtgcagcggcgcggtcgccccgcacggtgaggaccccagctggggacagcatcttgaggaccaaatacccgtaatgggcaatggccatgaactggtacagggctggcctaccaatgacggcat

SEQ ID NO: 160274 - DNA, 1051 bp, Zea Mays
cgagcaccttggaatccggacgacatagcgaccgcggacgtgagccaatgtgacgcggggcgcgcaagattgacaacagcagcggctcgatgatgctgtcaacggcggcgacgattaatgttgagggcgtgcggcggtggaggacggcgaaacgcgctggcggcggcggatgaacaagaatcgccctggcgacctctgaagaaacgcggcgagtcggccaggaaggttgaccgcacgggggttagggtatagaaatgtttgaccgcgtgggaagtggggtagtgggccaattcctttatttctagaacgtgggtcggctggagtagttatgctaaatcactattatgtataaacggaagaatggaatagcgtaaacatgtgttgactaaggaagatatggttgaccacgtggaaagtgggcctaagccgctatttctggaacgagggctcgcggttgttactctctttacgctaaaatgagtttccgtttacgctaaatcagttcgcttgcgtaaaaagtgatcggacgtgggctggggctctctacagttatatagagcccagggctcttaatagataaactatatatatatagggcgatggtaatggaagccctgggcttccattagtaccaggaagccccagccaggtatagccacgttccgtaccaacgtgcgtcccatcgggtacgggttctgacttggacagattttagcgtaaaacgtgaacaaaaagagcgtaaatgattacgaattttagcgtaaatcgtagatctgttttgaaatgtcgaatgcggcccgaaaattacggcgtaaaaatctcgcgcgtcccatcgtgatcgagttctgactcggacaaattttagcgtaaaacatgaaccaaaatagcgtaaatgagtacgaaatttagcgtaaatcgtatatatgtttcgtaactgtaaatgggtcccgaaattacggcgtaataatcgcgtgcgtccgatcgtgcgcgggttttggctcaaatagattttagcgtaaaacgtgagctaaaacagcgtaaatgagtacat

SEQ ID NO: 160275 - DNA, 496 bp, Zea Mays
cgagagatcagggcattgctctgctctcttgcagctagaccacgccttcgcctaggccgtgaaccgagcagacacaagggataaaaaaatgtgatcggatatggcgctgtgatttcttaaatttgttccgagctattgatttttaacagtgtctcgatcgaaaggaagaagtctcgcaaacttcatgcaattgatgaataagcgaaacaacctctcgtcctcgactcctcgggcggtcaggccagtgcattcgaatggcaccgttcaccatgattcacacgttaacagggtgtcgcccatgagctgagcaccatacgtacgtccgtccggtccatgccgctcgcctggatcactcccgcgcactacggtttgaacacggcccttttccgccttttggtgagcctcatctgaaaaaatatgcatggaccgcggcgtttttttatcttgaaaaaaagacagtattgttcaaacaaacccaaaaaggcggtacacgacg

SEQ ID NO: 160276 - DNA, 619 bp, Zea Mays
tgacagtcagcagtttcgggaattctgtgcatcagttggcaccatggttaactttgcctctagataccaccccttgtctaatggtgtagtagaaagagcaaatggaaaaatctcacagtagtcaagaagtggctacatgatgacacgaagggtaaatgccccgaccaactgctcgaaatcatatgggacctaaatacaatagaaactaggtgcacaggattcacatccttcaagctaatgtacagtgttgaagcaatgacgccacaagagttaaaattcaaatctctaagagtagaaaacaactcaatgtcggggacagacgagcctgcgaccaaatatttgctcaaggactataggaccgaagctggaccacaactggagtgtgaaaaatctacacaagttttacgtgtaaaaggacttcgatcgtaagggccttaactgcccatgcagtatttaaaacactaaacatttgggtctatacacttctcctcataaagggggtgaggtttttaatgaggcggagccttgtaataaaacaatgaaaatcccccctactcatgtgtcacagccaaaacagctcgctcgagcccaacattcagccaagataagtcaacgccgc

SEQ ID NO: 160277 - DNA, 503 bp, Zea Mays
ttaattagttgtgtgccattataatttttctggttttgaaatatgccattgaactttttaggctggtaaccttgccattaaacttctttctagatttgaaatatgctattttatactgttttaatcacctccacctgtagatatgcatatttttgtattgttcatcctacctctcaattgtgttttgccgtctgttcgcttcccaccaccagccataagtggccgtctgtttgaaatatgcattttgatctgatcaacatcaaccgattattcttcaatctcacatgattgaataattacagtcagattatcagcaagcacatagaagctgctacaggaaaaaaattgcttggatgctaaaagaaaaaaaaatattcactgcatcccaaaatatagttctttctagcccactcactcacaactgcaaagtgcaaactactgaaagcagaactcacttaaacatagttagatcaacctccataaaacacataacaccatttccc

SEQ ID NO: 160278 - DNA, 2512 bp, Zea Mays
ccattcggttgtgatattgtacccttgagcttgtgaaacttgttttcattggtgaccattcttgattttttcgatgttgacaatactttataccccatgccactcatggtgttgccatggatcaggttttagcatttacagatgggaaagctcgtgatatttgggaaaatatttgtcttgtaaatgttgtgaacactggggctttgaaatctgttgactggtcacagtgagttgctaatactttaaaattcgaatattttcactgctattcttattccatgtcttattcatctattacccttcttttttctctgttcctaattttgtaggtacaatgctgtgctagtaagctctctcgaagggaaaggggttgtttcaatgtgagaattcttctataacatgtcttatgctccagggttggcatgtaataaaacacaatttgctaatgaaaaaacggcttagatgtttgcattccattgtgtgtgtgtgggggggggggggggagaacagctgatgtactcattgttttgtgaatttatttattccattatatgacctttcattttgttcatgtaaaattcgtttcttggaattcatttccattttttctgtagcagttctttgtttggcacttagcacattcatattgttttcagtcttatgcaggaaccttttcggcttctaccagtgatttggcttatacatgaagacactcttggacaatatcttagaagttatgcaaagttacatgattctattcaaaatgtcattgaagattggaggactcattttaatgcatgcgcttatgttgtttttccagatagctaccatcctgtatgtaccaccatcaactcaatactgtataataatttatgaaatgcaatttatgtctgacataaagctatttgatttcagttgttgtactcgcctcttgattctggtaactttttagtgatttctggttctccagttgatatctggtctgctaaaagatttggctcatcacattctgacgaaactacaagaaagcagcatgggattgaaaaagatgatgttgttattttggttgttggaagctacttattttttgatgatttaccatgggattatgtcacagtcatgcgtgcatcagctacacaaattttggatatagcaaaaactaaaaatctgagggtgcagtttgtttttttctgtggaaatggctctgatgcctacaactctgctttccaggtaatgaatattccacaaattagacagtggcctttgggagaaataccttgctattgaaaaattccaagaaataccatttgtacttcagtgatgggttttctttatgtcatctgcttgaggagacaatatcattaccatattgtgcccatggaagcatccttttaaagtcaaaagtaactggcagaacttggccagaccttcatatttttcctttactacatgatttttttggcatttaaagtaactatgcattgcatttgtgaacttcactaaagcaagatcttgaatttcttaagccttcaagcttgtatgttttgttggacatgcttttagctggctaacctttttatttctaatgaatatttatcctctagttaattacttgggcactttactttgcggtaacctcatatgtttttttgtcaaacaatgcagaaagcttgacatgacacacacaccagccttttcacaagattacatggtgaccacacatattagatgaaataaacacccttcttgtccctgctctctccctctatgttatttttttcttcaaaaacattttagaatgggctcttgttcgtctgtttagtaattcattcttcccgtgtttacaaattcacgtgctaatataatcctaatgtctgttttacaggaacttacctcacacatggggttacctgatgtctccataaagcgattttctgtgactcatgatattagaaacctgttaatgtttgtggatgttgttctctatggatctttaagacaagaacctgtcttccctcctttgttattgctgtccatgtcctccgaaattccagttgttgcaccaaatcttactgttataacaaaatatgtatgccactcgatcgaattcttaataattcacttgtaaatctttgccactacttttgacaatttgttgttccaggtcagtgatggtgtccatggattccttttcgattctgctgacccaagcacgatttcttcagctttcatacaaattttaggagaaaaaaagcttttggatactgcctattctgttgctctggaagggaagctactttccaagaacatgttagcacatgattgtatcaaagctcatgttaagcttcttgaaagtgttattcattttccttcttatgcaaaattgccatcttctgtttctaaagttcaagaacgaacatggttgtgggatcctttcgagttgaaagctgcactagaaaatagtttgttggaagatgaaagccatgccagcacaaaggctgttgatattctt

SEQ ID NO: 160279 - DNA, 1054 bp, Zea Mays
catgaaagtcaatgcatccaacaaccggaatacaatagagaataatgttttgccataaacagcagtaattttttccaccaagattttcacataaaccaagattctaaacctcaacccctgcatgtccacatgtgcaactcctacaacttcaccaatcatcagacaccccaccatagtgtctccttcgctaagggaataaggtatgtaggggcctagggggacaccagcaaagagaaaactccatccagatggggaacatccctgtacctcaaaatctagaggacgcgtgtgtccactcccgatgctctttgagtccatctgtgtgggcaattgggcatcctctagacatgtgaacagggagcaggtgggcaatgcagtggcgcagtagggaggtggcgcctaggcaggggcagcgaacagcacagatacaggtcaatgctgaggagggccgtcgtcactatgggcaggtgggtgggaggtgcaccaccaggtggaagcagctagggcaggctgagacgcccatagcagatggaggcgggctggtgtgtacgaacaaaggaagggaggaagaagtaaaaggtggctgatatctgcggcccacattgacggcaaccaacgaatccaaaacggtccatccatcctcgcactctccatccctcaaccaagcacagatgggatcatcctaacccagaaaactaggacagaaccagtcacgtcacatcccaccttgtccaccaaaaactgtctaatatcttttgacagaatgctttgagttctgaacttgtgttatggtacaaaacacttaggtcgtgggcctaggaacacccaagcacacttaagctctaggcagaaggtcaccgcttgattagcacctagcgctttttggaaccttgtcccaacgaaattgtgtaccattggtattattaaagtgaacttacttcggtgtgggttgtgtgtgttttgagtgtagtgcatttcagtatttattgacaaaatgaatcagtattccttgacaaaaggacaaaactctcctgcgccgttcgaggaaaaaata

SEQ ID NO: 160280 - DNA, 520 bp, Zea Mays
cagagtgcagactgatctcgcgcaagaaaacaagaaccagctccctccccacccgtggcctgcctgctaccagtacaaatacccgtgcctgcgcgcatccccctggttcattctccagctagcccgggctcaggagccagtatcccaacaagctgcaggtgcagctatataaaaagcgagcagctcggacatacccgcaccaaaaggacccaacgaagtccagccagctgagctgagcctcgtgaaccagagcatttgctccttcctcgtcctcctcgatcgacctctctccttggtgccgctgccgccatatatgaactgctagcacgcgcagcagccagcagctgccgaccggcctataatcagaaggccagaaaggatcgatggagaccatcaagtgctgcatcgcgtgcatcctgccgtgcggggcgctggacgtggtgcggatcgtgcactccaacggacgcgtggaggagatcagcgggggccccgtgctggccggggagatcatgaaggcgta

SEQ ID NO: 160281 - DNA, 585 bp, Zea Mays
gggcaatcgagcgcgttcccggcgatctaaggggtcctagtccaattggcagggtcggggagcattaggagaacccaaggatgttgaaacaagatagcagggggcatgaacagacctaggattcactgaccacgctgagggctcaacgcacggtgttcttggttgatttgggggaaatcccaaattggagagctctggtggacgatcagaggtgagagctggtttactggatgcacaattacatagcggagcaggtgggggcgacaatttataggttccaacagcggtggcgtccaatttcacgaagacgcgctggcggccggagatgaaaggggttactggcgctcgggattagtggaatttaccttggcaacctcaccggcgatgaccagacgtgctagagcgagtcactacgacgaagtactgcgtctaggcacgtgtcatccgagcggcagacggctaactccggtgaacttatccacagcggccgtggcacgctcgtgtacggtggccggagtagaatagtggccatagtttatctcccgcgtgatatttcttaccgaggagcgcttatctgagttcggt

SEQ ID NO: 160282 - DNA, 704 bp, Zea Mays
ttgggtccaaagaatttaggcctatcgacatacgagaaggaatgtttggccattttgtttgccgtggagcattggagagcatatttacagcatgatgaatttgtcatcagaacggaccagcagagtctgactcatatggacgaccaaagattaactacaccttggcaacaaaaggccctgaccaagctaatggggttgaatttcaaacttatttacaagaaaggggttgagaatcaggtggccgatgccctatccaggagaccaaatctgaaatgtgatgacacaactgttcagttaaatgtgcttgccagctctgcaattgtgccaagttggttgatagatgttacaaggggttatgagacaaatgaacagaccaagaaattgttgactgcgctgtctactgggcactctgtggaacatttcaccctggtggctggcatcatcaaacacaaagacagagtgtggttgggacacgatccggaactacagtctaaggtgatcgcagcccttcacgacagtgctattggaggtcattccggttttcctgttacctataggcgcattaaatctgttttcagttggcctggcatgaagagtaagatcaaagagtttgtagagacctgttctatttgccaacaagcaaagccagatagaagcagatatcccgggcttctgctccctctacccataccagagcatgcttg

SEQ ID NO: 160283 - DNA, 643 bp, Zea Mays
tctgatgagaattaccatggtacattaactgacaaagatcccaggtgcagtgcacctcgccgccggtgatcccgcgcccgaattcgcgccggtcatcatgattcatgctcgacgcaaagtggataaccgaggggagtaaaagatcttggcgcccagataagctcggacctggtcactggatggttcaccgtacccacttgctctatggccggtcgtgataatcctcgccggcattggtcgcctgccacccatgcgccacgtgcctaggagctttaccacgttgcagtgaagcgtagtagggagtccatccatcgccggaggctttgccatggtgaaagccacggtagtgcttgcgccagtgacctcccctctctccggccgccagcacttcccgtccaaattcgccctcctcactgtcgtcctctataaattgatgccccggcgaactccgttaggttattacgcacccagcgcaccagctctcacgcctaatcgtccaccatagcaccttaattcgggttttcccccaaatccgttccccgcgccgccgtgtgtagctctttcgtggccagcgtcgcctgaggtagttctttgttctagcttccttagggtgtagtgatgctccccgtacttagaaattgaa

SEQ ID NO: 160284 - DNA, 789 bp, Zea Mays
cgatcaggagaagttgaaatttttgggtcatattgtaagtgcagcaggtatcactacagatcccaaccaaatcaaggtgatcagggaatggccaaacctagtttgtgtgaaggatgtccgtagctttttgggcatggcgaattattatagaaagtttgtgcctaactttggaatcatcagtagatctctcacaaatctgttgaggaaggatactgtatttgtctggactcaaacagaaaatcaggcgttcatggatctaaaaacagcactcgttcaagccctgtattagccattccaaacttttgaaaacaattcgtcattgaaacagatgccagtgggggagaaattggtgcggttctacaacaggaaggacatcctattgcttatataagtcgagctttagtgctaaagaatttgggagtgtctatttacgagaaggaatgtatggctatcctttttgtggtggaacaatggcgttcttatttgcaacatgacgaattcctgattaaaaccgatcaccagagtttaacccatttggatgacgaaaaattgtccactccatggcaacaaaaggccttaaccaagttactcggtctgcagtttcgaatcatatacagacaaggcagctaaaactgagtagcagacgcattgtcacgccgtccaaacttggaccaggatgaaccagagatgcaactgaatgtcacttcagtgtcaacagttataccaatttggctgcgccaagttgctaaaggctatgagcaggatccaggtacaaaatttttttagcta

SEQ ID NO: 160285 - DNA, 631 bp, Zea Mays
ataatagcaagtaaacggaatacaaacaatgttattgtagcaagtaaaagtggaagagggtaacagtgcgcttcggccggtgctggctctttcttatcacgtagaaatggggaaaaaaggactacgaagatgacaatgttcgttggtttatgccaacgacaaaccgaaggatatgtagagtagaattcggaagaaagacgaaaccgcccgtggatccattgtggcctctccaactcccatagggaacataaaggcgtaggtgagacgaagcggcctccaagcctgatgcagcagcagcggctgagaagaacagcgtggttagtgtgcgggaaactcatctagctgtcgtcttgaagagctctccgttggtagaattagctttccccaccccgattctacaaagagcgttaagagctatcacggggtaggcatctggtttcagaaagtgcgatatgcctcgttagtatcggagggcattcaacagccgaccaatgcacatctaaccactactatttttaaagtcgacgtggcctgcttctgttgacgctggctggtgcaggggtttagtatataaaaagaaatagaaatagcgggttaataaaaactaatatagaaatcgggtgagtcgacg

SEQ ID NO: 160286 - DNA, 643 bp, Zea Mays
ctcccctcgctccctctcgctgacacgccaaccccacccgccagcccctctcgctcgcgcgctttccctcactggcagactggccccaccggtcagccgtgtcgtcttcctcacgtatgacgctccgccgtcccctcgtcgcacaggaagagttcggcaccgccccgtcctccccgcttgaccaacgtccttgcccggtaccgccccgccgtggagtctcatcggcggcgctgtgcggcattaatgccggcgctgcgcacctcaccggcgcccgccgagctcagccgctccccttccctcgggcgcctataaaaaggttgccccgggcacctccttccccgcaccggcctcggccactacctttccccccctcgcccgagcgcaattcgtagagcaccgccgtcttccccctctccggtgagtcctccccccctcctctctctccctctccgttggtccagcgagaaattaagtggaccaagcagctccctcacaaggccacgaacccgaagcaccaattcccagccccagtccctcacccagagcccacaggcggcgatccctgccgcggaactccgccacctccccgtggacagccccctcccaaccccctctggccgaattgagcctacccttagaatcg

SEQ ID NO: 160287 - DNA, 463 bp, Zea Mays
ggctgggtgacgtccgggaggtcctggcggtcacgtcaaggtgcgagtcgtcgacggtgatggccggaacagggctgtccacgcgcgcaggtggttgggctcggcggcggcgtgtgctccagcctgctcacggtggtagggctcaatcaaatggcatagggagcttcacgggatgctaaggatgctataggtataaggaatcgacgaatggcttaccgtggagctcggtctacgtgcgacggtggatggttgaagtccagcgacgttgatccggcgtctctggcgaggtattgctcaatcctcagctcgggtagcttcactgaggtccgtagaagctaacccaagggccggacgaggtggaggatggctagtttggccggtctacggtggtcgtggcttgtgcggccgctggcacggggttctatgggcaaacgccggcaaactcgtgctcgggctgggtcag

SEQ ID NO: 160288 - DNA, 561 bp, Zea Mays
gctccacaacatgtcgccttttggtgcatcccgtaggaatctgtcggtgcaccgaatctcccggagccacaccaaattccacattctcgctggcaccttgggtccacacgttagagtcgtcttcctctaacttttgctcccatgcagagcctgcgcatgacgttgtgacacttcccacctctcttgagcgattcaaacctctatgccacgatgccctcctctgtataagtgtgtggcaccctacgccgctgctcaagcccactcctgccagttgctgccactagggtgtctctttattctttgcccacacatgtcgttgtctatttcatcgcgttcctgagccgatagccagctccaccgtcgaattctactgggtgagcaccaccttcggttcctacacctaaaacatgccttgttctctctttaactcgctagtcgtcttgaccatcgttgtctttgtgttccattcctccatcgctagagcttctctagtgtcaaagaaccctcggcgagtttcctcggtgcactttgcaccatgtgcgcacgctagttcattttcta

SEQ ID NO: 160289 - DNA, 308 bp, Zea Mays
ccgaggcgacgagtcggaggcggtggaggggctcgtgtccgtcgttgtggcggaagttgttgagaggctcgtcgcggcggtgaagcgagtcaagggcttcgaagcaggcggagcaggaggaggcggcggcagcaagctagggtttgtgctcgggggatggcgacggggcaccaaccgaacctgattggggttcgggcgaggaccgcgggttgaatcgcgaaaagacgaagggcctttctgcaaaacaacgaccgcaaaacgcggggagagctcgaaatggcttcaggttttaaggaaccagataatat

SEQ ID NO: 160290 - DNA, 278 bp, Zea Mays
caaatgtcatgacaacccactcaaataaaccaatgaagcctggacatataaaggccattttagacacatcttctccggccatggaaatctaattatatccggcattaccatcaagaaaactaataattttatttcctgacgcattattgatcaatgtgtcggctatgggcatgggatattcgtctttaggagttgctctattcaaattgcgaaaatcaatgcatactctgagcttacctgattctttcttctccacgggcacaatattggagacccac

SEQ ID NO: 160291 - DNA, 546 bp, Zea Mays
atgctgacagcacaccaagatctttactagacgttgtgttgctccctgtgtcttagtaacgcatgagtaatcaccgggagtcatgatgactgcagtccatgctgcattgataggcagtaacccttttcttggaaacgcacgagtaatggtgagtcattgccctcgctatggtaacgtgtgagtaactacacggcccatgcaatgtggactgggcacgccgtctatcactggaatggacagacacacgtcttatccgtaatgaatgcaaagatgcacgtagtccagaggatttatgccaggctcgacccgttggcttacgtcgtgtgtagtaggccacgtggcagcatcgggtctccgcctgggcagggagcaggagtgtatgtgataaggtgcggatcccaccatatcaggtctagacacgtgtcggctctggaccccgtctgagtcttgattaaggcccgggtatgttctgtcctagaaccctgggacctcactgtgggcggcccgaaccccatacggggggtccagatcccattctaggggtcc

SEQ ID NO: 160292 - DNA, 563 bp, Zea Mays
gctatatagaatctcacaacctcaccactcttaccaaccaaagctcttatgaggtccctgtggattgcataaaaaatgtgtggtggtaacaataaagtgatggttgagcgaatacaagaccaaagtaccgattacgatggcttatatgtggaacttggtggggaatagtaaacaaggaatgcaatctgaatcctagttgttgtaaagttaaataaccatccaactagaagttcactgcctagtgctgaccacaagatacgagtgatgtaagtagatcaaacacacgcgcaaagaattttcagatttggtgcaaatcaaggagtatggttggaatgcaagtgttgcgatcagacccaaccaaaattttgcaccaaatgacaatagcaaactggttgaacaacttgatgaacttttaacacttgcgcacataaacaaactgatcgttctacttttctttcacaatcttgttcaacacccttttttgtacctttctttcttctctttttttgatactctttttttatagaactgaacacagagatctgatatgatattgcacactt

SEQ ID NO: 160293 - DNA, 540 bp, Zea Mays
tagacattgtgcgatgacaggcgtacaaacaccgacggggggaatgaattgacgaagggagttcaaagggccccacaaacatagtcccgggtaggtcaaaaaaggcgatatgggaaaaataaaaaatgttttttcttcagcagcgatgggacacactacatcgtgagtcaatgagcgctgagcacgacgtcgtttgcagataattggtccacgacatggttgaccgcctcgtcataaccctctacgatgtcctttatccccttttgtccgacaaagatgagggaggcccaacgacgtcctaaagagtgcagcccgaccgaagctccataaggaatattgtccaagcgcttcacaaggatattgtccaggcccctcgactaaagctcctcgacgagcatacgtcaaagtcaacaatatcctgaacacgacacacgatattgtccaggcgctccacatgggacaaactgcgtgcccggacgcactccgcaacctgacccgcccgatgacacagcttctccagctcggcttccaaagctatgg

SEQ ID NO: 160294 - DNA, 923 bp, Zea Mays
gctgcacggaaagaaatagtgaaactcagatccgaagtgtccggacttcggtttgattgtgaagagaatgaaaaatatttcaagatcctagaaaatgatttttttgccagttagactgaagttcagataatgcgcgaggataaaaataagcttgaagtttcgaatgccgaaaaggacaaacgaattgcgtcgctcgaagctaagctggaacgggtaaaaaaggagcacgaagctgaaacgacaaaactgatgcaaacatccgccgaagtggctgtcaatattagcagcgctcagtgaatattgatgacctgaaggatgaaatagatcatgtgagagggcttaatgaaaactaccgaatcctactggccaattgccacaccctcaacaacagatgccacaatgagctgttgaaaaccttctcctctgtaggggctctatctaaagagaaattttttagatggtgacttggaaggtctgatgaggttggtgcttagcgagacccgtgctttcaaagatgttctctcagcttgagaggaatattatgcttggataggcgcctaaagagctgcttcgattatgctaaaagccgtgtgcgattatgtgagggattgcacagaccccgatttcagagtctctgcggaccatgtccaaagatcaaatgtcgaagctttggagtggtctaagaaattcttatctgagatctggaggaggggtgggaaagaattaagtattgaagaatctataaagaataggggaatgtacgtactatgtcacctttgtctttaccttcgcggggcatgctcatactaactggaaaaaaattataggcgtggcgagtagctaaaaaggttgtggacatcatgaagaagcttcaaagcaagaaatctgaaggtatttggcttttcgcttttgttaaattttag

SEQ ID NO: 160295 - DNA, 565 bp, Zea Mays
acctcggggacccgacctgcgacctggaccatcgtcgacggtatggtgctgttcgggggcaggctgtacatcccgccagcctcgccgctgctatcagagatactacgagcggtccatgaggacggccatgagggcgttcagcgcacctgcagcgtctccgacgtgattttcatttccctaacatgaaggagttggtgcaggactaggtgtggtcatgtgcagtatgccagcgatacaaatctgagcacctccacccggcaggcctcttgatgccactaccggtgccgcagggtgtgtggacggacgccgcgcttgactttgtggaggccttaccgggcgtccgcgggaagtcggtgatcctcacagtggtggatcgcctgagcaagtattgccacttcatcccgttggcacatccctactcggcagagtccgtcgcccaagcattcttcgccgaagtcatccgcctccatggggtcctgcagtccatggtctccgacaaggacccggtcttcacgtctctattttggcaggagcttatgcggctaatgggtaccaaactccaaat

SEQ ID NO: 160296 - DNA, 588 bp, Zea Mays
acaaggatgagtctctcaaccatatatagccaagtactagtgtcgttcagccttctttcaattttagaaatgagaggaatataatctttaattttttggttttgtgagacccataggcagacccaagcaagtgaaagggaaaacaccaacttggcaaccaaaaactgcagccaactgaccaattttgatggtgttgaggttgatcggcaatagacaagacttgtggaagttgattctgagcccagttgcaagcaagaaagagtggagaattcctttcagacaaaataagtctctttgggatgccttcatgatgataatagtgtcatcatcatattgaataaccaggaagttgggcatgttgtccctctcaaggggagcagagaaaacacccatgttggctaccttgttaatgatgcattgaagaagatcgacaacaattactaaaaggagaggagacaaagggtccccctaccagacacctcttttgcacaagaaacttttacctggcaccccattcagcaacacaaccgaggcaccagactcaaggatggcttgaatccaggagatccattactccgggaagacgag

SEQ ID NO: 160297 - DNA, 563 bp, Zea Mays
ccagaccgcatgaattcgtgggcaatctggtctaccgcctctgcgtcaggtatgacaccatgaattgattcgcctaacacgtagcagcatgtagcacctatctgcatttcctaaagtcactctggcaccgtgcggtactctcaccggcgaagtcgccgccatggtgggtctgggcgccaccgtggtgtgggtttcaggaagaagataacgtgatggccgtctgttccatggatgtgcggtcatgattaaatccctgagtcactacgccacaaccgttgatgctagattagacgcttgtgattggaacccgcataccccttcgggttttaaatctaggccgtggatctggttatcgacggcgagcgttcaaccgtggcgcgtaatgcctcgggccgttgatcttgatccaagggctgctagatcacaccacgttaatgaagtctcaatctaatccgcaccgctcaatcgtgatccaacagctctcatccgcccataccccttcgaccataagttttgctaaagacccccttgaaaataggagaaataacccgccgtccgcgcgg

SEQ ID NO: 160298 - DNA, 294 bp, Zea Mays
cttgccttcaccaagttgctgctcagggacttctcctgcaacttcctcgggaaacacagactgctcgttgtctacgcaaagcaatcattcattctatgcacttgggaaataacaaaagagcaatataccaaacatgtgcagcagagagatcacaggttcaaatagaaaaagattggcaatatggtgttccctaggtctagggtagatgactatacaaagtgattcattattcactaaccaggtctatgtcactatcatattgttcagataaagttagtttagtggtggggttaa

SEQ ID NO: 160299 - DNA, 796 bp, Zea Mays
aaaaacggcccccagcccgaccgggccagaaggcctctgtcatttcctccgcccgcgagctctctgtctcacggcgcccccctctgctcctggcgatattccggcgaactcccgccaccagcggccaccaacctccgacgacctcatccccctcctcggtgcgcagatcttccctctgttctcctctccctctcttcctgtgagcagaagtccctctcttctcccttttgtgcatctcttcaaatttcttgaaatcaggtgaattcctgtgaatgcaattggtggtttgagttctaatatctctattgtgtatccctgcaagtttttagctccttcgggagggcattcccacctcaaatggccgtttcaccaaaaccctagctccccgcacgccacatgctcgatgaaatgcccaaaccagccaaacttgctccaattgaacccagatttttcaggcaccttcacaacacttccagtaacctacttgccaaatttcacgccaatccgagatcccaggcttaaatttcaccaaaatttccgttttgagcgatcgtttctgagccgagtgccctaattcctttttcttcgcctaaattcaaaccaagcacacacttcactcatattcacctatataaacctattcgtgaagtatcggctcaattccatatcatttcgtgcctcatttcgaattccaaacctcctatgtcactatttgtctgtcaaacgtcgttttcacgtcgtttgacttcttgatcgtcccgtctcgtgccatatctctctgtgtatgtatttattc

SEQ ID NO: 160300 - DNA, 537 bp, Zea Mays
ttagtatagttttctgttaacttggtataagcaaatatgttttgttggttgacaagcactacaatgtcaaattttaggaacaagaatcccatggataagtgtttgcattcctggcacaaatgtgtctgttcacatattctccccacctttttagattctttacacaagtcttaaacatgcacttgatgtcacttctgttatgtagggggaggttgtggaacgaattctgttggtggtactagctacttgactttgttttatttctaaaatagtgacgcctttctcctttgatgttttggttatttttgtagacacatttttttggattcttatgtgctttattgcagttagtcttcccacacgtagtcatggtaggctaccagattttgatgtgcattttgtatatattcaaccaaacattgtactcacattatgtgtgtacatattctgttttccctgcatggtaccatgcccttatcaaattggttttctgaataatgtagtaatctacattgaggaaacacatgcatatttttt

SEQ ID NO: 160301 - DNA, 590 bp, Zea Mays
atcagatggctgtcgatagcagtgaagcagacccaattgagagtatcaaggtggtgtctgagttcctagatgtgtttccaaaggacctaccaggtatgccgccagagtgaaaagttgagtttgctatagagcttcttcctggaaccgcccccatctttaagagagcttacatgatatctggactagagttggttgaacttaagaagcagatcgatgagttgtcagagaaaggttacatccggccaagcacctcgccttaggctgcccctgtcctatttgtggagaagaaagatggcaccagaaggatgtgtatcgattatcgagctctgaatgaggtcaccatcaagaacaagtaccccttgcctagaatagaagatctattcgaccagttgagaggagccagcgtgttctccaagatagatttgtggtcaggttatcatcagctcaggatccgaccttcagacattccgaagacggcattcattaccaagtatgggctgtatgagttcatcgtgatgtctttcggtctaaccaatgcaccggccttcttcatgaacttgatgaacagtgtattcatggactatcttgat

SEQ ID NO: 160302 - DNA, 619 bp, Zea Mays
gctctgtaaggagtggatcagttccagaaattgttgtccctatcagtgtatcatcctgagatgcaacctggttataagtgtttgaacattagaataattagtttaatggcataaaatgcattatataagatgtattttattatactgacatgaggcgttggggtctgataaaaaactagcccactgtcattgtgttccatttcctctgttgccatttcacctctctacacaaaggtatattattagtaaaattatgcaatatgtattgtactaatgtatcataaaatggaattataacatgagacaaggactgctaaacaaacattttttgcggtgtcacgtcaaatttcggcaaacgggtgcaagctggtgtggtttgaggtgtgatatttgtgttcctcaacatgttgtttcgaacatcaaaacagaaatcctgttgacaaaatagtgtggttcgtatccagctaaaaagtaatatgcaaacaatgtacgtatgatgagtaaaaaaagctattggggttggatatattacctgatgtcctgtaacaacatccgcttcgtcaggacaagtctccagtactctacggatatgctgttgtctttcatgaatttcttcaaa

SEQ ID NO: 160303 - DNA, 510 bp, Zea Mays
aaacgagatcacaattggatgcccgtgaccaaacccacccacaaattccggaaccagaaaatgagagaacattgttcatctgcaggaacaaaggctattgaggaaacaacaagtaaaagaataagacaaaacaggcactatgtactattgtgaatttatacacgaaacatgtttttggaccaaaggtgatccagtaatcgatctacaaattttggaaatgcaatagactccgggctgaagaaaagaaatacacctgaggcttaattcatttgcatgatgcttgccgactaagcatgtttacggatataaccatatgattggataggtgcttacgcgcagcctggctcacacaagccagtccaccagatacgagcgttttttgcgctcacagtcacagcagcctagtccaccagataagggctttttttagtttctacacatgcaaccaaatgagcctagaatgcaacggtgggtgcaagcccggctcttagggggtgtttgggaacaaag

SEQ ID NO: 160304 - DNA, 344 bp, Zea Mays
ggggggggggggggtccactgctttcttccgctttgtaactatcttcttcaagacttttggaggactgtcatcaaagttatgcttcttcgataatggcataaagtcatcgtcctcgtcaccggcctgcattggtttgtgtctgacagtattcaccggagcacgaggtatgtcgacactaaagcactcttgagtagactgaattataattcgctttggattagacggaggtcggtctacgttcttcatgtatgattttcctgccaaatcaaacaacacatatacatataaaacgtataaaaacaatcttatggagcaataaaaattctgctcatatgcaacagcc

SEQ ID NO: 160305 - DNA, 436 bp, Zea Mays
agtgcgtgtccacagtcgtggcgagctcaccgacgacgatgggacggtggtaaggagtcacggtgacgcggtagatggacagagacacgcggcggacaacggagatggcacgacggcggtgagcccctttatccacgggcggtgagcaagggggagagtaccgcggttggccggggtggagtctagctcaccggcggcgaagattcttttaccccgcagcggtatccaacacccaggcactaatctcgacgccggcgacacgaatcacggcggagagagccgtcggcggtgagggactgccgcgctggcggtctgatcctttacagttactgtaccatggcgatttcagtcggatgaactgacagagcaagtttaggtcacattttctcttaatttcaaatggcaacacatccagtgaccagcagcaaagttgtag

SEQ ID NO: 160306 - DNA, 903 bp, Zea Mays
gactgatacatcgggtttcggctttgctataggtgggaatggcgaagttatctatggcaaggctagtgaagggagtggtttgagtactattgagaaaaaaaccccattcctcccaagctaaccaaggtcaccccacctgagcctaccaagtccattgcgaaagatggtgtggttgagggacaccaaaagctccacctcctaaacaagtgtagatttccgagccaaaccacctaggaaacccacttgatactcttcctagcatccttgaggaaccccttcctagaggaaagcctccaccaaaagtgaaccctactcccaagaaagtgtatcaacaacccccaaagagagtggtgaggtatcattatgagtactatcatagagacagagtggggtcttcctatgggacgaagagggatgaaaggagagagttggagatgatgaaccagtacatgtatcatttgtctcatgatgatcatgtgccgcactttgagaggcgctttgagagtcgcgttgctaggcctagaagtgctatgcctcaagctactaggcctcagtttgctggaccctgcggtggtcgtgcccggcgaggtgtggatcgttttccatatgactttggacctcgtggtggtggctttgagcctcggaaggtgagcaacccatgtttcccttctcgtggtgttcactctcccaaagcaggacgtgggatgtttgtttctcctgactctttcttggagcaattggctcaacactggtacgcttcaaagtttactaaccccagtgttccagcctttgctcattctttgccccgctattggtgtaggttggggttggaggacatgtggctcattgactctggatgttcacgccacatgactagagattccaagtggttctccagcctcg

SEQ ID NO: 160307 - DNA, 652 bp, Zea Mays
catggaatgagaataaccaaacaaggtctcaagtggacatgaagatgcttccagactgttgaaagagaacttaggtgagcaatcattattgtactataggagcactgtctttctttcagaaggaattaaatattgagaaataactacaacattttccttagagaaaagagatattgctatgtagtttctaaactgtaaattatggctaatgaagaaaataaggatataattggcttcaaacatttcacaaatatgtcctttttctgtttccaaacatgcaggagaactatgtgtcattgcagtaggaagagagttacttctagtcttctactttgttagattacatttgcaccgtttagggctcctttgggagtaaaggataccggaggagattgaaagagctaaaatcttcttactattcaaaattaaatagcaaggagagtttagccctccaatctcctttgccaaacccttagggctaattcgacaactctattttttcaaggggttccattttcccaaagaaaatgaactaattttacttgaaaaaatcgggttgcttgggacccagaaaaccgaagggattggagagggctaaaatcctctttttatttaattttgaatataaagtggattttagcccattcaatca

SEQ ID NO: 160308 - DNA, 713 bp, Zea Mays
tgcccttagggcgttgctaagtattaagccctgcatgaaagaataaaggattaacatgagaataaaagacttcattttcaaagtccataaacttcaaaattcacaatttttgtaccttcagactattgtatgcaagactatctgcgagattggccttcgtcatggcacaaaggccagcttcaagcttcggaaaacccatacttctggccatctcccgatagacagataattctttgttgtccgaaaggcagtacaaaaagtcatcttcgtttgtaccattaaacactagggcccccttcggatactgcaattcccgggcataatgtttggcttcagaaatttcttcttcgaatagtctttttcccgaagcatgtctaacgatataatcaaaaccttcggagagtacttcgggaataagggattcggcttctttggccacacttttctcaaaagctatattactatctggagttattccttcggccctctactcggttgcggcaagcttcgtctcagcaggcactgtgggccctgcctcggtttcatcctgggttattgtagcttcaacttctatttgcttagtatcaactttgggttgcgttttgtcagcttcggcaaccttccctgtaggagcgggacttatggagtcggttgtttccaatacatctaatacatttaccatccttctccttttaggagtcacgatagaaccc

SEQ ID NO: 160309 - DNA, 752 bp, Zea Mays
cagcgcggagcacggtggtgccattggtgaggcacgccgaactcgccaccacccacacgaagtggccgctagtgctacaaaacttcctcctcgagattagcgcaacccacagggatgatcccgaggcggaccggcggcccaggcaagatccggccgcgacagcttctctccctttctctctctctcttcttccccttggtctctgccaggatacgatgttggcgcacccatcaacccgacacatgcagtagctcgccagcacacactacattggcaacccggtaaccccagctcccgccaacggctatgacacactgtggtctagaagctgcagagcagaagaataacgtgctggcgaatatgtagcgcagaggccctaacctcaacgaaaggtggcgtcgtggcttcgccagcccctggcgaggatgtaggtacccgcgacctgggcgagaaccagtggctggaggaaggaggatgaagagtgggcaccattcgccagagattggaacccgcagccatggcgtggacggcccggggtttatgcgttaacctaatggaagaaggggtctagggggtgcttatatgcacggatagagccgtgaggacggcgggcagaacgaccctggaatccggctggcgcgtagctagcgcgcggtagtttcgccgctgaagctgcgcaggaagcggaatccaccgtgcaatcccgatgttcagttttagggagaagatgacttacagcccgggcccgctag

SEQ ID NO: 160310 - DNA, 980 bp, Zea Mays
ggcccccaacaccggtgaagtcgaagcacatgcttatgatgctttccgcaacattacgttcttggtgcatcaaatctatattatgtggtaacagcaatgccttcgtgtaaggtagctcccagataaacgagatgtgtgtccaattgtgttctttaccatacccttgaaaccaacctcctacgcccggttttaggtcacgatgttgtctcatgatattttcaccagtttgtcgcttcggtggcccatctctaatcctcttgccttttcgaaatgactttgtatcctttctaaaaggatgattatagggaaggaggcgtcgatgaacatcaaaaaatgtttccttcttaccatgttctaacatatatgcttgtgagtcacccatacatatcggacaacatagtatgtcgtggacacaccagccagaaaaaatgccatatgctagcagatcatgaattgatcatagatatgctgcgcgtagagtaaaacaacatttcaggtgactatcatatgcctcaaccccctgccacaacatttttagttcttcgatcaacggttccataaatacattgattttcgttacaggatccttcggacctggaacaataagggcaagaaacatgacctcttctttcatgcatttgttaggagggagattgtagggcatcataaaaattggccaacatgagtaagaagtggaattattggagtaaggagtaaatccatccgtcgacaaaccaagacgaacactcctagggtctcttgcaaattatggatcaaaacggtcgagagcctgccaggcctcgccatctgagggatgcaccatgacatccggatcttgaccctgacgatccccttcttaatgccacctcatttgctttgttgtctcttgatttagaaagagacgtttaagccgtggagtgataggcatgtaccggagttgcttgatcgacacctttgtcgtaacctcgtttccatcctca

SEQ ID NO: 160311 - DNA, 878 bp, Zea Mays
gatggatagcgtcgcggggtgaaagatcttcgccgccggtgagctggacgccactccggctagccgcggtacctctcccctttattcatcgccctcggataaggattttcaccgccgttaagccgtcgccattgtccgccgcgtgcctctcactttccaccgcatcgtcgtaatccttagcggctccccgttgatcgttggagcaattgccacggtgctagccacccagccactgcgccagtaacttcttcctcctccgaccgtcgcgagtcaccgttaaaattcccggccgccgctcttgcgccctataaattgagccctccaccagctccacaaggtcatcacccacccagccaccgcgaatcgctagcaatcgttcgccagagctcgcgaattttgaattcgccccaaatcagttctctaccaccccgaaacccacctcaccgcggccagccccattccggtcagttcatcctcccctctccctcgtttaagctttctcatatgtctacgatgcttgccgaaccaccaatttggacaagaggatcaccaatccacgggaacgtgctcatcagtccgccatgttcacggtcgtcgtggctagaacaaactgtgtgaccattagtgaaattatgttgggggaaatggtcggggtggatccaatttcgtgtccgccgctcggtaacgccggtcatggccccgtttggccggtctgcaagctcgccggagctcggccgcgttcaacgccgtcggggacctccccctgcgaagaattagaactgcaggggcttctttgcaatttgtcagcgacatagggaaacagtaatagaacccatctccagttagtcaagaacccgaggcccttttcgcaaaactgc

SEQ ID NO: 160312 - DNA, 464 bp, Zea Mays
ggaggcggcgagatcgtgatccaacttctagtccaagagagttgcacagggtttatgtaattgagttcgatacgtagacacagtcatctagtcaaaaggctgacgagcaaggcagaggcctatgtttttgagtgtgggggcccatttctttgggggggcggtgccgttgcacccccagcaccccctaggtccggccttgcctgcactcgtgcccccaacacaaaagggtcattgccggcatgcccacccagccttagccccttaccgtcgacgctcgccttgcactgtgtccgcaccacgccgtgcacactatcgtcatttgctgcatgccagaaccacacatgtccatttaccccctagacatcgctcatccaccccctacgtatgcgcgttcgctatctccccgccccgctgttgctcgcgtcacgtcatcacgtgtgtcatcatgcatcattcacgcttgt

SEQ ID NO: 160313 - DNA, 454 bp, Zea Mays
ttaaagtttatgttcttgactggttattgtaatatttgcaactttgcgtgaatggtccttggaaaggaacgagttcatcaaaactcggcaactcgagtaagttatctgatccacttacatatctatccgaggccttgagggcaaggattggtgtacgtgggcccgataacttggttgggttgtgacaattacccccgcaaaattcccagaaactactaatactactgctgttcgtccaccaacaaaaattctggatagcacctataccgaatcgcataggtgaacggataaccaaataaattgcagcacaaataaaaagataaccacaagatcaccttgagttcttgcttccctccttccttttttctcctaccaaaactccaattgaatgcttgcagccttgcaccaacacgaaggagatccaagcggggaggggctgcaccttggagaggag

SEQ ID NO: 160314 - DNA, 580 bp, Zea Mays
gccttcatgcatcttcacccatgaaaaagattctaaaaccctaatttcccctcttgagccattaaaccccaaacattggattaaagggaaaaattatgcaaatggccaattcatgaaatgaaacctttaccaaagttgaagtacattaataaatatacaaaatatagtcagggaagtattacaaaaaggcccaacaaaaaccccaaatcaagcccccaggtggagagcacactagagccatccatttttctctaagtcccaaaatcagccctaacctaaggatcggtagtgttcacccctttgctggtgccaaaaccacatggtccaaataacaaaaagtggccaaactacccaaggcacacccctgaaaaatttgaaaccaaaccaaggtcgtttgacatggtttggcatccattttgtcgtcgggtgaacagtgcagacagacaaggcttggcgccaccatatcttccaagctaggctagatcttcccttggaactcacatgaactagatacctctaggtgcaaggaagaaatcttacacaagacatatggctagattcacacgtttgggagctctac

SEQ ID NO: 160315 - DNA, 425 bp, Zea Mays
tgtgatactactcctttccgatagccttcgtatcataagacaactcatggatgttgcaaaagcatcttgcatcttgttccagtccttggctcctcatggcccatataaagatccccactttaatgatggcttcgggagtaagttgatgaaggtaaatttcaaaggtttttagaacctcgaccaacaatttgtccagggggaaccgaagctcggctttcatgaagcttctgtaaaccaccacttcgtcagctttgggaagaggaacattattatcccctctggccctcttgattgagatatcacgaaaatacctccccctcattgcatcgatctgcccttgtttaatagttgattttccgaagacaacatgacttggtctccatggccgatcttcggcatcttcatttccactttccacatcgaag

SEQ ID NO: 160316 - DNA, 598 bp, Zea Mays
agttggctgaagcgaagttaaagtgtgcaattgccgaagctgaccgagacgccagcaactattggaaaaattattgggagaaaacagttgtagaacttcggtcttcaaaagagaaatgttatgaaagatccatagagtgtgtgcaaaaaaaatctagcttcgccaatactggcgcattctctagcgaggacaacttcgtaagggccgatcctgaacgcccaattgattggatcagcaacgaagttgaagcctttgaagaaattttgagtggtcgcggggatgtctgcgccttctcaggtgccaggggaatcgtggctattttggagaaactaggctgtgaccacgtgaaagctttggccgaaaccgaagctaccttatctattgaagatacaaaagacccctcagccgaagcaagcttagttggcgggaaattcttcactgacatctgggaaaatggcagccgagagatggcgcatgatataataaaaaagagtgtaaagattctcatgatgcaaaagaagcgacgaaggcagctgagaaagctgcggaacttgaaaggcggataggtattgcttaattgcttttgactttgtgtttt

SEQ ID NO: 160317 - DNA, 425 bp, Zea Mays
attaatcttgagtaaagtcacaaacttttgcacatacatggttacatgtgtatgttggtgatgtgcaagtaatgatcgaggtgaagcatggtcgcagtgacggtgaaacttgttttctgtactaagatcaaggagaaattgaggtacgaaactaagtttcgggactaagtttagggaggaactaaggtccatagtcgaggatgttgtgagggatgttttgattgaagcgttgttgcatattgtgattgcatgagttggagtggtcttggcccatgtgacagctagttagcgtagttgatacaacgacacggtaggcccaagaggggcgtaggcccagttggcgcagtgtgcggtgtaccaagagggtagaaagcgagaggcagcacatgtggctgaggaaatagtgtcttatatgactaaagagt

SEQ ID NO: 160318 - DNA, 649 bp, Zea Mays
tgaagattggagaggaatgatggtaaccccaagtcaggaggagctacgtcatagctcgacgaaggaagatcaaccggaacaatttgaagaacgttgtcaggggttggcttagccccaccagtggatgtcagacttcttgcatctggctcgctgacctccaaggcaacttgtttgcttgaagccaaagaagcatgcatcgccatcaccccatcagatcgtggtggagacgaccctacatggacatccatggaggtgtgggaaggagagctcacttggacaccctcgagggctgggttgcagctcgcgccacccactagagccggatcactaccaccaacaccctcgggggctgggttgcagctcgcgctacccactagagccggatcactacctgcgacaccctcgggggccgggttttctacaacaaccacctctaagggtgaaggatcctcagtcacctccatgtgagtcgggcaatcccgaccaacgtcttgacatcaaagactgccttccaaagtcaatgatgcacgagacactgctcgggatacctctaatcccatgtctggaatttcagaacaaacaaccatcatgtcgtcagcagtcagctccaatagcatatccttaggaacgacatcttcaagggcctgat

SEQ ID NO: 160319 - DNA, 797 bp, Zea Mays
aatcttctttcgataacccaagttcagctcttaaattgttggcagcaacagcttcatcgatgcccaatgcagttcctccaccagcatttggtaaccccaaaataaggtgcaccgtatcctttgtaattttcagctccttccctgggccggctcgaattgtcatgtcattatggtcgagcttttccatcagccaagctaaatgtgatctgctgccgagtgcgtcaagtctcatatcaagaatactggaaaatcccctccgtgtaattgcttggcgctgtctgtcatttaatatctggatgcttactaaaacatcttgggggttgcatctcacgttaagcctctgctaaaaaaaagtatacaatgaatatcgtaaacatttacgtctgcataatcgcaactcaatgtttaactcaaacctcaacacaacatgatttcacgcataaaatgatatattgccatagaccataaatctctaacctgtcagggggtccactactttcctccgctttgtgactaccttcttcaagactttccaaggactgtcgtcgaagttacgcttcttggatattggcataaattcatcgtcctcatcatcagcctgccttgtttcgtgtctaacagtctccgccggaacacggggtatgtcaacactaaagcactcttgagtagactggattgtaatccgttttggattagaaggaggtcggtctacgttcttcatgtctaatgttccctgccaaatcaaacaacacatatacataaaatacgtaaaggatcaataaaaatataagcgcaag

SEQ ID NO: 160320 - DNA, 311 bp, Zea Mays
cgggtatcacactctacccccttaaaaagaattcgacctcgaattctgacgcttctatcggaacgacaaaaggaaagattaatgaatcaacaacacttacccacaacaaaaagttccggatacttctgccgcatcagctcctcaagttcccacgtagcctcgcactcagactgattagtccataagaccttgacataattaattgatctcttcctcaatacacgctccgagaattccaatatacgcaccgggcgacactccaaagtcagatcctgctgcaccgcaattggttccatctcaatctgatggtc

SEQ ID NO: 160321 - DNA, 409 bp, Zea Mays
ccaaggagtaatagtgaggtatgacatgtctagtttatgaatatcattaatccgatgttctacaataaaatccgctacgacttgacctttcatagatttcaatggttcataggccaagtcatattctatgagtgcataagcccacttaccaattctaccactcataattgggttatgcaacatgtatttgatcacatcggcttgaccagaacagtgcaatgactagacagtaaataacatctacacttggtgcatgcataaaacaagcataagcataacttctcaataaaagtgtacctcatttcagcatccaccaacctccgacttagatacgtcaccacatgctcctttccttcagtttcttgtgtcagaacagccccaatgaccttatcttcagctgcaatgtata

SEQ ID NO: 160322 - DNA, 938 bp, Zea Mays
aagacggcgacgtaggcgcaaatctctggtggctgcttcatcataattaccttcttcatcaaacaccgcatcatcgggaagatgtggacgaggaggtggtggtggcggtgcttgttgttgcgtctccaacacagcaagtctgtcgacgatctaggacaatcgtcaatccagcctctcgtaagtcttgccaaggttcatgtcaatgaaggcatcatgcactgacttgtggaccgtctcctgcatttgctcctttaggagcttgttgtttgcctcaagatcttgtcggctaacacattcatcgaagtatgtggggatccttgcttcttcttcgtcgcctgccatcgaaacacaaaaacaggaaacagacggtgatggttatccctaataatttcactacacgctcctctcaggtggaacataggaacacgctctaatgtatcttaccaagcgcttacaagtgtctgacgaaatacaagcaaaggatggtacaaacggaggctggttcgtgatacttaccaagaggtagtgaaaccgcgattgcaaggtcaaagctgtactaatcagaagaaagtatgtggagcttgggaggccaaaaattaatatcaaggattagcaaaaatcgagtgcagattagcgaagttcaataagtgtccaaagcataagtcacaattgttggctaagacgtgtcctatcgaagcacaacaaggtaaaggtaacaaggaacggtggacaaaaacataaagacccagcagaatggcagttctgtaaatagcgtagatttttcagcactagtagaaatcaaaggcgcatttccaaaggagtaccagcaaaagatgtcaaaatattctgaaatttttatcactgatccaaaatcacaaaatatggaagccccacaaaatttcacttgaaacagagttgtattgtggcctagagaaaat

SEQ ID NO: 160323 - DNA, 610 bp, Zea Mays
cgctcgcgaggcgcccctccctcccccgaacatgagctcgtgccgccgtcctcctgctgcccaaatctgcgccgccgccatcctccccctgccccgctcgcgatctatgagatgagacggttgccgccctctactccttttaatcgtgtgtcacgcgcttcacgttctctccccacgtggtcgcttcccggcttgtggtcgtcaagccccatacaggtttttgtgcatcagagctctgtggtttcacccttctccatcctcatctcggctacgacctcgccatagtttcaggtatacaagccacaagccaccaccctactcacgctcaggtttcttatcatcggctggctcctatggatggcgtagtgggggctccgatgtctaaatttgggtggggaatgtgtttgggaagggttggtggtgcctgatgtacattaggatggaatctggtggacttggccggtgtttggcatcacctggtggcgagtgggatgcccctgtgtgcttgccgctggagcattggggaagaaaggtggggttgggtgagaggagataccacatacatgcagccattccctagcatgacgttgggcatttatttcaaaagaag

SEQ ID NO: 160324 - DNA, 885 bp, Zea Mays
gttcaggggacattaggggtttacacttggagttgacaggttcatactgataattggccctttgatgtgaagtctgagatttttggagacaattgctctatctgctagatttctagtctctctctaggacagaaatgactgtcactcttactcgacattcttccccacagaaccttttttttctcaaacacggaggagggatgtgtatcattgtattaaagagaaaaagaacggttctgtacaacacaacccccttatctcactagagaaatagggcttgccataaaaacttaaaaacacatttttgaatgcaagaaactaagaaacacgttcacctgatacaaataccgcacgctggactaatcaagttagtcttagcccctggtctatacaattcctgaaactttctagctccagccaggggccataatctcgattcctctgtgaaatactgattagttttccatgagagagaggtaggtgccatcaaagacactttattcctgcgaatccacaaggtccaagcatataaaatacagcactgttaaatcccttcttgcttgtctggtcaatccttcgactagctttcctccaacaatctgtgaagctcagttcatagtgccttggtgcagctcgttccagcccaaggggaggtaatatcccatgccagaactgtcatgcaaaaacacaagtggtgagaccgattcttctccttgatcacaaagtaaacatttctcaggataaggaaagccatgtcgtactatcagatctgctgtccaacacttgtcctgaactgctctcagcacttcttttctttgtgctctgaagtctgaataatctgttatacctatttatgacaacttgggtcttttgggacaatgggag

SEQ ID NO: 160325 - DNA, 519 bp, Zea Mays
tcccactagacaaccccgtgcaaaagtcgcccaagggtgccaccggacaattacaacatcacactggcaagcgaagggcaacagaccacattacaatacaagtcacagattacatacacacagcgaagggtcaccagacaagcacagtaatgtgcgacacgaagtctttcccacaagacaaccccgtgcaaaagtcgcccaagggtgccgccgggcaattacaacatcacactggcaagcgaagggcaacatgccacattacaatacaagtcacagattacatacacacagcgaagggtcaccagacgcaccgcacaaataaatacaattgcaccctctactaccgcacggcaagtgtgggcatcacacatactacatcggctcaaccttatggataatgcccgcctcccgataattaaacaacatcattttcaattcctcaccctcaaacaagttccgcagatccccctcaacaatactcgccccaaacaacgaggacatcaagtcgcgttggacacc

SEQ ID NO: 160326 - DNA, 564 bp, Zea Mays
ggaccatccggcccaaagcgcggaccgtccggtgcgacacagagaaggcgccgctcctacatccaggtcactgaccgttcggcccagagacgcagttcgtccatgccgccatagagggcagtgctaggcggtacacccctagtgattggcgctgccagattagtgccaacactcttatctcgctctgcaaccctttttccgcgccccgacgaactgttcatagctccagcaggccctctatcccaaagtgcaaaatagaagccacccttggtgctccgtatgcctatgagttctttctcatctccgcacctcaaccttcactttcatccgctcccaccaaatccgctaccaccctgaggatcgaccttcttcctccccccacctattgtcgaatccgcaggagttggtctcatcacgacgctccacctctaagcccacctgctgctcaaggaggactgaagggagtacgtctaagtctgctcctgcatcaacggtgttgcatcctccgtcgagcatcgccattgcgtactctgctccatgctcacgcaccacgctaacaccgcg

SEQ ID NO: 160327 - DNA, 395 bp, Zea Mays
taccgttgtaacatgtttgcgtgactagaaggagaatacttcggaaagaaggttctagaggcgtagagaacaaagtcacaggaacgaggtcatgacggttgaccagaaattgaacacatggaaatattttggacgatgtggacaccttgagagagcccggtttgaaccggcttttatatataggaaatatggtgtcattcacttcaccactgtatggagcagcccagcagaacaaattcagtccagttcttttatttctttcttcaggcctatggctcctatagcaaccgacaacacctgtagactgtaccaccgtcagcacaccgacgataaaacagagtgcagagagcaaaatttcataccaattgatattgttaaactggatatggaagaat

SEQ ID NO: 160328 - DNA, 791 bp, Zea Mays
gcgagaagctgatgaagtcttggctggcgaggatagtcttgagttttggtcttaaccccttcaagaaacaggccatcttcttggtttctgtgctgacatcgttaggcgcatagcgagctaattctatgaatttatgcacgtactcactgacagatcttcctccttgagttaattcccgaaattcatcttatttgagctagacgatcccttggggcacatgatgttctcggaaggcggcttcaaattctgcccaagtggcatctctgacggcagcgctgaaggtatcccaccaggatagggccatcccagaaagttgatgagcaaccagatgaacgcgctggttctcagggcatccgatggcctctaacttccttttttattgtgcgcagccagtcatcagcgttgagcaggttgctggatccagcgaatgtgggaggcttgagccttagaaaatctcccattctgtcctgaggccttccaccattcgggcgctggttctcaaggcttcgggtgaggacctcaatgagttgagtttggttggctagaacttgggctaaatctaatggcagctccgaatgtgcggggaggtgggtttcactcccttctccatcgacttctccttcagcacctagaggagaccttgctccaatccctgaggcggtaggcgtggttttatcctcagccatctgccagggggagaggattactactatgcacatgccaaattttttcaaacacgttattttattcatcacacaagttcattacaagcactcagttaccacaaacca

SEQ ID NO: 160329 - DNA, 446 bp, Zea Mays
gtataagcatatagttgtgttaatggatcacgaggcatatgggaaaaaatacaagcaaagtgggattaacctcgtgtgtccatatgggaatttcaacacaaacatacatttgtatacatccgtgcagtttttacatacacgtatgtataaacatgttcttataaatgaattatatactctatgtttggtgtaaacatatagttagccaaataagtacaggatggagcagacgaaaattataactaaccaaaataacaaatttgttgatgtacaggtagcacagtacatagcagaagcagtacatcaatcaaccgtgttagaaataaatgctacaaaaaatggaacagtcgattcaacaacacaatgccgtagcgaagtagaagcaatggcgagatccaattatctcttgaggtaaaccttgttggcttgtttatgtgatattgtta

SEQ ID NO: 160330 - DNA, 491 bp, Zea Mays
tttcgtctgttctctgccccggtctctgtgctctggcggttccctccccatcgccggcgtcctcccctctccggcgaccaccgactctacggcgaccacgtgcttctctccttccctctctggtgagcatcctctgctctctctttccctttctttctctctgtctatccctgcagtgaagcaccccaatttcctccctttgtgcaattctccaaatcctgtgaatcccagtgaatccaagttgtgaaatgtgttcccttgtggccattgagtgtccttgcaggttcttagctccttcgggagggttttcccacctcaaatagccgtttcaccgaaaccctagaactccacacgtcacgtgctcggtgaaatgcccaaaccagccaaaaatgctccaattgaacccaaatttttcaggcaccttcacaacacttctagtaacatatttgcaaaatttcacgccaatccgagattccaggctttaatttcac

SEQ ID NO: 160331 - DNA, 2011 bp, Zea Mays
gaaaaaaataccacggatgccaggccatagaaatgatttgttttccctctgtttttctcagttcatcatctgatgatattggaaattcccatttgcacgttggaaatatgctttgtcattttgcagcagtaccctcatatttatgtaatgatatattgtacaactaaagaatgtttttgttgtgttatcatttgaattttgaccgtctactctttttttcaggacgaagaagggacagcaaacatagcatttgaacacctcgttagcatctatgcagttggcttcttgggtgctttgtcgggtgcaacagtcttcatgttgtacacccgcttttcaggcacgacggcttcgcttcagcacttctcctttgcatgcgttgctggtgccttccattggttgccagctgtccttgccgcttatgccgtgattgtccgggagacaaagacaaccaagagcccagtggaatttgctctcttcattgccttcgcctacttaagttatgggatcatcgttagtcttctcgccagtgtcaccaacaaagctctggctacaaggtcagggaccaagaagaaggatgtagcacgtttgatccagcagcgcataaccatcgctgcacacctcagatttgcaaagatgatatccggtacagaagccttttgcatgtacttgaggcttcttggagcaaagattggcaggcattgctccatccgagccatcaacccggtggcagatcctcagctgatcagcatcggtgatggggtccatctaggtgatttctgcaacattgttccaggattctactcaaaggggtttaccagtgcagagataaaggtccgggacaacactgtggttggcagtggcagcttgctccttcctggctccgtcctccaagagaatgtcatcctgggagcactgtctgtcgccccacagggttcggttctccttcaaggtggcgtctatgtcggggcgcagtctctgaccttggtgaagaacacattgctcgcagaagatgaacggattgtggagatggacccgatgtataagaagattgttgggaaccttgccgcgaacctggccatcactaccatgaacgtcaaatcaagatacttccaccgcactggcgtcagcgggcggggggtcctgaggatgtaccaagacataccttcgctgactgagcacaagatatttggcgctggaaagtctttcccggtgattgtccggcacagcaacagcctcagcgcagatgacgacgccaggctcgacgctcgtggcgcagcagtgcggatcctctcggatgatggcgaggtgcctcttcttgacctcacactgaagagcggcaaggcgttttacgcgcgcacaatcgccgacttcgccacctggcttgtctgtggcctgccggcgagggaagaccaagtgaagcgtgcaccgcacatccgcgacgccgtctggggctcgttacggaacaccgattcgtacaccaagctccattactactccaacatatgccggctgctgcggttcgaggacggcaggcagatgtatgcaaagttcaagcttcgtcctgcggaccaagccatctcagaggactccggccaggtggtgccgcgtggcatcctgccgccggaaactggtgcgatcccgagggacgagggtgacacacgcccgctgctgttcctcgccgacgacttccgccggaaggtggagtctcccgagggggtgcgctatgtcttccagctgcagctcagggacgtccctgctgacagcgccactcgcgagatcgctctagactgcacacggccttgggacgaggacgagttcccgtacatcgaagtcggagagataagcattggcagcaatctctcagcagaggagacggagaagctcgagttcaacccgttcctgcggtgccaagaggtggacgtgatctcggcgacgtcctgcaagcagagcgcgtccatcgaccatggacgctcgctggtctacgagatctgccagcgcgtgcgaaacggcg

SEQ ID NO: 160332 - DNA, 533 bp, Zea Mays
gggctcgctctgtcagcgctgaccgcccgttcgcaagctcgccctcgctggcctacagaccccacctgtcagccccctccccttccctaacttcctgcccgtgctctccgccgtggaagcgcccacgatgcacgtttcccggccactcccccaagcgaccgacctcttttctagagcccgcaccaactcgctcactcccctcgctcagttgcgccctcagcagacacccttgctcctctctctctcgcactccatggagctccgccgtggttcgccgtccgttctgtggctaccgtcgagcttctgccgcatcccttgcctcggtgagcttcgtctcctcgccgacaacgtgagacacactctagtttgcccctagcccctcagtttcacctcgttcgtgctcaccggccatttcacagtgcagtcggagcttcgtcgccgtcaacccaaggcctccctgcgtcctcgtcattgcccaagcgctctagagtcccttctcgaggtgagcaactcccccaagccattaattttcc

SEQ ID NO: 160333 - DNA, 680 bp, Zea Mays
gggatgaattggttgcacaagaaccaatcaacccttagttgtgacaagagaacagtgaggttagtgtcttcatccagagaagagatagtaactgaactgatcatgcctaaactagaaggggcatgtcatctaatgtccatagatggtaaggaggccaacccgcttgaggccattagagttgtgtcgaaatttctagatgtgttccctgaggagctaccaggcatgccacccaagcggaaggtcgagtttcctatagagcctgaccctagcaccgcccccatttctaaagagagcttatagggtgtatggaccagaattggtggaactcgagaagcagatcgatgagttgttagagaaaggttacatcagaccaaatacctcgccttggtcgctccagttctgttcattgagaagaaagatgggaccaagagaatttgcatagactacatggctttgaatgaagtcaccatcaagaataagtaccccctgccaaggatagaggacctatttgactagctcagaggtgtcggcgtgttctcgaagatagatctaaggtcaggttaccatcagatcaggatccaaccttcgaacataccaaagatgacattcattaccaagtatgggctatatgagtaacatagacatgtccttctgtttgacaaatgtgctagctttcttca

SEQ ID NO: 160334 - DNA, 384 bp, Zea Mays
acttaatgctggtacaaggataaggccatactactaatccacttacgcctaaatcggtgacttagatcaactcagccatacacaaaccacttgacctacataattggttacataactaatcccaactagcatatagctacctactaaaccctctacctagctattacctactgatctatcttaacctcttggtgacaccaaagctcaagagggaaaagatcaacctcgtcaaggaaggagagaagtcaaattcaatcttcggatgcattaccatctgacacgaagttcttccttaccataaactttcttacccctgactattcttgcctaaactatacatctcttatatcctacctaataagtagctggatacctatgccctcc

SEQ ID NO: 160335 - DNA, 504 bp, Zea Mays
cctacaccaaaatgcagttcaagaacaaatgggacaagatgaggattgagtacacaaattggaaaagactatcgaaggaaaatggtttgggatgggacactgcgaaaaaaacctggagtgcgacaaataaaaggtggaagaaattgaataaggtaatagaacttttggataattgtctttattgcatcttgtgttacatattatatgtctaacatcttctttctcctaatgtgtagcaatacaaaggaattgccaagtttaaagatgggcctctgttgcatgaggaagaaaaagccatcatgtatgaagatattaggaacacaggagatgatcattgggctccgtctagtggtactacaccacaaagtctagagggtgaaaccactgagaacactgatgacaaggatggagactatgaggccaatgatgagaaggatgaagactatgaagaatgtgaagaggtttcacctacaactgctaaaggaaagcgtcatgtttttgttg

SEQ ID NO: 160336 - DNA, 633 bp, Zea Mays
gctctatgcaattgaagcagctcgtcttgcttcagcagttgaagaggctcctttgacaaatttaggcaccacggccagttcaatgtaacgcggccggtgggtcagaaccttcatctttttgcccttcggctcagctacagtggccgaagtggcagtcttcctcttttttccttgcccccgcagcgggaagcgataatcggggtgtatgaagccaattgcatcaaagaccctattcagtcttttcttcccccggccttcgaaggctgcggacaaagcattatcttcggccttgtagtaagctccaagtagctcatcactggtagcttcaatacacttcagccagtcgtcgtttggctcatcaaacttctccctaaatctgaaggtatacttcagtcggaccagaccaccatcactagagtcggtggtggtctccttcggcatttcccagctttccacaagcggccataccctgaaggatatatgctcttgaatcaaatcccttgtgccaatgaaggaacaaacagtgctaaaagccctctaacatgcttcaacagcgtcatcaatttccaccttcggccttcgaaggccgaagcgagaccaaatgggtcgctgaatgatttctttgatatcttc

SEQ ID NO: 160337 - DNA, 320 bp, Zea Mays
gaagaaaatgcagaatcatgtctgggccgaatctccatttcccaacccagctaatgcaaccgcacagactcgaatttctccccagccggcccaacactccgcgcttgcggaaacacccacttacctgtggggacagcaccactacccctcaaccgtagtcgctattatgtggggttgttgatgtcagcttcttcctctcaatcctggtaatacgaaaacaactcgatctgtgcgcggctggtttgttgatggtacctaatcactgatccgggcgggatatggtcccctgtgctaagtatatatatgcttgggtggctcgt

SEQ ID NO: 160338 - DNA, 455 bp, Zea Mays
agctccacttggaacaatgctggtctggctttctacaggaagacgcagaggaagatgtatgtacttcgtgttgtgcagctactgccggtaagtgtggatgagggaccacagagttcgcctagcagcatcgctgacagaaacaccgtaggtggatagcggtgtcagagactcatgagctgacagagtcctgaaccctctatcacctgcatccatcaccctgacatgaatgcgagtgatgtagtagcaagtccgagggggctcgtacacttgcctggtctcatacaggggttggacgtaggttcccaacgcatgcagaacattctgcaacaggttaggaaagtgccccgtctcgaacattgatgtataatgttcgatgataggccatatccccatgaagtggtcctgttgttcaccgttgctcctcgtttatgttctcttcttcttatttgtcgtcg

SEQ ID NO: 160339 - DNA, 466 bp, Zea Mays
tgatatagagcggcttacggtgacatggtgaagcctcatggcacgtggcatctgatcgacgggcggccaactccggtgacttatgtgagccggccgtaaagcaaaaggggtacggcggcacgacggtgagcaagtccgagctaatccgagcgccaagatttttacccatcttcgttatccatctgcgctgggcacgaatcaccgtggctggcgcgaatccgagcgcacggctcgtcggcggcgaggggatctgaacccaggatctttttcagttactgtactatgagcacttgttcagagcgcctgacagaccaaattacagcgccaagatctcgaatttttgtgcaagaacttgccaatccatccgtagcaaacttgtagccctatgatccagctacaaattgactatggcaactatcctcaatcgagcaacagatcttactcaaaatcaagccctaagttcatc

SEQ ID NO: 160340 - DNA, 517 bp, Zea Mays
gccagagttgaacgtctaatgatggaactgtgccatggaagcagggagcgtgcgcgtgatagtcgtctcattgctgagttgtcaggagaggttgactatttgtagtgggagattgtggagcgggatagggctattgactgggctataaattcacgatctatagcctaggattgtgaggcgaatgcccgagcccgggtggaagagctaagcgtagccctggaaaatctacaagcgtataacaacactctacacgaggaagtccacgtgttgtatgaccagttgcatccgaacgtgtcaccggaggttgcacctatgggagccagaacatcaggagtagctagcggaggaccttatggggagttggatctctctggagctcgtccttccatgaacatcgcggatgatcgttctctcgaagctagcagtggagcgggagcagccaaggacgcgaataactagattagtatactaataggttgtttccttatgtaatctaaattaggaaaaatgagttgta

SEQ ID NO: 160341 - DNA, 819 bp, Zea Mays
gtttctgaatttatttctaaactaaaaaccattttctgaattgttttatcccttttattcaatgattggactgggggcactattctgtgaaagaccaggggctatttcgtatatttctccaagactcatacccaccccgcgcgtggatggcgggttgaattagaaaaaccacatgggctctttagaaattatccaccgccgaaggggtatcttctattgtggaccggacgatctagatccgacggtcaaaaacgaattgataagccacttctaatctcgcccacacatctagcatcctagggttcagattgcatggagcttttcccttaatctaatccgtgcgttgcctcttcaatggtccggatcgatcctaatctcgatcaatccagaacgcctcccgatggatcccacggccaggaactcttcttcctcccagtggccgcatgaggcggcaccgagtgcccagcggcggtgaacacaccggcgtccatcgagccggcgccaaggtgccccagctctagagtggacacgcacggattcacgaggggagttaagcgaactccaggaggtacttcttcttaccggcaatgcaggcgtagggggtgatgtctacgaagagggcggctccacggaagcgacagcgctccggcgagaatttagttgagccccgctcgcccacagcccccaattctcccacgcaacggcccccaagatgagagtatatggaggcgaattttatgggtgtaaagactcaccggtcggtggagtcgacagcagcgcagtacagatccgccatgggatgtgtcgtctagcaaggta

SEQ ID NO: 160342 - DNA, 699 bp, Zea Mays
ttcacatttttcaatagacctctgaatttgtttttctgtcatttcttgcaaacggcttaagtactctgtagaagaggaagatgcacctttctttctctcagatttactgtaatcacgacctctcagtcgtttgcctgtcaacccagcagaaccactatcagtttcaagtgggtcaccagatggattacctgaagatccaatagattttgcatttaagcctcggaacgaatgtcctgcacatatactctcccatttgggttcacccttcagtttatgccagcaatgcatataatggaatggtttctgttcgtcgtgtgcaaacaatgttgccgcctttgaagtctgcacaaatattagatgatttagagaaatgtagtaacaagtatgcactactaaataattcacatgatttgaagtgtatatgatttgccttaccttgtcgtcatcagttaagccactttggttctcccttaatactcttgcgtagtagcctgagaacttactcacatcagctctaatcttgtcccatctgctgcttagtgctctgttaactctacaagggtactggcccctctgttcgttgtaccttttttcaattcgagcccaaagcccctcccttctttgtccagtgtgcacaatagggtcactgcttatttgcaaccatgttgtgcaaaggagaaggtcttcaggacctgtaaa

SEQ ID NO: 160343 - DNA, 454 bp, Zea Mays
tctagatgactgacgcggtgtacacgctaacttattggacttgacaataaagtcgacgacgctaaaggatggatgaccaagccgacagtgccacagatcagaggaaactgagtggctggacagagcagcatggcgggacataggtgatgaagacttagagcatggcaccgggtacagaccattgaagcttttaccgcgtagaagtgttctccgtgattttttatccttgatacagaaaaaggatgggtgaagttccacaaatgcatcattatcatgagctaatttttgaatggacagaagattcttacgaacactaggaacatgtaaaatattgtgaagatagagtggacgtgaggaaccaggtattaacgagtgaccaatatgagcaatagacaaacctgatccgttagccacctgaactgtgtctttgccagtgtaacgttcatgcagactg

SEQ ID NO: 160344 - DNA, 696 bp, Zea Mays
gtgggcgcagggaggctccggcgagcacctgcaccggccgatttacctaaggattgatgctctacttcggtcgaaaccgaattcacgccccaaccattgattcccctaagttaattgcacaaatggtgaactaatgtagtctagccacggtgagcgcgcggatgaaccaaagatccatgtgttcccgacggtcagtggacccctagtccaattggacgggtcagcaagcatcgtagacatgtgagaatgcttagacgagggagagggagggttggactgaccgaagtacggctggccgcggtgaggttgggcttcgggtggcggagaacagatttggggcgaacgtgaaattggagagctgtggggagtaatcggagctacgcgtgggttctctggacgcacaattacctagcggcactggccgaggctccaatttataggcagcttcgacggtggccgggaattttaatggcgatgtatggcggtcggagataaggaagaggtctggcgtcgtggttacgtgtccccagccgtggcgagctcatcgacgatgatgggacggcagtagggaatcacggcggtgccgtggaaaggctcggacacgcggcggcacagagatggcacgacgacggcgagcggccttatctacggcggtgagcaaaagggggaaagtattacggcttaccggggtggctt

SEQ ID NO: 160345 - DNA, 361 bp, Zea Mays
gattttgaatgatgagcggttcaaagaaatgtttgaggataatgtgtggaattttactggttgttttcagtactgctattagattgtagtcttgcagatggatttgtattgtccatgttggtagtggtatataaaaagaaattatagcatatctcaatccatatattctgataattacctgatcttatgcttttccaatgatgttgttgtttattttagcatgtgagacaccattttctatatttatcctcttattgtggccaccacaccaacttgaatcttgtcctacactccttgtgctattcatattgtaagctaatcagtagtatttttccgtgtgtgatacttgatttctaacccc

SEQ ID NO: 160346 - DNA, 739 bp, Zea Mays
cgggtgctatgtactcggcagagaatgtcctcgacgatggatggacaactttaggggctgtttggaactggttttaagtctaaaaccaccgtaaattacggatctgtaaaattttacaatcctagatccaagttgtctgctttgatggacggtaacatgtgtggtttgacaacagtattatgtcttccgaaccggaaaataaaaattttgcccgtcggccactcaatcagtgtgtactgcaggtagggacagatggaccacaggcatccaaatctaatagggagaagacgagagatgggatgtaagctatagccatcggatggtgtatacggtcagatttatagagtagaacttaagaatttgaaatacaagaaactgctagagatagccagatcgtgtatatggtcagatttatagtcagatttatatagtagaacttaagaaattgaaatagaagataggatagaagcttatgttatatgcagtacaactaaattgtatatatacacactgattcaaagtatttgtggccggtctaagttaatcggtccaagatataattgaaccgaaggtttaaccggtccagtgaataaaaaaatatcatttccatgtccggttggattctaataactacgcatgaccctcgtgccgtggtgttcagcaagagagatatgcatgcatgcaatgcactggggctttggcccttttcacatgcaccacaccgcctcacgatagtgca

SEQ ID NO: 160347 - DNA, 562 bp, Zea Mays
gggtgattcgctgcgctcggtgcccgcttgtctgccgctcctccacgagtgcgacgcgaccctggtgactcgatgcgccctgggacccacctgtcatctcgccttcccgtcaacggatgtgccgagcatggcggagcgcggagatctcgcgcaatccattgaggcatcttggccacgtccgcgtccttaagaagcatgacagggttcgtctctctctccccttcattctaccctcacaactccccaactcgcaccgcctgtgcccttacaatttcctcaccgtgcgctgactcgtggtgagggtgtcgccgccaccgtgaatatgcgacttggtcgtcgctttggcttcggtttgcggtcggggccttcgttggggcgttctggtgcttgtggtgcccacggctggcgcggttggtggaccgcggggaaggaattgctcgccgtcgtacacactctgccgcggacccgccattctccgtggccagcgtcttctgccactcccagtctctggtaaggccttcgatcggattctatatcttcctagcgtcgtgtagagtcgttc

SEQ ID NO: 160348 - DNA, 408 bp, Zea Mays
ctccatctccaccttacacacccgagcagttttttgcacaatttctgggagctcaaagaaatatggaaaacttcagaaaaacatggaagcagagcttcacaacattgctgacaacactctccatgggcaacctcatggcacacatgaagtcaatcagtatagaagtttcaaggatttcatggacactagaccacctatattcaatgaggcagcagaacccttagaggtagatgagtggattaacactatgggcagaagtttcattttatgagacatatagaagatcttaagaccgagtatgcagcacatcaattgcagggacccgcatgatgtggaggtctcattaccgcaccacctactcagaaaatgctccaatcgcttggcaaaagttcattgtagcttttagag

SEQ ID NO: 160349 - DNA, 814 bp, Zea Mays
tgcagagttagcctaggtgcaggaagagttggcccaaattacacttgagaaagatgaagaagtctaggtcagagatgtggctgttttggataatgtgttgtgtattggcgaatgccaagactccagaccttactggtggaaatcattagagaaaaggaatgtagctttgactgaggtagcacatctcagggcaacacaggtcaacctaatgcaccagctgaacaatgcagaagcttgaaatgctaatatgcatgaggaggttcaccagcttcatgcccagctcaatccaatcaacccgccaggaccagaagaagcagacaccgtcgcagccaatgatggaggtgtagtctccgagaccggtagcgtgcaggtgtagttgttagctgtcactagaggataggctaacccatttggatagtgttcctaggagtaggaacatgacttttggagtaaggccaatgtaatgatggcttctgacgcatgtgtgtgtgtgaaaaacactcttttggttggttgtgcatgcgagcggaaccatttgcttgtttgtacatttgcattttgtgaagtatgtgatgacgatgttgcacatgttgggatgtggttcttgccttacgatttttcacatgaagttttcattaatgagatattgtatggcatgatttccttatttcacatatgtgcaacgtgactcgccgcttactcataataaaatgtgcagatggtgactactcaccgcattaacctaggggcgctggagcctctggtagtgataaccaggagggtgaccatgaagcaccacttcctccacctccgc

SEQ ID NO: 160350 - DNA, 427 bp, Zea Mays
ggaaggcgagttggggagattcgccacgaaaaagggagaggagccaactgaaacatacaatagacttaagaccctagtgaacaagattagaagctatggaagcacaagatggacggatcatgacgttgtgtgcctcatgttaaggttatttactgtaattgatccccatcttgttaatttaatccgtgaaaaccccagatataccaaaatgtcgcatgaggaaatccttggtgagtttataagcgggcgcataatgataaaagaagcaaggtacgtcgacggcatcaccaacggacctcttcctctctacgagccacgacccgttgcactcaaagcaacgaccatcacagagacgctccgaagcaaggtaacacaagtggaggctatcaaacttaatgttgaagaaatgacgcatgtaataaagcgc

SEQ ID NO: 160351 - DNA, 451 bp, Zea Mays
gttttttagttgatgttagatttgtatgattcacaatcagtttcataattttgaggcaatgttagagtcggttttctatgcgtgcggggggcgcaaccaagtacaacaataaattgtaactgacattgttgaacacattacacatggctggtgcctggtgctgaaccgttgatgcacggttgttagcggtggcagacaaaaggaatttagaagcaactaaaatcttattgctaccttgcttctagaaaatcagatagattctataaattgcgaccgcaaagtcggattgctaccttgcatgaatgatgcagcctgccttaatctgttaacttaaactttaatgttaccaaactctggaggcttagcgctaaccggcacagactaggcacttacaatgatgcatgttcgggaggggtgatcatagatggagttgatcttcacaaacctaaaa

SEQ ID NO: 160352 - DNA, 432 bp, Zea Mays
gcgcggaccatctagcgctaaggtttggacagtccgcacgatgtcaccaagggtaggtagccattgatctgttagtcacagtcggtggattatcggttatatcagttgagttgttagatccaatcattgtaacaggcacgaatcgtccaggcctaggtcatggactgtctgccaatgcgtagagctgacaaaaagggcataatagctatgtgggtagttgggggctataaatacaacccaccggcccaatcattacaacccttcactcacattcaatgcaaaagctagagcattcactccaacatccaaaacaacacctccaagtgatcaaagacacacaaatgctacatcaaagagattaatgcgttgagttagtgccttgtgtgtgagtaatctagaggagtgtgtgttgtgctcttgagtcttggagta

SEQ ID NO: 160353 - DNA, 451 bp, Zea Mays
aagagtaactcctcactggcaatgctctagcaatatttggagatgacccatcaaatatacagtgattgcggtgattgcacaatatccaagcgtccaaaatattcatggaattgagtccttttctaatgagagcacctactttgctagaacttgtttcccaccaatcttcaaaggatttatcatccgaacgaggagtgagcctgcagcccagcccttcgcaacagatcaaccaaaactctcgagcaaagacacactccaacagtaggtggttgatgaattcctccgcttgatcagtgtgacagtgttactgtggaaagcatttctttttgctaaccgattaggtgtccaacacctatcccgaattactagtcacataaagaaccgacatttaacaggtccaagattttcaaattctttcccctgcccctccctgaaatatattttcataagc

SEQ ID NO: 160354 - DNA, 473 bp, Zea Mays
ggcttgttggcatcgctgtacttcggttttgtgtgtttttctcggctatatcctaccgatcatccaggctacgacctcagcaccaggcgtgttcttgcatccaaccatgtctacttcgatgaagatcattttttctttccacaatgtgtctgctccggctgctcccacatcatcataagacccagttgatgatctgatcccccctcagccaccacaactaatgctggatcttccgcaccatcctcaccgccgctcgttctttacgtctgtgtgtgctcagcctatattaccgatctctgaacccactccaccatcgcacatatcgagcattccccagagcgccactacctccaacacaaacacccacatctaaccatatgatcacccgcgcgtaatctggcgctcctcgacagcttcctcttccagcccgatacaatgacttcttcctaaatattgccgacctcccagctccc

SEQ ID NO: 160355 - DNA, 593 bp, Zea Mays
gccttcgaaggccaaaggttgagattgacgaagccgccgaagcatgccaaaaggcttttggtactgtctgcttttttattggtacaagagatttaatccaggagcatatagccttcagagtatggccacttgtagagatctgggaaatgccggaaggagactgtcaccaagtctagcgagggtgagctggttcgactgaaatacaccttcagatatggagataaatttgatgaaccaaatgatgactggctgaaatgtatcgaagctacaagtgatgaactgcttggggccgtattccaaagcagaagataatgcattatccacatcctttggtggccgggaaaaaagagattgaacagagtttttgatgccattggtttcgtttaccttgactactgctacccgctgcgggaaggggaaagaagaggaagactgctgtttcggccactctagatgagcctgcgccgaagagcgaaaagttgaaagtccttacccaccggccatgttatattgaaccggctgtggtgcctgagtttggcggagagacttcttcagctgctaaaccaaatgagcccatttgtcctacgtagaag

SEQ ID NO: 160356 - DNA, 682 bp, Zea Mays
ggtgtctttaggacatctataacctttaaggtgtataatatacaatcttcaggtcgaattgtaagggcttaagttcataggtgatctcccactgaaccctgcaggtctctcaaatgtttcatccctatacctcgtacacattttctgaatgtgacagcaggtaaggatttagtgaataaatcagccagattatcacaagacttgacttgtaggatttttacctcaccctcgttctggagttcatgaggataaaaatacttaggacaaatatgcttagtcatattgctcttaatatagcccgtttctatttgtgcaacacatgcaacattatcttcatagataatggtgggggtatttgcggtgttagaaccacatgacttcttgatgtggttagtcatccatcgtagccaagcacattctcgtgcggcttcatatagtgagattatttctaagtggttagtagacgttgttactaatgtatatttgcacgatctccagaatacagcagtgccaccacatagaaatacaaagctagtctgagatataccattatggggatctgactgatatctagcatcagcatagcccaccatagtctgatcctgattcttcgggaaaaacaggccaagatcttgagtgcctttaaggtatctaaatatagtcttaacacctacccattgtc

SEQ ID NO: 160357 - DNA, 617 bp, Zea Mays
gaacattgaatgatgccccttatgtcctccctctggttcaggtcgttcttcacataaaaccactcctgcatctaagagcccggccacttcttccaaaatgtaggcacaagataactgtcctcagagcggggcacgaagctgtagcagccgaagttgctgtggtattgttctttcccagtcgctttcgtctaataggataattcatgaatattacagaagcacctagcgtttggctctaacccttggctcctcatggcccatataaaaccccctactttgataagagcctcggggataagttgatgaaggtatatttcaatagtttttagaacttcgacgaacatcttatgtagtaggaaacgaagtccagctttcatgaagcttctgaaaactaccacctcattagcttcgggaagaggaacggtattctcccctccgaccctcataatagaaatatcacacaagtatctgcctttcatcgctttgatctgcccttacttaacagatgactttccaaaaacaacatgactaggcctccacgaccgatcttcaacttcctcattcccgctctcaacatcgaaactctcattgtcgctggaattctcagacaacctagc

SEQ ID NO: 160358 - DNA, 622 bp, Zea Mays
gttcaatcttgcagcatttgccaacaggcaaaaacagaccgcactcgcagtccgggactcctccagccactggacattccttctgcagcctggaacaccatttctatggacttcatagagggattacccaaatcctcccgctacaattgtgtacttgtggtagttgacttattcacgaagtatgctcactttattcccctgacacacccatttacagctgttggagttgctcatgcctttttccacaatatatataagctccacaggctacctgctgctatagtatctgaccgtgacaggatatttaccagcaacttttggcgcgaactttttcagtcagctggtgttaacctccacatgagcagtgcttatcacccccaatcagatgggaaaactgaacgtgtcaaccagtgcttggagacttaccttcgctgcttcgtaaatgcttgtccgagtaagtggtccagttggctctcagcaactgagtattggtataatactagctatcactcttctattggtcgatccccgttcaaggctctatatggatacccaccaaaacacttcgatcttcgaaacctggactcttcttccactgaattgtctgactttctccaggaaa

SEQ ID NO: 160359 - DNA, 947 bp, Zea Mays
agatggccccgattaaaccagctccgcgagggaaataatgtgcaatccagagcgctcagctctcgatccgatggcccaaatgactctagcatcacccaagctccccatcctactatcagcgatctacggctaacattaatccaagccgaatcgttgcgattgcctaattctccgccgctcattcccgatctgacggtggacatgcatcgccccctactcggtcaccagctcaaaatgggccgccggagaggatacagaccacggcggtccatcgccggcgccacacgaacctcaactctacgcgctcgaacttcgctcgggttacgtctacacgacgaggaagcaattgcgaatgtttgggtgaggctgataccggtattctaacggtgtggtgtcctggccacggcgtgtggcggattacgacgacggtgaagaattgtggtcgtcgagatcgtccgaccactcagccaacgaccccgacgtggcacagttgctcgataggagccccagaccgcgcaccaacaccgagggagaacacccgtggcgattctacacggcaaccctcctctctctctctcctctgattgctaggcttgcacggcggcgggtctgccagaagtggcaaggtgggcgagggagtcaattgtgcccccagtcgcacacccccggatttgcacgagggttgttacgccgccgcggtaaattcgcacaatggtttcagaggaaggggacggcgtatctggcaactaggccccacatgacggtgagtggtcaagcgcacacgcggtagctggccaagggggtccgttggacagtgacacagcttcggttgagggcgcgcgggtgtgagattgaagcaccgggcccatcggtcagcgtagggttaagggcgcacgcgcttcggttgggctggcagcgcgcgaagggaaaaggtagtgggccaaaat

SEQ ID NO: 160360 - DNA, 846 bp, Zea Mays
caccgactggcgggaccgcttggcaggctgactctctccatcaaacggactccgcgccgcgcgtacgtcgtgacgctgcacctcaggacccactgccagccacactttcccttcacccgcacgatcggcgtgatccgctgaccggtaggcccggcccgtcagtggcgtcttctacgcctaactcgcgcagcagagggcgtgatttcagccgccatgaccgggcgcacgggcgacctccctctccctccaaatcggagcccatgagataaaaggggatccccgtgacccgttcctatcccctgctaccccctcacgcgagctcatgtcctagaaaaccttcagccagccaccgcgaaaagccgccgccagcttggaccttacgggggcaacgaatcgaccgtcgcaaggcattggggcgatctcgagcgactgccgaagctagtcttggccttcctgggcgaagcaagtcacctggtcgtcacgaattgctcaccggagcgcttcaccgccgccaagccgcccctttgtcgtggccagggtcttccgcgccgcgaatcacggtatgaaccctaccctggtgttcgctatgtcgttagggttgggctagtggtctcgggtaggcttgcgggcctgtgaatcggcggtcagtgactcgccggggcgtccgccgcggggaacacggcaccgccgcggggccagtcgtgaggtagaatacgtctgggcaccattgattcagtattcgacggctcagattagaatagcgataccgtttcgcctcgtgtcgatccaagccgttgatctcgcatcgtacagttggggcgtgatctcgggatatttaaatccgaa

SEQ ID NO: 160361 - DNA, 511 bp, Zea Mays
gacggtgtcaacaacacaatatagatgagggcaagaagtcacgtgaagcgctttccaaaaaccttatttgccctctcctagtgcaggatctcgaatgtgacaggttccagcagcggagcacccgatatgtcgtgctatggctcatgtcaaaccttggcccgcctatcttcttcttcacggtatctcatgacctcgccgagtcgctcgcatgacacgtcgcgtactctcgatctctcacagcccacttctctgccgtcgaatgtcgctgttctagctccccctctccagcttcacttccaatatgcttctccgcttgcagctcagccgctttagcacagtgctcctccctctagactctagcacccatgtgtggtgggcaacactgtgtcctgcggtcgctggcctccgcaaccgtactcgatgtccatgctctcgcgtgtcgtgtccgtgtagcgatcctccacgctccttcctctctaatagatagtagtctgaaaacgtccaacttccc

SEQ ID NO: 160362 - DNA, 951 bp, Zea Mays
acccgggggccgctggagcttctggtaaaggtaaccaagagggtgaccaagaagcaccacttcctccacctccgccattcacacccgagcagttcttcgcacaatttcttgtagctcagaggaacatggagaacttgcagtagaacatgggggcagaacttcgcaacattgctaacaacacccaccatgggcaacctcaagaagctcatggagtcaaccaatatagaagcttcaaggatttcatggataccaggctgccaatattcaaggaagcaacagaacctttggaggtagatgaatggatcaacacaatggaacaggagttctgtatgttgagactttcagacaatctcaagaaagaatatgcagcgcaccagttgcaaggacatgtagggatgtggtagtttcattttcgcaccgcttaccctgaaaatgcttccattgcttgataccattcaccgcagctttcagagggaattatattccattaggcctaatggcaaagaaggtgtcagaattcatgagattaactcagggcacacaatcagtgacagagtatcttcatgctttcaacaacctgtctcgttacatgcctgattatgtggacaccgagatcaagataattgctagtttcaagaggggcttgagcctgaaaatgatgaagagtatggggatttcttcccacacttccttcaacgatttgattagcgactacttgacttaagagaacaacaacaatctctacgctatggcaaaggggtgtaaaaggactttggaatctggaatatcacagctctaaaccaccattgtgactcgacccagtttcaggctgatgttacctggagcaagattccaccctcaacctccaaagaagaaatagaagcaaggattcagggtttagaaagcattcaaggtggccttaccgcatgcaaatactagaccagaaagttc

SEQ ID NO: 160363 - DNA, 568 bp, Zea Mays
gaaagatttgtggctctgtttatccaagataccctgctgaatcttggctaacaacgttgcacattcgacagaagcaggcacatgagatttaacgggtccttgtagttctggcttgagtcccttaataaaatgagccacatacagagtcatccaaatcatgattgtggacagaagtggcatatcgcgcctcatcaaacgccttcttgtactcctccatggatcccaactgcctaatctctagtaaagactacatagcctgcgaatactcctctgatccaaacttcaacaacaccgcgtcacaaaactcatcccacgaacacggaccatactgaatcttaaaaatctgaaaccaacttttggcattccccttcatgttcaacgatgctgacactacccaaactgactcagggacccgatacaaggtgaaataatcaacacattgatcaatccaaatttgaggttcctccccttcgaatattggaaaaggcatgcgtggtatgggtagatgccctccttcaaaatcctcaaccctacgccctgtaatctctctctgacgactcaatggcac

SEQ ID NO: 160364 - DNA, 467 bp, Zea Mays
gcaagcataaggaatcttgttttgtggacactgaggtcagaaggagtctgcgcctcagggaaaaatctaaaggatttaagcagtgacatacttcaggcaagtgttgctacagttgtgcaccacctcctcctactatctcatcaaaattatcaagaagttggggcaagagttttgcaaagtggcacctgaagatctgactggacatatgttggggaaaacaaaaaagatagcttcaacaatccagaggcctttcaagggtgatagcagtgatgatagtggcgactcttctaataataggggaactaatgaagcatccaaggggccctcgaggaagtgagccttgatgctcaatttccttgaagctgcagtgtgcgctacattattttgctttattaaaaagtaattatgatattatatagccctatgaatagctggttgtgggagtatttctgggagcatatggctcg

SEQ ID NO: 160365 - DNA, 919 bp, Zea Mays
gtatttttagcattttttgtaattctctagaatttctttagctctggcagaaaaagaaaaagaaaagaaatgaatagcgttggatctgaactggaccaagtcggcccattactggaggaaagcgcccgcgcgcgcccgcgtgcagactttgcaaggaagaccctgtctttttgtacaacctgaaagagcccaagacattatttgatgcagtcgctgacatttgctaataaacccctgcgcttctatctcttcacactctgaagtccacgacggtggacggcgacgcgcagatttccggcgagcttgcaccggctaggatacttaatgaccatggacctaacgtggccgacactgaattctacctttggcggccatttcccctccatcaattgcataaatccgagttggactctccctgtccacgatgacggcggaaaccgagaacattttgatgtgttcatgacgactcagggtagtctagcacaattggataggtttacgagtaacaggagacttaatggaggctagaacattaagtaatttggtatgtactaacccaaggagtgctggccacggaggggtcccttgcggcggtggaagagaccgattccagggaactccgatgatctctaagggtggtggaccaaacaaggtggctagtgattcgttggcttcgcaactaagggacaaagagctgtgcttggttgatttggatgaagggggtgagagcgtggtgaatttataggccagtgagccaccatgatggccatggtgataaccatcaccggacatagctggcgaccaacgacaacgtcgggcgctgccctttcccatgagttcaccacgtgccgccgcgacagtaacgctgtcaaatcggtgagggtgtggatgaacggagaggagcagcgccggtgaccag

SEQ ID NO: 160366 - DNA, 1024 bp, Zea Mays
gaagttttcccgagactcatattcaccccgcgtggatggcgggttgattgtataaaactgcaggggttcttttataatttgtcacggccgaagaggtatcgattaattctggcgttggatcagagatctaggattcagattaaaataacccagatcgattcctgatcgctggatacgagatccacgatccagattagatggtgcaagaggtaagtgcgcaccaatctggaccacccgcagtccgatcaacggtccaagattaccaaacagaatcagacatatctatgagatctggtccgcctatccatattttaacggctgcgatcacaatacggaaaggcgagttgacgtttaaatcgtgatcgtccatttgaatcggacggccactagcgtgcttctatacccggtggcaactcatggtggagccactcaccacccgcggcgggccatcgccggagcaatccccatcaagagtccccaggcacaaaacgttgatcccgaccgagctacgcaaggcgagaatcaaggagtgtattatgaagggccttaccagcggctatgtcgcagtgcggtcagcttatagtgtaggggtgggttcccggtggagttttgctccgatgagtaatcaggagcgcgcagagtggtgttgaggcacgacggttctcaggacgatacttgcttctctctgcacgcagacgcgacagcaacacccgcggcgccagaggagggttgagcaccatcagatcgatgtcggcggtttgagttcctccacgacggcgtagactggagtcaagcacagaggcgacacaagttctacgacccggagagcgatgggaatggtcggggctttatatcagagcagcgtctggattgcgaggccggctggcgcggttagttttaacagctcgcgattcacgcgcatctgttgaagctttgcaagcgtggatgaagaagatgaccagtggggcctgggcgacagtgacattagggttcacgagtgtcaggccagtggtacaacggtgag

SEQ ID NO: 160367 - DNA, 906 bp, Zea Mays
gttaggtgtagcccccgagctttgaatggatttttgaagtaatccattcaaaggtattatgaaatctgttgggtgtagcccccgagctttgagtggattttagaagtaatccattcaaaggtcttcatctttatgttttgaaatcaacattttcagagtagctaggtgatgccatctgtccatgccttgttaggtctgaaatcaatttgatcgatgacaagttggacatctggctagttgaaacagagggccttcggctggacaccactccgccctgtacttggactcgtgcttctgttgattggactcgcgcttcagtaaccatatttggacttcctctcgtttcatccgatctcctctttttgtcgcggtacattcattgcgtatattttgtgggtatcacctctttagaaaatcttgaagattctgggcaatacacccaatgggtgtgcccaaagggtgtctgccccgcgaaaggtgtttatcgcgttgttctgaagtagtaatttgatgtgacggaggggtgtaatcattttcctgagcagttgacttgagtccaactggtgccatgttacgtgaaacaacgtcagtcgcctgacttatttccaggcggcttgaattgcttattgaattcttgcgattgttcggtgtgcggggtaggaagtggacggtcaccccttggcctccttaaatagcccgcttgtcctggctgttttcttcactcgcccttgatcacttgctctcttcttcttcgtcacttctccactttctgcacgaccatgggtagaggcaagagaggaaagggatgacctcgccgcgctaacagcaagtgcaagcgtcctccaagtccaccctcggaggactttggtgactcggagtactcgaagaaagtttcctctgagtatg

SEQ ID NO: 160368 - DNA, 966 bp, Zea Mays
gacatgtttctctgtgtactgatttcaggttcttcagccagtttctagcatactttttaacgcaccagatggctgtggccttgtttcggttgctaggtgcaattttgaagacaatggttgtagccaatacatttggcatgtttgcaatgcttcttatcttcctgttcgcagggattctcctacccagacgtaagtgtcttttcctcaaaaggaagtatgtcattgtggagaatgaacttagtccccatggttgcctgttaagcacatttgtttttttccaaatcttttctcattgaggtttcttatgtttcctgaatattgtactttgcattgtgaagtactgttgtttcttactgacttactgttccctcttgatatttatgtgtacagaggacattaaacattggtggatttgggcctactggtcatctcccatgacatacagtaataatgctatatcagtcaatgaattccttgccactagatgggccatggtaagtttctgcacacacacataaaaaaattcttctaaatgtcatactttctctatattattaggtacaaggaatgcaattcatgccctccaagatagatgtttgtacagagatcccatgccaagttttttcagtagtttgaagaaaagaaaaccataatatctatctttttcacttatactaatttctaggttcttgatgtgcttaattatttgtaagcggcgaatatcttgaactaatatagcatttacctgcagccgaacaatgaagcaaacattgttgcaccaacaatagggaaggctattctaaaatataaaggctactttggtggtcaatggggctactggctttccatcggtgccatgataggatatactattcttttcaacattctctttctttgtgctcttacattcttgagccgtaagtttttttccctgaaattgttattagcttgatgcctaggtgaagc

SEQ ID NO: 160369 - DNA, 519 bp, Zea Mays
ccctaagctcctggagaaaggaatgcttgagagggtcttggtgtggcccataaacacccgtgaaccaccactgagcaccaccttcctcttgcaacttgactgaaactgtgaaatcatgcaccaaactctcaataacagaatagactacctctctacaagccaccaaaacaccacctctggttccttgcgctggggagtaaacgaagtcactaaacccagcaccaagaatagacaggatgtcaaaagctgagatagagcctagcttagtttcctgcaaacagacaaccgctggtttgatgctaaggaccaaggacttaacaatgtctctcctagacctgtcattcaggccccttacattccagataagaaaaacaggctgcattataacagggtacactaaagaaacacgacctacaccccctccaatcaggtttgggcccggccttcaacaggcaattcccagccaaataaggctgccatggcagcaatatgctctctggaaagtgctgcatcaaaaag

SEQ ID NO: 160370 - DNA, 444 bp, Zea Mays
gccaaaagttggaatgccgtttgattctctagatgcagtggaggaattttataagatatacgctcatgaagctggttttgctgtacgagtaggagctcaaaacaaggtggtcggtgtggttgagaataagatgttcttgtgtaccaggcaaggtttctcgaagaaaaatgctaaagtagatgttattgcttctattgtaaaagataacaaaactgcaaagatgcgaccggagacaagatgtggatgcaatgcacaaatatatgtgaagttgggttcagataaaaggtaccatattgcttctatggttgagcaacataatcatggtttagtctcgcctgataaagttccctttcttcgatcaaacatctcaatcagtgaaagagtcaagacaaccttatttacgtgccacaaagcaagtataggtacatcgcaagcatatagact

SEQ ID NO: 160371 - DNA, 512 bp, Zea Mays
agaattattatccgaggagaatttctaattagcatgcttgtcgagtgcatatatcaacaaaggggagaattttttcactcacacacatcttgatccaagggggagttttttctttctctggtatgcatttctttttgtgagttcttgagctatgctttagggcgagcttttgagatttggggaactcttgttagttgtgttgagcctttttcctctttatggagggactaactttgattttagccctaccactatttttatgttctgatctagatttgagttctggctggtggtgttgagcccatttctactcttcttgtggactagccatttgcgtttggttgtgttgagctgttgccatttcgttgacgaccaagctttgttccctctcaatgacttgtatttggcttctgttggctttttggtcatttgaccggattctttcttccttttctgatggtttttatgctcgtgtggtagtgttaagaatgcactcatcaagggggagattg

SEQ ID NO: 160372 - DNA, 384 bp, Zea Mays
caactatttgcagtagcatacaatgatggaaatcattcttattttaagtctgggccattatatgattggttgcgacaacatattttacgtcttggcgaggggttaaggatgacaaggtgaccccacaagccagggaccgagcgtgagggtgtgcgtgaaggcggctaacgaggaattcccacctatcagcagttacgagagggtgaaatcgacgccgcgctgctgcacctaatggggtggtcccacctgtcagtgattaaagagcgcggttatgctggtatgctgtgcttcctaggccgaaagccacatggccagcttaggggcactattttatctttaaaatttatgagaaagagattttgagtttaaaattcaaattcaaat

SEQ ID NO: 160373 - DNA, 1370 bp, Zea Mays
aaaaaaaatagattttggatgtatcataaaacacgtgataggatatgtgtgaaccaagatgaaatttatcactcgagagatatctatgagctactcgatgtagtatgcggttagattaagaaagtgcatgggcatgacaatatggttaatcagttaatcatgatatgactaaaaaattagtttcaagttgtaatccactacaaggtcgagtgaagtcttgagctataataaggtgacacaaatctcacctttcgtttgacaggtattgtatggcaaaaggaccaagatatgtgtatatcgaggttcggctgaaatgatctttgtgtatatgagattcattaagtgttgctaggcatagctgttgagtaatggatcaaaaaaggtttttgatcatggccatctactcatgaacctaatgtatgatgtatcacacatttaagatgttggaacggttgcatagatgattggctgtagtgcaagtgaaatattattgaatatataagcaagaggcaaacatgatatatgagaacactagtggtagtgggaatttagagaaaaagcccgttagcataaggtctatatctacaaaggagttggcgtgctagagaaaagagagactcaacttagacgttattgttgtctgtctccctagtgtcacgacatccaagatgttgccaccgtttctctcaccgcactctcaccgcacgtgcgtcactttgttttatattcatatctgtagataccatagaaacattgttattagtattatggtattgattaacaacaaacatgaagagtaagaggataggcaaggacgtacaactatttacactacattgtcgctcgatatttcgtcgttgtatgcctggttgtctcgcaaagcaaagaccggtcggaaggcccttacaacacgatacgaccacacaaacctgaaacgccagattcggatacacaacaatccacggtatccgtaccgttccaacattcgacgcatcacccgacgacccggtccctttttaatttactcttctttttcactggacgactgacggcgctgtacacttgcacagggaagatcaagatatatacgggaagcacccacaggcacagaacagaacgcttcccgtgttttggactaggcgctcgattcttcggttcggttctttggttcttgtagaaattcgattcttcaaaaactaaaaccgaaattgcaagataaagaaaccagaaccgactagttcggttcttagttctcggttcttcggttttaaccgaactgtaacagccactctaaaattataattaacggtaagttttgtgagaaatttcagcagtatctccccgcaaacaaccacaagtgcacaatgccc

SEQ ID NO: 160374 - DNA, 785 bp, Zea Mays
gtggagttggtggtggtggaggttgtggaagattagaagagcataggtatccagctgctatttatgtgggatataaactgaacaggttgaggtaagaaagattatggcaaagaaaagactttatccaaaatgtttaagtcgtgattcatctcgagattcgctttgactgtcatatccttccttgttgatgttgatcttttcttctccagtcttgatctcattgattcgaggttagtgtatatcatcggggtcggaggaatatggttaagatagatatggatgaaatggactacatgatgtaggtctaaaagtttgtttgatgttagatgggaatagacagattatgcaatccatcgcgactatcggttggatcagatttcatgcatgtggccaagttagtttaaggcactagtgtagttttaagtgcgtgaggggtatggccttatcttttgtacccgcattaagtaacttactctagattagatcataatggattggatgaaatctagattagattagataagatctacttaatttattttggaatagatcctgtttgttacactattatgaaataagtaaggtggttgggataagtatgctcattaggacaaaatgagtctctaagaataagatataatcttttgagattagttagatttattagggtaagataaaaatccttttgagatgaggtgagtctatccaggtaagagagtatcttttaagataagatgggtccgagagtctcttaaggtaagaaggatctatatgaaatagataca

SEQ ID NO: 160375 - DNA, 477 bp, Zea Mays
tttgaatgcagcacatgattcttaacaacccttatggcactcgtgctatcacagagcagaggcacatgatgaaaatctaagccaaaatcacgtaaagtagccatcatccataacaactgcaagcaacgaactcaacctctatggtagactgaacaactctagactgtttacacgaagaccaggaaaccatcgaagtccccaaaaactgacaagtccgagatctcgcaaaatcatcatcagaataaccacacaaagacagaacggaagaagaagagtaccataaaacaaactcaggagtgaagcgcgggtacctcataatctgtttcacaaccaaactcagagtgaagtgtgtggggcgacttggaaacgggcgcacagacacactgcaaagtgtatatctagcctcgttgaggtcaagtataggagagagagccaatcatgctcctgtagtcctttaggtccacgggcttgccatcc

SEQ ID NO: 160376 - DNA, 453 bp, Zea Mays
ggagctctgctcaccgcgtctggacagcgatctctagcctcttcctcaacaacattcttcaccaagctgtcttcgcccaacaagaatttcatagcctctatcagcgggatatgtctattgctgagcacactgggcgtctcaaggagctcgcggatactcagtacgacgttggcgtagcggtcactgatcatgcgctcgtcatcaacaccctacgtggcctcaatgaagaatatcacgacactgtcagtattttcaacaatagtaacaacccccttccttccttgctgttcgctccttccttatccaggaagaacgacgcatcaaaaattgtcgcaagctggcggccaacacaaccctgcttgctggtcactccaccagcgcttctgctcctcgtccatctgggacaagctcctctacagctccgactggtgggggcgatcgccgcaaaaagtg

SEQ ID NO: 160377 - DNA, 388 bp, Zea Mays
agcaaatcacttttgaaacatgcgggttctatggcacacaagacagctcaagagaaatacattggctatatgaatcctaatgcatcaattgataaccaaattgagaagtggagtgatgaggaccttcgtttgtataagataagacttacttattcaattagatgtttgaaatatcttttgcatcaagggttggcattccgtggacatgatgaaagcaaagagtctagcaacaggggcaatttcattgagcttttgaaatttcttgctactaacagtgaagaggtgaacaaggttgtattgaacaatgctccaggtaactgcactttaactagcccaatgattcaagcacagattattcattgttgtgccatggaaactagaaaaaaat

SEQ ID NO: 160378 - DNA, 535 bp, Zea Mays
atcgcgtactcgtcagtctcgcgtgcgcagtttcgcacgtgatcacgggtatcgcgcgcgccgtcgtcgttgtttgtagtgtcctcgcgctgtttcgcgcgtgtcgcgcgcgcagtttgcgcgcaataattatttacttcgttataatcgtccgtacgcgttagtcaattagttctcgtattaatcaccgattaattgataattcttttgttatctaaaatattccacacaagtagtttacgtcaactaaattgaacttagaaatataactttcacgtttaaacgtaatataggttgttcgtcgtcacgtcattaattagccacggtttgctaattatttaatgtgtcgtgcgtcgcgcaactagtgcgcgcgctcgcggttgcttgcgcgcagtgcgtcgacgggactccgtctacgttcgcctacccttcgtctacccctagacgactctcgtctatccccgtctacccccgtctaaccccgtgcgcgttcgtgtcgttcgccatcgcccacgcgtcgcgcaataaatcgtcg

SEQ ID NO: 160379 - DNA, 726 bp, Zea Mays
cctcggatccgtacatcaagcggaagggtgtgaatccggttgctcggcattctgttgtatttagcgcccatatgacttcgggtagttggtctgcccatttgccctttttgttgtcgaggagccttttcttgatagcgctgaagatcttgccgttggcgcgttcgacgatagcattggactgtggatggtagatagatgcgaacactgccttggtgccaatggaactgcagaattctcggaagtcctgtttgtcaaactgcttgccgttgtcgactgttagcttggacggggctcctaaccgacagatgatgttttgctagaagaatttctgcgtggtcttcgcagttattgtggatactgctttgccctcgatccatttggtaaaatattcgacggcgacgaaggtgaattttaggttcccttgtgttgtagacagtggtctgacaatgtccagcccccatcactgaagtggccaagtgtgggcgatgagcttggtaaattgcaaaagggcgcctgagtgaggagagaatttttggcatgctttgcatgatctggtgactcggttggtcgtgcatattattgcgagccaatagaatccctggcgaattaccttggcttcgagggcccttggtcctgagtgtgacccacaggttccgtcgtggacttcgcgaaggatctcttggccttcggtttcagttatgcatttcaacataggctggctgatgc

SEQ ID NO: 160380 - DNA, 693 bp, Zea Mays
cgctgcaggaatccatgaacaagctgctggtggcgcgcattatcggctgtgtcacctgaccggggacagtgtggaggccgatgccgattcgcctgttacaactgcgatcgtgtcgggcagcccgacgcgacctccttcggtattggaacctgggatctcgtcacctcctccccaggttggatcgtctgcgacaacgtcttcgaccacaccgcttgaatcagcacctccgatgccgcatgctgatcccaacgagggggcgctggattcaacggtgatcctgccgggtggatcatcttctgtggacgagcttcctgcagcctcgtcgtcagaggaagctgctggtactactcctgttgatccagctgttgctgctacttctagtaggccagtcactcggctccaacgtgggataatgaagcccaaggagtacacggatggtacggtacgctggtgcatgaatgcacaggcccagtccgaggagccgagctcagtagaagaagcacttcaagatcaaaaatgggcatcagccatggaaaatgaacatcaagcactgctgagaaacaagacatggcatcttgttcctcggcccaaggggagaaatgtcattggatgcaaatgggtttacaaagtgaaacgcaaggctgatggcaccatagacagatacaaagctcgactagttgctaagggttttaa

SEQ ID NO: 160381 - DNA, 406 bp, Zea Mays
ttcaacagtcaaatcatagccaaataatttactgacccatgtgtgttggggaatggtggagagccgctggtccaagatgaacttcaaactgtaatgatctgtccggactgtaaatgcacgtccccagagatatgggcgccagttgcggacggccttgaccaaaccgatcaattcccgctcataagcgggcaacttctggtgatgtggcgcaactgcacggctgaagaaggcaattgcaccatcaccttgatggagcacagcgccgaaccctgcccctgaggcatcgcagtccaccatgaagcgcttggagaagtccggcatttggaggagtggtgctgtcatcaaggagtgtttaagttgcaggaaggctgcatccgcagcgtccgaccagcgaaaggcctctttc

SEQ ID NO: 160382 - DNA, 619 bp, Zea Mays
gcaattgctaccaaaatcgtgccacaaatggtgctcctctgtctgatactatagtcctgggtatcccatgcaaacgaactatctggtcaatgtagatctttgcatacttctctgtcctgtgggtggtgtgtactggcaagaaatgagcggtcttggttaacctgtccacaataacccaaattaaatcatggtgcctggaggtattgggcaattccacgataaagtccatgcaaatgtcctcccatttccaagatggtatgggaaggggttgcaaagggcctgctgccttcaaatgactagctttgatcctctggcaggtgtcacactcggatatgtacttggcaatctcccttttcattctggtccaccaatataaggatctaagatcatgatacattttgttgctaccagggtgcatggagaatttggaaaggtgagcttcatccaatatcttctttctaagctcagggtcattgggaacaaccaatcgatctccaaaccataaaattcccttgctgtcctgacggaagcacttgtatttctctgccttctgctcgatcatttccttgataacctgaacacccttgtcatcaatctgggccctgaatatctgctcttg

SEQ ID NO: 160383 - DNA, 600 bp, Zea Mays
aggttgcgctaggtcagtctaaaaggacatcacaacccaagagtgtcgtaagcctttggaaagggatagcatatttatgaccctttgatcgttcggtgcatgtccatggtcgaggtgtgataggaacagtgcgaagggcctcaaattatcctctacctcactatctcccttttgacaaaggttctgcaagtcatggagggtcccacttcaggaaaaaaagtcaatgggacatacatgaagaaggaaaaggggaagactctaaggcgaactgctcgtacgggagcttacccagtggcaagattttggatgcctgattggatcaaggatgacaaagcaaacgcacatgtggtgacataccatagggactagatgtctgaagataggaatgacatgaggcaaagcaccatgaggagtagtgtcgataggtagtttcccaatagagatagactagcaagatgtcgacactctttatggccatctaggcctattcggatcaatttcaatagtagctattatgaaatcatgctcaaatctttattggtacaagcatatcctccaatagaccaaagtagtagcaccatcatcgctagtttagatggc

SEQ ID NO: 160384 - DNA, 572 bp, Zea Mays
gcggggtaagacgctttataatttgtattccaccaccaccaccaccctaagagatagttgtagggttcacattgtttgtttcctttttgtctctgttttgtgctaacaatgacaggaccaaagaatcaaatggacaaggacaaggggcctaagcttaacgacgatgagtgtgtctctcagatagaattgaaggagatgatgtgcgcgatgactgaagcttaaatatcaggactctgcctcgacatcctatgagcagcttgatcgacgagttgttgaacttgttacacgcatggacgtactggaggctcgtcccccaccaccaactccagccctagctcactctcctgtggacgacgacgacgatgacgacaatgtttatgcaccgctgcgacaacacctcgcacgtaatcgacaaggtatgggaggtaatggtagacgtcgtcatcataatcctgaaccagaccatgatccatttgctaagattaagttctctattccaccgttcatgggttcttatgatgctaaagcttacttagactgggagatgacggcagaacaaaaatttaattccc

SEQ ID NO: 160385 - DNA, 871 bp, Zea Mays
ccaccgctgcctagcttctcgcgtgcgccgtggcatgcggttgtttcaacaaccagggcctggactgactacctagccagggggctctcctcaagtagtggacacgagatcttgccccttcctcactcccaccgcgcattgctaacaccgaccgcaaatctagttgagtgagcaccgtcatgtgcagcggccgtctagaaaagagtgtgcgagctcggagggccggtgtgagtgcgtcctggtgcctcgacgcgcgtggcggctgtggtgttccccgtacggtgggcgttgtcccctgcagcaccacgctgggcaccagaacctcgccatcgatactcgaagaagcactgtcgcgcggacatcttctcggaccagccgtgttcttccccaaacgccggtaaggacatgcctctgtagttcgccatagtctgcgcaggatttatccatgctccaatcggtaaccgtgactgttgtcgcctgctcgctgggggcgacgaatcagtggccgtcgttgggcacgtcatggccagggcttgtcgggcatgctctcagctggaggtaggagatggtacctggatcattggatcctagttgggcgatcgggattagtgttgaggcggagatggatttctttgaatctgaaccgttagtctgggagcagacggatggatttggccctgcgttccaacccacggatctgctatgggccataggattccgatccaaggattcctgtagaataccggtttattttatgtaaaatcaaatctggacgcttgttgtttaatcgggcggccgagattggcctgtaccccttcgccgagcttgttttgtaaaagaacccctgacattattggttattaacccgcag

SEQ ID NO: 160386 - DNA, 420 bp, Zea Mays
caattccggaactcttgcacatttagttgtgtcaccaaatccaccagcaaggtgctgtttgaaccgctttattcctacagggactatcttctgatagaaaatacattgcacaaaatatttctttgtgggatctggccaccatccataattccatccagggtcttgtgatcgggccttccttttagaatcaacagcttgtgcagccagagcagggggcagtgctgcaatagccttttcagtgagagaggcagcatctggagcaaccgatgaagcagtaccaccagcaccagtactaccaccagcagatgctatcgtggctaggatagcagccacatcaccaccaccagtgctctcttctctaatgtatgagtctcccatgatcacctcaacagctgctgcacgttcacggcgccaaccccc

SEQ ID NO: 160387 - DNA, 683 bp, Zea Mays
cagaatgaaggggtgagtcactggcacgatttaccgtggcactcaccggttgaggagctacagcggttatcggcgagctagtgcggctagtgacgacgtggttaaaggcctggagcttggcacaatcgcggtgaagaatggcaactccggtgatggccgtaaagccacgtcgccggtgcaaagggtaggggacagcgaggccacagtagctcatacccatccgcgacgagatcttttcatggtgagcgaaatccacacgcccgcggcacgaatcccgacggtcagcatgaatccgggcgcaaagaccgtcggcgacgaggggggctaaaccagcgatcaagttcagattattgtaccatcaaacgcttcttcagtcagtctgacatgccagttttggggtgaatttcctctcaattttccatggcaactagaccaatgctctgcagcaaagttgtagcttaatagaccagctccaactttgctacattgtgcatccacaaaatgtcacaatatcctacttaaaattgagctctaagttcatgcaatcccactgttagtctgactccagactttaaatagtctgacatcacaactttgggcacattttctccaaatttttcataacaacaatgtttaatcccttaagcaaagttgttctcctaacatagctctatagatttgat

SEQ ID NO: 160388 - DNA, 676 bp, Zea Mays
cttctctcaatctataagatctgatctcactcttgtgcttgcgacatctttgtagatgtcccctgaccataaccttcttgtcttttgggattctttcctctttcttcattaaattgctaccatctggcgaactctagtcctttggtattgacatgcccgtatccttgcaatcttgcatacaccaatgactgttcaaggcatttcagttaacatgtccttgaccacccttgcttcgtaataatccatgagtgatcattttattttgcacatccttggtgatctcgttaattccttgtgacttccttcggtaatgaatctttactttaacccttctattggaaccttaccaatcttaccctttattgttttctccacttcgccacttcgcgaggcttgccttaactctatacttggttatgctctcacaattatcatctttacccttgtcacctctatatcttaccttgatgcttatgttatacatgtcctttaaaaccttctctcttccatctcagttttatatttgtattttacctattttcccttggctgtatcctcttccttgttgcttgcgagtttttaactccatcctttgttgtgctccggttgggtattacctttacctttctcatctctcgatcttaccttagtaattacactatgtctattctctaaa

SEQ ID NO: 160389 - DNA, 782 bp, Zea Mays
tgtatgcatatgatgagatgacctatgggatggagtttagggagacataaaaaaagtttaggagattagggttccaaatcttggattgaaattttgggatgttacaaacctaccccacttaaaggaatcttgccctcgagatttagactggatttgagaaaaggtaagggtattccctcctcaaagagtcctcactctcctaggtagcttcctcttctccttctctgctccactgaactttacagagtctcacttctgagttgcgagtcttccggactgctgagtcaagaatctttattggcttctctcggtactgaagatctttctgaatctggattgcctcttcttcgatgtgaccttctggtacttgcaggcatttgcggagctgggacacatgaaatacattgtgaatatcggacatggactctggtaattcaagacggtatgctgcgggtcccactctgccaatgatgggataggggccgacgaatcgcggtgctagctttcctttcacttgaaaccttctgacaccacgcatcggggagaccttgaggtagacgaagtctccttcctcaaatctgagttctctccgcctgttgtccgcataacttttctgccgactctgagcttgaagtaatcttttgcggatcagggtaactttctcttcagcctctttaacaaaggtaggcccttccagtgtcttttcccctacgttggaccacatgagaggggtctggcattttcgtccataaaatgcttcgaacggtgacatcttgatactg

SEQ ID NO: 160390 - DNA, 1423 bp, Zea Mays
ttcaacttttataattggcccaagccatgattccatgtttttcatggtctttttaccaatttccccttttttacttaaatggcttaattagggttattctagggtttgggcatttttctcactttgaggtgcatgatataattaaggcatgatccttaagataaaaagacttagttgagtttttgctcctaagtttttggtgtcttttgctcaattggattcacatgtgataatgatcttgagttagcactgagaagaaccctaggtaacactggggtgttacatcgaggcaccatccttcgatcatgtcgttgttggagccgtcgccgaggaaagcgcgtgctttcgactcatcaaggtggaggagtgctgctgcggccggtgccgctggaggtagctcgatgttggcgtgtgctaggagcagagcttcctcctccgtctccgcctatgcgacattggcctagccgcgccgtggttgccgacattccctggcccagtggccaagcttgccacagttgtgacagccgtcatctcgtgccggcttcttgttgccgacggcgccgccttgggcgcctcctcaggcaccaccctcagcttgtcctcgcgccccagcctgggcgcctccgcgcgccttgcgcggcttgccgcgcttgtggccccgtgtcgagtaggaggactccccttcttcttgtcaccctcgcaggcctcccactgctcccgattgagatgtagcttcccaccgatggtgataggcccagagagggcatgtggttcgtcgccgtcgacgaccttgagacgaccaattgcttcttcgatcgtcatcgtggagaggtctagcagagactcgattgagcgagcgatctgcttgtacttctcgggaatgcaacgaaagagcttctcgacggctctctcctcatcgtaggtgtcgttgccgaactgcaccatcttctgcaacagagtgttgaggcgaagagcaaagtcatcaacatcctcacctggcttgaaggccaggttctcgcactccttgcgaagtgcctgcagtgtggtcttgcgggcacggtcgctgccgatgcgggtcgcagcgatgcgtcccatgcttccttggcagcccgcttctgcgaaagcgaaaactgcatctctggcaggacgcttctgggaaagcgaaaactgcatctagtgcccatcgatcctcgtagtagtcgacgacgccgtaccacactgcttcccacgtgacgaacctggagccgtaccctcatcaccgcggcccactcgacgtagttggtcttggtgagggtaggccacccaccgtcgggaccgatgtccctgacaacggcttgggccccacggtgaccatggtaccgatctggggagggagagccgcgccgcctgtagaggccgcgatctctgtcgacccggccgccgc

SEQ ID NO: 160391 - DNA, 440 bp, Zea Mays
gtctccccttcagcttctggttgatggttagaaagccatctcttcaaggtctccgtgatcttctccatggccagttgatcttttggtttgaggagaatcccccagttcaacataaaggagatagtttcatacaaaaaccacttttgtattactaggatttttttcaaaagcaatcctgcttcggttacgccatgtagcccacatcaagcctgcaatcataaacagaaggtatgagagaaaacaggtttggcctgcttccaggcagcaaataattcttctaccgagttaggagtgtggacccaatcaaaaatctgattcatgcagccccaaataaattttgggagaatacaattaaagaagatatgaaaaattgatttgtgccccttgcacaaagagcacaaggcactccctttccaccctttttaagactactacaactt

SEQ ID NO: 160392 - DNA, 489 bp, Zea Mays
cgggagagaggttggggaggggagtgaggtgagagggagaggatacaactttgctcacagaggcatttgactaagggacagggcttcgcttgtcgaggtcctagctcgtcggatggccacgtgctatggctccgctcgccggacctccgctctacctcgcttgccgaggtcctagctcgccggatggccacgtgctacggctccgctcgccggacctccgctctacctgctttgcacgactggatgcaggcaatggggaaagagaaaggatatgtgcgggtgagtcaattgagagtgttgcttgcctgtttcaataatacaagagagagaatgttcacgtgcagcggagagaaaaaaccaaagcagtggacagtggtgcactgtgcgacgtgcgagaagccgagaacaccagtagcgcgggccacgcgtcggccgggcggagagcgtgcgagcgcgaagcgcggagggagctccaattcccagtggctt

SEQ ID NO: 160393 - DNA, 661 bp, Zea Mays
gtcaaaatcacattaataaactcgagtacttcaggacatcacacaacattaccactgaattcacaagcataattggtgtttatatttcaccatcatggaacaaatgaaatagcacatgtattgtttcctcaatatgttttatgatgcatgtcaccatgcctattatgagcaaaatgagtacaagtgccgaacaataaatgccagacccttatacaatcatatatagttgcaatcaatctgggccacagttactacttaaagctgcatgctcattataatcaggaataacatgtaagcacactcctcaacaaaccatgaagaggtggagccatctacaagcacaattatctccaggtagcaaaaaattatcattaaacaccaaggaggaaactctttttctactacaaagagtgcatatgtacacttcaacctgccaaacaatgtatgtatccaattctatcattctatggattatgaatcgattgtctggtccatcacacgaggacaaatcgccgtatcacatggcagtactgaatcatcaacggcaatttttttccaaacccagaattcaaacggctcaatcttgagttgcaattcttgcccctacctaaaattcctaatgcataccctaacgatggaaccaatgaccgctcgacctcgc

SEQ ID NO: 160394 - DNA, 669 bp, Zea Mays
actgaatttggtttcagtgaattgaggtcgactttggggcattctaacttgtgattcttgtgtaattagccctagaagactatagtaaagttgaagacctatagttggtgcaccaattttcttaagtaagataggcctgttcttatgggaagaggggaggaacttggctcagtagtgaactgaagaagttcagaacagtccaaatccctgaaaatatctccatccactaactactctaggtgtttctggtgtgggctaactaaaagaactcgttgcctggaaggggggggggggggggttcacttgctacaactccaccatgcctgggataaacatggagatgtaaaaatcatcccctagctgactcagctgcttggatgcctctttgctgtcccacatgcagaaaaaggagttggccacatcttttgtcttccctgtgctttccccatacgtggtgctcatgcagaaggattgggggacgtattagtgtagttggactcttgttaaactctagtaaagaccccaacagctccagctctctaaactatttaccttggtgagttatggcaccaaattgaacaccctgtgtttctatcggtttcccgcctctctcaccgtgccataccattcccatacacctatgctaagcccttaagcttttcccagttc

SEQ ID NO: 160395 - DNA, 341 bp, Zea Mays
tcaggccggatatggtgaaagaaactgaagaaagagttcaaaggataattcataatttgaagaacgctcaagctcgtcaaaagagttatgcagacaaacgacgaatgcccttatacttccttgtgggggactatttctacctggaagtttcgccaatgaaaggggtatcacgtttcggggttaaaggaaagcttgcaccccggtatattggtccattccctatacttgagcaatgtggaccagtggcataccgactccaactacccgaaaccttgtctgctgtgcataatgtgttccacgtgtcacaattgaagtgtcttcgggttcccgatcgaaccatt

SEQ ID NO: 160396 - DNA, 1159 bp, Zea Mays
gtggtacgcgtagatgtgttcgcgattggaatactaacaagtgtttgtgtgcctgcaatggtccaattgtgcgttgtagggattggtcgcggatgcattaattgtttgttaaaacacttcgtcgtaaagtagtgtgttagctgtggtaaattaataaagcgtaaaacatgcttggtaatttccgcagtcggctaagatgttcgtctatgttaaaaatattttatgtattcatcgtggtgtaggatagagtggatcgaaaatataaattatgtgacatgtgattcgtgttttaaagatgagatgtgcgaaggatcggttagtgtttcacttgactagtcgataaacattgtcataaataattgtgctaaaattggtcatgagaatgcagtggggacacgtatgcgtttgtgtgccatggtgtattatagtggtggtggcgtaagatatttgattaagatgtgtgggtgtatgccgtaatatggttatactcgcgacgaagaaagatgtatgcactaggtaacatgacgcttaggtcgctgttgtataatcgaataaaggatgtattttttagcatgagtcaaaatgtggggtactagtggcacgctaggcagacggtgtccaaataaattaatcggttgatgtggtagttgtcgtgcgtgatttattgttagtgagtagtgggattacgagttatgtaaggattatgttagaaactagtaggcggcgtgtaactgtgttcgtatggtgaataataggtcagtaggtattgttggtgtcatgagcaaatgtagttttatggagttttacgtcatgtgtaaatgccttcatgttagacctcctaaaatatggtgttttaagtgacttgtgtgttaactaattcgagtggagaaatggttaagaaaaactaattaacctgcttcaacccatgtttcgagttacaatgtctaaaatggtttgctaagtcttatacggcgttagccaactcatgttaagtaagagtcgatagcgtaagtgattgtgatatatatacatgtggtgtctcggactgcgttaataataggcaagccgacgtgtatgtcgtatggcgggctatgccattcctttggttaatcaacttgttagatggctttggttaagctcgtagttatgatgaattact

SEQ ID NO: 160397 - DNA, 1123 bp, Zea Mays
atttgccccgagactcagttttcccccgcacggatggcgggttaattcaacgaaacccgaggggctctttagaaagatctccaggccgaaggggtatcttgcatcctgaaccgcccgatccaaacccgacgcaccggattagatcgcgcatcataaaacgtaggcatccttttgaccattagatccaacatccacggatgagggtgatcccgacctgactcacccgtcaccgtccgatatcgcgccaacgttccagatttaaaacccgaaggggtatgcaacgggtctaatcacaaccacaggtggttgatccgacggcccacgcgtattcttgcccacacagccaaggtgaagcggcggcgcgccaggatccgtggcggaggaactccggcgagatccacgcccggcgctaccatgctccgaaacgaaatgggcatgtgccacacaattcccggatgatgacgaagcaggtagtggatttcttaccgggaatgaaggggccgacagggctgtccacacgagcagtacgatgcacggcggattcatggcggaccacaacgacggcaacgaattgcccacgctctgaggcatcacactgcccccagagccacggacacaacccgcgagctcgactaagcacttgttaccaacgccggtgatgcagaaacccccaaccacgccaatggaggatccacggcgacacatgaatgacagcgagaaattgaagggcttccggtgatcttctcagtgcaccgggggcacgaccaccatcagaaccaaccggtgaagccctcagtccacaaatcgggtcaggtcaacggtgtagtcttggattccctctctcactcggcggaacgaccagtgcggcagcgacccacgcacagcggcacatctatttcctcacggtttctctgtgcggtaatggcgagagttgcaagggcagcgcgtacggcgacttgagtgcgaaggggaggacaccgcgtcgcttaagtactccgggctcggtcgcgagatcatgcggactcctcggctgcacgttgggcgacggcgaatttgccgcgcatggctccggggaagtcgcgcgtatggttgagacggcggctgggcgagatttcattgcgtt

SEQ ID NO: 160398 - DNA, 634 bp, Zea Mays
tctctaatctttctgacataaaaggaaccacaaatctgcaaccaccttactatatcactcaattagtatactgcattatacaggtgtctgtaggagttatgatctaattttgtgagattaaaagtgttcactttttaatgatgcacgtgatttttttctaatattttagtaaatcacaaaatgtctaatagttggcttggcattcatgcataccatgtgtgttcagtgttcttaaggcggaattttagtaccctacttttgtgggatttgtgattgagtttgggcatttgatactctgcaatgggtaggtaggagcaatggataaacttttattttctttgaacataaagagagccgcagaccatgtgcaattgccttcttctgcgctaagctgatattgctctgtatgatggagaaaagctaccatgtaggtgtttagctgctgctgcattaagtctagttttttcaatagttagcttgacattcatgcataccctgtgtattcagtgttctgaaggcagaatttcaataccctacttttctggaatttgtaattgagtttgggcatttggatattctgcaatgggtaggtaggagcaagggataaaactttattttctttggacataaagaa

SEQ ID NO: 160399 - DNA, 591 bp, Zea Mays
ttagaatcctctagaattcaaaggtgtttagaccggattttaggatttttttattcagatttttaaaacggaggagggacgagtaattgttgtgcctgatccgcatggatgcgcaccacgtggatgaagctgacatgttagatcacgccgcccctacattgtaacgccgttgcaatatttcgagttggagatgtgggcagggctgccaatccctatcctgccctgcctttggatatcgcactagcatgtgcgctttctttggtcggagtcggagcccgcccctttctttgaccaattccgttccgttccgttccaaagagaatcacagggacgaccaaaaagaaaacccgtcaccaaatactcctttcctacccaccttccaccacccaccttctacctcctcagatttgcccaaagatttgcttcctgtgaattaatgccctaattgctacttgttttttttactactagtagtgcttaattgttaaacactccaaagcggatggtgcacgaccagtagaggatgcaagatgagaattcatatcgggtcaagaaaaccgcatgacaaaattaaacaaaactgtaaaaaac

SEQ ID NO: 160400 - DNA, 326 bp, Zea Mays
gcagaagggaaccaaagataaagattatggtggaaggaaaaagaaaaagagagcccggatggttttaaagaaaaggggttagctcaaattttaattcctcttggtgttttataatgcatgcatgctggaagaaacgttgcctctcaaaagaaaaatagggtgcctttttagggcatccttaaaatataagtattggcccacagggcctaattaattagccacctatttctccctctatgcctaaggcctttcgtcctaggtctagcggtctagtcctgacgatctgtagtagtttctaggcaagttttagattttgaaaattggta

SEQ ID NO: 160401 - DNA, 417 bp, Zea Mays
gcacttcaaccaagaatttgctcaataggaaccgaagacctgccttcaaaaagcttctgtagacaacaacctcattttcttcaggagcaggggtggtgctgtcccctccaaccctcataatagacatatcatgaaagtatcttcccttcatggcgtcaatgtgactttgtttaatagtcgactttccgaagatggtatggcttggctgccagggccggtcttcagaatcttcatccccactttccacatcataatcatcgctatcatcagaatcttcagacaaatccgccattatttcctttgtgatcttctctgtatttgtttttgccatagattcgtaaaacccagcaagaaaagggtccacaactttcttctcctcagacatctttttctcctcaggtatcttcttctccttag

SEQ ID NO: 160402 - DNA, 630 bp, Zea Mays
gagcgtgagcagcaagcagccaggcgtgtggcagtggccaccgccatggacagccaatccccggccaacgcccgctcgtgcctcgcttttaaaagcacgccgcgcaccccccccccccccccgagcttccctggactcgcctcgatccctcattcctctactgcagcacactaacgccatggatggacgactgaagctccctgctacctctaaatccctgtcctcagtagccgattgcttaaattgagtttgccatcacctccccctcgccacgtcgatccgttcgaaccctttcccgagcgcagccatgagcggcgatgcccgcgccattgcagcagtaggctgccaccgcgggctcgcgtggccaggccacctggggctgccgccggccgagccaactccttggctgtgcgcgccctccactagggacggctcggctggccccgccgcgctcggccgacaccggcgagccccgaccaggaaaggccgatccccttccctgtacgttccaaggaagaagacgacggaccaatctgcaaattccataacagcagggggtaagtgaagggtttgtgactcttgtgaacagtgctgaaaggccatatgtgcggacgtgtaggcacgtttgtt

SEQ ID NO: 160403 - DNA, 485 bp, Zea Mays
ggagtttggtaggagttttgttggaggcggtctaatacccaggctaactattagctttaggacgttctaaacagaatctagcgtggaggtttgagtgcttggaaaggtcttaaatgcaaatttagattgcggtagatgaaacaatttaaatatttcaaggaattaaaacgagtcaaaattttgttcatggatcaacatagaaagagattattcagctattagaatatagttctttttagataatgatttctttggaacccaaaaaacacatatagggaaaacaaaggattggatctaatgaaaatgggagaacacagttcattcgtttcaaagtgctccttatttaagaaatcaaaatcttaaggctagtttcaacagattccctatcacatctcctatctcatcttctatttcaaacttcagtctacaaacaattttttctatagttctgcgtctcctattttactctatctacctaagacaat

SEQ ID NO: 160404 - DNA, 535 bp, Zea Mays
gaaaaaagaacttttggagtctaatcagggggcatgagtggatctaggtcgtatatcttgaatattggagggccatgaaaatttggaaccatcctcaaaataactcaatctaatgtgagggctctatcagctggaggccactcatgcatgaccttcctcgtcgagataaagcgcaaatatctcatttgagaaggcatgggatttagaggtgaaatcatctccaaaagctccaaagacgattgcttgtaaaccatatccaacactttctcctcgtcggaataatgccctaggttaattagaagagcagctaacatgaaagccaaaataggctagctccctcgttcacagtgcattagtagtaagttatgctgacccaaggaaagccagctttcgctagacttcaagatgaagtggatcatttccatggtgaggagtggacatccctcatagtggccagggtagtccaatataatcataccatactcagacaaaatatggtatatagggatttcttcctctttagtcctgaaattcg

SEQ ID NO: 160405 - DNA, 825 bp, Zea Mays
ggtgcaccgaggccagcacaagcttcggtgaggggtgagggacgcctagggccaaggcacgggcacggggcggggctgaatcggtcggacaccgagcgggcgcggcaaaccagcgcgatagagctccagcgaacacaaattcaccgtagagggaaaagaatcggggcaggaagggcacggggatggttccttaccttaggagtgtgctcggggatgcttgacacgatgctaggagctccgggcagacgacgcggtggcgcgcttctccggcgagcttgagcggcggcggctaagcgcgagagaggttgagagtgggtgaaattaggaaggggagggagagcgggtgtaggcggggctcaaaagggagctgggggcgtgggtaggcaacgtggtcggcttcctcggcgtgagtgcgtgtgcgggtcagcagcggttgcggggaagatgagactgacaaggcgggcccacagagtagaggcacgagcacgtgtgaggaggaaatgattcagcgctgatgggctgggcccactgcacagagggagagcgggggcgtgcgcgcgagggtgagcggcaccaataggtcgggcccacctggcagatggagagagagggcaggtgcgtaggctgggctgcttttctattttctttttattctgaatttctagttccttttatttttattttctctattgaattcaaatccaacgaaaccacaaattcaaatttgaatatttcaaacatgtgcatcaaccaaaaacaaagtttaagctcagcatgatgcaacaattcatgtctcccctaggtttgaatatagtaaagaaaaaa

SEQ ID NO: 160406 - DNA, 686 bp, Zea Mays
cgtcgactagcgtcctcgccatgccccagcttccgttcgtgcgttccagggactctcctcatggtaaccgttctagcctcgcccttatttctcactgtctcgcatttacctgcccgcgattgctcaccggagtatcctctggcccgccgaggactcccctccgccgtctagctgcctcacccccattcacacaaaactgaccccgccatagagttcgcacgacccttcccaacctctccagctacctgaaccgacccttcacgccctagggggcccagtctgcctcgccttcggcgatggcgctgccgtgcccgcggggagcgccacccctagcttccctgcgcagacaaaaccccctagtgtgcatctagttcgtccagctccaatcggatggtcctatttcaattaggccaaatctaatccagaccgcccgatctggatctaaccgttctccactctctccctcacccgcgccctgcgactaggaccggccggtcagaccgtctcgccccaggtcgctgacggccctggcccgctggtgagtcgcgcccgcattcacgagcgcgcgtccgttcggtcagatctaatcctagccattgctcgctgatccgatggccaagaacaccccgtaccccttcgcgcataattttaactaaagagaccttgagtttttgggtaatagaacc

SEQ ID NO: 160407 - DNA, 464 bp, Zea Mays
tggcggatccaaaggggctaggggctccatctacatccatgaaactccattgttgatagaggtcgagggaaactccattgttgatagaggttgagggtagagaagatccggagaggaggagcaggaagaagaggaggaggagagaaaaataaacccacctcgctagcttgtgatgtctccgccactggtctttttcgatttccattgctgttgtgggctgcacagctagcgtactacacaaccatgaaactgtaaggatatttggcacaactaacaccgatgtaatcccttgggtttcaaacagacatttggtccttgatgatttggcacgcacgacacctgctgtgtttatttttagtacaggcacaaggggctagttgttgaaaatgggccacagttcggttaggtctgaccagaaacagtgtgtgccccaaccaaacttcgctttcattttcgtattcgag

SEQ ID NO: 160408 - DNA, 659 bp, Zea Mays
ggtaaccattccttaaaaactttattcgtaaaacccttcgacaagccgactaacttgcagctgtaactacaatgggaaaaatccacataacttattcatgaattatatactattcagtccccatgtatcctgctgaactaatctctccagtgatcttttgttgctgatctgagacggccaggtgggttcctcctcataaggtgtgtcatcggttacacatggatttaataatatcctgcatcattctattagttcctattgaattaaataaagaccacaatgcccatatggaccatgagcacatttcaggagctgtttatgttagttggtccaacaacatcgctcggaccagagaaaaaatgtctgtgtttttatggacgccctttcaggttgatgtgtgcctaattcatatgagaatgttggggcattacacttgtgatgtaaacaatctgtgacttttgtttggtttccaggtaatcagccaaatatagtatgtggtatggagttcatatttttgctacttttctggtgcgacgatgtggcggaggcgatggcagggcctagaacggattggtcgtcctgctctgtgttggaagttatgtgaattttctacctcctagcgctagacatatgattttcttcattttgccaactccttg

SEQ ID NO: 160409 - DNA, 644 bp, Zea Mays
gtcctttaggcttgctacaacaatccttcaaatgaccatatttttcatagcttttgcactggtcttggttgggggtatgtccaccataggattggcccttgttgttgtcgtgtgatgcagagccaaagctcacctttgttgcacctatggtctcgaccgtggccaccatgcttcttgcagctattgtcgttggagccattcccaccattcgtctcccggacttatggagcttgagcctggtgagtcagttttcttcacaatgaagaaaccaaccctagttgttgaggatgagtgtcggcttgtgccattgcttgacggtgtgcactagtcgtctcctcgatagagatgttgatgtcgatcaaggtctcaatgtaaatcaccatctgacctatgttctctagcacaaaaaatgtagcacctttgacactatcttgacattggttatgttgtcaccaggagatgcaaatccgtagaaagcccagcgatgtagttcgtgaaatctcccatgtctttgcttccttccataatgagaagttaagctcacgacggagttgctatgcattagactcacatatccattggacctcgatgcagatatgcttaatcgccgctcacactgttaacaacattatactctcctaaag

SEQ ID NO: 160410 - DNA, 300 bp, Zea Mays
aagccgcggaaggggcgcacggcaggaggcaacagtcaaatgagtcgtggttacttgcgcagccgccggtggtcggtgaaacgcggtgagtggattggacgcggatgcaagaaggtcggcgacgccgggatggagagtgccacccacaggcggggcacgaagcttttatgccacaggacgaagtttggcgaggatcacggaggatcccaacaaaaccggagcggtgaccatgcgatgcgcggctgcttcggtaatgggagacgagacactgttgaccatgtggggtggggtacaagcgtg

SEQ ID NO: 160411 - DNA, 517 bp, Zea Mays
agcgagcgactgtcattttttgaattcagcatgtaaatcccttgctatagctttggcctatagcggcagatagagctacacggcttcaacttgcaattcaaaattgtacctggcacaggacaaaatcttgtagcttgttggtcttgccattttcgaattcaaccgctttggcttgtaacatgctaacggcagatggagccataagactctaggacttgggcttgtagcggcggatagagccacaaccatcgaattcatcatgaaaaacccctcatcaaagctctggcggctttggctcagatggagccgcataactttggcttgtagcagcaaatggagccacacgactttaacttgtggcaaaagatggagccacaaccatcgatttcatcataaaaaccccttatggcaacttcggctcgtagctacagacggagccacccaactttgtcttacagcagcaaatggggccaaacgagacttcggcttgtagcagcacatggagccacaaccattg

SEQ ID NO: 160412 - DNA, 367 bp, Zea Mays
gcccgtgctagcggctttgcgaaaaagcccttgttttactgaataactgggagcggggttacgtcactgtttaacggagtcactgacagatgcagaaaagtccctctggttctattccttcgcagaccgagatccccgacggcgacgagcgcagaatcgagctccggcgagcttgtaccagatgacttacgccaagaccggagctctattttggcttaaacctaattcaagcccgaatcaacatttcccctaagtcaatttcatagctcgagctctaaatcaccctgtccacggagacagcgcagagaacggacgaacagaaatgttcccggtgatctagggcagtctagctcaatcaagcgggtca

SEQ ID NO: 160413 - DNA, 366 bp, Zea Mays
atgctcatctgtagtttggaatgtttatgtcatgcactctggggctgattggttgccggtatatcaggtgcctggctcgtgcgggtctgcttccccagcgattgtaatttttagcatctccacacatgcaggctggacaccgaaaaaatcactaaattgcatctgcgcatgtagtcttgagggcgtcgggtggggcaaccaaacaccttctcgcgtctagtcaacgcatgccgtgagcctgggcagttaggacgcggcaaccaatcacacgttctatgttctgtcatctcaaaacgctatgaaaataatagaaatggaaaatacactcgtcgaattttttttccgaaaaacagacactacttgaga

SEQ ID NO: 160414 - DNA, 663 bp, Zea Mays
cacatgagcaacacctgacataagtgacttaagaagtaacataaacagtttggggatcccatagggaatcatgttcagctatgatatctaagtcttggctttcaaacaacgccgtttccttggaacatacttgaaaggcagcagttctgcagggagggggaaaaccctgttgttgcgatgaaaggtcaggtaatgctgaacaaaagcacgttggtccaatggttcatcctgaaatagtcataatagttgaattaatgctaagaagtatgaaggaataatatatgcatgatcaaaacactaatttagtaacataccggtacaacaaattctgataagtcgccatcatcaaaatcgtagcatcagaggaagtttgcgacaaaaaacccacaatcatttgaccttggtaacatggttggacaattgggaagaagcccaatcttgtagttgccaaactttggtaaacttgaatctggtcgagcttcatgtaacgcaatgctaagtcttctcattattaatctggaccaaggtatcttcgttccatgtatcaacaattgatcattgtggatttgtttccaggtagtgcctccaagcaatgttccataaggatttgaatctaaaatgtctattcgacgaagttgaaagttgattgcatgaagggtccag

SEQ ID NO: 160415 - DNA, 681 bp, Zea Mays
atcctcgccaggttgttgcaagtgccgcgcgcaagcgatctcaacgaatctcgcgtgaccccgcataacgccgcttcaccgacacgtgggcccacgtgccagtccctgtcctctgtcttcctcgcgcgctcccctaacggactccgcttcgtgcggggcgattgcagggcggactacgcgctctggcgtgtggtatctggttggggccgcagctccttgggccataaatgatgaccgtcgtgaccccctcatctcatccacctgtgcccacatccgagcacaagcactgtagccgtcatcgccgcaagcttggagaaaggtgggccgccgccacggacaattgctttgtgggtcgccgccgaccgcaccatcacggggagggactcagcatcgcgtcgatccgaggtaaacgcacccccgcaagctttgtcaagctctattgcgtacgtagcacctctcggatttggatttgggcgcacctggcgtgatttggccgtgcgacggcgaggatccgccgcaaccagggcgtggcgccaccgtgcgcaatgtcggattggggaaagagatttgggccgtcggatttggtgtcaacggctgcgattagacgcttgcgtaccgcttcactgagttaatccatgtcgtcgattggatgactgagggtgtggatcggatcgcccgtga

SEQ ID NO: 160416 - DNA, 341 bp, Zea Mays
gtgacaccactatacaaataagccaggtatgctctgtccttcagtggctgaatgttcttaaaaacaaagtctgcaactacagcttcggcaatcagacctctctccttcagcaaaccaactttggcaagcagaaccctggcctcagctatctccaagtctgtgggggattcagtccaacttggagcacgaacatccggctgcctccctgaacgaagggggagggacttgccatgattctctacaataaaccactccaagcgccatcctttgatgttgtccttgagtgggatgtcgaggtactctgtcttcctcccacggcgcatctccaaactcgcaccacc

SEQ ID NO: 160417 - DNA, 898 bp, Zea Mays
gagaactcactaaactgcttgaaacatccttggacaaaggaaggggtgaatcctcttccatgaagaaccccgacgacaatgcaatgacgactctgacccgggcttcaattttggatagcgcgagtggatcagtggaatggcgatcggggtcaagaacgccggagtactcatatattggcttctgacgggccatgaggggatggactcatcgctacatgaaggtgcacacaaatcgagcaccgttgaaccccttatgcttcagcgtagtagccgccttaaaaagatgctccaccttgctcttgaactgtgcctccgcgtcgtagtgccacttcttcgtcaagatcgcctctagaccggtgaaaggcggggcgctgccagccacgttctgacgtaaaaccactcatttttgtatcgcatggaggagggaagcgggatcttgaagtactccaccttttgaccggcgcagagttgaatgttggcagaaccaacgtataaccggtcgccatggcccggagtcactcgtgcgctaaagtaccaccacaacttctagtaggggttgatccccaagaacgcctcgcatagtgtgacatagctcgctatgtggaggacggtgttagggtggacattctggatctccagctagtggtattggaggatctctcgcatgaagggatgcaggagtaggctgaacccacgttcgtagaaggacgcaagcacgaccacctcatcattccttagacgtgatacctcaccctcgccctctaatctccactgcaaaatctcttttgtgggcatgaaccttttcttctctagacactgcaggcgactcacccggatcgagcatgctaggaacgatgccatgggaggaagaagcgggcttgacagatgttggggaatc

SEQ ID NO: 160418 - DNA, 498 bp, Zea Mays
gggagatagccggatgttcacgctccaagttggactgaatcccccacggacttggagatagctgaggctagggttttgcctgcagagattggcttgctaaaggagaagggtctgactgccgaggctgtggtcgccgattttgtttttaagaacattcagccgctgaaggacagagcgtacccagcttatctgtatcatggcatcactgattcaactcgggttaccaatagaaggattcctgctgtggacctggtaagccgacttgagatgattcttagaggcaaggtgtcgaatatcggtgctcctgttgcgtattcagcctggaatctgcctcctcccaagactttcatcagttttgtgtcaaatcctcctgctggtgacagtggtttgggccttagagtgcgaccctctcccaaagaggttgaggctttggttgcttcgcttggtgaaatccccaatgacgagaggcaggttcattttgagatgcctacaagcccg

SEQ ID NO: 160419 - DNA, 797 bp, Zea Mays
caagaaacccaatttcaagaacttgtgagaacataatgctatctgttttgactcaaaggtcttgaagaaataggcctaaaaagtagtgtaaaagttgtcacctgccttgacatcctgcttcttggggaaccatttgtcaaatgaggcaagacaatatggcttgactatgctagctgaagtgccatggaggtcgacatggtgaggtggtagaccccccctcctttgtaggtgggacctctaggtcatcttgtgctctatagtgcggcttgctctcctctgcctctgcaggtgggacaacatactctcctctgcctttacaacatgacctgctctcctctaggtcataccatgctctatgatgcaaactgttgcctaagtcaggctctagctgcagctgaggctctatcgagtaaacgaatgtgcgcctacgagaagaccaacaaagtggttgagtagagtgccatctagagccactaatcctaagataaccattgttgccttcacacttttgaggcctttgttgttgctacaaccttaataacctattgtgtatgtctgtcggggtgctcttattcttgtgacacatctgctccactaccttgcccttgtcctgtctaggaggctaaggcttcatgtcaccatcatcgactcctggatgagggcctaacgtcttggtccatcatgagagagaaccactaacacaagagcacactaaataccactactccccgtggcactgaccacaaacaaacaaaatgtcacttgtgtggcttggcccaatccatactcgtgggcat

SEQ ID NO: 160420 - DNA, 663 bp, Zea Mays
tggacttcggccacctggcatggggagccgagttgcatattgcataatgaccttatcatactgaagctcaacctcagaggactcataaccaaagtcatgagtttttccctcttcttctcgtcagcttttacgtagaaccattcgtttgtccacccgatcagccacttggtgcggtagccgattaccggggccttggtgtccttttggtacgcaaaattatagcatccaaagtttttgtgaaagccatccgccctggccttcgtctgatagtgcaactcgtgcactcggcagaaaccttcggcattggcacttatgctctggcttcggagagcccatatgcaaacactcagcctgacaatggcatttggtgtcagctgatgaagatatatttcaaacctcttcaaaacctctcctattatatcatatagaggaaaccgaagccctgccctgaagaagcttttaaaaacaacaactttgtcggtgtttcggacccggggggccctcagccggaccgactagtgaattttagtgccgcgtgcccctgtctagatgggtcgatgcaagatggaacacaatcgagggtatgaggcttatattatcttgcacctgggggtgcttgcagtaggggttacaagtgttgcgggggagcaagagcgagagaga

SEQ ID NO: 160421 - DNA, 517 bp, Zea Mays
gtcctttgcctccctcgtcacatgcgagggggccatgaatgcgttgtcctacgagggcggcagacactacgaggtcttcgaccaatcagacgagagctttgaacgcgagatcttcaagtctgaagaccctgttgtgaagcagtcagcgggggcactttttgataggatgtgggggcgcatggtcgggaggctgtaagggagtgatccgaccgagcgagagagcaggtgaaggttattatttgtgtgtggttggttgcgtgtgggtatgtgtagtttttgctgagtgaatgtgctgttgctacagatggagcgtgctgaggacgtcgaggaccttggaggtctggtcggcgcgccgcccgaggctgcggaggtcaatccggtgccgccctcggatgccggtgaaggcccctcggccgtgcccgtgcctgcaatggccagcgaagaccctgtgtcggcccctgcaccgtcggtcgaaggtgctttgaaggtggcggccgagccggcagttgaagacccc

SEQ ID NO: 160422 - DNA, 515 bp, Zea Mays
accgatccatcaaaatataaagtctagggagtaacagtgaggtatgatatgtctagtttatgagcatcattgatccgatgttctacaataaaatctgctacgacatggcttttcatagatttcaatggtacataggccaagtcgtactctataagtgcataagcccatttaccaaccctaccactcataatcgggttttgcaacatgtatttaatcacatcggtttgactggcaacggtgcaatgactagacagtaaataacatctacacttggtgcatgcataaaataggcataagcataacttttcgataaaagtgtaccttgtttcagcatccaccagcctccgacttaggtaggtcaccacatgctccttccctccagtcacttgcgtcagaacagccctaataaccttatcttcagctgcaatgtacaatctgaacggtactactacttgtggtgcttttaatacgggagccgaagacaaatactttctaatgagatcaaacgcttcctg

SEQ ID NO: 160423 - DNA, 611 bp, Zea Mays
ctccatgtctttccaccactaggcgacttcatctcttggtttggtctatcacataatgctaccagatccactcttgcctttacgtcatcctttgacttatcaggaatgtccataattgttgcccaaactgtcttggcaacattcttttcagtgtgcatcacgtcaatgttgtgtggaaggagcaggtcgtcataataggggagctgagtcaagcccgacttatgtgtccacatatgctgctcaccatatcccacagaaccaccttctagattggccacaagcccatctatctattgacgattttcggcactagtcatcattgcaggtggatggtctgtcactacgacacctttcgtaaagttcttgatgtctaggcagagtggatggttaggagggacaaattgtctatgtttatcaaacgatgaatatttgccaccccttttcaacctaatgaacctaagagcttccttgcaaactgggcatgggaacttaccatgaacacaccaggtgcagaatagcccatacgctggtaagtcatgcatggagtactggtaccaaacatgcattttgaagtttgtcttcgtagctcggtcatacgtccataccccttc

SEQ ID NO: 160424 - DNA, 435 bp, Zea Mays
tccggcctcttcctctaccacgtgcaacaccttgatttctcctcccatgttcacttgctcttctagaataatttccttcaccttctttctcatcttcatcatggtttcttgcaccatcagggagtcgacgatgacctctgatttcagccataagtgtctgaagatcttgtgccaactgatcttgcttgtcttctatgctttgtttgagctcattaaattgtatcatggtgacacattcttcaatctcagcgttgggatccatcttcctgtgaaattagtggcgacaaggcaacaaatataggtggaatatgaaattatatagagtctcacaacctcaccactcttatcaaccaaagctcttatgaggtccctgtgggttgcaagaaaatgtgtggtggtaacaataaagtggtggttaagcgaatacaaggccag

SEQ ID NO: 160425 - DNA, 1316 bp, Zea Mays
ggcagttctccctcgcgcgcgccctccctctctcgctctctgctcagtggggccgacctgtcggcgccagtttacttcgcccgctcgctctccctctctctctctctgttccgcgggcccggttcgccagtgccgaatcgttgcccctgcgcgcccccttttctctctctgcgtcgtggaccctccctgtcagatccgccttccccgtgcccgccgtggaccggcgcgtgcgcactcgcgcacgtcaccaggtttctcggccacgacgcccgcccagctccctttttagagtcccaccagtgccccatgcacacccctcacctcatttcgctcggcttcaccctctctcgcgctctgcccacgccgccagccgccaccgaagactcgcgcccgtgttcccgaccatccagctcgccggagaccgccccaggcctcatcgaactctgccccgaggtgagacacccgtccctgtgctcaatttcccttattgcgccctatattcatccaatttcgccttcgccggtgctcgaccgcggcgtctgccgtgctcgcgcggtggccggtcgatttagtccggtctagttcaccgaagtagttccctgtgtcacccctgcctctgatgaagttaaccaaggccttagcgcgccttaagtcccctccccgtggccgaaatcgctcaccggagtttctccggcccgcccgagaccttctcaccgccgttctcccctctctgcccgtggattcatggcctcttccccgccactgagttcgacgtggcgccctcttcccctctgcccaactccggtgaccccggagccaccctagctcgcgccagcctaaactccggtgacctcaccgccacggagaggagcggcaccgcccgcagccatctgtttccctggtctgaccccccccccccccccgtctgatcttgatcgaacggctcggaccgcgggtaccacttcgcgcactcgcacctgacgccctgacccgcctgtcagcgccacctgcagccactcatccttcccggtctgatttcccccgtccgatcttgatcgaacggctcggaccccctcggacccccccccccccccgtccgatcttgatcgaacggtttggaccccctctgacccctgtagcaatctgtttcccctctggcgctgggcccgctcgatcagcatgctctctccccctctatcgctgacgctccctgtcccgcttgtcagtgctcgcccgcccccgcgcgcgccctcggccgtatatctaatctcgactgtcggtttctgatccaacagttagattcacccgataccccc

SEQ ID NO: 160426 - DNA, 649 bp, Zea Mays
gtggattacaagggcgcgtgggccctgagggttaaacataaaatttccagagattgtcaatgttccaggagtgctctaagtcttcgccggagggcgttgatagcctgtacgcgctgggggatgccttcatcttgacgatgaatggaccctcccatttcggctccagcttgccccgtgactctgtccgagtggtccggacgagtacgaggtctcctttgttgaactctcttgggacgaccgcattgttgcgccaggccttggtttgagcttggtatttgttgagggcctgtagggtgaggacgcggtctccatcgataaggtctttagacgttggttcgtcgacgtcgaggaccactgatgtgcttgttcggggcgacccatgctttatctcctacggcgtcatggcctccgatccatataatagacaaaaagatgtgaatccggttgcccggcatttggtcgtgtttagggcccagaccacttcaggtagttggtcggcccatttacccttcttgtggtcgagaagtcttttcttgatggcgatgaaaatcttgccgttggcgtgctcgacgaggccgttggattgtgggtggtataccgaggcgaaggcaggcttggtgccaatggagaggcagaaatccataaagtc

SEQ ID NO: 160427 - DNA, 372 bp, Zea Mays
gagcgatccaaagataacaacaacatccattactccacatggatatgtcgtttagagataagttgataaaacaagcatcatgatcctcggagaaggggtatgagaatgaccaaaaatgagagatttaggcaagatcaacatccgatacttgagaacgggtcatagcagataaccagataacgaggcagaatcattaagggatccagagattcggatgataaagcaaacatgattcacaagaaaaaggattattagatccaggcgaaaggagaggtaggcaaacaggatcagctaggatgatcgacagaaatgctatgaagttttaggggcaaggatttatggaaagagacatggccttgatagggtttgcgc

SEQ ID NO: 160428 - DNA, 665 bp, Zea Mays
cagaaaagaaatagaggaataagagaattacataaaatatacctagaagtatattttcagagttagtactttaaatgtgcaaggtagtttgaagacaaatgtgccacagtgtcagatttacatttgaatttgaaaagaagtcaaaataaaataaaagaaagaaaatcaaaaacagaaaaaagagaaaagaataaacgagttcggccactgggccgattgtccccaccggcggcccacttcccttctcctccactcccgcatagtccactagcgccgttacacttacaggcgagccccactgaccagtccttcaacccatgcgccagaagcttcttcctcccctaacagaatcgcacgcgttccctgtagaccttccccctcgtcgtgcgcttcacccagtcaacagcttgccgtgagctcagcggactccgtcgattccgccgtggatcttggccactcgcgttccctccacgttcagcttctcggtcgttgatcagtcgtccgcgctggccacgtttctcccgcccttcttccccaaatccgcgccgagctcaactaccgtgcgcaactgattctgcgatgtccgggcgccttcctctcaacggatcaacggatcgcgcgcgtatggcgccgtggaaatcgtgtgccgcttcttttgctcgcag

SEQ ID NO: 160429 - DNA, 2046 bp, Zea Mays
aatgtactgcatatctgcttactattgctgcctattatcaacttataatattctgtggcttttgattcaggtattgggttcaaaagtgtgttcttgatatcaagccagccccacatattcagcaatggctatcagatcaagttcaatgagaaaccctgtgcagaatgcaatattgggtacattgtacctgaatgggtggaatccacacctagcctttctgacatcgaaacattgtacgggtgctcgaaagtcctgcctacaaccaccatcatcttaccattgaagagcgagaagattgatgcggtgaagacgcagctgtcaagcatgcatcctgaaatgctattgttcctgacaaagatcacgaaactttctgtccgggagaactctgatctcaaccatacaactgttagtgagatctcgataactagtgagaagaactaccaagccaggaagaacatgcatgcggagtcgtacacactccacttatctgctgaagagaccgggaaagaagaagcagaatgcggttactatatgtggaggcagaaattcccagtcaagccagagaacagagtcgataagcgtgctgaaattgacgaatgggtgataactctggccttcccacatggccagcgtctgactcgtgggaagcagctattacctagcatctatgctttcctcccaactgagatggtaacaagcttcccgttcatcattcaggctgacttcctccttgcttcgtcaagggaggctatactgtttgacagtccgtggaacaaggggattctagagtgtgtcccaaaggctttcatggatgcttttgtgacacttgtaaagtctgatgcaccatcaatgtctcggccatctatgttcaactttctacctgtcgactcctcacagatcccactgcttgaaccagttaggtctggcatcaaagacaaggtccttgcagaggatatagttccgtgtgaatcttacgcttcacagaagatattctgcaagcccagtgaagttgcacggctcaagccaacattttggactatccttgccaaagcatgggggctaggagtggatctgaagaatctgtcaacccatggaacttatattcttagctcacattttgacaaaagtatctatgacagtgtgctaaactttctggatgtgaaaaatgtgaaccatgaatggtatgcaaaatgcattgaaggctcaaatcttgtcaaggaggtagatgaacaactttacctggaaattttatattttgttgcagtcaattggcaaaacttttctggtacaaacatgatgtccattcccctgctgaagtatgttgataggggtggtgttctctcgttctggagcatatccagagctagtcagtgtaatgataggttgtgcattgcgtctgaaaacaagtacatatcatggctaatcagctggaatagggagttcctatcttctaaccggttctttctgcctcctagcacacaaacagctctagaaggttgctcggagaagatgaagagctggcttcagaaacatgcaagagttgaggttgtctctatttatagttatggatcagttgttgttaattccttgggttctgatcaaagagctgtcattgccttcgcacactttctttatcactctttcaagaaggatcacatcggggactactacttgtcagaactctgcagcagcatgccagtaattgatagctatggctatgttgtcaaggaaagaaatagcattatagttcctgccaagggaagcaaatgggttggtttgatgggaacaaacccatggagggatcacggctacattgagttgtcagcagaatacaagtcagcaggacattttgctggaaactatacttctgaagaccagctattggaattcctcaagacaaatttgcaggcttcggatgtgccattcatactcccaccagatgccagattctctactgtgtcatcatctctaactgtggacaatgtattcttgctgctggaatggataaagaatttgaggtcacgtggtgtaagattaccagacctg

SEQ ID NO: 160430 - DNA, 622 bp, Zea Mays
aacctcagctaaagccgtggaattcatacaagacataatattcaggtttggaataccgaacagtatcataaccgacttggggtccaacttcacaagttcagagttcttcgatttctatgagcaaaaaagcattcaggtcaagtatgcttcggtagcacacccgagagccaacaggcaggttgaacgagctaacaggatgatattggaggcactcagaaagaaggtcttcgataaaaatgagaagttcgcaggaaagtggataagagaattgccttacgtcgtttggagcctaagaactcaacctagtcgagccctgcatggaaacactcctttcttcatggtctacgggtcagaggcagtactgcctgctgatctcaagtttggggcgccaaagttgatctttgaaagcatagcagtggccgaagcgaccaggctggaagatgtcgatgtacttgaagaagagcggctgaatgcagtaattcaagcggcacggtacaagcagactctgagacgctatcacgacaaggccgtgcgacaacgatccttttcagtaggagatctcgtcctccgccgaattctaacgggggagggacgacacaagttatcgcccttattgaagggc

SEQ ID NO: 160431 - DNA, 961 bp, Zea Mays
agcggcagacaccagattgaactcctcccacgcatttcccctaaattaattttactaatggcgcacggaaacgtcctgcccacggtgaccgcatgggcaacagaagaacacgggctttcacggcaatctagggcgatctaattcaatcaaaggggtcgaggagcttgaggaggacctaagggcgctagaacaaacaatcaaggcactggaactgacctggagcaagctgtccacgacgagggtaatcgcgcggtgtttttgagcagattggaggaagtgtgaaattggagctctcgggtacaccattggaggcaatactttgtggctgggtgtgtgattatcctacggacctaacggcgcggtcaatttataggaagcaagagcggcggccgggaatttggatgacgacgcgcgacgaccggagaaggagaggagcactggtgcaagcgcttagtggttttcactgtggcgctccctccggcgatcactggatcccttaacgtgactaatcgtgacgtggtaaagtgtctggacacgcagcgcacggcagtgatcgatcaacgacggtgaggtcttatcccgatccaccgatgagcaagggggtacgacgggcttagccgtgaccgagctcgggctgatcccacgcccagatatttactttaccatagttatcccctcgctagtgaacacgaatcacggtgtgaagatcgtcggcggtgaggggggatgaatcgggcatcttcttcagttactgtaccatggcatacatctccggttgactgacaaagcaccttgaagctagattttctcctaaattcgctagacaaccaatctaaggctctgcagcaaagttgtagtccaacatccaaaacaaattcttactagataatgcttagaattgagctcaaagtctgctcaaacccactggcagtccaaattcagacttcaaacagcctgaacg

SEQ ID NO: 160432 - DNA, 292 bp, Zea Mays
ttgtactagacctggttgaacagagaaacgaaaccaatcacacaagcgtggtccattgcacacattcccaactcagcctcgttccaaatcccatgcaggcttagttaataaatgaaaccaatcacgccctaaattacagtagagaccgggctgcctaagtacaatttagagcatctccaagagaaactgtaacacaaccccaaaagcatttatcatggaaaaactattctgagccctccaactcttatcttctcccctaaaagcttcacatcctgaatccgtggcccttccc

SEQ ID NO: 160433 - DNA, 1175 bp, Zea Mays
ttttgtcgctgtcgaaaaggaccgttctttttccaagacattcggggtgttgcggatcgatgctgagcaaacatgcattatacagttgctgcttatgtaaattattttttgtcgcataggggttggaagtcgcatcaaagagcaatcttattgtcctgctttgtcattgcgcccagtagtggttgatcctttttgacgcaggcacagtgagtagctggtttgctgttcgtcgtagtttgtcggctcaccactcctaagattcagcttaccagaccatgatctacctcctgttctcgttgtggacctgctagttacagccaagaggttcagcaggaacaaaagattcccgaggaatttagtggttatcagcccacgacgaatcaacctcaactgagacggtgacagtattgtgatgctgaatttagaatgaccgaactttgacccccggcatttttttgttttgtttttgtcgtcttctttctctagagcctttcactgctgggatatgcctgagggatgctatgttatttgcattcagggtagaaaaattctggtacggtaccgtcgtagttgtctatttgggggtaggcacgttcgatctataggtgcagcgtaagtacatagaatgtgaaatgagaggatttttgagacgtcgagctttatttactaaaagggaggccacataaagtagtttatagaccgaaaaaacaactggaaaatggcttttggttcacatgatcacttatgcaacatacaatttgttcagcgctagttaactccaaacgatctatagttctttcattcattgcacgcataaaaaagggtcacattttgtaccagctgttgacaattcttgagaacgtctcaacgcagctcgtgtcagtaactgttgggttccctccaaccaacaaaaaaacgtgtgttgaacattgaatttaaaaccttgtgcattaaattgctgggttcctctctaaaaaagaagaaccctcaaaaaaaattagcgtatgctgctttttgcagcgggcacacggtattctttagtaaaaggcgaaagaatagttcgctttgtgcccacggcgcagctgggtggccttctccttgctcctatgggccttgtaaatagcagtgctcctgctgccattaagttcagcaagcggtttgggactaaaatgtgt

SEQ ID NO: 160434 - DNA, 543 bp, Zea Mays
gtggccaaaggcttgacatcagcgagccacgggcgatgccaacgagtgacaggtgacatcagtgagcgacaggagacgtcagtgagcaatggcagtggccacgacctctcgagtggcgattagtagcgacaacgacgacctcccaaggcatgagtggtagagacagtggtgaccacaacgacggcatctgaagacgacgacctcctccgattcggcgcctctcgggcatcctccgacgacgaccacctccaatccgactccctcgaggccgtctctagcgatggactcacccgatctgtgtttatgcctttgatgatttttatacctattacctacacactttatgcatttcagtgaggattttttatgataataataacgacgcctctcatgtggcttgatttttacggtaaccacctagattcacgcacattttttacgggaatgtcaaacatgacatcacgctgaccattgtaacaatactgtgattttttatgcctccactatcagtatttatgcttaatattgaggatttttatgcta

SEQ ID NO: 160435 - DNA, 1001 bp, Zea Mays
accgtatgttgccctcgcagatttcatgacttcttgaagtctcaaggtccatgtattttccaacaagtttgcatgcctcttgtttgacttctttgatgatgttcttcctggctcttttccccaaaacgatcttgaagggggactccataccttgaccccaatggcccagtcgtggcttagtggccatatcccgcacgctagaaactccttgacaacatgcctggcgctcctatgtattaccacatggtggaaagcaacttcatcctgatcaccctctacaactttgtatcagggaaacatagtgtactagtgaggtagcatctcaccaaccctcacaaacaaccggtgtcttcacccttgttaaccttcacataaaaccaactttccgtctagttgttgccccaccatttgattggacatgaccccaactcgacgatagcctttgaggtctcctcgatatttgggggtgaacatgtagctcccaaactaaattatacacccaccatcagtcttcttttgccaatgtagacaatagtgttttgcgaagacctcaacagacggttcacctccatacgtaagtgtatcctaaacgtacttcctgaggtccatgatggtgttctaggtaagctggtgcagttgcatgttaaaccttaacaaaacttctaccacaaacttgtggcacgatagccaaagtcctctgacaaagaacacttcaaagcccatgatttttccttgtggcttcggtgtggtctctgacccaagggcatgctagcccccatagtaaagtaacttggctacttcgtctccttgatgcggcccactgttggagcgaggacagaaccagcccttggtcaacctttgtttactaaccaattaacaaagtgtccaatgtagaacaaataactaggggaaaagcaaagacaaaggctccccacttatgctacaaaggctctcctcccccatggcgtcaaaggactagggcttccgccccacgagggcta

SEQ ID NO: 160436 - DNA, 722 bp, Zea Mays
actcatagttaagctagatccaaagggaggcatagaactctgtaacctaaggctcaacgtagaagctagaccatcccaatagatctaccaatcctgacaagtaagctaggtagggacatatttactctccttcgttagcaactatgtcctctaagggactcactctatgaggtcagagggtgatcccactacaagttttggataagtggaagtcctcatgaagcgctttatagaagtcatttgacgctctcaggtccctctctactagaaaccactactcaagtggaacaaagcataactcctatactcaagaagtactcatagtccccatgtaaagatgcataaccataggatgatatggatatactactcttaggtgtgacggttgtatacaagctccatgtcttggtccctcagggtgtggtgtcattggtactcgagcatgagtggaacaatgggcagtcgactattgcttagtctcttactattgagtttgctctacctatgggtgctcctatatgaccttagtgatatgaatagagccactcctaccaccttgctctatggcatctactacataggaaacatctagatccctctgagcctctatgttagctagtttgggcttcctaacgctcttagtctatactgtcttgcccttatcattggctaaagagagttctggcaatctgccatggtcattgtcacttggaccactgcca

SEQ ID NO: 160437 - DNA, 879 bp, Zea Mays
ccggcgacatcctcgggggctgggcatgtgtcaacaccatccttggggtccaagttctctgcggtagccacttctaaggctgatgggccctcagttacttccatgggaccaggacgatccaagacagtctcctgaccctcgagatcgctctctaaggtcgacgaggcacgggatgacctcaacccagcatcaagcacatcagcacaaaccttcatcacaccatcatctgctagctccgataataaatcctctggaaccatatcctcaagagtctgatcaaaattcgccaaggacaattcttgtagaccaatgagagcagacaaagcaagagaaggaactccactactttcaccactagcgatgagctgccgactgtttttctgagtcaaaggaacttcatcctcttcctccccatcgtcttcattagcaacacaggcagcacccccattgggatcagcaacagatgaagcacccacattgggatcagcagcagatcgggcacacccattgggatcagcgtcaataaattcagtcacatgaacttcttcagcagcaggaaccgaagtaccaacatcccgatccaaactggatactcgccggaggcgtctctttttctttttctgctcatcagcaaaaggatcaggttgattggctcggcaagggcgcctcaggcgagtactagcagacttctgaatatccaaggtcgtattagcctttgggaggggcgccaccaccgatgtcccagcaggagcagcatcagaagagtcctcagccagcaaatcaagcatagcacttatctctgcatcgctaggatttaggggcacctcaaaatggacctgccgttcatcatcaggaatctccccgagcgaggcaaccaag

SEQ ID NO: 160438 - DNA, 638 bp, Zea Mays
gttggtggtgcaagtttggagatgcaccgcgggaggaagacagaatacctcgacattcccctcaaggataacattaaagggtggcgccttgagtggtttattgtggaaacccactgcaagtccctcccccctcggtcggggagatagctagatgtacgtactccaagctgggttgagtctccaacttccttggaggtaacagaggctagagttctgcttgctgagatatgtctgttgaaggagagaggtctgactgccgaagttgtgtttgctgacttcgttttcaagaatattcagcctttgaaagatagggcgtatccagcttacttgtagagtggtatcaatgactctacccgggtcatcaacaagagaattcctattgaggatctggtgagccgactagacatgatcctgaggggcaggatatcaaatgttggtgatcctgttaccttttctgcttggaatctgcccctcataggtcattttccaatttcgtgtccaaccctcctactagtgatggtggtctgtgtcttagagtgtgaccctctcccgaggacattgaggctctggttgctccccttcggaatcttcccaatgatgagaaacaaattcactttgagatgccagcaagtccagat

SEQ ID NO: 160439 - DNA, 687 bp, Zea Mays
gaggaagtgggcagcggacgcctagctttaggaaacactattaaaaggtgttaccttgcagagagaccaggagtttctcctcctccttggttcgatcgcccagatcctcctccaaggccatgactcgggcctcggtggcctctttcccttgctacaagatatgtaggtgggagtttgctttcacactcaagatgtgcaagggtcgtcgactctgcatccctccttgctgcttcgactagggtatcttaggagtttttttatcaacgtggcatgggcgtgggcttcggcggcctcgcttttcaccaccaaaagatcactggcggaacgttcccattcctgccttttgtcaagaagaaggcgggacctaccagcctttgtccctgtgagcgactaaaagcacgaaaatcagacaacgagacaattagcaagagttttgccgcacggttgaaagtcgatcaaggtcgtccctcaatgccttctcagttgcatcgctctccttgtttagctccctacatagggtcagggggttatagccttcagcagagcggtcaggagcaagctagatgcctggtcggccatcgaggcccggcaacatggtctggggctccccatgagcaaggagggacgctatcacacccgggtttagggccaccaaactcgagcgctgttggtcacttgttctcaaat

SEQ ID NO: 160440 - DNA, 905 bp, Zea Mays
caccttcatgtgaggaatggtgtgatcttggaggacaactctgaggagattctggcgacacccaccctgttatcagagtctcatgcctttgctactagagcttaatctttagtgccaccggtgccagtagcttaagtccctgctcctagaggtgatgaccctaatgattctggtgatggtggagacgatgatgatgatgcagaagaagaagaagaaaacaacgatgaagatgccaacgataaacaagaggacaactttgttggaatgtggcctgtcacagagcattacacctcaatgttcgagacgggacacttcccaaacttgttgcaggatgtgctgcatgtgctaggaacctatgtttgacctctttatgacaccaggcgggtatctgagccccctcgggattgttactacatcactcgcgtgcatatcagagtgttggatgcaggaggtagaggctttaggactctttcatctcatgagtctctaacgccgctatccacctacgctgctttggtcagcaatgcttctcaaagagctttgtggtccctcaaccacacctatcggcagcagttgcatgacacggcatacaggcaccttcccttacgtcctcatggtgagagccagacaagcgtggttccaggtgaagctagagaagatcacctcaacacccttgtaggtgtggtggcaggtcttaacaccgacctggacagtgcgacccttgatctctcaagtgtacatgagaagcttgaagatgctcgtgcaaggattgcagcactcaaggctcaacttgaaggaatagatccacctgaagctcacgtccctaccatagctgtgtcctcgccccgcaagagaattcgctatggagcccccagatctattacgaggccactctagagttttat

SEQ ID NO: 160441 - DNA, 732 bp, Zea Mays
gatcatcactggatgagattccgttttgagcgagaggatgtcactattcatgccagccagattcgccagctatttggatttcacgagtcgtcgactcgtcttcacagcttatgctatggcacctctgaccctcctcgtcgccctcacggcggtgttgctcctggtacagctcacgtcgcggctctgttctgactgcccttctcagatgggtcgtgacgctctctggcagacttcaccacagcagcaaagtttctatatcagcttatgagactgacacttctgtcgtggatggggtacagggaggctaccactcatatctagctctggctccttggtgccctggtctctcactcagagtttgatgttgtggatttccttatttgtgagatcgaggacgccgttctggatggtctgcgtgctcgtcgatagctgccttatgctcactatctgtgtcatatttttgctcagctgattcggcctccatagttccagggcacacttgaggactcacgcctcgtctttgggtcctaccgtccagcgcctgaggatcctgtgccagcacctgctccagtatttgactctcaggccaaggatactgctcttcgtcagttcgaagctcaggacgcagcagttgatgatgatgatgatgattttgggattccacctccgcctcctatgcctccacactctcatgatcatgaggctgggagttacagtggtgttgcccctgct

SEQ ID NO: 160442 - DNA, 880 bp, Zea Mays
cgcgacttgcgcaaagggttcgctcttctttgtagggcggtgaaccgtctgctcagggcgtccgaatcgtccacgcgtgcgtagaggctgtgatgatcttctacaaaacatgaatcttgtcctcgagaggggccatgttaggaggaaagattctaggcttgtcaggccacccctctaaacaacgtcaagccaaggagagctgaagattggggatgaagaagactaatctaaactaagtcactgctactcctagggtaagaatgtaaaataactggtaaataaattgatttcattgattaggcaatgcctcaatcgactgtaccccatcatatatatagggatgaaggtctagacccgtcccaagatgcttcccaatagattctcgtgccattagctagataagcacgtgcgggggtaaggacactcgcctgaattaatctaattgtggattgtccggaccacatggtcagaccgtccaaccgtgcctaggtgccaaatctggtgctcaacacacgctcccaaccttttggagaagctaaacatacaagttgtaaacaactcgatatgaaaccatcggttctctaaccatcttgtcatacactaggatgatattgcattaggaagtggtcattcaatgccttgggtaactcatcaccttgcaatgtttgtaacatatatacattaccagagattgcatgtgtaactctataaggcccttcccaacttatggactacttgccaaacttttgatcccttctcattaatggaaagattgtcttccagactaaatctccaacctagaatgacttagtctttaccttcttgttataggtcctggcaactatgattttgtctttctcaatctcccttatagccatca

SEQ ID NO: 160443 - DNA, 653 bp, Zea Mays
caagagcttcgaaaggtgcttcgggagtaggagtggcagttttttcaggcagaatttgttctacagcttctttttccgttttcttttctccggtttccaagggtttctccttgacgggctctgaaggcccagcttcagtctcagcctggctctttgtagcttcggcttcggtcagttttttctcagtctgcgcttttgaagcctcggtagttttccgtggagtagagcgtgaagtttttatcgtctccaacacatctagtacactggccatccttttcctcttgggggtcgctgtaagacctttttgtgccttcggcactgtcacttctgccgaagggctcacaacttctaatatttttgttccttcgactcctatctcttcaacattatcgaccttcggctcagctattctggctgaggatgcctttggcattgcagccggctcttcaatcttctgcgtaagcgtaggttctttggcttcagtagccgaagaggtctcaccaccaaatccaggcactatggccggttcaatatagcacggtcggtgagtaagaaccttcacctttctcctcttcggcgcaggctcgcttggagcagctgaagtaacatccttcccagaagttgcactctttctcttctgcccccgtggcggg

SEQ ID NO: 160444 - DNA, 561 bp, Zea Mays
ggtgccgaggtcatggcggcggatcgactctccccctcctcttgattctctctctccggcgaggatctctgctccccgaggtatctgcgacgacttccagttagcgcggacggagttggggcatcaggaacctgatctatagggatgaggagtccccaagtcgatgcgaggtacgcgaaattcatggaattccgttgccgcaagcttcgtccagagttgacgacgggaatagatataatactggccaacaagacccactcggcagaggaacgagggagcggcaagctgcggctggcgcgcgggctcaagttgctagtgagactgacataaggggcccaccagtcggcgcccaggcgaggtagtggggatatgggctgagcggatgaaaaggggtggtgggccgcggcaggagggaaggtgagtgcgccgatggagttttttatcttttctcttttttctttttattctctatttttttttctttttgctatccttttattccaaattcaaatcaatcccaagtttaaaatttccaaatttttgtggcaaatctatcttcac

SEQ ID NO: 160445 - DNA, 699 bp, Zea Mays
gaggaacggccgtggttggctcctcaccaggccggaactccactgccgaacagtgtcgacgctagaaactctggtgagaaccactcctagccacttctactttacttatccatgccggtggtacttcttaggcttagatgttggggttctggcaacctgggggtcaaacgccggtgcaagtcgtgccctggggcgagtgcagcggcgccgcatggcgagttagaggtagaagaaaacatggatgccgttgacgtgaaaagcaacggtcaggattcaatcagagacttaaggatgcgataaccggcctcggccgttgatctgctcgtatgcggctgagattagctcatgtagaaatggatttgggccctcggatcttgatccaacggcctgtagatggcgctggttcattatgtggaataatctgatctgggcggtccgttttcgatcggacggttgatactgcccgataccccttcgactggggacaatttcataagagccctccgctttagttgtattcaacccgccatcctccttagggttagactgagtctgagaatcttctcgcttaagtccctgtgttttgggctaatagtaggcgcagtccagaggaaatggaaaatcagagaaaatgatttataaaatgaatttcttatataaaaacaattctagaatcttgttaaatccataggaaattca

SEQ ID NO: 160446 - DNA, 425 bp, Zea Mays
tccagaacattcgatcgcttgtttctatcattctcgacgccgcgtcccccactacgcccactagcgcaaacatgtgctcctcaacctgcaacgcgacaccctcgacgaccatgttcttacttatgttgctaccctcctgctcccatcatggcaccatatggacagtgtgatgctctcgtgtatcctcagcaccctcactatcaagctctaagacatcattcgcgagcgggggcgccgctcgctaggcctgggttgccatcgaggcgtagttcctttgcaaccgggaggcccgcgccctccacctcgatgcctccttcaaagaggggctctctgtcactaagtactatcacaagttgaaggcatggccgagtctctccaggaccttgttgagcccgtctccgaccgcacgcttgtcatcaaccttt

SEQ ID NO: 160447 - DNA, 672 bp, Zea Mays
gtgacattcatggcggcggaattcgtggtcgttccaaatttcaaaattcgaattctaattggactaggcctcgcaacctacaatggcgtcccattcggaaacgggggcctgctaggcccacctgcttttcgctgtcatttctgtaaggtgagagggcacttggaattattttgtccctctaagaaatcatctttcggttttcctttaactttgttccctgcctttgggagtcgggccaatttggtgggaaaactgaaattcccggccacagttcctggtttcgctcccccgcggtgtctgtgatcggtggacccctagctatagctgcttcgaggagttcgcccgggttgtcctattaaaaaatctgaatcgacacctctccagtccctgacgctttctttgggtgtgacttcatcaaaaccccaaactgctccttcttcgattgctggctggcgatcctcgcttccttctccgatggcgtataggcgtgttgatccggagccttttcttccaccgggcttcagcgcttcggtggtcctgcaccgtgaggttatggccaggttagtgactaggcgtcttccgccaatgcataaggattgggctattatcaatatccaacctttaccggaacatgaagtcatttttccgacggtgagagatgtggtcagagaa

SEQ ID NO: 160448 - DNA, 675 bp, Zea Mays
tcgagcctacctcccagggggccaagtaccaaggggaagttgatgacactacacataacaaggacaaataacatacaaataagtttaagttccaatgctacctcattagcggttcttataatatcttacaaaatcaaaagttattacaaccgcttcccagtggaacccttgctttgtctctataggtcgtcagcaggatcgtgctggaagcgctcggccaccagctccacggcgtcttgtacactctcccaggcggcgtcttctatggcggctaccggaccagcgatcactagcgccaaggatatggtggggtcgtgactccggaagcatgttaggacttattcaaccactgcccgacagagcttgctgccctctgcctctaggcgggccccgaggatctgatccaggcgacggaggcgatcggcggtagagtccagcaccgggagcgcatcagagatcgacgctggtagctccgacattgggatggggctcatccctagtggcactagtgccgtgcttgcctcgccggcccacgcgacaatacactggacctcgacgcggtgctccgcttggagatcttcaagggccttcctggtggcctccatcgcttggggacccggtgccgcctgcgctgcattgaactagcggatctgctcctccagcttcctctctttc

SEQ ID NO: 160449 - DNA, 354 bp, Zea Mays
caagcgatacgtgccatgagtctcactcatcatctaccccttcccactactgtaagtaatcacactaagccgttgcactgattaaattgttgaatctgagatttgtctgtaccaaatttggctaatcaaaatagcagttaaaaaaggtgagctcgtggaggatcctctgtttcagactgagtgtccttgatttggtgatggtgtcgctatgatgtcgcttaactgctttgggatggacaattatgttagcaaaccattttttctcttattcatgctgtttttaggatatataagtttgttgcgcttgccaacgcactttttaaatttctaatgctaaaggtagttcatgatttt

SEQ ID NO: 160450 - DNA, 383 bp, Zea Mays
ggacaattcagcccccgagggcgctgctgagggtgattcagcccccaagggtgttgctgagggtgacccagcccccgagggtgctgctgaaggtgatctagtccctgagggtcctgagctcggctcttcttcggctacttctatggatgttcatgtcggatcaccactagctaagtctgaagaaccagcgggaacaagccttgatcttcctactgctcttgttggcccggtcactttacgggtcagtgacccgggcattgaggatccgcttcacgttgttggagctgaggtcccactaggtgttgccttgggcatgagctttaatcctcctctagggctcaaatctgctctcgatattgcttctaccagtgttccgctgtttg

SEQ ID NO: 160451 - DNA, 806 bp, Zea Mays
tttgaagggcacgatgttgtatcaggatatcttcacccattaaacgttttggtggacccatctttaacttttatgcctcttctaaatgacttcgtatcatttcgaaacgggtgattggatggaagaaaccgtcaatgacaatcaaagaatgagacctttttaccatgctccagtcgatatgcttgtgtgtcccccatgcatatgggacaacacagtcgaccgtggacacaccagccagaccaaataccatatgcaggcaaatcatgaatcgaccacaaatatacaacacgtaaggtaaattcacgttttagatgaccatcataagcctttacccctacccatagctctttgaactcttcaatcaacggttgcatgaatacattgatcttctttccaggatgtttaggccctggaataataagggcaagaaatatgaacccttctttcatgcatttgttgggagggggttgtagggcatgatgaaaaccggccaacaagagtatgaagttgaactgttgttgtaaggagtgaaaccatcagtggacaagcctagacgaacactcctagcatctcttgcaaattctgggtcaaaacgatccagagccttccaagcatcgccatctgatggatgcatcataatgtctggatcttggctctcactgtctccttccttatgccacaacattagcttcgcagtttttggggttaaaaacagacgtttaagccttggggtgatgggcatatatcgaagctgtttaactgccacttttgtagcaaaagtagctccatcctcttttagtacctcc

SEQ ID NO: 160452 - DNA, 567 bp, Zea Mays
tgcgaaggcttcgggagaggcgtctgtcactgccagttctgcgactgattctcacgaacagtcatcttgaaataaatagatcatcatgtaataaaagccccgtggtcgtacaatataattttaaaaatgccgattgtagggatggaatcagatggaaaatgttgtagtgattaaaggcccctctgcctttggcaatagtataatgttctgcgctttgaaacaaacactggctacccttggaatgatttggcggacgatctttatatggcctccttactctaggcgttctacagtgtgcgtacaaatttaattatttggtttgtttttgtttagataaacattttttaatgcttcggtttaccacgggcacaattcaacccaccgcccttctcctaataggccagggtggccagctcattcactcccttcctctcccacagatgccggcctactagctgcctcaaccatagtccatagcctacccaacctcctctctactgtcacccgttgtttgaatttcggggttggaggatggagcagggaagaaattcttggagctatcgtttt

SEQ ID NO: 160453 - DNA, 898 bp, Zea Mays
ttgaatattcattttaccatgctagttcgtaatgaaccatttacatggcttgctacgaaatgttgcaaaccactccactagtccttaaggagagagaatgtaatctagaagtattaaaccagcacctccaatttgctgtcaaaagcctttaaatggatatattcaggctgttaacattaatttttatcgagtatgaaagggacacatacaaataggaatgtcctttttctggtattcgccccaaacatgaaattccacccttgctgcgagattcgaaggtgtggaccgatgaaataaggcattatggcacctaaaccacatggggaatcgatgattcacgcatattttaaagtggagacgaaacagttaccttgaactcgttgtggacggcactggctaaggcatgggcagatccggcgagagtggttgtcgactggtctgcggcgccgccttagcaccattccgtcggccatcaatgctggattcggctgcaacgaacacctcctcgctcgatctttgtcgccgctcttcaaatccacctagaggtttggcccagacaaggatccactctaacaaagctctaggacaacgccaatgacacgggatgaagaacccacgctccgggaagtcctccgggacacaccgggcgacgggagcggatgggcggcgagctcaggatgccgtcgtcgccgtgagcgcgtgcgtaggaacgtgtgggggaagacagcgccgaaacctcggtaccgtccccctcgacctggggcgagagagacgatcccgtcgatgtacctgttgcgtgcctctaaagaaggggatgggcatctcgtggtaaccgctgtagaaagcctaatcctcgtttggaacggagaaaaaacctctaaattttaaaggattcaat

SEQ ID NO: 160454 - DNA, 478 bp, Zea Mays
tttgttgatgacattgatcttctcatctgtcactgatagagggctaggggaaagtggaaccaccactgaaaatgctcgtgtaagtgtaaccatcttcctttctactagtggttgaaaagaaggtaactcgaacaaattaacagtctgtttggttaatggaataaccctgttcggaaccaagtgatccagcatggactcactccttgtaggttcggatgggaggaatgagttggtccgcctgttttgcgaggaatgagtagcttctagattttagttttagatcggaatgaggggatgacggatgagatgaatctgtgatggtaaccaaacactattttaggctcggatgtaggttcggatgactccggaccattcgatgcctctaaccaaacacactgtaaacttatcaggatcatcaacccaccgaaagaaaaggcacccctatggtcctaaataagttgatgtcactaacttatca

SEQ ID NO: 160455 - DNA, 489 bp, Zea Mays
ctacgacctggcctctcatggatttcaatggttcataggccaagtcatattctatgagtgcataagcccatttaccaattctaccactcataattgggttatgcaacatgtatttgatcacatcggcttgaccagaaaccgtgcaatgactagacagtaaataacatctacacttggtgcatgcataaaacaagcataagcataacttctcaataaaaatgtacctcgtttcagcatccaccaacctccgacttagatatgtcaccgcatgatcctttccttcagtttcttgtgtcagaacagccccaatgaccttatcttcagctgcaatgcataatcggaatggtactcctgcttgtggtgcttttaatacgggagctgaaaagaagtattttttaatgagatcaaatgcttcctgctgctctgccccccaagcgaatttggcatcattcttaagactaaggataggggtgaaggcatcaatcttcc

SEQ ID NO: 160456 - DNA, 414 bp, Zea Mays
cgaccacggacacgaactgaacaaagccaaactgaaaacgaaattgcaaaggctaaacaagggttctaggacagcggaattttttgtgtatggcaattatctggagttataggatgaaaaacctaaactaaactagggtaagcctgacggtaatacctgagtctttgaatatcacttgataggaatgggggtgccagatcttccgtcaggtgaagataactatcgatttggtggagatgtcacacagacgatccggcttccaatcaacataactagaaccccgcaatcgcagcaccacttctcctctggttatcaaccatgcactgcacgattgacctcaccacgagggctaattcctacctgagaatcgaatacacaagcaagaacaagaaagaacttaatctagaatattgc

SEQ ID NO: 160457 - DNA, 295 bp, Zea Mays
ctgttatgctgacttttgtattgcaagcttccattaacatcgtgacgagtttaccttaacagcacttcttacagtggaatgcaactgcaactggttgtagtcaatgcagtgacatggtgctgttagcttggcagggacttcttgatattattatcgtcggaagattcgacaacagttccttggtttcaaaatcgatcgctactgtcgatggaatcagtgccagtgctgatgcggggttgtgcaaataactggagatagatttgtatggtctttccattaccggggaatagcttgc

SEQ ID NO: 160458 - DNA, 571 bp, Zea Mays
cgaaatatgccatttcgaacaaccaaaattggctcaatgccactattaattgaaataggcaaatcctaagttgataatacatgatacgatgatataccatggcctccatataacaattttgcattgtagggtgaaaaattataaaaaggagatctaagcctattgagaggggatggtgagctgtgattatcaaaaattttttagcacaaaaatatggccctcttatcttttatgttgtggaaaatgtgttgtggcatgatttctacagtactacataaagacaagtaatataacaatattcaacccatctaaagacgaatcctctaaaagcaggcagagcaactgaagttgtacgcatcaaattcaaggtttccttacatagaccatgaggcaaccatgtaatttttattggagagcatctcgcaacatttagatcaaacaatcagtgccatcttttgcatagatcaaacaactgtgttagtttgttcaagcaaactgttaactaatatgaatctacatgtgaggttctcaactacatagttttgtggactggggacatgctcagttgggc

SEQ ID NO: 160459 - DNA, 450 bp, Zea Mays
gctgcttggaaaatagctgcattctcaagctatttgtaactactattactacatcaacccccacgcttctgcttcatcattagcaatatgtatgttcatcttctgactttggctcaacaagctaactatattcagacacaatttcagtcatccaaccattaaaatcacaagtgtggaaccaatatttttggttcgagaaaaagaaggaatccatcgttgtttccgagcattacacaatacgacgtatattgaaaacttatcactcagctaacagaaataccatcaacaaaccaacagcaatggggttgtacataaaaacagggctacttgtaaaaggtgcatatagcaccctcaccactacatgcacatatgaatgcatgataacttcaaagttagcaagttaatactgaacagagcattttgtataaggtgtcacgtagcaaatatcag

SEQ ID NO: 160460 - DNA, 1236 bp, Zea Mays
attacttccttcatatacaaggggaccaattctgaagctgaattggtggtcttcatgggaataaagtgcgcagacttagtcaagcgatccactaccacccaaatagcatccctgccccgaggaaaacgaggtaagcccaccacaaaatccatggtgatatgctcccacttccactccgaaatttccaatggcttcagcatacctgcaggcctcttatgctcggccttcacgcgctgacatacttcacaggcgaccacgtacttagaaacgtcaacattcatccgcttccaccagaagttttgcttcagatctcggtacattttggtttcaccagggtgaacggtgtaaggcgttttatgagcttctctcaagatatccatcttcacctctgatttctgaggcacataaaggcgacccctgaaacgaaccaaatcattctcatcaatggagaactcccggggtttaccatcgccaaccctctttcgagcttcctgcaataaacgatcctgctgctgagccgcacacactctctccatgagggaagattgaataagcatacgagtctcctcactagcggtgccgacatagcaaacagcgatccccaaacggtccagaccagcaatcaactgcaaggccacttttggaaccccagacctgctaagggcatcagcgaccacattgccttcccggggtgataatgaatagacaaatcataatctttaatcaattcgagtcaccgacgctgcctcaaattcagctccttccgagtgaaaatatacttgagacttttatgatcggtgtaaatgtcacaagcctcgccataaagataatgcctccacgactttagagcaaaaaccaccgcggccaattcgagatcatgagttggataattcccctcatgcttcctcaactgccttgagccataagcaatcactctgtcttcctgcatcaacacacagccaagaccaattcgcgaagcatccgtataaactgtgaaacgcttaccgctcttaggcaaagctaggataggggcgtccaccaacttgctcttcaatgtctgataactaacctcgcaatcgctggaccagacgaagagaacacccttctccaaaagtctagtcaaaggcttagcaatgctggaaaaatttggtacgaagcgccgataatatccagtgagccccaagaaactttgaatttcagagacaccagagggtctcttccactccaccacagccg

SEQ ID NO: 160461 - DNA, 561 bp, Zea Mays
gcacattttaaggcacatttttataatatgccttagttgtcttctttatctttacggtcattgcctcagcctttttccagacttctcgtgcttagccaaatcaacagtatgtgtcataaggctccttgcaatccttgacaaaaatgagttgtgatagcagtggtagctttactcttctttttctcatacagggacaccaattttggtatagaaaatttagattttttttattgtcgtgtatcccttgatggctgtggggaaggtggatcccttgctggtagcgtagacagtgggtcaccaagaggatgaggaggagaaggtggtgtagccctgaatggcgatgatcgtggcagagatggggaaggtggtggatgtacaataggaactgcagtttgagcaggcgaagagggttgggcagaggacgacgacggcggtggtagatcaaccaattcgacatccctttgagaccaaaggatgaaattcttgatatcttgtccaaatgtctcaatacctttggtccagggatgtctagcatgttgtcattggatccttgaagaccgc

SEQ ID NO: 160462 - DNA, 318 bp, Zea Mays
ccaggtggcgccccttcgggcgccctatccaggacaagagaaaatcagtagtaaataattgttgatgaactatttagcataattactgcttcaaagatggaatctcccacaaaaccgtttaatagctagcagcaaccagtgtagcagaggaaaatagtttgcattgaatacagttatgtgcaagacgttgcacaacaaaaagacctttcaccatggttgcatttgttacagacaaatataatcttttcccagcatagcctcttgatccttctgcagaaataaaaattgtctgtgagaaaatacaatgtactacaaatc

SEQ ID NO: 160463 - DNA, 602 bp, Zea Mays
ggagactgcaaactttcctttttgaaatttatggtaacatgtgctctttgcctgctgctgatgtgaaacacatgctcgtagacagctgccgagcgaaagtttggagtctaactagcatgacatttgctctttggtatactttgataaatacagatatatctaacagttgactcaagttccctggctcttatttttcttatacattttatacagggatgctaagactagggaacttttaaaagtatttggcatcgatggacaagtcgacttagctcgtcctgaggcccgagtaatgccagaacaattcatagaggaagagattaaagtaaaacccacaaaagggagaggttgcaaggttctttcacattttttagaaatctaggaatgccttgatgggcgcagctgatgttgtacgcagagttgcaacaaaagggacatttgtggaagataatcgacaaactgaagcagtggctcaagcaatgaatggtacaattttgtctcgttgcacagatggttcaattattgtttgggatggaaatgggaatagactgcgagaatttcattaccatagttcttctgttcgatgcataaagacactcgga

SEQ ID NO: 160464 - DNA, 1000 bp, Zea Mays
ctgaagcttcaggggcaggggattttgctttttttgccataccctgccctgctgccatgccgctatctgaagtttgttgatcagctttgtcttcagacgcgacagccttcgtctcaaagggcactacaggcccagctttggcttcggcctggaccttggcaacttcggcaactttcttaataggagcaggggtcaaggcctttgtggtctccataacagcgtctagcacgctggccatcctcctcctcttgggagttgcggcaggagctttttgcaccttcggcagttttgcctctgctgatgggctcagaatttctggcattttcactgttttttccacctttggctcttcggccgtatcatccttagcttcggctggcccgactgtagacaccttcggctctacaatcggctcttcagcgctctgcacaataggagcagcttccagaatcggagcagcttgttttgtttcggcagttgaagaggtcccttcgccaaatttaggcactacgtccggttcaatatatcacgtccggtgggtcagaacctttacttttttgcccttcggcacagctgtgtggtcgaagcggcagtttttctcttctttccttgctttcgtagcgggtagtgataatcagggtatacgaagccaatcgcatcaaataccctgttcaatcttttcttgccccgacccccgaaggctgcagacaaggcatcatcttcggccttggaatatgtcccaaacaatcatcatttggctcatcaaacttctctctaaatctgaaggtatacttcaatcgaaccaggccaccttcactggattcggcaacagtctccttcgacatatcccagctctccacaagtggccacaccctgaaggctatatgctcttgaattatatcccttgtgccaatgaaggcacaaacattgctaaaggccttctagcacgcttcgacgtcactttcaatagtgaccttcgacctttgaaggccgaagcgag

SEQ ID NO: 160465 - DNA, 474 bp, Zea Mays
tttagtgttattatttagcactgtatgaatggttgataggagggttatatggtttacatgattgacccaatccgactaccttgaatggttgagaaaaaggtcaaggtgtgccacacttgcgcgtgtgttgcccacaaaactgtgtcgaggtgaggtgtggcatggcatggcaaggcaaggcaaggtgaggcgacatagtggtcacggtcgtggtcatgttcacagtcatgacgcagtagagttacatgtttgatgagcaaaactgtgtcgaggtgaggtgtggcatggcatggcaaggcaaggcgaggcgacatagtggtcacgaccgtggtcatgttcacagtcatgacgcagtagagttacatgtttgatgatgtgtagttacctgacttctaatctcctgcgccctcttagccctccttttctttaaactcgaggcttaggtctcatgactcgcctatataaactccactt

SEQ ID NO: 160466 - DNA, 318 bp, Zea Mays
ggaaatcctgctccaatcccgaaggcggtaggcgtggttttatccgaagccatctgccagggggagagaattactactatgcatatgccaatttttttcaaccaagttattttattcatcacacaagttcattacaagcatacagttaccacaagtcgcactacacgcgagcgctttctaaggtacttccgaactccctttctaaagtgtccccaaattccttgagaaggtcgtcaaggctagctagggacatattctcgacgtcagacaaattctctatcctggagggaggtagtgctagaggggcttccttctttc

SEQ ID NO: 160467 - DNA, 637 bp, Zea Mays
tgcggagaagacggacctgcccaggggtcccaccggcagcggaagaagggaaggaggagggcgcgcccgcgaccgacatgggtggcccgcatggaagtgagcgtgctgagcgagagggagaggccgcggggtcggttgactggtgagcgggtcccacagacagcgcgccattagggcgcagatgggccagcgcggtaggaaagctcttggcgggccaaaataggtcgctgcggcccatgatcagtttttcccttctatctttttcttttcttttcctatttcttattcttttttttatccaatttcaaattttgaatccaaattagtgtcgaatttattcttaaatgatattgtgaaatctaaaatcccaattttagaaatataattatttatattatttatatcacccttttctctcttcttctttttccattttaaatcccaaattcaaattttaggttttactccaattcttcaactatttattacatttttattaatgttattgctattgttattaaatgcacaaacaaaattcccacatgatgtatatagtattttattaaataagtgttcacataaatttaggtattcccatgtgataatgagtagaagatcaaaacaccttatgacatcc

SEQ ID NO: 160468 - DNA, 716 bp, Zea Mays
taccttcttcatcaatcaccgcatcatcgggaagacgtggacgaggaggtggtggtggcggtgcttgttgttgcgtctccaacacagcaagtctgtcgacgatctgggacaatcgtcgatccagcctctcgtaagtcctgccaaggcccatgttaatgaaggcatcatgcactgacttgtggaccgtctcctccatttgctcctttaggagcttgttgtttgcctcaagatcttagcggctaacacattcatcgaagtctgtagggatccttgcttcttcgtcgtcgcctgccatcgaaacacaaaaaaacaggaaacaaacggtgaaggttatccctaataatctcacaacacgctcctctcaggtggaacataggaacacgctctaatgtatcttaccaagctcttacaagtgtctgtcaaaatacaagcaaaggatggtacaatcagaggctggttcatgatacttaccaagaggtagtgaaaccacgattgcaaggtcacagctgtattgatcagaagaaagtatgtggagcttgggaggccaaaaattaatatcaaggattagcaaaaatagagtgcagattagcgaagttcaataagtgtccaaagcacaagtcacaatttctggctaagacgtgtcctatcgaagcacaacaagataaaagtaacaaactagcagaatagcagttctgtaaatagcgcagattttttag

SEQ ID NO: 160469 - DNA, 319 bp, Zea Mays
tggtggctggcctcttgatgccgaagagagaccagatgggacgttgaataattcctcttatatcttccctctcagttaaattattctcaacatagaaccattcttccatccaggccccgggccacctctttcggaatgttaggaccagctaacttacatcgacatggggcacaaagccgtaacaaccaaaattgttgtgatattgctccttgccagtagccttcgttttgtacagcagctcgtgcatattgcagaagcattttgcgcttggtccatcccttggcttcttacggcccaaataaagaccccatcctaataa

SEQ ID NO: 160470 - DNA, 470 bp, Zea Mays
cccgtgtgacgtcgccgcggtgtagaaacttgtccgtcgccgttgccacatactagagattgccgccgacttagggaaaaaagatgcgctcggggaagctttgtcaagggttttcagacgtctccgcatggaacttcgggggcgtgggcggccagggctcggcgaatttcttgccggtgaatgaatccgccgcggacgacccactctccgtggtcgggcttctgcgcttcgtccctgccggctgccggttagacacctttcccctgcattcgttgtcttacaccgcacacaggaactagtttgatgtccacattcaggttgagcatggctcccatcagcccacatcccagttcagtgccgaacatgtcggatagctcaacttcgagcaaagtttttcctagatcgaaataaggacagggaaatccttcttaaccgaaattgtttctcaacaacagatcttcaggtttgat

SEQ ID NO: 160471 - DNA, 532 bp, Zea Mays
ggaagcatctacaaggacccgaataacgggtagtgcgctgaagatataccataccgggtgtatacctatgcacgccaacaagtgacgcaagctcgtgacgacacgcaagaccgcacgacgtgcgactgctccatgcgactgacctgcgggaccctccgcgcactaccatgaggatgtcagtggaagactagcaaaaggaacccatacgactagcggacgcgacataacaccatgatgtgagtatggttacgcatgaccctacggaaaacactagaggaaccacgctgcccaagggccaccggtcgagctcctcatagcagaatacaagtccctatgtagagttcagcccttgaactataaaagggaaggacccttgttttctaaacacgcaagcacaccgtctgtaacacaccctcagcaataccatgatcactagactagggcacgaacctaaaccaatataacccaccgtcccaaaccccacgttcgaatccctgtgattcaacattcagagtgagtccgcgctaatccc

SEQ ID NO: 160472 - DNA, 815 bp, Zea Mays
ggttaggagttttagggtttctaaccttgtgggaaaactgggatgttacaaacctaccccacttaaaggaatctagccctcgagatttagactgggtttgagaaaaaggtaagggtattccctcctcaaagagtcctcactctcccaagtagcttcctcttctccttctctgctccactacactttacagagtctcacttctaagttgcgggtcttccagactgttgagtcaagaatctttattggcttctctcggtactgaagatttttctgaatctggattgcctcttctttgatgagactttctggtacttacaggcatttgtggagctgggacacatgaaacacattgtggatatcagacatggattatggtaattcaagacggtatgctgcgggtcccactctgccattgatgggataggggccgacgaatcgcggtgctagctttcctttcacttggaaccttctgacaccatgcatcagggagacctcgaggtagatgaagtctccttcctcaaatctgagttctctccgcctgttgtccgcataacttttctgtcgactctgggcttcaagtaatcttttgcggatcagggcaactttctcttcagcctctttaataaaggcatgcccttctagtgtcttctcccctgtgttggaccacatgagaggggtctgacattttcgtccatacaatgcttcgaacggtgacatcttgatactagcctgatggctgttgttatacgagaactctgcatagggcaaactagactcccagcttctaccgaacattaacacacaagctcttaata

SEQ ID NO: 160473 - DNA, 512 bp, Zea Mays
acacagtcccataaacatacccttggtattatatggttaactcaagtaacagagcaccactgtcatccatctattgtgaacttcagtcgacaattcctcttcattaaagacgaactcctcatcacttacattcccatccttagaagggtctgccatggacaactagtgttctatctagcagcgaagtccctaattccatttatgaaaccatcattcttgagtcatcatcaagggtcaccacctccctagttgcatccatcttcaccgtcgtactagtctcctaccatgcgcacaccttaatacaattcgaatgggcaatcttctcatcggagatcccttgtcaccccaaccagaaggtatatgggaacatacgagttagagacctagccatgaaacaacaagaccctaaattcaaccaattggaacgaaagcacattgggcagatagatccactctccaaacaagatctaatggtgacggcgatcacaaagacgatgagatgtgttaagcga

SEQ ID NO: 160474 - DNA, 662 bp, Zea Mays
caatggcctacaccagagttggaggtacaggtggtgggattggggtctcctccccactacctcgagaaggctctgccccatcatgaccacgagtccttgtcggcatctggagaagaaaatatacttgattattacacagtacaattgcacaacctttattacattattccaagctcgtactcatcatacatactcaacccgtacaactcactttccttatttagactacacaaggaaacaccctgttactatactagtctagtcctccacattccttgtcgctctagatccgctgctagctttaggagggcgatcatccatgatgttcatagaaggaggggctccaaagatgtctagctccccatagggtcctccttcacctgctcctactacgctagcttccacctctgtaacttcaggtggcttgtttgggtgtagctggtcatacaacacatgcacctcctcgtgttggacattgttgtacgcttgcaggttttccaaggccaagctcagctcttccacccaagcttgggcagtcacctcacaatcccaggctatggatcgcgaatttatagcccagtcaatagctcaatcacgttctacaatctcacgctgcaagcgctctacttcttcttatagctcagcgatgcggctactagcac

SEQ ID NO: 160475 - DNA, 556 bp, Zea Mays
gggatttcggcgaccaattcacggtgactgggagcaccgccccggttcgggtggctagggctcaatccgagggttcctgctaaagcctcacgactactttgtggtcgccaatttcaggtggacacggatatccgtcacgatgacgacttgggtggcgcgacgacttcttttctgggagctatccggttgacgtcgaggggaagaaagcggggcacgagtgcctttatccagctggggaggatacgataggcgtgaggtggtcagcggttgagcgcaatggccgccgattctcccggcaacgccgcgaagtggggaacgcggggagcggagctggcaagcctggctcacacgccagagaacgaaaaaagaaacgagcgcgagagaggggtggctggccagtggggcccgcatgtcagcgcaacatagagggcgcgaggccgagacgccaattgggccgaattggtgttggctggcccaagtgcacaattcactttctttatttttttttcttctttctaatttattttcaaattctaaatctggtgctttggatttc

SEQ ID NO: 160476 - DNA, 866 bp, Zea Mays
aaagagtgatgaggcagtttaataacacaattgatgatctgcatctcctagagctagagctcaccgatagagcattcacctggtcaaatgaacaacttaacactaccatgactaagattgacagattcttcgcgacaacagagtggcatgacctgttcccctcagctgacctacactccatgtgcaccatgacatcggaccactgcccgcttctaatgcaaagccactctttggttactttctaccaagggtttagattcgaatctttttggcctcagattgaggggttcaacgaggtagtccatcaagcatggaattctacagtaaacactgatgatgccatccttcgacttcatgtaaggatggctcgcacaaccaaggctcttttggcctggagacgcaatacagttggcaacttcaaagtgcagatggccatcattcagatcacccttactctcctagagaaagcacaagagattagacaactatcctctgaagaattggaattcaggaggactcttaaaatcaagattcttgatattgcctccgctcagagggcacgtgcaagacaacactccaggctcacttggatgcggttgggcgatgctaacactaaattctttcacctagcagccaataacagaagacgaaaaaatttaatcagatcgttaattaaagatgacacactgttgacgagtcaggaagacaaaatgaacgaggtacaacatcacttcagccaggtgctaggcacgataggtaggaggagcagtgctgttcgttgggaccagctggggtatgccccctttgagttatctgagctggacaacttgattgatgacagtgaaatcatggatgttgtgatgggg

SEQ ID NO: 160477 - DNA, 453 bp, Zea Mays
acatggtgacgttggcaagaacatgccgaccaacacaaacgtcactcctcaagcaacaccacatacggaatcttgctcgctgatatttgatgcgatgtcgcaaataaaggtatgagtacaccgcctcgttgtttttctatattgttattagtagtttactaaacatctaatccatttataccattattgttagtctcccggcggcgtccaacaggcggcagaaacagatctccctgacagtggtccatgctttgatcagactccatctgaacatgtcagctcagtaattttcattttcattatagttgccaaaactgttcacagattgttatatatattttcatatatctatttaggtttctgttgaaaccgatccagctacaaacactcctcaggttgaccaggtttcacttgattcggagatgcaaactgtgttagctctacgcgaatatt

SEQ ID NO: 160478 - DNA, 422 bp, Zea Mays
caaaaaatgaagaatctcttgtagatgctctaaagccctgcagtttttgaagctcaaccagataagtcaaaagacgacgcctcatgtccactccctccgctgctccgcgtaccctgccaaacgtgccccgccgtcggacgctactccctcggtgcggcagatgtcacatacacagacctcgactggacgtcgcttccttggctccctcccatggcgcaaaccctagcatgtcggcgcttccatagccccccgccacacctctgtcctcatgcttcttccttcctccaaccatggcgagtagcctccgttgaatcctcaatgcgtacacattccacatttccactgtcgcttgcctgattaatccctctccgcagtggaaatgtggaatgtgaaatgtgcctcgcaggcggccgccgactccc

SEQ ID NO: 160479 - DNA, 463 bp, Zea Mays
ataatgctctgtccgcagcctttggaagtcgaggcaagaaaagattaaacagagtatttgatgctattggcttcgtatatcctgattaccattatccgataaaagggcaagagaaaaagaggaagactgccgcttcggccactgtagctgagccgaagggcaaaaagattaaggttctgacccatcggccgcgctacattgaaccggccgtggtgcctaaatttggtgcggggacctcttcagctgacgaggccaaggaagctgcttcgcttgtgcagagtactgtagagccgattgtagtgccgatggtgcctacagtcgagccagtcgagactaaggttgatagggctgaagagccaaagattgaaaaaataacaaaaatgccagaatatttgagccctccaacagaggcaaaactgcctaaggttcaaaaggcttctgccgcgactcccaagaggaggag

SEQ ID NO: 160480 - DNA, 416 bp, Zea Mays
cgcccaatggccaagcttttgggtaagatgatccgaggagcttgggaggggtccaaatttatacaccgaaccagccatcaatgggcgatttgttgcaattagtcggcggtgatctcggggatgaaacgagctccacggtgagtctgttacgcgagcgagcgaagacctgccagcacggccccactagtcagctacctagtcaaggcacggatcgctgtcgcacaaacgctgggtcgagattgggccatggcaggagggtagttgggccgcgccgaagggagatggtggcccaggttgacttcttactttttttctttttctttttcctttaaattttcttgttttcttttcttttcatttttgcttctcaaatctaaattcaaactcaagtgtgagattcatactttgagttaaat

SEQ ID NO: 160481 - DNA, 703 bp, Zea Mays
ccaggttatgcccctaaacatgcttaatacctaagtgccaaaaaatcataagttatgttccccaaggtcaagcagggttgaatcacgattcgcccgagaccctgctcaatggtcgcttcactcgagcacatcctcgggcgaaggcatcgctcgggagaaatgctcgtatcgactgagggcccctcttcatggaatggcaagactccacctcgctcaagcctgtctcgggcaagaggacaaccccaatcctagcctcagtcaaacgtcacgggaaccgtggggacatgcgcattaaatgtgacgattcagatatctaccccacgtgacacaacaataaaacatgaaatggtgggaccactgttccatctactttcactaactacgatgatgaacgcccgagaaaaacgaccactgctctccccacgcggctactgtactcaaacaagtccggatgggacgtgcgcacgtctgggcacggcctcacccttgggagggaactccacctcgcccgaagacggccacagcctcgggagaagactccacctcgcccgagctcggcttcgaccgactgcccaggcaacaactcctcgcgaatctagtaggaggccactccggcgacggttctaacgactcactacatgactgcatgccccgacgcaggtccgaccatggcctcgaggagaacttccacctcgctcgagca

SEQ ID NO: 160482 - DNA, 451 bp, Zea Mays
atgggtatccatatgtatagtcattttattatgtaggacgaaagatgggttggttagggcaagaatatcctggtgtaagaaagtttagggtgagaaagaactccttgttgggtggtaatgcatctgaagatcgagtttgacttctctccttccttgacggggttgatcttgtccttttccagtcttgctctttggtgtctccatccgggtttgggacaagaagctaagatagatctgttatgtaggtcaagttgttgggtatggccaagttgatttaggtcaccagtttaagcttaagtggatttggagtatggctttatcctttgtaccagcattaagtaacttactctagattagatcataatagattagatagaatcttgattaggttggtacgactagattaaactagttaagatctcattattttggattaggtctcggttgtttt

SEQ ID NO: 160483 - DNA, 742 bp, Zea Mays
gtcctccacctcttcgtcataagccatctgcagcaatagcacacatttagcaaaaccacgcatactcacgcatataaccacacaaatgagcctttacctgattcattgcccggtcggacctctcccggaccgtctctcggccgtgcgggccccacatcctatcaaagagcgccctcaccgactgcttcagcatcgggtcctcgacctggaaaatttcacgttcgaagtttttgtccgattggtcgaagacctcggaatgcccgcacccctcacgggacaaagcattcacgaccccctcgcaggtgacgagggaggcaaaggacatgaggcctgtcacgattgtcgggagcacccccagctcctcctgtaaccactcaaggaagcggaggcccacctcttggtcgggcgcttcgaaggcggcggtccgtgcacccagctcccggtacatgtccacgaactgcgcatgcgtttgctcgacctccgcgcgcgtcgaggcctcagctttgtccacgcggttgcgcaggccattgagcctcacctccagctcctcggcgcgttggtgggcgagactgccctccacccgtgcaagcttggtctcgacttgcgcagcctacgcattagcaatggctttgttcgcctccctcctctcctccaccagctggcgccggagatccccttctcggcctccgcagcggccaacctctccgttagcctgcggcttttgttttccgcagccgacatc

SEQ ID NO: 160484 - DNA, 363 bp, Zea Mays
ttcaaaaaatcttgaagaatccgagcgatacacccaatgggtgtgcccaaagggtttctgcccagtaaaaggtgtctatcgcgttgtcctgaagtagtaacttgacatgacagagaggtgtaatactttgcctgagcggttgacttgattccatctggtgtcgtgttacgcgaaacgggcgccacacgcctgactcatttccaggcggttttgaattacttattgaattcttgcgactgttcggtgagcagggtaggaagtggacggtcgcctcccggcctctttaaatagcccgcccgccccgactgctttctccactcgttcttgatcacttgccttctccttcctcttcacttcctctcc

SEQ ID NO: 160485 - DNA, 1283 bp, Zea Mays
tgggtcactcatatgtgaatttgcaagccaaaccctaagttttggccttatttgcaaaaaggaccctaattgagatttcatgttaagtctgaatttcagagttttggctcaactttggggctttgtatctttcaaattctagggtttttgccctaggtcaccacatcaaaattgtagcccaatcataggagaacaactttgcttaagagtgtgagctcagttgttaagacaaatccagagataattaagctcaaagcttggctgtcatgctggtttcattctgaaattcagatattcagtgtaacagagtcagctttgagtgtgaattcaaccatgatctagtgatcaaatgagctcagtcactatagtcgaaatataggtggtatatagctctccaactttggtgcagtgagatgacgaagttgtaatccaaaaattggagaggaattgctctgaagttgctctgtcaggcgtcttaaactgaatttcccatggtacagtgcctggaaggatcagatcaaccgcgcccctcgccgctgatgactttgagccgggatcgtcgccgccattgagattcgcactcactggtaaccggatagcactaagagtcgcgtaaatatcctcgccatggatagactccgaccattaaataactccggccaccgtaccatggttaccgcggcggaattggataagaacgtcggtgatcgccgtcgcacgaccttgcgccacgtgtccgagtctttccaccgcgtcgccgtgactccctattgctgtcccatcgtcgccggggaggttgccacgacagtagacacgaattcaccgcactcgcattcttcttcatctccggccaccgaattgatgcttgccgagccaccgaattgaactaggagactcccaatcgccgggaacacggcgatctagccgcactgctcaaggtcaccgtggccagagcaaaacacttgatcattagtgaaattaagttgggggaaggctcgggatgggttcaatccggtgtatgtcgctcgagagcaccggtcgtagcgtaaatccgccagtacaatctcaccagagttcgttccccgcgctgtcgccgtcgtggacttcaaaccgagaatagatggaagtgcgggggtctatttgtaaacgtcagcgactctgttaaacagtagttaagcctgttttcaattagccagaaacccgagggtctttatgcaaagtcgccagggcacgggcgcgcgcgcgttttcccctagtactgggccggctgggctagaatcagc

SEQ ID NO: 160486 - DNA, 428 bp, Zea Mays
aaatgataagaagtttacttcatgtctatgtgacttatggatgatgaattgtttttatttcctatctaaagaaatcatccttcatcatatactcccttatgctattaacatctttcttgagtattttcaataagtttggaaggaaaaagagacaactacaaagggaggacactcacatgaaagagaaggacatcaagaacaacaacacctacttggacaacgagatcttcaaaacaatcaatggtgtggttgtaagcattctaaatctttttcattgtgagaatatcaggcttaagttgtttattgtaaattttataagccttgatcaagatgcttctccctatttgtctttaaaaatgagtgcatctattcaattcatttcaaataccttgatgcatatctttagggggagcctatttctatatctt

SEQ ID NO: 160487 - DNA, 451 bp, Zea Mays
ggtcccgctatatctatactgttacgatcttcgtagcactccagttggatcaaaccagctattgatgtttatctgtgtcgaggtgctggggattttgtaggttggacggcgtcgaagcacatagtgatcaggcacggatgagatcgccacagataattcgtgttttaagatttgctggtttgagaagctcatgggttcatgttaattgttgtttccaggtaccaggtttgcttgatgagcaacgtgagggtgatgttggggagctctttagcctggctcaatggagtaattcactcttcccttgctttacctaatgttagtgttccgtatcagaccacaacttaatactgcaactattagttttcatctaacgtagcacattttccccttggaagcactctttcacattgctcggttccttgctgataacaattgtctgttacagatatcc

SEQ ID NO: 160488 - DNA, 744 bp, Zea Mays
gattataccttcctaaaaataaataactagatatataaaatttttggtagttcaaattttatattcaaattttgtgtgtgtactacatattttggagcatttacctaaataaataattaacatacaaaataaatgtgacttgcatctcatgccgagttctttgaatgttgcatatgaatttgtgaccaaaccagatttgaaatttggatatttgaactaaaataaaatagaaaatacaaaatagaaataagaaaaagaaaaaaaaggtgaagggagcttaccggatggcccaaaatgtagaacttgcccatgtccctcacgcctcccttcctaattcctttttatttattctcttgccgcaaatgaggtcatcatgacatatgctatgacataagcatgcaagttagccgcacaaactccacatcgtgcgttcatgagcatatcgctggcacatgggacccccttgctagcttcttcgttctctcatccacaggcaggttgcgggcgacagaacgatttccgcgcaattgtagccagactctgcgcacgccgtcaccagtacttgggccccacgggcgaaatctcctcccagctctcaaacgtgatggaccccaacagaacccgccgccgccgccgtaggttgttagggtcgagttcggactccgccgttcggatcttgggatttctcagggctataaaaacccaagctgctctcgtacgatttcgccgcatcctgctgagcgc

SEQ ID NO: 160489 - DNA, 412 bp, Zea Mays
ttgaagtctcaagcttaggtaataggacagagaccctggtgggtaaaaagtgaacactacaatatgataagaaaatagatagtacaaaaaaaactactaacctattttactcaatggaatgtatgtgcactgatggaaaaatgggtaacacatgttaatttatgctacaacatttgaaaaaatgtggaacttgcttcaatcagtgggatttggtgattccatcgaccaaaaacattccagttccccctaatcagacctagagagcgtgtgtccaccaaatcgaaatcaccagatcaaaccaaccagttcgattgcaccaggatcttcagtatgagaaggattatggcgcttctcgatgaaatatgtaaccctaaacctatatacagacccagagtgcatctgccaaacccta

SEQ ID NO: 160490 - DNA, 687 bp, Zea Mays
attcaagcagttctgccacacgccctgctagctgcgtcagacccccctgtgcggtgtatatacatgtcaccctgcccctcgaccttggtgcaaagcgaaatcaccaaatcacatagccgtcgcgtggtagaaaaagccaggaatcaacgcagtcgtcaatacctgtgtacaccattgcccaagctctctctctcgggtctgatggagttcgtgtgcactctcggattgttcgcacggcagtgagtgggcactaggcgcacttgagcatcctgaatcgctcgctagagtcatagcggcgtcgcgcgtcacgtactacgtagattccgcctcggtctccggtaaggcttccactatcgagttgtccattggttctgcactcctttgcactgggttttagggctgagtggtgtaggtcagcgcacttgggtgcatcgccggcgaggtcacgaccgtcgcggtggaagcgtcgccctgttaagcgccaggggtggaagatggcctttagaccgtaggatcaaaatctagcgatcatgagtggaccaagtcgtagtagtacgtgggtcgttgatcactgggtggatggcttagattaggcgtcgtgtaccccttcgctcggatagatccacgccatgaatctccgatctgacggtagtaatcagataaggtctcataaactttgggcctttg

SEQ ID NO: 160491 - DNA, 500 bp, Zea Mays
acctacgcgggccaaaactcttagctagcccattaccttcctcactccgccggcccacccttgcgccatctcactgaccggcccaccccagttctcagctgaactcaccgcgcgtgcatgtccttggtcactactatgtgggctcaccgtgtcagactcatctcccacccaagctccacaacagaacacagttgaatccgtcgctcgcgcgcgctgatctcgcaacaatccatgtgttggcgttcctacgcgggtcccatggttccgggcatatataccggggccctcaagcacagcagacatctacgagttgtcgagaggggcagtgcgttggaggatccttgtgcgccgttaccgcgcatagagaaaagacgatgtcgtcgtgagcgattatcaagagcaccctcgtttggggtcgtgcacacgaccagggagggtcgcccatgccccttgaacgcgttgacagcggtggcgtgttgggaggatgacctgagcaccgg

SEQ ID NO: 160492 - DNA, 437 bp, Zea Mays
ctctcccactccacaaggtcgtggtcgtggtcgaggtcgtggtcacggtctgggggtcaggttggctcatgggatagcaacttttttctccatgtgcagggacatatctgttgatgtgcatgagctagcaaggcggcagtgggagacggatgacaatctccgtcgtcagtcaatctctattggacatccttttgctccccgctcgcatgatgtgcctcttcatgcaccccctcctgatatcaatgaatggcaccaacaggcatacagtgtaccattcatgtctgctgaggatgaagacattgaggaagaattttttgatgatagagatcagtttgtcccgccaccctaccaaggtgatctgggcccctcatcttcttatcctccccccaggatccatcaggtagcactcctcctcctgctaaccacatggaggaaaa

SEQ ID NO: 160493 - DNA, 457 bp, Zea Mays
gtaatagagtacacatggaacttaaattaattggcacatagctcctttaccgtgacccgtgagtacacatgcaacttgacctcgagaaactagaagccagagaagcaagagaatcccactctcacacgcctgtccttgtcaccgctctcgccccctgttgcttatcgccgacctcgccgcctccgacgccaccgagttcgtgtaggccgccgcgtcccagtcaagctcccgtctccacctcctgcgcgccaaacatgggcagcatacgttagggatgattgggggagatctgcctcccgcaaatatacgggagatgaaggtgtagatgtgggacgccaaaaaaattggggaagatacgggatctgttgcagcgaaaaaaagtttgattttctcccgaaaatgatttttcaggttgatttacgcagtttcttggagttgctcttaacttatgtcgtcg

SEQ ID NO: 160494 - DNA, 787 bp, Zea Mays
ggcagacttgtgctcgtgtcttctgttctgtcctcctcgcccatatatcacttgtcgatcttttccctcgcgacctggacctgtaaacgcattgacaagatccgccgctcctttctctagaaaggtaaggccgaatctaatggggtcactgtcttgtggcatggccgctagtcagcaagctcaaagccctaggcggtctgggcgttctcaacctcgacaagcttgggtgtgccctctagcttcgttggctttggaaggactggatgagtgaggatcatccttggaaagggctcgacgtgccttgtaacaccgtggacagacttctttttagcgtctcaaccattgtcacagtaggagatgacttctttttagcgtctcaaccattgtcacagtaggagatggtaagacaactaagttctggcatggcagttagcttgatggcatgacaccaaggaacctagcaccaaatctcttcgagctagtctcaaaaaagaataagtcggttgcctgtgagttcattggcgagaattggatcaggtctttgagaaacaagatcacatcctcagttgagatcgaagatttcgtctccctttcgatcagactccatgagttccatcttcagccacaggtttcgaactccattacttggaaatggagccccgatggtgtcttcacagttaattcagcctacaaagcacaattcatcggatcttacaccaacataaaaaccggcttggtctgaaaggcaagggctgaaccaaaatgaaaggtttttgtttggattctt

SEQ ID NO: 160495 - DNA, 407 bp, Zea Mays
ttcttgaacttgaagtgatagggcagacgaataagttcattctttttcttttctcccttaagcttcggcatattccattcactcaacgtcggaaataccccattggctaagtattcttgcaccagatctctagtgccgatctactcagtcacaactctgaattctgccatagcctgttggcatggtgaccccgatgacatgcggcacagcttaaactcagcgggctcattaccagcgtcttcaatttctctctcttcttctcatcagccttgatatagaaccactcacttttccagctggttggtcacttggtgcggtagcttagcatcggggccttcatgtccttgtggtaagcgaagttgtaacagccaaaattctcatgaagcccatcttctctggccttcgtt

SEQ ID NO: 160496 - DNA, 567 bp, Zea Mays
caaaaattattgcctgcactagcagaagagaaagataggtgataagatagccaaatttggatcgtgcaccttcacgccaaggactgcgaggacctcggatgaggttgtcgagatagtcctctatgctaggaataagtggggcaactggtgggacttttggttctatgtagccccgggggatgtcaaaggcttgtcgagtctgcctcctgccatcctgtgctcacattgttatgtggcatttccacgatttgaggtggcgaaagaagacgaggacgaaggggccctccgatatgcagcctgcctaagtagcgagcgcaacctggtggaggaattcattgactacggggtgtggcccttggcacatggttgggcgttgggtgaagtgaccctccactgaatgcctaccctaggtggccagatggtgcgaagtccagtcttcaccgtggatcttcgcggtcgcgatgcaagcgcgtttgtgcatgaggtcgaggccgaggccgtgaagattgttgggaagtatgtgccgaagatggagactttaaggagttgggatattcacggttcaaa

SEQ ID NO: 160497 - DNA, 567 bp, Zea Mays
tattgattggaggatgcggtggccgcgattcttggcacagagaggaagcggcggacacagattcgcggcattagagaggaaacgatggacacgatttttagcatcagagaggaagcggcggacgtggggcagatcggcgagagagacggggcggatcggcgagagagatggggcggggatgagaggccgcgattcttggcaccagagagacgcggcgcgacagacggggctgggcgcgtccggggattggcagaaccatgcgccatcgtgttgtggacgcctacactatgttcttaaatagtagtagagatataaaggtttgtttgcttctcatgtctgcagctggcctaggcttgagcggcatgggcgtcatccacactgtatgggagaggtgcaatagctgctgctgccagctagccatcctatcatatgtccattcgtttgtctattcacatggacgaccacgctctggcgtgtttcccactaaatgttttctcctatatcattttttgcgtcacatcatcaatattttatctcctatttttttcatctcccgcagcagttccc

SEQ ID NO: 160498 - DNA, 649 bp, Zea Mays
cagctttacatggtagtccaattgggggacattcagggtttccagtgacttatcgaagcgtcaaacaactttttgcgtggactggcaggagcagtcttatgtcgctcagtgttccatttgtcaacaagcgaagcctgacaggagcagatatatatcctggcctattacaggcgcttcctgttctagatcaagcgtggcaggtgattggtatggatttcattgagggtcttcctcgttctgcacatgtggacactatcttggtggttgttgatattttctccaaatatgcccatttcttgcctctgctacaccctttcacagcatgcaaggtagctcaagtattcctcaactcgatatataagctccatgggatgccagaatccattgtttcggatcgaggcagaatttttacaagccggttttggcaagagctcttcaagttatcaggcacacaattgaggatgagttcatcgtaccatcctcagacggacgggcaaactgaacgcttaaaccagtgccttgaaacatttattagaagctttgttgatgtttgtccttcaaagtgggcatcatggttgccactggcggaatattggtataacaccaattaccactcttccttgggaaagtctccgtttgaggtattgta

SEQ ID NO: 160499 - DNA, 527 bp, Zea Mays
gagtaaggcgttaaattcacggtcgcccctccatctaccgacattttagcaatcagtattccatcgatatgaccacgcacgaagagtggctttaaatggttgaccaattcttttggcttagtaaaggaggtctttttaggatcaaaatcgaattgagcaacaacaggttcatcatcaccgataatagtacaatcggttgagaacataataacatttacgtccatacctaggtgttctagcgtggctccatatttgaccaagtcctctcatagtaggtcgtcctcctccataggtgttggcgcgtcatcggaggtgtttagcatagagaggatggtccagactcaaggatcggacggttcgcgacatctgcggacggtcccgcttttatagccggactgtccgtcgtacctgcagagagttgtgtagctgttgtctcgttctctgtctttgtggccgtttgatttgcttcgacggtctttggcttccatctcttttggggtggtgggtactgcggatgtgtatcatta

SEQ ID NO: 160500 - DNA, 1138 bp, Zea Mays
atgaaatgttgcatcatgctgagcttaaactttgtttttggttgatgcacatgtttgaaatatttaaatttgaatttgtggtttggttggatttgaattcaaaagagaaaaataaaaagaaaaggaattagaaattcaaatttaaaagaaaagggcaaagcatcccagtctcccctctccctaggcatttcggcccattaggcctagctctccccacgcgcgcgctccccctctgtccggtgggtctgccctaacggcgccaactccctgagccatgcgcgctccctcgctctctgcgccacggacccggtatgtcagtgtcgttgcacgttcccgctcgcctgccccctcccactgacccatggaccccgcctatcagtcccgtcatccccaactacccgcatgcacatcgtggacttcgcgcccacgacgcacgccgaggccgcgaccgccccacccccgggcatttctagtggcccaaacccccactcactctcctcctccctcattcgcgcacccgcaatgctcccaccctcgcctcgcaccgtgagcatgccagagaagcactatcgccgtctaccatggttgcgtgcccgtttcgccatcgccgttgaacccttatcgtgtctgttgcttcggtgagcttcgcctcgacgtccgtgaccctggacaccccttggttcgtgccctcccctctgtttctctctgcacgcgctcaccgaacttccctccgcttagcctcagcgctgccgccgtcgactcgagccctcgtcatgcctctgccaccattcaagggacccggagtgttccctcaaggtaaccaaccttccccgcccctctatttctgcttccctgccctctgctgtgcgcgattgctcaccatagtgagaagggctgctgccgagccttttcgtcatggaccgccacccgccagtgcctttgcatcggtgtcgtgcccacctccgtgttcgccacacctcatccgacctctctgagcctttcccattgccttagaaccccctaggccaccgcccgccctgacccgcctgtcagtgcgcactcgcgcccgcgcgcactctcgcctgcacggtttgatctcagccgtcgatctaagatcggatggcaaggagcgcccgat

SEQ ID NO: 160501 - DNA, 407 bp, Zea Mays
ctgccacaagaaattcagcagcatggaccagatgcttttctccatcgattttctggcattgttgggtgccatgaacaattgacgacagggggtgtcgctccctctgagttactaaataaagtgacctctcctaaggcagcaagtggtatttcttttactactttagatataccaaccgttgatatttttacttctcttcctcatacaaaaagaaatgattcctctgatcttttgtctgttccagcatgtgtcaaagcacaggagtcatgcttttctgatcatactcaggaattggggccctctagtgttgttccttttgtctacgcgggggcaggtgtaccttttgttggctccctgcatgtttctcctggtggtaaacatccagcgcgtcaggtggtgttggctcc

SEQ ID NO: 160502 - DNA, 776 bp, Zea Mays
gtttgtttctctcgaggaagaccgctatgcacatgaagtggcataaatattgtacggacaaacaagatgggttaatggtgcacccgtcagatggtgatgcatggaaggctattgacaactttgatccagagtctgccagcgatgcaagaaacgttcatatctgcttggcaactaatggtttcacgccttttaatatgaccgctgcgtcgtattcatgttggccagtcattgtcataccgtacaaccttccacctgctctttgcatgaaatatgagtttatgttcctatgtcttgttatacatgggcctgagcatcctgtcgtacgcctcaatgtgatgcttcaaccactgattgaagagttaaagaagctacgacaaggagtggaagcctatgactgcttcaagaagcagaaattcaatcttcgtgttgtgtatctattatcggttcatgattttatggcgtatggtattttctctggatggagcatgcatggtaggttgacgtgtccttattgtgctaaagatacatattgttttcatcttagtgctggtggcaagatatgttactttgattgccatagatattttctacccttcaatcaccccttcagaattgtgagaaaggagtttaggaagggcaccatcgtcacgaagggaccgcccaagcgacgtagtgggatagaaattatagaagagcatatgaaacttgtcctagacaagagtgggaaaaggtatcaaggttttggtaaggagcacaactggtctcacatatgtggc

SEQ ID NO: 160503 - DNA, 890 bp, Zea Mays
aatgatgcaataacccagttggctcatttgtagtttggtgacgacggtgtgagcctctaaattaccccacctcacttgactttagaggaggaagccgccttgaaagagagagccactcttcccccatcggactagtctttggggtgattgggcctttacccaagtaggtgtgcttaatgaactattggagttcgggcagccctaacttgttgggcctctaccaaccccacttgcattgagtgtattaagagcatggtgaacaagctctacatggctggcttgaggataactgaatcaaaattgtttaagcacatcatcaagttattcgattagataccaccaatatgggcgataacatgaaaaaggcccacaagttggtcgtaaagaattgaccaagcaattaaaagtagatgaagaaaatatagtattgtatcattttttacaaacatgtatttttatttttaaaaattacattctatctattttgaattacattttttattttgttaactacatgattagatgatttctcccaaataaaatgtcatgttttgttttaaatacaaatctataaaagaaaagataatgtggtgttgtggtggctacaagttgacggtaaaggttgtgtacaagagcgatgtagtagacatgggttgacggcagtcaataacatggtcggtaatgtgatcgatagctgatgtggtgggtggtatggctgagtgcattagctccagcctaggccatatggattatattatcgctacacctggatgcactattcctgtaaggattatgttcgtgtctgtggcatatggtcaaaagtattgatgtttcttaatgtgaattcatgccaaaatgcttttgcactgacagttgatgatggatgcaag

SEQ ID NO: 160504 - DNA, 339 bp, Zea Mays
gctcgcctggctcactcacgcacgcggtttcaccggccatgtggacccacttcgtcagtccgcgatcagatacgtcgtcttcaccatgccgcaaagcacggactccgcgggtgtgactgccgtgactctcggtcagatccacggcaccaggtgaagattaggatctagccgtggggtataagtattgccgcctcgcgcccttgccctgctcttctctcccttcaactcccatccatctcgaccaatcatccactcccatgaccaagaaatcaaacccgcagggagttggttgccatccgccccgaagccccgtgctcgcaccaacgattagtggttgat

SEQ ID NO: 160505 - DNA, 872 bp, Zea Mays
ctttcccttgacctgtctaaaggggtgaggagggtcctcatcatctcctccccttggcgccgacacattcttcgtgcgcggcatcctgacctgacgactgcaagtgagagagtgaagctaagcacaagtcgataacaaccgatagaatgtcaaaagagtggatgtctacctggaaagctcacacgagaggtgaaaatccaggcaggacaggagacggctcacgggcaggcaaggtcactgaaatgacagaagaggtgagcacgtattagtcacatagtcataagtatatgaaatgttaatagatacatacacagagaattatggcacagaaaatgagagatatggcgatcgagaggtcaaacgacgcgaaaacgacgtttgaacgagaaatagtgccataggaggtttgaaattcgaattgaggtatgaaatgacatggaattgagccaatacttcacgaataggtttatatgggtaaatatgagtgaagtgtgcgcttggtttgatttgaggcgaagaaaatggattttgggcacttggctcggaattgatcgctcgaaacggggaattgagtgaaattgaagcctggtatatcggattggcgtgaaatttggcgaatatgttactggaggtgttgtgaaggtgcctggaaaatttgggattgatttgagcatttttgtctggtttgggtatttcaccgaacacgtggtatgcggtgagttaggtttttggagatatggccatttgaggattgaaaccctcccaaagggagctagaaacctgcagggatattcaagggacacataggaacacctccaaccacatggattcacaggaattcataatattttgaattgatcaaagtggtggaa

SEQ ID NO: 160506 - DNA, 908 bp, Zea Mays
aaacccggcccgctactgaagtgacgtcactcaagtgtccacggcccggcccacccagtcatagctaactacacgacacccacctgtcttcctcggctcctccaccccggtcctctcctgccgcgtcgcgttcgcccctcgcagcgggcaactcccaccgccgccgcttcgcatccgcccatctgcttccatcgtctcacggaggtcgctcacttcgccgccgcccgccccgcctctcccggtgccacggggccctcggccgcgccgtggcgcttaaaccctagatctgtgcctccgcgctggccgcggccgcgtcccgacgccggcacgccgccgatcgccgcacgtcgctcgatcccaggtgacgatcgattgctgattgctgcggatcgcgtaccgtggtcacgctgcttagttcagctctaacaactgatcgctcctcctccactgttaccgattaatggcttgatcggtgccgagtctgttttaggtcgtgcccggctctctgctcgggcggcacgtgtggtccggtgttgcagcggatgtagaattttgaccttgttctctagctgtgaatgacagtattataggcacagacttatagattgatgtgcgttttgcgttgaactgctcatcgaacagatgctcccaattcggtagtttatggcttgtttggatacatgcgtgaagttttcagctgataagattttaggaaatgttgtttttggcattaagtgtttttataatgtatgggtctaagggaggcccagagtgtctaccttccgttattttgatctctgaattgccgcctttcacacgaagggcggtcacgcgtgtcacgtgaagggtggtcacatgatctgcagcatagcactactagatgttggaccttagtgtatctatgcaca

SEQ ID NO: 160507 - DNA, 421 bp, Zea Mays
ctttggcacactagacgttctatgcatagagggagtccgccaagtggttgtggagtcatgcacaacgcagacacatgaatatccttgttgtgtcatctcacatcctaggtgtgaccctattcaggatgtggtcaacaatgccttggagtggtggagagcaagcgagcacctaacatgacctagcacacatctgttgggctctagcacctcactaattttgtggcatgtttacaacagatggccatttcctgccttgagcctatgttggggaagctacaatggttcttgctcgacaattacatcctaagttgggaatctctttggccaagccaagcccctagacaaacaaggcctagatggttctctaggcttccttagctcattctcttggtgttggggtatttggctagggtgatttagg

SEQ ID NO: 160508 - DNA, 1154 bp, Zea Mays
atcttaatcatgtgtatgtgcacgtgcgtgtgtttctatacacagacactgaaagagttggcactctttactcttagatcaatatcatgtcttcgtctccttttagtccactaccaaatcaatgctatagacttaatgaagctagtcttattactattggttttgctgcacatagtttggattaaaacaaaaaacatgcatcattgatatatacgacaatgtgttaatatttacgacaatgctctcctaattcgatctatcagagttaacaaacattattgattctcttactcacagattgttgacaaacacaatgttcagtctaccaacaatgatttgccatcaccaccaaaaacgtatatagcagaatacattcactggtgcactgagaacaaaatgtgccttttagctctgtagctagagcttttattccatattaatacaacataatacatgcaggatgaagcacacccaggctagctaagtcataccagattatacatgttccaatgtgacaacggctagaccatcctcaaacacatgaaggcataacactatttaagatgctttgtataccgttttcatattatctttggcaaacgattcaggcaaaactaacatactcctctcatctatatacaggtttcagtttttgtaagcatagaaaaagcttcatcacttttggatatggaagacttttgtgtacatagacatccatgttgttgaagcattctgaaaactgtgcttgcttatgcaaactttactcacgaattattactagatatagaagtatgctactttaatgcagctcggtacgtattgtgacatgtttgccttataactctgaactctacaagttcccatactagatcttggaatacgcgacatgaacatgaacaatagttgtaatttagttttgtgtatgctctctgtattctctagtacattacatcatctttttggcaatctgtttaaacatgataataacatgaagaatgtttatcttcatgaacatacttatcagatagaacataaacattgtatttacataaacaagaagctgtaatctacttgcataaacattctttgtattcttgctgttgtcataatgttagctccatatcttagtaaacaattcttcaagagcatcaata

SEQ ID NO: 160509 - DNA, 424 bp, Zea Mays
gattcgctgtgggcggccatgattaaatggtgcgcgtaccgattcgctgggttgacctgggccgtttgatctcgatcaagcgaatccggggcgagttggggtattttaaatccgcgtcgtcggtcgtcgatcggacggttatgattgtgtaccgtttcggtttgggatacatctaatcctagcggtcgataggagatcgggcggccagaatcagagaataccccttcgcgggtcggttttgttaaaaagcccctgctgaagatagaaataaacccgcagtccacttgcactgttctctgtgtctctggattcttaccccggaacccctgcacttctctgtattactgtgcccagtccaggaagctaagatttcagataaatggaattagaaaatgatatttaatgcaaaaataaatgctagaat

SEQ ID NO: 160510 - DNA, 298 bp, Zea Mays
ccctctgtgctgggagaccttgggagagagatccctggttggtcctgattgggttcagcagacttctgagaaggttcaggaaattcgtcataatattttggccgctcagagccgtcagaagagttatgctgatgtgaggaggcgggacttggaatttgcagtgggtgaccaagtcctcctaagggtatcacctactaaaggagttgttcggttcggtgtctccggaaaactcaacccgagatacattggaccgttcactatcttggcccgagtgggcagcctggcttatcgcttgcaa

SEQ ID NO: 160511 - DNA, 438 bp, Zea Mays
tcgggccgggctcgggtgacgtttaagaatgcaaatccttgccggagataacctgcgtgggcttgtcgtgagcgcgcaacctcgtgcccggcttagggtcgccggagtcactatcgtagacttgagtttgtgaataagcaaaaagacagggatctcagtgctaatgcccgatagcttggttgggttgtgacagcgatgataaatccactaaagaagcaaaacaaattttattttgatatagagagagtattataaactatacatgtgatggttgcttcggtagagagaagctttttaaaattaaaatttttatgaactatttatggtcaacaataactcaagagaggttaaatggcttggtgattctatatatcgaaaaaaagttgttggatgaggcttctatatcgaatttcgcactgggcccctgaaaagccagga

SEQ ID NO: 160512 - DNA, 419 bp, Zea Mays
gttcgattgcatggacggaggagtcttcagatgaggacttggattattttgcagcgttggatgtggctgcagcggagccttcgccgcgcgcggagggttccgaggagctcccgggcgcgagtactgggtataggcggcgaagggcggtggcgaaacggagagtgagtcaattgtcgcgaagtggttggcattatcgtagtgagatggagagtggtcgtcttcgcgtggacgagactggtaagcgagaattgttgtcctcgccgattggggtgagtgtaggtgagggggagctgcaaaatctttttaagggtgaggaattgaggataatgttgttcaactacagggagatgggtatcatcccgaaggctgagccaatgtaatatatgatgccctcgctgtgtgtatgtaaccgctatttg

SEQ ID NO: 160513 - DNA, 414 bp, Zea Mays
ccggatcagagcgagacagtagttggcatggggaaaggtgcatgcatgcgcaggtagtggggggacgagtgcgtctacgtacgctgctgcattgcatgcctgctagtgccgggccggtgttgctgagcaatggtcaatctatatacggcgttgcgattgcgcatgcagatcaagacacgcctagtgcatgcagaatctctcgtacacgagatgcggtactctcgtacgagccatgcagagaggttgactagaaagaaaaatactgacaagaggtttagcggtttggtaacctaacttattgaaattttgattattgattttagtcatatatcgctcttggcaggagctagcaaggaaaaagagatcaaacattttttatgtaaggcatagaaatggtggttgggtaaattcgtg

SEQ ID NO: 160514 - DNA, 562 bp, Zea Mays
ggtgggagtgccaaaaaaaccgatcttgtggcgaagcttttctttagtgcgtgtcgagtcctattgaaattgcttgggcaggctgtacgtgtgggcgtgaatatttggggatccttcttcggactgggaaaggttacaccagaggaggctccataaagttctggaatgagtgggagggcgggggtcagtgcctttgtggaaatgcgaatatatctttccgcgtgtaaatttttttccactctttcttcctaaaactatggcgcactgaagtagtcgctgttgcctgtagcccgtaggtgctgggtaaatggtcatgtattcgatttgggcgatcgacttaaagcctggttgaccagctgaccttatgcagtggctttgtactttcccagtcgccaattcgccatcggtaagatggtccgtgtctcgtgtttattgcaggacaatgtaagcacatgtcaggaccagtcatgcgagttgaacttgaatcttgttgtgtcagctgtgagctgtcactgtaggaattgtgtacaagttcacaaaatatgatcatgtattagcttgt

SEQ ID NO: 160515 - DNA, 322 bp, Zea Mays
tcgtgtatcctgactaccgttacccaacacggggtcaaaaaaggaaagatacggcgtctgcgaaggaagccgcctcagccgctcttagtgagccagcgccgaagaggaaaaagataaaggttcttacgcaccgtccacgctatattgaaccggccacagtgcccgagtttgtcggtgaatcctcttcggcccccaaagccaaggagccgactcccctgaagaatattgaagagccggtcacaatgccggagataaagaaaatagaagaactgaaggctaaagaaacaaggacatctgaaattttaagtccttcagcaaaagt

SEQ ID NO: 160516 - DNA, 587 bp, Zea Mays
ccatactttcagccatctcctggtagacagacatctttttgttgtccgggagacagtataagaaatcatcttcgtctataccattgaacaccaaggccccttttgggtatttcagttttcgggcatagtgattggcctctgcaatctctccttcagataacctctttcccgaagcatgtcgaataataaaatcaagattctcagatagtgcttcgggaccaggagatttagcttcttcggctatttctttccccgtagctatgccagtacctggagattcttgttcagccccttcctcggttacagcgggcttcgtcttagcagacactgaaggcctagcttcggcttcagcctcggtcgtagcagcttcggcgactttcttcgcgggggcaggagttaattcctttgtggtttctatgacagcgtctagcacgctggccatcctccttctcttgggagttgtggcgggagcctttgtcaccttcggcagttctgcctctgccggtggactcagaatttttggcagcatcactgttttttccaactctggctctttggccacaccatctttggcttcggctgacccg

SEQ ID NO: 160517 - DNA, 427 bp, Zea Mays
ggggggtgcaagggtgcggccgcaccgggcccccaaaaatagagggccccctagccaccgtacggtagcattttttcctattaaacctatctattatagacacaaatacgtaaagagtgatgcgttattgagttatcgactagtcttgctcatattcttaaactgtctcaattacttatcgaatactccatccgtttcaaaatagtatttgttttagttcttgatttttatgtttatattgatgatgatgaatccactaaagaagcaaaacaaattctattttgatatagggagactgggagagtattataaactatacatatgatggttgctttggcagagagaagctttttaaaattaaaatatttttgtaaactattttttatcaacaataactcaagagatgttaaatggcttggtgatttta

SEQ ID NO: 160518 - DNA, 298 bp, Zea Mays
tgcgaatttaattgttatgatgacttagcaattggttgatcttttccttgtaggcatagtattttctaggtcacccgagttgcttttatgaactatcactcaacttgtttgggcacttgaggatctggatgcatgcatccttgtgaaaagcaatatcttggcaattcactcattgatgtgataggcaaatgttttttagttttagattggcttggccttcccattgagccgaaggacctgggttcgatgcaacctctctgtaaaatggaggggtaaggcttgcctcagctattccttc

SEQ ID NO: 160519 - DNA, 628 bp, Zea Mays
ttctgtgggattcttcacggctattccattattcagttagtaagtaatatacaattagtttgtcagtttggtggctttaatttgcatattcttctaccatgttttgggaatattactaatctatattaactctttgaagcttgttgtaacagaaaatattccactaaaattatcttggtcttttttgtaaacaattaatttctaaattgtcacacagttttgcatggtacatactttcctggcacagagtttcttcatgtcatgaacttatctttttatattaattttagaaatataccacctgcctgtaaccctcgggtcagtccgtccgcagtaagagaattgtataaaaggtctatttaggtgacccatgatataatttctcagatgagtttttctactacaatagttttattgcctaggtgcagcaataatcagtattaagcaatacatgatcaagttcagtattgctacaattaactcttaaatgtagttttgttttacatattatatctcaagttaattatcctatccatgttgtcttgtatttttgcgttgaagagatggaatgttggcagagagaacatgcagagaggtacaaattgaggttcatcgagatagatttgaa

SEQ ID NO: 160520 - DNA, 624 bp, Zea Mays
cagacccactggtcggcctcccagtagctccacggcctcgccctcgctcacgcacactcgatgccatgtgggccccacctcaccaatcactccaccgcgttcgggccctctccttccctctctgtttggtggaccccgggcgtcagctagatcttctccaacgcgtaacaaccgagcgtctgtcacggggctcgccgtgggggcctcatctgcttgtgccgcaatccgcggaccgtttccccggtacctgcatgcctatatagccctggtagttcctccatcgtcgccttgtgtccatcacagtagccagcagtgagagggagggaagaggaagtttgccgccataatcgaccatcgcgtacgccttcgcggaagtcaacctgtcgtgacccgaggcctctccaagtcgtctccttggttctcgttgacgttccggggccgtattaccgaacgagcggtggtaattcctcaccgatgcgctcatccccgtcgtggatccgcctggtccgctaccgtcattataccctgtaagccccctgtaatcaattcaatatgctccgtagaacgtgtactacgtattggagctaggaatcgtactctagggcgttgggcgcgctgctcact

SEQ ID NO: 160521 - DNA, 462 bp, Zea Mays
cacatgtcctccacgccagcatctcactacctcgagtaggaaatcaatcgaacatgttacacgcacagccaccggcaccaagtaaaagcgaacagtacttgtttggtcctcgatcgtagggcaccgaaccgaaccgcgcaaaattcaatcagaagggcaactgaaccaaaaaatcgaaacagaaccagacattcgcctagcgagccgtgtcccgtcgatcctcgatcccagaaccaccggcgattcaaggacgccccaccgatcctcgacccagcgcaccaattcagccaaaacccgacgcggaatccagaaccacccgcaccgactacacccggaactaaaacccaacgagaacctggagcccgaaggccattgcggcggagtagagaagaagcaggaggcaaacctgcgggaatcccaagcgtggcgaggtgaggcgaagtcgggctgcggtgtggtgtg

SEQ ID NO: 160522 - DNA, 510 bp, Zea Mays
aatgttccatgagttccctacttcggtgccgtccatctaagtgagccggtaggatcctggtcgtgtgaactctgcgacgatgaatggtccttcacacggtggtgataatttgtgtcgtccctcccccgtcagcactcagcggaggaccaagtctcccacagcgaaggatcaatgccgcatcgctttgtcatggtagcgcctcagggtctactggtatctggccgactgaattaccacatttagctgttcttcctccagtacatcgatgtcctcgagcctggttgcttctgcttcggctatgctttcaaatgttaatctgggtgctccaaagatcagatctactagtaccagtgcctccgatccatacaccatgaagaatggggtgtttctgtgcaaagctctgaaccatttccctgcgagcttctcgcttttatcaaacacctttttcctgagtgcatcgagtatcatcctgttggctctttccacctgcccattagctcttgggtgtgc

SEQ ID NO: 160523 - DNA, 1084 bp, Zea Mays
gtacttcatgatcaactacgagaggaacataggcaagtcacatgtcatcaaggaaaaccattcttcatcaaaggacttcatgctttctacacatgatgttgtttcttgtgtgttcgctgtattctgatagactaaacatttttgtcacaggaaagctgcttctgtatcttcttttcatgttccttactttcacctacttcacgttctacgggatggtggcggtaggcttgaccccaacacaacaagttgcagcagtagtgtcatctgctttttactccttgtggaatcttctctccgggttcctcatcccccagtctgtaagttactgaatagcccaaagaagcagagtatattacatcattatgcttccaattgttccaagttttgaacatacaaatcttgctgaacctattcttgtatttgtaaacatgatgatatatagtttacatgttaaagtagctttcaagtaaaaaaagaaacaatttttcatagttattgaacgtaaccagattttttatttcacacatcagttttgagtcaatccagagagcgtttcagtatgatgctgtttatctgtttctaaacgtcgtgcttgtcattcgtgatgcagaggatccctggctggtggatctggttctattacatctgtccagtggcctggaccctgcgaggcatcattacatctcagctgggcgatgtgcaggccaggatagtcggccctggtttcgatgggaccgtgcaggagttccttgaggaaagcctggggttccaacaggggatggctggtgtcacggttgcggtgctcattggcttctcccttttcttcttcgccgtctacgcgacttctatcaaggttctgaatttccagagaagatgaccagctgcctgagctaagtaagcctccgtggtttgcttttgctactgtgtggtgccaacatcaaagtctacttgctagctactcggcggatgccggatggatgaagcacccgttggtcgtaggattgaagttttcacacgtagagaggatggtagataattaaaggttcatgtctgtatatgattactatcgcaaatataatgagaa

SEQ ID NO: 160524 - DNA, 622 bp, Zea Mays
cgtgtttagggcgacatggcgaactcgaccgtgggcatcacgccggcgcaggagcaccaaagagcgcggggcacgccgaggcgggctaacgacgatgtggatcaactccggcgaggaattgcgcgggcactagggcagtaacaaacgaattaagggcatgggaaggttgcttaccataagcgcgaactcaggagcgcctggagtacggcgtggaggaggtgaagcctcgggtcgacggtggcggactctggctgcgcaagaagtgctctggtgagtgcggactgggcaaactagaggtggaaggacgaaccaaagcgtgtcccgagttgtgggtgatgcggtggagcttactgaggcaatggacgcgatggggactcaacggcagtcgtggaacgacggctgtcttcggtgagcggcggtggagtttgtatggtcgtgtgcacagggtgagagagggggcgagagagctcgactgagggtgcaaatgatcagggggaagtgggcgagcagggcgagggctctaaagtggtgagagcgtgcggtggtggccagagaacgtgcggacatgggcgtgtccacggcgggggacatgggcgggaggttagggatgggctgacgggtg

SEQ ID NO: 160525 - DNA, 508 bp, Zea Mays
ttttgccggggaagaaaccactccgacaccgaaagatgatgaagtggtagttttcaaaagctttttcagagcaggattacggtttccgctgaacgagataattggagaaattttggataattatgaaatctttcttcatcagctgacccctaacaccatcgttaggctcaacattttcatctgggcccttcgaagccaagggatggacccaaatgccgaagctttttgccgagtgcatgagctacattaccaaacgaaggctagagaagacgggctacatgaaaattttggctgttataacttcgcgtatcgcaaggatacgaaggcttcggtcctcagctatcgcaccaagtggccaattagctggaagagtgagtggttctatatcaaggccgatgagaagaagagggagaagttgaagacgatggtcatgagcccactgagtttaagcttcgggatgaccagacccttgtgcaatatgaagctagggtcaccatgccagctggcc

SEQ ID NO: 160526 - DNA, 390 bp, Zea Mays
cccgaccgcgcaccatggggttacccacgtgatgcttttgggtaggatgacgtcgttgatcatgactcgatggttcgtgtagaggcacgctggaatcattcacagagttatacaggttcatgccgcttagaattgcgtaataccctacttcctgttgtggtttggtattgatctctggagtacgaggattacaagctgagggttgtggatgaagatgggctagagtggttcgtgatgaggtaagatcatagggggtcccccttagccttatatacacgaccagagagagttatcccattacaagttgtgattactatgtacttgcttatctccttctttgtcgcaggttgtatccctatatatttggagtcttcatcgcctagccgcccg

SEQ ID NO: 160527 - DNA, 1194 bp, Zea Mays
tcctcacgctgcttccttttcctagtagacttcccaaaagtgatttgctcaaaactttcatattgttgcagaaccccttcaccactcaatgtcactggagtctccctggtttccatagtattgttgaaactggccttgttcttgcgccacgtatgatccataggcagaaagcgtcgatgccccatgtagcaatgcttggatccacatttcaaccataagaagtttgtatccttgtggtagtatggacatgcgaacttgccttttgtactccagccagataacatcccatatgctagaaagtcattaattgtccagagaagaattgctctcaaattaaaattcttcttctccttggcatcccatgtctcaacacctttttcccaaaggtctttgagctcatcaatcagaggctgcaaatatacatcaatattgtttcctggagagtttttaccgggtatcaacattgacaacatccagaaaggttgtttcaaacacaaccaaggtggcaagttgtaagggattaaaatggcatgccatatagtgtatgcaacattgaccatcccaaatggattgaaaccatcagatgcaagacccaatcgaatgttacgaggattagaagcaaaatatttgtatatgttatctacatgcttccatgccttagagtcagcagggtgcctcattttgttatcttggactaagccctccttgtgccaacgcatatattcagatgtggttggattcatatacaacctttgcaatcgaggaataactgggaaatatcttaggattttccatggggcacgcttgttggttgcctccttgtgatgcccagaaaccattggttgccatctagactcaccacatgttggacatgtatccatggctgcatattctttatgaaacaacaaacaatcattgacacatgcatgtatcttttggtagtaaaggccaaggtcatgaataaccttttgtactttatccaatgtgtccgaaacatagtggccttctgggagaacaagccggaacaactgaagtatggctgctaatgcacttttactaagaccaaacatgcatttaatctgaaagagccttactataaaagataccttagtgacctccttgcatcctggatacaattccttcttcgcctctgttaatagattaaagaatgtgtttgcttttgcatttggctct

SEQ ID NO: 160528 - DNA, 715 bp, Zea Mays
gcaaacagatgattacgagagatccgaaggcgattgcttctcaaagccattagcaataagagatagaaacaaaaaaacctagtaagtaactaagtatctaagtagttgcctattttccttcttccttgatcactttgtttttggtaacgtagcactaattagtttggaattgtactgtagttcttttgtggggttcatatggtggcctagcttatgagctccaaagtttagggaacattttttagcctttgatgtgcaacatctggatgggagcgtaattggagtgcctttgctgatgtaagtactctactacctactaagtagttcagactttggagataacattccttgcacaatattatggttttggcttgttgtcctcttgacaactgttttttgtagatccataccaagaaaagaaactggttagagcataaaaggttaaataagttggactattgtagctacaaccggaaaatgcaaaacaggtttaaaaaaattaaagagcttggttccaagagaaagaaatgcaatccactgttgcttgaagaattttgatggaaaaaatggatgggttgatgcaaataataaacttgtacacaaagtttatggaaatactttgacttgggctgttgtggatgaagttgttggtgcaactcaagacctataggggcgtcacttgcgtaggtctgctgcagtttgtgctgctaccgtt

SEQ ID NO: 160529 - DNA, 542 bp, Zea Mays
caaagtgtggccactggtgaatgactggaaaatgccaaaggaaactgcttccggctccaacgaaggtggtctgatttacttaagatacacctattgctatagaagtcaatttgacaagccaaatgatgattggcttgaggttgttgatgccaccagcaatgagctgttgggagcttattcaaaggcagaagacgtagccatgacaactgcctttggcgctcgcggcaagaggaggctgaatagagttttcaatgtgatcggatttttttatcctgactattgctttcctgcccgaaaacaagggttaaagagaaaagtggcagctttatcctcttccgtcgtatctaatccaaaaagagcaaagattctgactcgcaggctgaagccatgtcctttagagaagacagctgcagagcttgatacagaaaagatagagaatgttgaacatgccaaagctatccctttagctccagagacaattcctgttgtgacagttgaagctagtatcggtctggtagaagagcatctaaagctgtcgaacc

SEQ ID NO: 160530 - DNA, 572 bp, Zea Mays
gaaatgggcctacaaatcgtttatcgggtccggggaggatgtgctgattcgtttattaggctgtttccaagtcctcgactgtgcaattcgtctattccactctttgctctccgctttcagtctcacgctctactaccctctaggactttctcagttgtgtgcgatcgtcagtggtgatgatgagctttttctttgatgattgaggcggcgtgacccatagtgaatagtatttagtgagttcgctcggttttgatttgtttttctcacgagcggtggcggtggcgtgagaaggagccgactatgagtggggggtaggcgacgacatgtgggtgatggcaacgatgagcattgtaggtgaatgtgttcatgttttgcatgggcgtgtttaggttaggttatcatgtggttatttttctgaatttatttccaaatcctccttaatctattatttttgttagggttctcatcatcggtcctttgccttttgtttgccgattgggctgcgttgaggagaagaaggttcctcacattgccaagtttaggttttaggggttcgagattcagaattactg

SEQ ID NO: 160531 - DNA, 274 bp, Zea Mays
aggagacacagctcgagcaatttcgcgagatgcaggccaagctcgacaaagaagcggggcggcttgtgcagctccggcaaaacatcgagcaggagtgggtaggccaagcacttgccggaggagcgcgtcatcgggcccgagatgtccagcgccatatcgttgacaatgccagggcagggctgcccccggctttcagcggtgtcggccagaatctagctgcagcgacgatgctactccaagcaatgccggagccatccaccaccgaggggcggcg

SEQ ID NO: 160532 - DNA, 890 bp, Zea Mays
ccagttcgggcataaatattgagttcattaaataggtgaagtgggcaggagcattagtaagtccgaatgacataaccaaatacccatacaacccatatcttgtagtaaaaaccgtcttcggaatatcctccgatcgaacccgaatttgatgataacccgaatggagatcaatctttgaaaatacctttgccccaacaagctggtcaaataacaagtctattcatgacagtggatacttgttcttgataattacttcatttaagggtctatagtcgacacacatccttaaggtttgatccatctttttcacaaaaattgcaggacagccccacggtgaggaactgggtcaaataaaactcttttctagcaaatcttgtaattgagtcttcaattctgccagttcatttgggggcattctgtatgatctccgagaaataggagttgtgccaggcttaagttcaatagagaattccacatcacgctctggtggcaaacctggcaactcttcaggaaacacacccggaaattctcgcaccaccagaatattgactaactctttgactaccacactagaagccctttccggagtttcctctagagaagacaattggagttttaactgacttcctcctaacactgcatttatctgaatagtccattttctcatgtcaataatgccttcatgttgagctagccaattcatacctaggatcacatctctgtcctgacccttcagtactatcatattggtggggtaggtatgctcacccaattctactagcacatgaaatgctacttcatttgtgcctaacttcccccaggagattttacaataactcccatatttgtttcttgaattggaacatcatgattcatagcaaaagttctac

SEQ ID NO: 160533 - DNA, 575 bp, Zea Mays
taatccatgaatacactgttcatcagattcatgaagaaggctggtgcatttgttaggccaaaagacatcacagtgaactcatacaacccatacttggtaatgaatgccgtcttcggaatgtctgaaggtcgaatcctgagctgatgataacctgaccttagatctatctttgagaacacgctgactcctctcaactggtcgaacagatcttctattctgggcaaggggtacttgttcttgatcgtgacctcattcagagcttgataatcgatacacatccttctggtgccatctttcttctccacgaacaggacaggggcggcccaaggcgaggtgcttggccggttgtaacctttctctgacagctcatcgatctgcttcttgagttcaactaactttggtccagatactctgtaggctcttttagaaataggggtggtgccaggaagaagctctatagcaaactcaactttccgctctggtggcatacctggtaaatcttccagaaacacatctagaaattctgacacaacctcgataatctcgagtggatctgcttcacttctatcaacagc

SEQ ID NO: 160534 - DNA, 677 bp, Zea Mays
cgtttgtaattttgggccaaaactcaccagccgatccgtggctgtctggctgcagagctggtcagggttgttagggtctggtcctttgtggccctcctggtagacctcaatgtcactaggcttttggccactcgtagctttctgtataaacaaaaaacattcataagcaatcatactatttgctgatcgacatagctatatcaaacttaccattcttttagcttttcgtaccatgtcgtcaccgccaaacttgtggttaggattggttcctcgacattgcctgtgatgcgctgacgctttctggaagccttcggaagcccaatatcgacaccaagtgtagtacgcatcaggcacgggcgccatccatagaaccatcacctgcacacacaatgttacatattatatcaatcacaacaatcaataaaaagggtaaaacaaattgaatactaacctcacgatattgatcctcagtcaaatatatgtttgaggacccttcctttttattcatggggcctacttcttccggatgcttttgaaaatataggtttgtagcctgaattctcgcatagtatatggtatccttcaccagcttctttgcattgttttggaacacacgttcagcgtgccccatgtaatcctctccgtcaggcaaccgatatcgaagctacaacataaag

SEQ ID NO: 160535 - DNA, 613 bp, Zea Mays
tgcttgggccattccccctcccttctggcccattaaccatttaacccgcacgcaccagcccaactgcctactagcgtcgacatatcgggccctcacgccatcctcacaactgagtcgccagtgggagccttctgggaagctgacatgtggggccaactagtcagcctcatccatgtcgcgcatcgtgtgacgagtgggacctcattcctgttgttcttccccacgggcgtatctctgtccccctccgcaacaaccttccgtgaacgtcgccaacctctaccgacctcctcggtataagatcgagccggggcgccaggcttcccttgttcaccctatcaattcggctagcgagatactaaccaggaaaccctaccccgtcgtagctaggacattagcgcggtgtgcgggccggtcaccgtggtcgactttgggttttaccgttccccagccccaattcatggtaggagtgtggtccctggtgttcgtcgcgcgttccccgccacaacgtgtgcattgatagggatcaccgggcaacgaatttctcaccgacgtcgtggaccccgcggacttccgccgtgcgccgtgggcgtgcctcctggtgacctaatccccg

SEQ ID NO: 160536 - DNA, 709 bp, Zea Mays
aaaaaaacctcctcaagttgcttggaaatcagtttgcaggccaaaaattcaagggggtcttggagtcatcaaccttgagtggcagaataaagcactccttatgaaatgcctccacaaattctttaatagagtcaacatcccatgggttaacattatctgggacactcattacagcaactctctgccctcaactaaacctgttggctcattttggtggaaagatattctcaaaatccatgattcttttaaggaaattgcccaagtggaaattggaaatggtaaatctacgcttctctggcatgatcgatggaatgggcaatgtttatctgaaaagttcccggatctctggtcttttgcctctgtcaaagagattaacatccatcaagcttggttagcttccccgaatgaaatgctccatatccccctctctgctgaagcgttcgagcaacttctctcacttcaggacacccttgataatattcagttgcttgatcacaatgatatttggagatgcagtgcctcttccactcggttttcctctcataaggtttatgctcacttgtctggcacccgtcaaacgctccctctattcgtttggttatggaagtctaaatgtcagcccaagcacaaagtcttcttctggctgttgctcaaaaatagattgaatactcgctcccttctcaggcgtcgtgcaatgcctttagactcc

SEQ ID NO: 160537 - DNA, 483 bp, Zea Mays
gccactctacgatctaacggtccaaatgatcccagagtaacacgtgctcggatcaaatcaaaacagtcggatcgcgatccaacggttcagatctaattaaccccaatcgttttccagctctaaatcgcattcggtcacccggggatccaacggaccgaggggccatctcctaccagacactcgtcaacgagaccgaggcctcacggcggcggccaacactggcgcggtggcgccatagccgccaaaccccaaacggaggacccgggaggccaaaccttagtattctaacgcgcagaacagagaggaaagggcaacgaacgtaatggtggatgccataccgagaaaataagctcccaggagtcccgtccatggcgcacgacggtaatccgcggagtcaatgactccggcgagcaattcgcggcaccacggtcgtctaccacacaagacaccgcaacgcgtacgtcaggcacaccacggtggtct

SEQ ID NO: 160538 - DNA, 679 bp, Zea Mays
aatttggaagaaaactggccctaaactatggctgtctggctgtcaaaatgagttagtcgccatggtacagtgctccatatggattagaccgccagcagggaatcctcactgccgacgactccctccgccatgattcgtgtaaccggtgactagattcgtgtctggcgttgatgaatggcatcgcgaggtaaaagtcgtgcgctggacgccactccggtgactcaccgtcgtagcccttccgctttacggctaaagcagataagctcgccggtgaaacgccgccgtccgaccttgtaccacgtgtcccaacctcgccaccgcatcgccgtgactcgctctagcttcccgtcgaccaccggagttactgccatgacactgaacacatattcaccgcaccagcgttcttcttcacctccggccgccgcgcgtcagtgcccaaattcacggtcaccgctcgctgaacctataaattgagcccacagctagcttcaccacatcatcacgcaccaccccaaccagtattgctcctagtcaatcaccagtaagcacgaattttaaacttcccccaaatcagttgaagaacaccgtgaactccagctctctgtggccagcccaaattaggtccacacttgtcctctgcgtgcttgtttctacgttcttacttgctctagatgatcac

SEQ ID NO: 160539 - DNA, 1090 bp, Zea Mays
gcaactataatggattaatttggagttaaaatggttaagttatgattattctagaatttatatacttagtttacatctataaaggattatcaactaattctgtaattgtttatttggtttattacagaattcggacgacgggcataaaaaaccaggaatcacaggggttgtttcataaaaccgcagggcccgatggtaaataatttacactaacagtggatggcaggtttattaccacaaaacagatggtctcttttataattctgcaggctcgaaagggtacgggccaatatgagccgtctgatttgaaaccatggctcggattagacgctggtcaggctgaaacagtgtactatggtgaccgcgggatctagaatttatgacagcgatttaatggatcaggactccatcctggccgcccgttatagatctacgtcctagatcatcctaacgtgaaacgttcccccagatctaatctagaccgttgccacagagaccaacgaatccactatcccgacgtcgccccaacgcccgagctcaccggaccgaggcggtgccacccgcttccgcggcggagacaactctagcgcacatgcgatcgccctgaggtgctcccttacccgactagaccttgcaacgagatgcggtgaacaacccaaacacattccccgccatattaccttggattgtgcactgtcgtgctccaccgatgaggaatgcggcgagtacaggcgtatgtgagtgatcatcgggtgagtgacaggcaggcccgtgggccgaggctcacgagcgcataccgaatcataacctggtcaggaccttcgccacgctaagttgctcgacagggacttggtctcctgctctgcctcgaaggtttgttcggctagggcttggtcgtttgcctcgcctcgctaagtttttcggtaaggacttggtcattcgctccgcctcgcaggttgtttggctgggacttggtcatacgctccgcctcgcagggttgctctactgggacttggtcatttgctccgcctcgtagggttcctcggttgggacttggtcggcttagatgggtcgtttaaggatcatgggc

SEQ ID NO: 160540 - DNA, 611 bp, Zea Mays
taatcgatttaacacagttctggatcgggcctcgatttccagagaagtcaggggcccaggcgtaaatgtaaccgagactcataacactgcagaggtggacggcgggttaaatcctaaatagtccaggggctctttaataaaaagtcgaggccgaaggggtattaacgattcctagccgtccgatctgattccagcgcacaggattagatttaacttattatgaaacggtacgccacgatgaccacaggatctagatcctacggtttagatctaatgaatgctggagccactccccgccactggatattcatccaacggacgctatatgccctggcagaagcgttattcggttttctaatcccgaccgtccaacagagaattgacggccgagcacgcgcgccccaatctacagtgagcacggcggcggtggcgcactgctcacggcggatagctcgccggcggcacgcaatccggctaatccctgccccaaacctaaaattggaccgttctacacgacgagaccgacatggtgaaggtaagagtggagttctcaccatggattattgcgcaggcgagcctggccacggagaatggcggatccgcggcgacga

SEQ ID NO: 160541 - DNA, 638 bp, Zea Mays
gtgcaactttgccaatagcacaacacgattcaccgtagttggcacttgacacaacaccgaaccccgaatctcagatttgagacccttcacaaactgttgcacaaagaaaatctcatccaacttaggattgtgcatagcagtggaatagcgtaactcaacaaactctacatactcatccactggtgtagagaaggtacccctccaggccttgaatatggtttaggagaaggttccccaaactgttccatctgctcagccatccgttccaaagtcaaggccgccaccctcttccctgtttcatcaatttgtcgcgccatgacatcacgatccttcgccgcttgctctgccatcgacaaggaaagagcttgctgacccatcagctgttgttgattggtctccaccttctgcaaccgtccagtgatggtgtccaacgctgcaaaaatcttatcccaccgagtatcatccgatcgatttgtctccgccatcgcttccaacacgaagcgtgtctgtagcgaaggacgcgcagacggagccgtgataccaccccgatcaataactctgtgggaagaagaagtcgcgcagttcctaaaccgccgaccagagctcaggaagacgccgcccaggaagatgaatctgat

SEQ ID NO: 160542 - DNA, 768 bp, Zea Mays
atgggaccacactaagtggtacccgtctctagaccactcgcgagattgtggacttttcctttagactaggtactagtcaacatgtgcccttattcagtatcaagtgggaatataaattgagcagtagagttggttacatatttcaaaattcatgataacaacgaagctatagtcccgagtgggggcaggaagagaaaaacgtaccttggccgaggatatgataatggatcctgtgtacttggagctggattgggagaaaaacctttcctcttttttaggatgcatgaaaccttggatagagatctcgaggaggttcgggtttgcaagatcaactcctactaggctgggccacagagggcgccagagactggttttacacaagcgaccttactgaactatgaatcgtttgtgatcagtccggatttacggggctagtcccaaccagcttgttcctgatgtgtacacctcctactatggttgtccaatttttctctccttttcccttcctcctaaagttttggcaactttggaggttcgaggccttcacaaggccaggggccatccaggacgtggtccgggtccaacgacattcccttaatgcctttgcttttattgtattcaatcctctaaaccatgtaacttaactttttccatcctagtttgaaaccagtccctagaatatgaatgtagtccgaacacccaagtacttgatccagaagatactaattcagctattcttaggtgatggaaggtgtgagcttacgatat

SEQ ID NO: 160543 - DNA, 518 bp, Zea Mays
acggtgggttaaatcaacgaaatccgaggggctcgtttagaaaatgaccgcggtgaaggggtaagatggaatctgagccgcccgatctagaaccgaggacccagattaaaagcccgctacgacgaatcggtacgcattgcgtgtcattcgatcagtgaccaacgcccaggatttaaatagccgagagaggatcccgtacatccgatcagatccaacggtcggactttgacacatgaagggggtacgcgatggcgcgatctcatccatccatagctgagtcaacggtccacccatcttcttccttccagctaccaaacacggcggcgcgcgtccaccgtggcggcggccacggccggcgaagcaatgccccgacaccccaacgctctagacaaaaatccaaggagtgctacacggtgtgtacggcatggcgatcacaatggttgtcttcttaccgtgattcaagcagcgcaaagccccccatcggtgcatggtggcatggccgacccccggtgagaaat

SEQ ID NO: 160544 - DNA, 1084 bp, Zea Mays
ctatatttaattaacaacgcattctccccgataatcgatatcgaagtgttgttcacacaataatttgtattttaacttagacctcacatgagcacaaatacttttcatccgcgactaataaccatacgtatttagactacaacaagcaattcatcgtgaccacgagcttaactaaagtcatctaacaagttggttaaccaatataaaacttagcaagtattttagacttcgcaactcaaaaacagaggtgggagcaggttaattagtttttcttaaccattttctcaacttaaactggacaacacacaagtcacataaaacaccatattttaggagacctcacatgtcgagcatcaatttataacctaagtgactcaacctctatcacacttgacaactaccacatcacccgatttatctatttggaacaccgcctgcctagtgtgctactagtaccccgcattttgactcgacttaaaaacatagaggaagcgatgactacttcggcatgtcaccacctcactacacaagccaaaattattattgcttacccacacgcctaaataagaatgattttaattcaacacgcccatattttaaatctcggcataagcttggctattggttaacgaagtgaccattttctaactaccaacatacactcctttcaccatttgtggatacttgtatgacacacggctattgtaatacatcacaagtacatacaaccccataagtaaggcaccagcacatttccaaaaattcccgagactacgacgacaaggcatcgatccgccatacaacaaaaatcatgacgaagacgataggtgctatcaactaatcgttaaaaaatattagacttacttctctctttgccactactccactctttagtcacatgaccatcatgtgcatcctttattcgattatataatagcgacctaagcgtcgtgtcacaatacatacatctttcctcgttgcgagtataaccatatcacggcatatacccgcacacctcaatcaaatatcttacgccaccatcactataatacaccacggcacacacgcacaagaaacctcaact

SEQ ID NO: 160545 - DNA, 576 bp, Zea Mays
gttcagctgcggggactaactgcagatcgccgaacttctgacatacttgacctcttttgtagtatttaaagcaatcgacagtcatgtcggaccaataaaagttggatcctctcaacaaccacttcatatttggagccgactgatgagtaccgcaaatcccttcatgcatttcggccatagctaatatagcatcatcaaggcccaagcatttaagtaagacaccaccagtcgttcggcgataaagttcattatcaattaaaaaatatttgaaagttgtacgccgaacattcatgtatgtcctaatactaggattacgtaggtaattaaccataggccccctccaatcagtcacatgggttgtgttgccagtcgaattaattaagaagacatctctggtaccgccggacggtccggactccttgtccgaacggtccgaactcaccgcggacggtccggctatgtagcctaggtggttcgcgaccttggaatttggtgcaacactggttaacagactttcagcattgtgaaatctttcttgttttattcgataacctgatgcatcttgcaccaaattat

SEQ ID NO: 160546 - DNA, 510 bp, Zea Mays
ttcacgaggaagacgactggaaactctgttctcaatatttttctttgattcctcatctcatgtttaggctgtcctttttgtatcaactcttgcatctcgtgttctggctgtcctttcttcgacgagtccgacattcccttctctgtctcccctttgttgcctcctcctctgagtacgacaccctcctcgaggcggactctgtggtcccccttactccctcgtttcctgcacaccccattgtgccatgtgcggctccgctaccccccgtgttgccccgcgcggccccagcgccgccgcgtgcgtcactgtcgtctctcatgtcgccacgtgcggccccggagtctcctgcaccgccacacgcggccttggcgtctcctgcggcgccatgcgcggcgttagagtctctcgtgctgccatgtgcggcttcggcgtctcccgcgccacctcgcgcggacccagcgtccccaaccccaccgtcgttcgccgaggtggcctcttcgtcgcgcttcg

SEQ ID NO: 160547 - DNA, 2254 bp, Zea Mays
tactacgtcagtgatagaggaaccaaggtaaaaaaaagcattttctgatattccataaaatgagttgtacctggggcaacagcatccggattcatcgcatacttggagatggtactagggcgcaacacaagactcgggcatcaggttccctttcagtgccaaactcagctgcgcctcgtacatacttgattaaatcacctaaccctaaatccatatggaactggtagaaaaggaagctcaaaaatggaatgttcagttttgaaaatcagacttgggcaaatttcagacctactgggttttgcagtctgaagcagttttgggatgctccttaagggctgatcctcatagttctggtttataagttctgtaccaaagtagaagtccatactttggtgtacaagtttgattaaggataataccactaaaaccatttggattcagtggtccaaagattcaatgttttaaatctggattcagacttagcccattttagcacactgaaaatgtgtgtttggctcaattttggagctctctggtgcttgattcttaaggtattaggccatactgcttatgacaaagttgaagagcatctattagtgtgtaactttgcttaaaagagaggggcttgatgctgtgcaaaataaggagtaaagtgccctcaaagtcgatctgtcagactgtgtaaagggagttcagtttcagttaactgaatctatggtcttagggaatcgagctccactttggggcactctaactggtgatccatgcatgtttagctctggaatgctatagcaaagtaaaagccctatatatggtgaacaattttgatgtggactgccaggtctgtccttgtgtggaaattggagaagaatggagataaagacaggcctgcagtcgactgaagcagatcagggagagtgagtgtctgctgcagaaaaatcttctcccactatggactccagctgtttgcaagtgagttgggatagggataacttggtctcagggaggggttgataccttggaatatgccttggtgcccatgggtgagttggagaaggagtgaagctaatctgttgctgactgtgctgtgtgtctgtttgtgtgttggcacacatgcagtgaactaagccatgtgtttccctgtgtttgtagcctttgtggagctggggaaggctgtccacgtgcttttgtgcatgtagtactggtcttcaagctcacttttcctatggacatgtggagatcaaaagggtttatctccttgttctttttctttgcaaactaggtccagagaagtgtatctcggttttctctatgctcttcgaccaaaacttggtagtctagcgtctgctaatgcttttgtaaccgaagcaagccaactaaaactgtcccaccgcccagagcacacccttgcactccctgcatccagatcgtggtgaccacgcccattccttttcggtctcatcgtggccagccgttctcaaggtgacgcctgcccgactggtttatgttttgtggtctctatgccatggtgatgctcaccgagctattccttcgaacgctaccgtaacaggttaaccggaacatcgccacgccgccagtaaacaccgccgagggagtgtcttcgcgtcgaccgactaaattgttgtctctccgagccaaccaatgtaagaattgggtgttaggtgtcttactgatgcccgtagtggcttttgattaagtgctaccgtggtgggagcctcggccagcctcaccggagctcggtgtgccgccgccaccgtggccagaggcggtttagcttgtttgggcccgattaacttaaggcataagatgtgttagcatcgggggtcgcgtaggtgtgttcggtttcaccagagatgaccgccgccggcgagtctgtgcgagggatggccggcgtccgcggtccgccggagttggtgtcggggttaacgaagtgcgaaaggacagaaactcgggagcctcgttgtgatgtcagtggaacagagaaatagggcccagggtctttgttatttagctggatcagcgagggggtttttgcgcagcgcgggcgcagggccggttttccccgagttcgtgggtcgagctcattagtttcggcccagtattgttgaatctttctctttttcttttagctgacaacttataaaatacactagaaaatgtagaaaaatgataaaattgtgaaaccaattttgttaggaccataaaattgtgtagtttcttctagaaacatttt

SEQ ID NO: 160548 - DNA, 579 bp, Zea Mays
tctcaccgccatgtgggcccgccctatcagcgtcgtgcctagctagcttgcccgacctctctctctgcccagtggggccgcctcatcggcgccctggcccgttgcgcgctcgcgtgtctgtgtcgctattccgctggccccgcttgccagtccctctcccctccttcaaccgctcgcccgcgcggaccgtgcacacgcacgacaagactgccacgcccacgtcgcctcccagcgccaaaccgtcgtctcgaccccctcctcaagtccccgcacgcacccacttcccctctgcctcattcaattcgcccctgcacactcacccgagttgcgcgtgcccgttcttcaagctcgttggagctccctcgtcgccaggactcctgcgcccgaatccgcccccagcagagctcgtccactgtccccgaccgtgctctaccaccgccaagcaaagcctcgctgtcgatttcgcctcacccgaggtgaatttccccgccggacttctccttctctctcccccgttttctatgttccatcaattagccaccggtgatcgccggtattgataccgcattgtcgtaccga

SEQ ID NO: 160549 - DNA, 1108 bp, Zea Mays
gggaaattggtcaacggagcgcgccatgcgcgcgagcatccagcggagaggattagtccgacgcatgctccagctccgattgttatggcggatcccaactgaccagcgtctgattcggcacaagcgcccgagatccccggattcgcttgatgcgcagagtccgcgttcgctgtggccgcgaggtagaagacccagctgcatggtggttcatggcggagttcgcgggagaaatgagcagagcgcgtgagaggcttgcatgcttatgtcacaagtgtgtcatggtgacctcatttgcggcaagagtataaataaaagggaaaagaatataggaagagaggctttaggagcatgggctgggatcacaggttttgatgggccggtcggtaagcttccttcacatttttttttcttatttctactttcatttctaatttgtattttattttaattcaaatatccaaattcaaatctagttttgatcataagttcacatgcaacattcaaagaacttagaatgagatgcctattcctatatttatttatttattatttgactgctttatttctcttaagtgagtatgcacaaagaaaagggaaaacacataattcccagaacgcttttatgtaaatccatgtatttatattttttttaccttatacaaatttaagggctttacaaattctaccccccttaacagaaatctcgtcctcgaggtttgtaagaaaggagatatagaaataatggtttgtaatttatgtttcagtttctaagtggttttaataccaaaagattttatttttgttcaagtttgtaacacaaattagcaggtgattatgaaagtatgggtatatatatgtatatctactttattatgtaggatagaagatgtctttaatgcacagataggtttgggtaagaaagagtagagtaaggaaagactccatccaagattgtggatcttgaatcatctcgagatctgatttgactcctattcttccatgtcgaggttgatcttatctttcttgctctttggtgtctccatccgggtttgggtcaagaggttaagatagatctgtatgtaacacgtaggtagaggagctagtttag

SEQ ID NO: 160550 - DNA, 273 bp, Zea Mays
ggccccgctcgcccgttgctcaaacgctccgcgttccactgcctgacccgatgggaccacctgtctgcgtctcctttcctctccgcatttgctggttcgtgggacccgctgcgcattgacttcatctacgctcgacgccatgacgcaaacctgggcgccgtcaaccgcgcgaaccgcgatgaacagaaatcgttgcaaccacccgggcgccatgcacggacggtcacctcgccagtggtttaagtcgtgccgtgccgccgcattacccttccc

SEQ ID NO: 160551 - DNA, 322 bp, Zea Mays
attgaaccaaaggactccttggtcatctgtcctgaggtccaggagttgttccttgcgggctttctccacaagccttgccgtctctgggtctagatgttgagccttgcagatgaggtcttctagcattggcttgacttcgagactgtcgttgtttcctagacatgcatttagttgtgatgattcttccttccagtcttctagaaagttggtcccttttattcccaatggttttcgactgagagcgtcggctaccacattggccttcccggggtgatagtgaatttcgaggtcataatccttgatcagatctaaccatcttcgc

SEQ ID NO: 160552 - DNA, 642 bp, Zea Mays
ttcaggtttagagaccaatttatccaaccagacgatgactggttgaaatgtgttgaaaataccagtgatgaactacttggggcctactccaagtctgaagataatgcactatctgtggccttcaggagccgaaaaaagaagaggctaaatagagtttttgacgctattggatttatgtatcctgattaccgctacctgccacgggggcagaagagaaagagtggaacttctggaaaggatgttgcttcagccgcctcaagcgagcccgcgccgaagaagaaaaaggtgaaggttcttactcaccgaccgcgctacattgaaccggccacagtgcctgactatggcggtgagacctcttcggctactgaagccgaaggacctgcccttacgcagaggattgaagagccgactgcaatgccgaaggctcacaaaattgaagaaccaagacccaaagagataaaaacattagaatttctaagtcctttgataggagtggaggcgccgaagatacaaaaagatctggcagcaaccccaaagagaaaaaggatggctagtgtgttagatgtgctggagacgataaaaacttcaagttctactccaggaaaaattgccaaggctccgaaagcacaagttgaaaccgag

SEQ ID NO: 160553 - DNA, 528 bp, Zea Mays
ggtagttgaggtaggtgtgttgctagctgaagttggactgctgaaagagaggggtctgactgctgaagccgtggttactgattttgttttcaagaatatccagccactgaaagacagggcatacccagcttatctgtatcgagggctagccgactcaactcgggttaccaacaggagaattccctctgcagacttgatgagccgacttgagatgatcctcaggggcaaagtgtcaaatgttggtgctccagtggcatactcggcctggaacctgcctcctctcaaagccttcaccctttttgtgtcgaatccacctatcactgatggcagtttgggccttagagtgcgaccctctgctgatgaagttagtgccttggttgcttcgcttggggagattcctgatgatgaacggcaggtccattttgaggtgcccctgaaccctagtgatgcagagataagcactatgcttgatttgctggctgaggattcttctgatgctgctcctgctggggcgttggtagtggcgcc

SEQ ID NO: 160554 - DNA, 561 bp, Zea Mays
cacggactggattttcattaccacttagccagcagcatggccaagctccacttccaaaccagcagttaccttctagtcatcaacatcccagggcccttagtagccagccaaatattcctggagttggtgggcctttatatccttccaagcatctgcctggtggatcattctctgctgagactaataacatgggttttatgaactcacctgctcaaatgcatcaaggtggagcaggtacaaactaccagcaaaagtcagttagtggtcatgcagttccaaatcatgttggtccatcaccaattcgacctccaatgggttctaatatgggtaatagtgatggacactttgaaagagatggccctcacacttatggaaggtttgatggagcaaaggctctccagcagcaaccaaagcttgctgctctctcaacttcacaaaatcccatggtaataatcttggtacagtagtgttgaatcttaatgaagcgaatagttcactcttacactgcctaaatttatgtcctaccataacagtaagctataatttttcctgtacattgta

SEQ ID NO: 160555 - DNA, 551 bp, Zea Mays
aaagtagtcatcgcttcctctatatcttgagtcgggtcaatacacgttatgtgttcatgatttgggaagtaagcgcatgatggtttcgagttagagattagtggtttacgattcgtataaattggtcgatgtacgaaaatacttgtaaatctgtgtatttataaaaatgttgtagtatatgttgtgtctcgggttgcgacgataataggcaagccgacgtgtatgttatttagcggctatgtcgttgctctagttagccaaattgttagatggtttggttaagtgtgtaatcgcaataaattgcttgttgtagtctaaatgtgtatgattatggtcgcgggtaaaaatttgtagtgttcatgtgatgtctaagtgaaaatgcaaattactatgtgaagagcgcatcgatatatatgtatgccggatttgatgattgtggtgaatgcgttgattaattgtgtatggtagttctagagcgcgaaataacttgtataaaaattagtaagtctacttgttagttctcacttgatcattttaactctaacaattgt

SEQ ID NO: 160556 - DNA, 1103 bp, Zea Mays
cactggtgttggcgggtgagttgggccaccttggcagacccagcatggtggaggtgctcgtgccgctcatggagggtccagatctggaggcaggccatggcttagcctgtggcggtggcacgtggagggaggtgtgaggacagtcggtggctcggtgcatggtggcactgttgtccgacgagacgggcttgagttggcgagtagggaacatgggtggccgacaccagtagtccaaggcagggcgatgtggagctcctgtctagtgtcaccgagtgggtgagggccggggcgaggaggtgagccacgagtctgcaacggcgcaagcacatgcctgagatgggggcacactgtgtgatctgtttgtcgcgttcctggagaaacagtgattctagctatgagggatgctcgacggagaagagaccggatgatcggtgaacaaccagaggttgaagaaaagggtagaaaagacattcccccaccttgaactctaataatcggtgcgatgtgttatggcaaatatacactcattcataagggtactaggcatatttcaacattggcggtgtggattggccaattccattgaagtcggatgtcctgcagcaaaatttgcctaacagtatgacatatttctagctatcatgtcattacttgagctgtctggagaaaagtacaattacctagggctgtctgactaggtgctactgtggtaggcatagcctgaacacctccctagcaccaattgctttatgaaacatttacttaactactgtttttctgagaatgaggtcaaaatggaaagtacaactaatagttaataatttgtaaatgagtagtactgctatacagcggaatcacacctatgcggcgccatggtttttctctagcctaactcctgtttgaacactgttgaggacatgggaccagaaaaaaaatcagaacagaactacagaagcactggagccggaagtcatataggagcgatgttaggcagctctccctttgtttgtaaatgtacgatgatactgtagaaagtgtgcagtgaagcctcctaacttcgaccactcatttcaggaaatcatttgaatcgatcacatgaagac

SEQ ID NO: 160557 - DNA, 846 bp, Zea Mays
ggggcacttaaggcctagcttcggtttcagcctgaattgttgcagcttcgacttctgcctgcttcgttacagttctgggttgtgccttggaagcttcggcaatttttcttgtaggagcagaactcaagatttttgttgtttctaatacaacatctagcacattcgccatccttcttctcttaggagttgcggcggagctttttttcccttcggcactgttgcctctgtcgaagggctcaaaatctctggcatttttgttatttcttcaatttttgatccttcagttttatcagttgttgtctcaactagtttaactgaaggtaacttcggcattatagccggctcttcagtcctctgcgcaggaggagcggtctcttttgttttggcagctgaagaggcccctttgtcaaatttaggtatcaaagccggttcgatgtagcgcggtcggtgggtcagaactttcaacttttttcccttcgtcacaggctcgtctggggtggccgaagtagcagctttcctctttttcccttgtccccgtagcgggtagcggtagtcgaggtaaatgaagccaatcgcgtcaaaaactctgttcagtctcttctttccccgacctccgaaggctgtagacagtgcattatcttctgccttggaatatgctccaagcagttcatcacttgtagcttcgatacacttcagccaatcatcatttggttcatcaaacttatctccaaacctaaatgtatacttcagccggaccaaatcaccttcgctagagttagtgatggtctccttcggcatttcccagctttctacaagcggccacaccctgaaggctatatgttcttg

SEQ ID NO: 160558 - DNA, 546 bp, Zea Mays
tccccaacgacgcgagcggaccttgtgggagaatcgcgggcttatggttgaagaggtggagctcggggataaaacttaccctgcgactgcctagctctctctccctctattgcacacccacgccgagcccgcccctagtaccccaaaccatcgcttagattgtcgccattggtggatcgggtgcctgcgcggagagggtctgtggggtccctacgccgccaccaatcgcatgagcccctttcggattcctcgccaaccgactcttaaccccgagtatacagcccgaggccgcgaccccctcgtcctcgctcgcaagcccctgttcgccggaatccccgtgcccactaccaccattgctgcggattgatagccatcgtcgtgagcctgctcggtcgccgtcaataaggcatcatcaaccaccctggggtgttccctgggacacacagaaggtgtccgcgttgtcgctgggccatcttagcggtcggagccgaactaattgctcaccggagaaccatccccgccgtgttgccgccatcctccgtggac

SEQ ID NO: 160559 - DNA, 856 bp, Zea Mays
accagttgtgagtgggttaagagaacttcccgcctattactttctaactcataaagaccttcaacttcaagattagaattctccaatgcgttggcattaatttgcagcttataagtaggaatgtactcattggcccaaagcactaactcaggacccccaatcttcaccaaactttcatgatgtggaggtggccaccatccattctttgtttcacgtacttcatgagaagacttcattaaactaacgatctccagacacctcttagcatttttcactacttctgcctcagaagttttgtgtatacaaactgaggaatccattgagcagttgagctgtcgcttctgaaaaaaactgcctatgctcccaaaatgattttttctgacatcctcaatgacacaggagaaaatggcctcagcaagagaagacagaagttttccatctgatgagctgatactacaatccaaagacccctggtgtgtattaacaaatgagcaagaagtaaatggagcagcaaatattattgaaaatttgtgaactttgcaagtttgcacacacctttcggggtttgccaaaatcttggaagtctctctctgaacctggggggaagacctcgagccgaaagtttgagagccgctgaattacaacttgcttaaaggccatagccaacatactctctgaatcaggttgatttgcaaagaaaaaatcagatccgaactgtttctctatcttactggccttatctttaacttccttggcttgcaaaatctacaaaaaaaatgccactgtttactcatgatgatccagcaaaacatgggccatgctgtaaattattcacatacacaagtaaaccactagg

SEQ ID NO: 160560 - DNA, 492 bp, Zea Mays
gattaccacgtattgtcaaactctgtataaggtgtgatgatattggaacccataccaattgcagatataaattctctcacccatgtccgtgttcatgcgggtagtaagtacccgtgggccgtgggttgtcaagcccgagaaaaaaaactacatcattaccattacaccattaccattattagcgcaggagcaaacatatgctgagttaatccctactactaattaagcacctaacgtgggcgcccgcgcgtccatgcccccaccataccaagaaaattgtgcacatcaacagctcgcctcgcctacaccgcaacagcaacagcaaaatccccaaacccggccatgccccaggttgctagggaagcccatctgcggttgtcgcaccattccccgcctcgaatctggggtctccaaacctagacaccatcagcgcccaccgtcagcgatttggaaaccgcacagatccaggccatcagcgcccggggtggaggg

SEQ ID NO: 160561 - DNA, 720 bp, Zea Mays
attattgcaactgaaatggattgaaaaggagtaaaaatggaatttctatgaattaaataagttctagatatatttttatacacaaaaaccatttcctaaattattttcctgaatttcctaagcttctggactgggcgcatgaataaacaaaaggtcagggctaacttgaaagattccccagactcagtgcaaactcgagctggacgacgggttcaattctgtgaaagctgagggctcataagtaagaatgccatgcgaaggggtacggttgatcactggctgttagatcccaatctagcgacccagattttaactaccgaaatggatccctatgcgtacaatctgaatccaacgatctagatcaagacacgaaccggtatgtttttgcgtccgcccgatccaagttctacggtcatgattaaatgaagacgcgcttcatctccatcctccgaacagatcgaacggttcagaacacatctggccatgctgcaccctccatctaatcccgaccttctgcttaacatccgacggctctcgcttcttctattcttacccgtccatcaccacattagcggccctgggtaactctcgcaacactcaaccatctcgttccagagaccaccggtgcacaacaccggggcacggcgttgcccatggcgaagcatccgcccggccaattcacgtcccaaccctagaatgaaatggtggtacacgatgcag

SEQ ID NO: 160562 - DNA, 467 bp, Zea Mays
ctggagcgcaagaggactgagctgaaggagtcctaggaagaagtgtcagtgcttagtagttcactgtcctctaaaggttctaccatcagagaacttcgtgcttcaaagaagtttgtgtcacaggagttggaaactacaaacataacatcaatgtcttagaaggcgattgtgaaattctgaaggcagggtatgacaaagcgatggataaggtggtccgctccagtcgtcttcgagtgaagaaacttggtgttgtggatcctgatgatattgttgcggatgttcaagctgcatcagggactgtgactaaggctcctgccctgagtggacttatggctgattccacttctggaaatgctcctgcgtgatacattgtaaacttagaatgtagaataattgttgcttgagtgggaggcgcttcccccttttgtaaatttacttgacaatttagtttgaatctaaggtttgga

SEQ ID NO: 160563 - DNA, 615 bp, Zea Mays
tgggttcagcaccggcaggatcacccccattgggatcaacatcaatagggtcacacccattgggatcagctcctgtaaagagtttcactggtacttcttcagcagaaggagcagaagggccagcatcatgatccaagcacgacacttgccgaagccgtctctttttctttttcttcccctcggcaggagcagtcggatgaccaacttggcaaagacatttcgggtgagtaccctcaggccttcgagtatccacggttttctcaggctctggagcagttgcaacagccaccgtttcagcagcgatagaatcagaggaatcccccgccaacatatccagcatagcaccgatctctgcatcactcggattagtaggcatctcaaagtgaacttgcctctcatcattgggaaggccaccaagtgaagcaaccaggacttcaatttcttcgggggagggtcgcactctaagacccaaaccactgtcaccagcaggaggattggacacaaaaactgaaaaagggcttagaagatggcaaattccaagcagaatatgcaacatgagcaccaatatttgatactttgcccctcaatatcatctccagccggctcaccaaatcc

SEQ ID NO: 160564 - DNA, 445 bp, Zea Mays
ataaaggggagtgtttgggttcattcatatctctcactctctatttcacttctaccactttctatttcactcctctcgatctccttttacgccaccaaaccactcttgccacgccttccttacgctttgacattgagatgattgaagatgaggtactcgatgtgttgcataaaactatgatggatgcagcagtgaagcttgccttcggatcttcaacgagagggagaaggactacatcaaccacgatcatgaatcctctcacaatcggctaatgcgagactaatttaaagacttatgtgtctacccttcgctcttctttcatcataggtactctatgtggaggagtctctttcttcaaatcttgaagaggttcggtaagtattcctcctatttcactcttagaattgatgcactcaaccacaactgtttctccctccatataaaa

SEQ ID NO: 160565 - DNA, 581 bp, Zea Mays
tgaggaggacggatcagctgcacgaagatatgatagaggtagtgcacataatgcagctgatgctgagctcaaagaccatccaacactatagtcaacaacattgaacacagagtgggagaccaaagtgctaaggagctagagctaaatatgagtggtagcctctctgtagcccatcctcagcagaagtgtgcgccttatcagctcataaaggaacatcgccactagggtgaagtctgtaggggagcgctgagaaccttctgtgaatggaggtctgaagagggcaacaacgtgagcggtaccgagagctattccgccgtgagggcgacgagggtctgaagtgtcatagcacaagtcgtgaagcctcatcatcgacttagggaatccaaaaagctcccggatctaagcagtatgcaaagtgacatcctctcgctcgaacccgaacctcatccattgatggtcagggtcgatccaaactatagaatagaagactctgacccactcctcaacgtatcggccaccaaaagtcaacaaggagtatagacctagaagatatgtgatgtggccctcagactctgcactgg

SEQ ID NO: 160566 - DNA, 699 bp, Zea Mays
tgactctctggacggggcctcaaatacagagaagtacaggggccagcaggtaaattatcctagactcagccgacagtgacactagactgcgggttcatttctgtaaagctcagggtttctttcgcaaagtcatcggccgaaggggtacgttaggatctgggccgctcgatctcactcctacggcctagattagatctacatttattaaaccggtacgcgataagggctttcagatctagatctaacggccgcgatttaatgaaacgtgatccgcccgactaccacatgatcacagatccacggtggaaatctatccaggtgaaacattataccccgatccgatcagaaccacacatcgcgaaatcgaggcccagggttcatcttcttccctacgttcggcgcacagcagtcaaggcctccaccgcggcggcgatttcgccagtgaacagcgcgcccacgcccacgagaaccattcccaaatttgacagcagcgacacaatgcaaagattatggtgagctcatggatgagtggcataccggtggttaacccactgtaaggtccgcccacgcgtgcagtcgagcccgaggcggatcgtgatcctggcgagtaaccgcgagcgctcgaattaggttgggctgcggcaaattcggggttgtgctgctccacacccggcttcggcgacgatgaagggcgccagc

SEQ ID NO: 160567 - DNA, 328 bp, Zea Mays
gtaaacccatcaggcccaggagctttatcagaagggaggcctgcaacagtatcccttacctccttctccaagaaaggactatctagcgcactaagatccacaacatccctatgacagcttgatagttcaatagtaaaacgcctctgaaaatcagcacccaataggttggaaaagaaaccatccaggacttcctgtatgtcatcatgatttgtaatcacccttccatcttcctctagctttgaaataaaattccgcttcttacggtaacaagcctgtcggtggaagaattgagtattggcatgaccttcttttaaaaattgaatacgtg

SEQ ID NO: 160568 - DNA, 536 bp, Zea Mays
caacctctctctctccaccctgattgcgcgggaacaacgacgctggaatgttaggcgcatctcgtagcaccaccaacagcacggcgtcgagatgagcggtggtggcgacggcggcgacaaggaggccttcttccactgcctggaccgcgtgccttccggcctgcacctcgacgccgatttcccttccgatgacgaagaagacgacgaggatgacgtccgcgtctccttcacctctgccgccggcgaccagcatttcaagagcttccggtaccaggcggccgtgccggtggaggatgacgaggatgacgacgacgatgacgacgacgacgaggacacgtccaagtacgacatgtggatgtccgacgagcccatgtccatccaggagcgccgccgccgcctgcaccaggggctcgggatggccagcagccgggacctcgcgctgcgccggcacagcatgaagaaacgccccgccgatgtcccgcgggccatgtcccggagcgtgtcgaggtcaaagccaccgccgtcgccgatcccag

SEQ ID NO: 160569 - DNA, 445 bp, Zea Mays
gaggagtcaagggctagagccagatgctaggtgcttctgtaatattcatgaattatcttaccagacaaaggcaactgggaaggagcagtaccataacaacattgggtgttacagcttcgtgccccactctgaggcaagttatcccgtgccaacatttcgaaagaaatggctgggctcttggatgaagcaatggttctatgtgaagaatgagttgagtgagagagaagatgtgaggggcattattgagtgtcccatatggtcacgcttcggcattggaaggtcgtccattgcaattgggaatgaagtgcaggcgtgcttaatggctttcaacgccgtgtgcacttatatcagtaccagggatttggtacaggaacacattgcttacaaggtatggcctcttgtgaataactgggagatgtcgaaagaaactaccgctagctctagc

SEQ ID NO: 160570 - DNA, 549 bp, Zea Mays
ttggcgtgtttggttaggggattgactctatccggaaccagttgatccagaatggattcattcctcataggatcggatggttctttctttgtgtttggttagggaaatggagtgaatccattttttgtttgttttgaggaaccaggtcatcagacatcactcccaagcgatcttgtgcgtacgctcactggcatggcatttttatctgatagtgcgtacactcacaactcccaagcgatatgatcaccggtttgcctatctcgactattttttttacttttctacactcacaactcccaagtgatcctctagaggactatacaataaaaaaggttacattttttatccagccattatccagcatatacattaaaaattgagaagtttttatccagcattaaaatattgatctactccgatcatacaattgatatccagcccatttttagctcagcattataataatattgaaagttatcttacgctaatacaattgattgcatatgcataatttacagtctagctaatacaatacataatagacccaac

SEQ ID NO: 160571 - DNA, 665 bp, Zea Mays
cgcgattgaaggagtagcgagctcgtccacggttcggggcgggtctgcgacatgaacagagcgccggtgagggattcccttgagctcacgccgccattgagcaccgagggcccatgaacgccataataatgctctggcgagactaccagacccgcaccgcagagctcgaaagtggtgaatcgaagtttttctccccgcggcggacgcatcacgcttttcctctctcgacgacccgatccctctctctctctctctcttgctctcatggcgatggtggctcggttgatgggagggcctgggttttatggtgcgagtgcaatccagatttgacttgatctctagaatcgcgcgcgtggagatcggttgatttggttggagtccgccctgttggccacggcatccgcgagattcgcttcgccgttgtacacaggagaagaacctgtcggagcttgacggggaggaccaagggtggcgagtgggccagggacatggttgggtgcggacaacatccagcaaccgattggtcaacaactgcagcggccgcggcgaagtatgcgtggagagcacggcgcggaggagatttcggcggtaggtaggtgggagatggcgctgacggcctgggcccgacccggaagtgaaacaaggagaaggaacggaggggaaag

SEQ ID NO: 160572 - DNA, 421 bp, Zea Mays
caagcacgatgtcaattccttgtccttcattgcaaaccgatccatcaaaatataaagtctagggagtaacagtgaggtatgatatgtctagtttatgagtatcatcgatccgatgttctacaataaaatccgctacgacctggcctttcatagatttcaatggtacataggccaagtcatactctataagtgcataagctcatttaccaatcctaccactcataatatggttttgcaacatgtatttaatcacatcggtttgactggcaacggtgcaatgactagacagtaaataacatctacacttggtgcatgcataaaataggcataagcataacttctcgataaaagtgtaccttgtttcagcatccaccagcctccgacttaggtaggtcaccacatgctcctgtccttcggtctc

SEQ ID NO: 160573 - DNA, 571 bp, Zea Mays
attttccacataggataatcctacaacatcaatatcttgctcgagatgatatgagtttttagatatactaactcaaaataactttgggtcaatcttggatatataggtcattgtaagattgatagcttgagttaataagaattgaattgactctctcaagcaccccagagcttcatatcatctcctttcccctgcaaagcttgtcaagcatattttggttcccgtctcttgatgggtccgtcaaggttagtcaacaaagatttaggaacccaaatgtcctttgtgctagcgcttagtaaactcattacctttctagcacaagtcacaattttgggttgcctagttatatatgaatcaattgacaagctaggagcgggatagttactaatgggacaatccttgtataggtgtcccttctttcagcatatgtagcacaggcgatcttcatgtcttgaagatttcttctttccttgtttattgcttgctacatggttagtaaatattttcttttctaaaactatgcctttttgttttacatagggacatgacttaaccatatgtcccttctcag

SEQ ID NO: 160574 - DNA, 488 bp, Zea Mays
gttgtttagtgaacaatctttattaatggagattaccctgttcttaacaagaatcaagagaaagagagggtgaaaggggtcagttcagtagaacactgaagatcagagcactaaaaatatctgaagaacgatgacagagatccagggcactgtagaattggatgtgttcgagtgatttggggaagggatcgaccgcggggagataactttgggtcatgtcatgattccgcgaacctagcccgagcttgaccgggatatttcatcggcggtcaccgtggctcggtcattccgccgtcgtgtcactcgtgcctcgctcctccctcactgtgtctcttccttacgtggtaaccatgcactgacaatgcaattcgtggccacgcctataaatagccccaccacccacgacgaggtactcaccacttcaccaatgagctcggttgaagcaaaattcacggaatcctttccacctctccccaaattagtggtgc

SEQ ID NO: 160575 - DNA, 543 bp, Zea Mays
gccctgcccacacgattgcgcgctcggcggtgattctccggtgacgacgagcaattcttgtccccaagaagctcccttgcgctcaccatggcctcggcgagcaaccttgcaaccccgagtagctcaacaatgtatcgccactgcccagcgcaccacaatcacatgcgtctgcgacggtgggggtcttctcctttggtttgacccagtctacatggcggcggcgtagatggggaagttggagcgtgagaaaaggagcgagcagcgactccagggaaggcgggcgtggatatatgcaccgcggacccggaatcctcggctcgatcgtggacgtgcgcggccaattcaggctccgttgcagcgcgggttccctggaagggacggttctgtttgaccgggcccacatgtcatacggaccaacgagatcagccatggagaaagggcagtggtccacccgccagcgagaaagccagggacgcgagtacgtgcggggtaagtcgctggtagggggtcccaccggtcagcgcgtgttgtcgtcctctgggc

SEQ ID NO: 160576 - DNA, 500 bp, Zea Mays
tatatagggaagaggtaatggaagccctgggcttccgttattgggggaagccccagccaggatgccaaccaggtcgtggtcggcccactgtacgccagcatgcgtcagccatgcatatgatagccaacgaatcctggatgagccgtgacaggtaatatacgcatgcataaatatatgtagaaatgtgcataaatcatgcatagaaggaatcttttgggccacgaatcacgggaatgaatattaccatgtgtacaccgcttacgactgcataacgctgtgtaacatgatagcgtaaaccatgcaacatttaaatatccaccggtttgagataaggaaagacgtgccccacgttcgcgtaaataaaggcacagttacgggaggaaacaaattctcatttatagccgctcgtccacgttcgtatctgtgatattggcggcggttaacaactgcataacgatgcataaataaaccgtttacgactgcataacgatgtgtaacat

SEQ ID NO: 160577 - DNA, 847 bp, Zea Mays
cacccattgggatcaacatcagcagggccacacccattgggatcagctctggcagggtcacacccattgggatcagcatcagtagggccacaaccattgggatcagctccagtaaagagttccaccggtacttcttcagcaacaggagcagaagggccaacatcctggtccaaacacgatactcaccgaagccgtctctttttctttttcttcccctcggcaggtgcagttagatgactggcctggcggaagcgtttcgggcgagtaccatcaggcttttgagtgttcatggttttttcaggctctgggatagttacaacagccattgtttcaacagggactgagtcaaatgaatcctcagccaatatgtccagcatagcacttatctctgcatcacctggactcataggcatctcaaagtgaacttgcttgtcatcgttgggaagatcaccaagtgaagcaaccagaaccccaacttcttcgagagagggtcgcactctaagacccaaaccactgtcgccaacaggaggattggacacaaaatcgaaaaaggacttggaaggtggcatattccaagcagaatatgcaacaggaggaccattatttgatactttgcctctaaggatcatttccagtcggctcaccaaatccacagcaggaatcctcttgttggtaacccagggttgagtcggtgacaccactatacaaataagcggggtacgctctgtccttcagtggctgaatattcttaaaaacaaagtctgcaaccacagcttcagcagtcagacctctctccttcaacaaacaaatctcagcaagcagaaccttggcttctgttatctccaag

SEQ ID NO: 160578 - DNA, 519 bp, Zea Mays
agggtcttaccaaagagggggtctcgtgttcaacccatttcctaggcaggggaggctcgaagggtggtctggtctggtgcattggctttggacgattttcattccctctaatgttcttgagcgtgggagtgtggccctgtgttgatagagcaaacaaaagaggagaaatattagcgcaaccatgcctactagaaggaaatgctttgacaaggggtgggttatcggtgttttccaaggattgtgtgccaaattattgatttctcctcagccccctctattccagacccctctaactgtcgtttaagggttggggacggtactaagggatggtcaggatatcgaggctatgctaagggtagaattgtcatagatgctcgatgttccacgcattagcgagtatcctgccttcctcatctttagcttggtcatagtacttctccaattataaacaaccccttccagggcgaagatagcttgtgttgatctttgttgctttgtccctgttgaagtacatggtct

SEQ ID NO: 160579 - DNA, 579 bp, Zea Mays
tttattggcacgctgcttctgtgcgcttgctgtcgtaactactgtcagtccgccttcggtcacgccaactgtcacgcctgtccccacggctgactgacccgtggcctccgcacttgatggttttgctgggccacgcgcggggtgcctcgataccgctgcattggttttgaaaattcaccttctctatcttctgctgcggccccgaggagacgcggtactggcgcgagaggcggttcgacttctctgcacccaggaaccggcgcccagggaggatgactcgtgggcctgggcccccatgtcagagactgggttgttggtttcggcggaggtgaagagacgtactaccgcgggcggcggcttgctcctccgcggtggttcaccttcttcgcactcggaggccgacacccaaggagtatgactcgtgggcccgggctcccgtgttagaggcttgcctgctgctttcggcggagatgtagaagcgcggcggttcgctcctcatgtggtggtttgccttcttcgcacacggagaccgacgcccaaggagcatgactcgtgggcccgggcccccgtgctagaggc

SEQ ID NO: 160580 - DNA, 401 bp, Zea Mays
agaggctgcgtcctctatgccacggggctccaaccgccctgcacctggtgctgctactgtgcgcgctgcgcagcagcacacgcctgcgctgacatcccgagctccatcaagggctactcctagggcgttgtctgcagcctgggagttgttacgccaccctccaagttccacggccttgccgggggccatgaagcagtggcgtgacgatgtcgaccgcctcctcggcatggcgcattctggtcggccagacccaggactcggtcatttcggcgtcaacatgaggcgtcggcgtcagtgcgctcaccctcagtgaaggccgcaccgactgaggacctgcgggcggagctcaaccgcaggcgtgcgggtgaggatgctccaatctctctggagaggcctgatga

SEQ ID NO: 160581 - DNA, 631 bp, Zea Mays
ctgcgctgctcatgctgctgccgatacgattacctgggcagaattctccacacaattcaggaattaccatattcctgctggactcatgaagattaagagaaaggagtttttatccctcaagcaaggaagtatgtccgtgagtgaatatagggacaaattcacccagttatctcgatatgctcccagagatgttgaggatgatgagcaaaagcaggagcttttcctggacggtttaattggacccttgcaatatcagctggtatcacacacattcccatccttccaaaggctattggacaaagctattgccgtagaaaacaagaggagtatatttggagagaaaagaaaggctgctaaccaagggcaggatggaagtagttcccgtcctcgctatactaccactccaattacaccagctagtggcagttccggacaacaaactcaacaggcaccaactgctcctccgaaagcaagcactccatcaggacccgttgctcctaacacaaccgccaacagggcatgcttcaagtgtggacaaccgggacactacgccaactactgtcccaacagagctgcctacaccacaccggctccgatgaagcaaggacaagcctcggcaggaaagagtcag

SEQ ID NO: 160582 - DNA, 368 bp, Zea Mays
gattttgttgtctttgttctacctcttctggggctgagagcatccaagatccatttggatttatttccttggcggagatggctaaattttatagcactttgtatacttgaaggccatacttgatttcatcttatgacgtaatagcaatcacaattccaaatgtgttctctacgatggagtttggtgtggtgtgctgatgattattcatgctgttgatgtttggatgaattgctcaagtggctgacagctgagatggcaaatgctgatcatcatggccgataaagacagatacctcttctctttcgtggactttaatttttggcattttccttttaaatgcacacccatcattatcttgaataaattcc

SEQ ID NO: 160583 - DNA, 741 bp, Zea Mays
tttgtctatgtccccctcgtcgagttccttcgcaagaggtgatatgattgtttcaacgatttttgtggaggtcggtgccatattttcctgcaccatggggtatggaatgatcgaactatctttttgttgcattggtgttgaattcggagttggtgacttctgacgcgatacacggcttaagatcggctcatcacccaacttgatgtcgcgtcgatgccaaaggaccaacttgttcattgcctcctgcaatgttatggtcccctcaactggaaagtctatatcccaatcttcacaaccactatctgtgatctctagaacttggaccacaacatagtatggcatgataggattatccttgtagttaacaagtcctggttttaccaaaccagtagcagcttgttttgtttttgtcccagatcgattgattggaatatgaagaaagcaaggcttgtcctcaacaatattgtctatagggtacttggtgaaatcttgcatagatcctacgctactagggactataggtggactcatgtggtctggcttgagttcaaatgataagcattctgttttcttcattttgttcatcacgtcattaatagccttttgtaccctttcatcaatagtctcttcaagggtcctttttgacttctcgtgtttcctatatgacgccgcatactctggaaacgcctctctccaggaaatcttagaagagattccccgagcccgtccagtgtgttcagg

SEQ ID NO: 160584 - DNA, 512 bp, Zea Mays
aaagaattatgttgaagtctacttaaaccctccttaaagttttcatgaattctaaggaaggaaaaactcttaaaccttagttgaccctaagtgaaccatttaagcataaagggtaaatgggagaaacccttgggagaaaaatacaaattttggagaaaaccaaattacaaagttttagttcactaattaactaacaaagaatagtaaggaagttttgccttttgaactttttaaaatccccaaaacagccccctaaactaatgcacttgggggaaattcagaaattcagaaatctgaatttcaaccccctcccaaagatcaatcttgttctctatttttcaaaactcaaatcaaacaagtccaaacatcaaagttgtgccaaattcccttgaacacgccctggaaaagtttgaactcaaaccaatttcatttgacatggttttggcacagttttacctcgggactcaccttgtgacactgtcacctttgtgacacgacaactctctgtacac

SEQ ID NO: 160585 - DNA, 479 bp, Zea Mays
cattgccaaccgagatgtttcgatgtagtgacatcctgtgaaatactgaatgtactatgaattctatgtgtttgtgatggttgtatttgagtatttttacggatagggctctagaacgtgtcctctgtgctgacaattataatctcctgttctcgagtaagagcgagcatgtttcaccgccttaagtcgtcgccgacttaagccgaatgctccgttagtagggtatagtggtcaccctaagtcgagtaagtgtgagcatgttgcaccgtcttaagtcgtcgccgacttaagccgattgctctgttagtagggtatagtggtcaccctaagtcgagtaagcgcgagcatgttgcaccgtcttaagtcgtcgccgacttaagtcgattgctccgttagtagggtatagtggtcaccctaagtcgagtaagcgtgagcatgttgcaccgtcttaagtcgtcgccgacttaagccgattgctc

SEQ ID NO: 160586 - DNA, 707 bp, Zea Mays
tctcctactgagaaggatcgttgtcgcacggccttgtcgtgatagcgtctcagagtctgctggtaccgtgctgattgaattactgcgttcagtcattcttcttcgagtacatcaatgtcctccagcctagtagcttcagcttccgctatgctttcaaagaccaaccttggcgccccgaacttgagatcggcgggtaacactgcctctgatccatagaccatgaagaagggagtgtttccatgtagagctcggctaggttgagttcttaggctccagacgacatagggcaattcgtgtatccactttcctgcgaacttttcattcttttcgaagacccttttcctgagtgcctctagtatcatcccgttagctcgctcaacctgcccgttggccctcgggtgcgctaccgaagcgtacttgatctgaatgcccttttgctcgcagaagtcgaagaattctgaacttgtgaagttggatcccaagtcagttatgatattgtttggtattccgaatctgaatattatgtcttgtatgaattccacggccttggctgaggttaaggaagcaatgggtttgaattctatccatttggtgaacttgtcgattactaccagtacatgagtgtatcctccttgagctttcttaaaaggtccaatcatatctagtccccagcatgcgaagggccaagttactggtatggtctgcaa

SEQ ID NO: 160587 - DNA, 671 bp, Zea Mays
tcaatttttgcgcatagaactgagcttctcgtttttctttttcggtcagatttttacccgaagcatgacgtaagacatagttaggagcttcagaagatgcttcgggaataggtgtggcggttttctcagataaaatttcttttgcagattatttttccgtttctttttcaatttccaagaattccctcttggcaggctctgaaagaccagttttagtttccgcttgacttttggcagcttcggcctcaatttgtgtccttggaacttcggtagctatcttcgaagtagagcttgaagatttattgtttctagcacatctagcacgttaaccattcttcttctcttgggagttgttgtaaggtctttttgtgccctcggcattggcattggcacctcaactcttgctgaaggacttaaaatttccgatgtctttgtctcttcaaccctcagttcttccattttttccatttccgacattgcggccggctcttcaatattctgcagaggagttgactccttggcttcggtggccgaagtggtctcaccgacaaactcaggcactgtggccggttcaatatagtgtggccggtgcgtaagaaccttcatctttttcctcttcggcgctggctcactaggagcggccgaagcaacttccttcacagaagccgtat

SEQ ID NO: 160588 - DNA, 746 bp, Zea Mays
cggattgggatgcgccgtatatgcgctccaggcctagaccgtggtctctctagctttggccatcagggcagtacctctgcctgtggagccacaatgtagcctaggtgtgaaaaccataatcgaaaatctcgtttactaggggctcatttatgagatttcatcgtataaaagggaaaatagtaacaagaactaagaaattggaaatggtaaaaattatagaaatgataatgaaaatgattttacattattaagaccattttcatgaaatattgcattctagcagtaattttctctagtagttatagcattcaagagcgcacccttgtgaccacacatctcacatgtgcttgcagtcccaactcccaacccaacaaataagcccaagcaagcccacccatccaccatattactcatccactcccatagtcccatcatgaaccctagcatcatgattcacatgctcatctgtctcaatgctcgggccactgcagtcaaaatcctagactcccagtagtcgtggccctccatataatctatgccccttcgcccttagcttgggtcgtgcactcaataacagatggtgatcattcttcatcctagtaatagagatccgacagccgcaacgctaatcctctcatcttatcagtaacttggcattaatggtatcgaccggagacatgcaggggcgaagccagaatttaagtataggatggacaaatcaaattgagaggggctattgagtggtc

SEQ ID NO: 160589 - DNA, 550 bp, Zea Mays
ctaaggaatgaagctctcgagaaagataagatattattttccttagtgaataggctgaaaactggcgaagccaaacttagtgcacaagccgaggctcacaaggccgaagttgaagatttgaagaagaagcttgccgaaatgaatgaaaaatttgaagttgcaaatgcgaagcacgagataagcgaaattgaaagattaagggtacaaaagaatgtcgaagagctccgcgactccaaagaaagatgctacgagatatccttggaatgcgccaaaactctaaagaacagttttacaaaggtaggagcttattcttctgagcagaaattcatccgcggtgaccccgatggtgtcgtccagtggatcagcggagaggtcgaagcctttgacaaaatctttagtggtcggggagacttctgcacattcgctggtgcacgaggggtcgcggtgaccttagaaaaagccggttgtgagcatgttaaggctgcagctcagccaggatttattttcttggtggacgacaccaaagaccctttggctgaggcctctacat

SEQ ID NO: 160590 - DNA, 533 bp, Zea Mays
accaacacatgtatcatcttggtatgatagtcctgaggaactaggtctttcatcaatgtcattttcagccacactccacaagtgcctatgtgtaaatttttgaacaatcttccagcttccataattcttgatgtcttgccaataaaataccttagttgcttgtgctgttaaaataaaagtatcatttttgtaccaacaactactatggtttatgcttctaaaatatccatcatatttcatactaactttcttgctatgagtgtcaaaccaatcacaccggaaaagaacaactgtctgatgctccatcaaatctgagttatactgcaactcgataatttcttttaagcagccataaaaatcaatgcattcattattatgagtgccctcaaccatgactccactgttttgggttcttctattgctctcacggtcaatggtgtggtaccggacaccatcaacaagacatgcagaaaaattcgaactcgcaaatctggttcgcatgccaatgcatataggtcatcatcaatgtcttc

SEQ ID NO: 160591 - DNA, 543 bp, Zea Mays
ggaagttaaaaaagaggagagattcaataaagcatttgcactagaacaagagcgagttacaaatgaaaagctccttctggcggtgaggaaagaagaggtcgaactgcggaaacaacaggttgatttgcaaaacagagggatgaagagagaattatgaccctagatctttctgctatgccagaagagctaaggagatactacatgggcttacgggctaaaatcatgagaaatgaagctacacttttaacttaggtttggttactttgtgtcattcttcttccacatttgtttatttatcttagttcctaacatttgtttattgaacttagttcttgggtggtgaccagcatggcatggagttactacaaatctatggagaaactgaatattgatggagttagtgcattttcatgtagtatgttactgcatattccagttgttgtcatttgtgacatttcgtacctgtttagctctttgctgctcatgtagtctgatagtgcatatgtcagttcatgtcatttgttacatttcatagctgtcaac

SEQ ID NO: 160592 - DNA, 1212 bp, Zea Mays
cacgcctcacagacaacgaagattcgtagcacttgatgttgtgaatgtaatgttcctgtctcagtctcagcctgctcctagatacatacggctgagatggcccacatgcatttctggtggctcaagcggcttccagccaacaagtagcgttacatgcacatgtcatccttcggattgactttgcccatcaatatgtagctacgtctctcgatgttcatcgcttgctcctgctctggacattattgtagaagctggtttgacgaaactgcatctgctatgaatgaagtgcgaacgcatggtggataagtgtatatgatgtgcagctttgtatgatgagcgaatgtcaacattagcattttctttctgttttcttttgtatcggctatgcttacttggcacacgaggtgtgtggtgtgacgtgtttcttcggcttgtggtgtgcaggtgccgagctcggacacggtggtcgacggcaaggtgaaggccgaggacgggtcgtgccgatggaccgggcgggagcggtgaagggtagacgtgaggcttggactgagggactagatcgtcgggtgaccagccgtagtggctgacacttgggacatcgacaagtgcgaggacacgtggagtgaccatgtcaaccgggtcaagacggcggatttgcaagtcgagcgggcagctcaaaagacatggcgcctaggcggtcgagaacgacggtgacacatgtcaacaaacggtggacgcgtacgcggtacgttactcatggcccagtttggtggtttggtcctcaaaaccattagtggcgggtttgggcctcaaaacccgaacgaaggttctgatgctggaaggacgacacatggcggtatcggggagttcgcttcgaggcgaagctaccggtgagaaggcgtggtggccgtcggatcatatttatctcgagtcgggccatattgccctcgctgatgtggtatggctcaattagaaactagggatagtttagggatatgtaatttggacgataaatagagggcatcaccctcccttctccctatctctctcattttcgcagttcttcatttaggtttttcatctccagctgctttgctttgtgagagatccactgcaactttgtactgttcatccgtgtgggaagtgcacccccttaggtgctgagtcctctaggctttttggattgaatcatggtgttcttgtgattgtgtt

SEQ ID NO: 160593 - DNA, 435 bp, Zea Mays
gtgtccctttcaggaggaaaggaaccttggttggagctatgaccagcagatttcgactggatctcgaggcacagcgacgcccatcacgcgcttcgagcacccatcggagattgagcggcggctgccggctgccgttgagctgatgatagggaggcacgcgcgcccaccaccatgcaagaacatttgtggagctatggctgccttttggctctcaagcttggaccacctccccaaataccagtgccgggatatatatatcgtcgcttgtccccgactggtttgcccggccggccacagccacagtacgttgaaaaaaaaaaaacaaagcaggcagcggctgtgcagctgctagtctatgattgttggatgattggctggtcgtttcatgtgttatgctcgatcttctgaactagctgaaaaatatgccagggcaac

SEQ ID NO: 160594 - DNA, 537 bp, Zea Mays
tagcgtgcgcgcacacacacgtacgtccgtagaaatgcatgacaagctagccaacagtcttggcaactccattggccaccacgaggttttcagttgttgtgcctaggcagtacatagagttctctctactctcacaatcaaccttacaaatattttagaaaatcaggaaaaagtaggcaatgtgctcaaaccttgaatcagcaattaatgtattttagtttgaatgcacccgcttttaacttggatctgctgctgttgtttcggccaggataaggaccaacaaaagtgattaattccctattgctaggcccacacactaatccccgttggtatttattcttatgggtatttgaagaggccaatgagagttatttaatcccagtcggctagctgacttcttggccggacgatggaaattaacttaagtcggcttcgccactaaaaaaatagcactgacggttgataacggaatccgtctgtaaaacaatgcaccccactgtgcaggttttggtgtaaagcaatccccgtgcatcgtcg

SEQ ID NO: 160595 - DNA, 842 bp, Zea Mays
cgcgagcatgttgcaccatcttaagtcattaccgacttaaggcgattgctctgttagcagggtatagtggtcaccctaggtcgagtaagcgcgagcatgttgcaccgtcttaagtcattgccgagttaagccgattgctctatcagtagggtatagtggtcaacctaagtcgagtaagcgcgagcatgttgcaccatcttaagtcattgccgacttaagccgattgctctatcagtagggtatagtggtcaccctaagtcgagtaagcgcgagcatgttgcaccgtcttaagtcatcgccgacttaagccgattgctccgttagtagggtatagtggtcatcctaagtcaagtaagtgcgttgattcgaagtctaatcaaatcgaagtcaattgataaccaatagtttgaatgcctttgagaatgaaatcttttattgatgacgtattttccaattacagagtacaacattgctctgatagcttttgaagtcttgctaaggataaaacttcctgaggtgctctatattccatgagttccccacttccgtgccatccatttgagtaagccgatatgatcctggccgagtgacctccgataccatgaatggcccttcccatagcggtgacaatttgtgtcgtccttctcccattagaattcggcgaaggaccaagtctcccactacgaaggatcgatgtcgtatagccttatcatgatagcgcctcatagtatgctggtatctagctgactgaattactgtattcaatcactcttcttccagcacgtcaatatcttctagcctggtagcttcttcttcagttatgctttcgaagaccatccttg

SEQ ID NO: 160596 - DNA, 490 bp, Zea Mays
atccatggcccagaactaatcccctacctccctcgccgaagcacggtggcgccgtcctgaacgcgacggagcgacaccggcgaactccaatccggaaaacccgagcgccagactcaaattcgctcggcccccgcgagattgacgactcactgaactcaattccccatcaaattttggttgacctcgagtgtaggacccagtacacggtgtaccgcggcggcgccatggtcggccagtgctcccggggattcggctataccataccacaagtcgctagggaataacatggaggaagggaagacgaacacgatggggactcacttgtgactggccgaggtgcggtgatgcccgaccacggaagcacgcgagtacggcggagaaatcgagggagccacagggctcaatcccaaccagggcgactatgaatagctccctggcgaccacccgaagctccatggcccgagatgaacggctgtgaactaccttcccc

SEQ ID NO: 160597 - DNA, 546 bp, Zea Mays
ttcgctctttccgcactcagaaaccgacgcccaaggagtatgactcgtgggcccgggtccccgtgtcagagactgggctgttgttttgggcagggatgaagaggcgcactactgcgggcggcagtttgctcctcgcgtggcggttcgccttctccgcactcggagacccgcacacctgccgtatgactgtgggcccgagcccccgtgtcagaggctagggtcgttgtttttggcggagatgaagaggcacgttaccgcgggcgacggttcacttttcgggcgcgcgtggcggttcgcttttcccgcaccaggagttcagcgctcaatctgtatgacttgtgggcccgggcccccgtgtcatagactgggtcgcctaggcttcaggtgtgcgccggccgggatttcccgtagcgtctcggggcgcgagcgggagagtttgtcttgaagagggattcaccccgcgagcagaagttacgcttttgcattctctccactcgctacgccctttcgcctatgagctctccgcgcccctttgcattcgcgttc

SEQ ID NO: 160598 - DNA, 9040 bp, Zea Mays
ccaactgctcccagtgcctctagttaggtcacagggcgccagccaccacgtaattcactcctcaattcctcgaaagaagtttctagaagaggtgacggcgaacgtgctcatttcctgttgtaagggtcatcgtcacccggctacctatgacgtcgttgttgcttctcctgcatgcacaagagtcagagccgcctctaccttcgatctacacccagtcctcttgtcttaaagacaacgtacatgagcatcctctcctttttgattccccaattagatcttgaaaggtgttgcttactcagaagttgcaagttaatgctgctaaatttggatgggaagaattttacattagcttgttgtagtttttgccttgatgtccttgagcaaacgcacacgaattgattactgtggcagccattctatgtcatagctagatataggtggtgcaatatggctaatctcagtagggtttttataaaagtttttatgacacacaattgatggagagcaatgaaactagtccacactattttcaacacataatagtcttggaaacatgatacaaattccctactaagactagctagtgttaacaactgcaccgtaaagagaaaacacaaggttgattactagtagctctagctaagctaacgctacactggtactgcaagtgcaattcatttggcttcaagttaggtagaatcatttttcagtaacaaatcgtactataggcctaactgcttattcaacactaatatgtcttgctatgttatgaatttgtgtggtaggtgctgtcatgtaatgagttttttcattgctcatgatcgccatgttcttctatgttgtagttgaatttcccacttttaaaatttgttttttaaacaacttcatatggagaaatgaccaaaatagaaattgtagataacaaaaagttatgcaactttatagttgataacctttttatttgaatcatctattaaaaatatgtttgactttttttaacatttgaatcatatttaaaattcaaaattttgaaacaaactcagatgaagaaatgaccaaaatacaattaaccaaaataaaaaattgtaaatctaaaaaattatagaactttttggttgacaattctttcataagaattaatttagggtcccaaatgctcattttaaagtacaataaatgtaatgtctagaaggaatatcttaaatgaacataagtgtcttatagatgtagtgattagacaaatgacccacaagggctaagatattgagcttgagcaacgacggccacaaactcgtccctccactatcctaatggtcgtcagtacccaccgtctcccacattgttggtgctacatgcatagtacaacttatacgttgggtgtacgcccactccttcagcatctagtgttggagccaaggtccaatctgtctaggcatatgcttaagctttgttcgaggtattacgtggaggccaacccgacacaaaggataggataccagacccaacacataggtgcccaagtgggctaggacaccagacagtggtgcccaatattcaatttcaggctagcttcactagtgtgagcatcctctcctccttgctcccccaataagatctctcttcttactctcccaaatagatctagaaagatgttgcttagaggttacaaattaatgtgcatgacttgattaccatggcagccattatattgtaatatataggtaaataggtgttgtatttggcggtctcaatgaggattttatgaaatttttctatgacccatgattgatcattgtagtcaaatatcgatagcctgcacgcatgagcttagacacatatgtatggagctttttgtgagcatcttatagtgtaacatatttaaaaaataaaacattcgtacataggccaaatgccagcttccaatgtgcatgagaactagcgcttcctaaaattattaagccatcttccaatgcgcaataaaaaagtgcttcctagaaattaacaatgcaaggtattagtaagtgagaagtgagtggagatgagcttttttcggcttagattttggttcgggtggagaggagctttgtgcggctaattctgagttaggaaaactaaatattaatttacaacaattgccaccggttgaaaacaaactttgcatgccattcatgtggcgttctcccatagccagaattgctagggctcggtgtccgaccactatccggtgcggcggtgcctccgatcaggtcatagggcaccagccaccgcgtacatccactcctccattcctcaacggaagtttctagaagaggtgacaacgaacctgctcttatgttgtcgtaaaggtcatcggcacccaactgcctacgacatcgttgttgctgctcctgcatgcacaagagtcgggccgatggcctctacctccgatctgtgccctctcctcttgccacaaagctaacgtatgtgaacatcctctcctccttgcttccccaattaaatctagaaagatgtttcttacttagaaattacaaattaatgctgctacaattttggacaggaagaattttacattagcttgttgcagtttttgccttgagagccttgaccaagcgaacatgaattgattattgtggtccgtagctagatataggtggtgcaattgctaatcttagtagggattttatggaagtttcttatgacacatgattgatggagagcaatgaaactagtccacactattttcaacacataatagtcttggaaacatgatacgaattccctactaagactagctaccttaacaactgcaccttaaaaagaaaacacactgctgattacttgtggctctagctaagctgatgatgctttgatacttcaacaacaatttatttgacaacatgttaggtagaatcatttttagtaataaatcatacaatatgcgtaacttgttcaacacttatatgtcttgctatgttctgaatttgcgctgccatgttatgagttttttcattgctcaagattgccatgttcttctatgttgcacttgaattgctcacttttaaaattcattttaaacaacctcatatggagaaatgaacaaaatgaatgttgtagataacaaaaagttatgcaactttaaagttgatatgcttttatttgaataatttctttaaataaaattacatttaaattttttaaatatttgaatcatatttaaaattcaaaattttgaaaccacctcagatgaagaaatggccaaaataaaagttgtagagcttgaaaattataaaacttttttttgatgaaataggatgggtgagaacccctagtgaaattaatatttaaaagtaaaaatacaacgagttaaaaagttgacatcaaaactattacattttgactaatctaagtaattatgccaggcacatatgatagagacatttttttcttctgcactctaagaagaaacaaatcaaaaagatctttgaaattattatagtagttcattactgaaggatttatgccttagaatagccaagcattcctttgagtccagattgaccacatcataatgatgatgatgtccattgcaaatggcaaacccaaagcagattttattgcagtgatggtctggatgtgggagcctcctctttggaaagtaactccaatttttggtacaacgctttgcaaacccacaatggaaaaataggtgcttcaccgattctagcttctgtagaatgcaaagtccaaatactcattttaaagtataataagcataatgtctagaatgaatattttaaatgaacataagtgtcttattgatgcatttgttagacaaataacccgcaaggactgagatatcgagctcgagcaatggcagccacaaacccgtttgtccactatcctaatggtcgtcagcacccgaccgtctcccacattgttgttggtgctagatgcatagtccaagctctatgttggatgtatgcccactttttcacacatatagtgtcgaagccaagttccaatatgtctcggcacatgctcgagctttgaccgaggtattacgtggaggccaacccaacacaaaggttaggacgccagacccaacacataggtgcccaagtgggctaggacgtcaggaagtggtgtccaatattcaatttcaagctggctccactagtatgagcatcctctcctccttgctcccccaatcagatctctattccccttattctcccaattagatatagaaagatgttgcttagatgttacaaattaatgcacatgacttgattactatggcaaccattatgtgctaatatatacctaaataggtgttgcaattgacagtcacattgaggattttatgaaagtttcctatgacccatgatttatggagagccatgaaactaattcacattattctcaacatacgatagttttagaaacatgcatataaaattcgttgtgatctttggtgtgctcgaatatcaatagcatgtatgcatgagctcaaatacatatgtgtggagctttccaggtgcatcttacaatgttgcacatttaagaaaaataaaacattcatatgcatgccaaattctagctttcggtcacccatggttcctagaaatgaataagctaacttccaatgcacaataaaaccaatgcttccaagaaattaataatatgaactatcagtaagtgagaagtaattgtagatgagctttttcggcttagattttggttcggcaggagaggagcttttgtgcggatggttgcgagttagaaaaactaaatattcaccacaatttccaccagttgaaaacaaactttgcatgccattcatgtggcattccccacaactggaattgctagggcatgttgttcgatcgctccccggcgcctccagctaggttatagggcgccagccatcacatatatccactcctatattcatcgctagaagtttctagaagaggtgatgacaaacctgctcatatgttgcctacgatgttgctactgctcttccatgcacaagagtcaaggcgatgacctctaccttggatctgcgccactcatcttgtcgtacagccgacatatatgaacatcctctcctccttactctcctgagcagatttggaaaggtgttggtccctaagaggttacaaattaatgctactacaatttagatggcaagaattttacattaacttgttgcagttttttccctgaggcccttgaccaagtgcacatgatttgattatcgtggcaaccattatgtgccatagctagataggtggtgcaattgctaatataataacagtggggattttatgaaagtttcttatgacacacgattgatggagagccatgaaactagttcacactattttcaacacataatagtcttggaaataggatacaaattccccgttgagactagccttaacaattgtagcttaaagagaaacacaagattgattactagtagctctagctaagttgatgatgctttgatctacaactgtagttcatctggctacatgttaggaataatatattttagtagaaaattgtacaacatgcctaacttgtttagcactgatatgccttgttgtgttctgaatttgcctgataagtgctgccatgttatgagtttttagtgctcatgatcgtcatgttcttctatgttctaatttgttcattttcataaaattttcatgcattgttttacttgtatagatggccaaataaaccatctgatctgaacccgcataagcctgaccaagacaggacccaatagttgtcaggcgagcaacacacgagtgtgactaactaacacattgggttgtgttgcacctactcatggctacacatgtgcctcggttataaccttggtcataaccccataaaccttgagccttactaggttggcccattgacacacgagcccgttgtgcttgaagcattgcaaatctattatgccactaaggttgtgttcggttcagctttctgaaccagactcgttgccaaaaatttggaacttcaaacaaatgggtacaacaacataatagattcctgaaaatcgacatatttctctagttcaattcagaatcaccttttaccccagatttttagattcctattatctatgctataagctaccattctcttataaaatatataattgatagttgtttcaaattttcagtttttccacaatcgtcccttcacagcagttttctcatagctcacagctagaatccgattttttaggaatctacagttgaaccaaatagacccgaagttacccctaaatagaaggaggctaccaccctacccctgcatagatcaggggtgaagtcactgcctcacccctgcacaaatcaggaaggatgatgcatcaccctatccatgcggtcggatctaagggaaggaggcccacaataccacctacacatggatctgagggaacatgtcaccatggatcttggtgggcattaatgagaggacaaaccgagaggaattaatagacattagtgagagaaggaacattaccaattagaggacatatttcgtttcgagaggagatgtgacattaaattgactagggagtatgatgtaggagaggagctcgggaggtgatttttctagggataggatctgggaggtcatcgattgggattaggattatgagaggagagggaataaaaataaggtgtccgagtgagagttcgatggggtggtgttggtatatactatataagctagggtttaaagtagtgggccatgttgcgtcaggctggcacgtgtgccaaggggatggcctaggcattgtgcaagcgtcggctaggccaacataagcatgacgattatggcaaaacatcaggctatgggtcatgttgatggctaggactcgagccttatggtcatctatagttagttgtaatagtaagcagaccctatttattattgcatagtcatgtacatttcattttctcatcttcatgaatgctagtgaatatctagttggttgtgacaataattaattttatatatagatggaaaaagggacaaaaaggaaaaccattgcaaaattggatgccagtgcacatatagcgtgaatagacatggtttaggaagagatcactagctactagctagaatagggcataaggtcacacacaaatcatgttaaattttgaagaataaactggcagggatcctactatcgtggacaacatagaaataggtggtaccgatgctcacaaagctgaatctagagcagggaagactttgaagatccatgacccaaggttagcggtgaccctgaaatttggacaatttttagggattattttggaagcaccctggtttttaagaatccagtttctagaaattggtttctaaaaaaaagaggtgagggtgtttgaaacccggtttctaagaaaaacaatttctaattttttgatacacaatgtctagcctatccttcctctataaattgggtgagggtggaaataaatgtaaatgtcatgaaataaataagggcatgatgtaattaaacagacaaactagttttagctgggagaggtcaccttctggattttaagaaactagggatctagattctataaactagagcataaaccattatgtttggaatcactctagtttccataaactagtttcttaaaaatgggcccttaagagttgtggaatgaaaaggttaaggtataaacaaatacatgttttcttttttagttgacgaggattaattgtttaaaatggattggcatttgccttttaattataggtcactctagtttgtaagaagtacatacatgcaccactagaatatgaacatagattatatgttatttttcttacacaccaatgattccctcatgttccaaggctaatggatggagctatcaattgatgccatagccatgggcaatagatgtgagatccaaaatgggtcaagtgaggcttggaacccaaggcattgagttgttcttttttagtaattttatttaatattgcggtgatttgtcaatgttggccttgggctagagataaatagttcattgattgaaatactagctgaatttagcctctaggaaggctagaggttaagctaatccacttttagagctaaacactttttgcagctattagttgaatttagtacactaaatgttctagatagagctccatttagcccgcaaatcaggcgaggggaaccaaaaaggactaccaaactagctgaccaaagataatcatttataaattgatgtgtttgttagactatcacttgttagttggtatttatagtatcttgttcatcttttttgtttagatatgtgtaaaattccctgatgtttaacatgttttttgcccacccgctaaattatttagcgcactaaaggtcatagcagactatttagaacactgaataccagtctattgttttctcttgtatagaacccgttggccatacaaagtatgcaaactaaattatagttggactctaaacaagagcttgttgtttgattaaaattctaaatgactggagttttttttggacatgtcagtttggacctatagttgtatactttgaaataacatttgtttgttcacttgttctataaagaaattatgtaagcttagagcctagactagaagtgcattttccttgtgttggttgaaactgcacctatatttttactatcatcaattctaatgtattataacaatatagtaccatcatgagcttttccaattattctagaaaacaggtcatgttcctctattatccatttaaggtttttaaaaagacaagtaatcagttttgatgtaaagtttgcaagaacttacacatttatattatttatttgataggtcatgaagcataatactaataaaagtattgaccaaagaacgcaaatggcttcttcaaatggtcatgtcatacctaatgtatctcaaaatgattcaaagctcgagctctttggttttgattctctagtcaacattttgg

SEQ ID NO: 160599 - DNA, 367 bp, Zea Mays
atctatggtcatgattcagcgacccaaggatttggatactgcctacgttcttgcgcaattgcaggaggaaatcggcgccacagccaagaagccagagtataagaagatggattatataccactgggaatgtcttacaatagaggtcccctacctctaccttctccacccaaggctggtgctacaactcctgttcggccacaagaacacaagtctctgcactctattcagccacctgggagtggtgatcgtcttgcttcagtctatgcgtatcggaaggctcaagggttatgctacaagtgtgggtcaccttatacccgcggtcatcaatgcccagattcagtccagctgcacctcgtggaagaactt

SEQ ID NO: 160600 - DNA, 547 bp, Zea Mays
gccgaccagggggacgacacgatttgtttttctggtcgtcctattcgtcgattaggcgtccaaatcgtccgattagccatctctggtcgaccagtgtgcggcgggctaggtgtactattgggcatcaccgtttttttcgcctagtagccgcataaatctgttggcaccccaaaaccctaaagcctcccctgtgcctgcgcccctctcctaaactttctgtcctctgccggcggcggctgctccagcctccagggctctccaccatctaccagctctggcgtctccagcagtccagctcatccttgaaggtcgtccctgccccctgctcatctacaaggcacaagatgagctcgtcatccgaaggtcatccctgctcccctccttcccccttgtctgcagttttgcattctgcgcagcagtacccatttgtctgcagttttgcagtctgccctgctcatatagtgttctatacttctacgttctattgccttacttcaatagttcttagcttcatagcagcgaccagtttatcccaccagtccagcag

SEQ ID NO: 160601 - DNA, 476 bp, Zea Mays
acagaggacacgggtgcgagagacatgcgacagagaatccatggcggcggcggcgtggtgggagacgctggtggtggcagcggcggcggatggaaccggtgggagcagcaccacggtggtgtccatctgcatgttcacgacggtgctgtgcctgtgcctcgtcgcgggccacctcctcgaggagaacaagtgggtcaatgagtccatcaccgccctcgtcatcgtacgaatccaatccccgccaaattttcactgataataagtagtatttcattgtcaacaacaactattttctacgattttcttttgccaggggtgcatcataggagtgatcgtatttctgctgaccaaggggaagcactcacacatcctgcggttcgatgagcagctcttcttcatctacgtgcttccaccgataatcttcaacgccgggtatgcatgcttggtccacttgcaaggtagtatttgtaatggcg

SEQ ID NO: 160602 - DNA, 466 bp, Zea Mays
acaccaatggggaattaattaggtgtgacctaaatctgccacaaatggccagttcaaaggatcgcaccaatgtttctcctagcaacatgatgaagccgtttcttgagagtctatcgactgaggatcagcaaccgttcgaggattacgtgaggcaacaaagagaagagacgctatgaagagaggcacaagaaataaaggatgtggaggagtacttgaagcacttcaagatggactagcaccataagatcatcaagcaaggagagatcgagatgtcatccctcctaccttcgtgaaaccccaatataagtaaatcaaagtaccttcagtccctcaaacaatatgtagatctgcaagggaatagttgcaacaacgcatggggggtagaagacacgcttaagaaactcatacgtacgatagacaaatctgtcatgtctaattttccatcacacgaggtcgcgattgagtc

SEQ ID NO: 160603 - DNA, 391 bp, Zea Mays
tgctatagcaagattgtagttggattatagggcaagaactttgttacagatggattaagtagttactacataaaaatctgagatccgagccatgtaaatcggtctgttagacgctctgatgaggtctaatagtacagtaaactgaataagatctcaggtttagtccccctcgccaccggtgatcttgcgcccggattcgcgccggtgtcgcgattcatgcccagttaaatgcagataacgatcctcggatgaaagatctggggctggggatgagctcgggacactatttcgtcctgggcggcataccccccttgccttacggccggtccagataacctcgccggagttggccgcctgcctctcaggtgccatgtgccttggtgctctacca

SEQ ID NO: 160604 - DNA, 301 bp, Zea Mays
atcacgtgttatatgaaccagtattgaataacaaccactggatcaagatccaagggcccgagttcaatgaagccgaaatcaatctcctcccaaagatgagcgatcaacggtccatgatgctcgatgccaagacgccgcccagatctaatcgtgtgcgtacactgtggatccaacggcccaggcctgtcttcctcccccagcgcggcccgacggtggcgccacccacccaggcggtggtgagctcgccgacgcgagtgaatccggcgccctagttacaatcccggccccccgcgacttctac

SEQ ID NO: 160605 - DNA, 362 bp, Zea Mays
aggaagcgatgactacttcggcatgtcaccacctctctatttaagcaaagacaattttcacctacaacgactgaacatccccatcgagcacaccttattttactatgtctcgcatgcaaccatattgtggcgtgcactagagacaataccgattaacttaacgcaattaccactacaatgctcttcgatatacacattcgacatcacagtgcttcgacaaaccccacacttccaatctacttgtcactttcaaacacaccacgtttgataacacacctttctaactaaacatatctcgtcttccaaatacccatcatatgtcacctaatttatatcttcgatccattctatcctacaccacg

SEQ ID NO: 160606 - DNA, 1109 bp, Zea Mays
agcgccgttgcgcgctcgcgtgcgcccgctctcgctggctcacgggtcccgctcgttagatacgtccccccggcaaccaccgcgtccgcgcccaaggcgtgcgcctcgcgtgcggtacaaccgcgcccacgtccccacgactcgcccacgtcgcccgagcgctaggtgaagacaccatgcactcctctagctcacacctggccctcattcgccctctccctgccctcgcactcacccagctcgcagcgccaccaccactgttgccccgccattccgccgtcgtcgctgggcttctgctagtgccttggccacgacgagcttcacctgagctttgcgcactgggaacctgcggtggtttcccctttcttcgactcctttgttcggtccgcgctcaacctctcccctgcgtaggtcagagttcgctgccgtcgcggttccccgtcgtctggccaaccaaagccctctaacgacgtgccaagctgtcccaaccgccgtctttgggtaagcaacctttccacaacccttttctatgctaattccgtctcactatgggtaatttcggctcgtcgaagtcgcccctcatccggctgccatgtcttcacggcgttcggccatcgcagcccctcctcgagcccaaacctaggtgtagagcactcctaccctctccccgaatcccatgctggccttagcgcgctagattatccctcaccgcgatgggtattgctcgttggagtggcctctggtccgcccgaggttccccctccaccgtctgcccgtctcaatcctgttcctgcaaccccgacctcaacatagtgcttgtcgagtcctccccaacctctctagctacccagaccaccctaacgccacgaccgtgaacagcgctgcccatggctggccgaagaagataaaacccttggtgcccgatcctaaccatccaacctcaatctgatggctcagatgagcgaataacgattcgcgtggtttgtggaaccagagccgttgatctgagatctagtggccagtgcgccctacgccctcagcgcaccgctgactcatgggcccgcgtgttagtgcttcgacccaccccgagcccacctgtcaggtgctcg

SEQ ID NO: 160607 - DNA, 468 bp, Zea Mays
atagggaagaaaagataataattgataaggctagttggattggccttcccttatttctagagctattgcacatccccaactttcccctagttagttagatttggatcacttcaccttggagcattatcatccaactcaagatctatacttctaacgcccatgggctatccacgacttggcttcatctcggcgcaagctttgtgatgatgccatgtgtcccctctagttcccgccaaaactctaaccaggtgttgaggcccaaacccgagaaaccgactaaccgatggttttaaggctgaaaccaccaaaaccctcttaagtagtgtatctgatagtttccatctacagtcttgacacctgttaccgtcagtccttgaccgctcgatcactgagtcctccagagcctatgcttaactgggtcaacacagtctactctttcatgtattcttatacttgtcgatatcacta

SEQ ID NO: 160608 - DNA, 2668 bp, Zea Mays
ccttaaaaagaattcgacctcgaattatgacgcttctatcggaacgacaaaaggaaaaaattaatgaatcaacaacacttacccacaacgaaaagttccggatatttctgccgcatcagctcctcaagttcccacgtagcctcgctctcagactgattagtccataagaccttgacatacttaattgatctcttcctcaaaacatgctccgaggattccaagatacgcaccggacgatactccaaagtcagatcctgctgcaccacaattggttccatctcaatctgatggtccggatcccgcaagaacttcctcagcatagagacatgaaaaactgggtgtacccctgccatggaatccggcaattgcaagcgataagccaagctgcccacccgggccaagatagtgaacggtccaatatatctcgggctatggtttccagagacaccgaactgaacaactcctttagtgggtgataccctgagaaggacttggtcacccactacaaattccaaatcccgcctcctcacatcagcataactcttctgacggctctgagcggccaaaatattctaacgaatttcccgaaccttcactgaagtctgctgaacacaatcaggaccatccagggatctctctcccaaggtctcccagcatagaggggagatacaccgcctgccatataaagcctcaaatggtgccatcttgatgctagactggtagctattgttataagcaaactctgccaatgcaagatgatcttcccagctacccttccaagacagtacacaagcacgcaacatatcttccatggtttggatcgttcgctctgactgaccatcagtctgaggatgaaaagcaacactaagggaaagcttggtacccaatgcactgtgaagactctcccaaaatttggatacaaatttggagtctcgatcagaaacaatggacttaggtaccccgtgaagcctaattacttccttcatatacaaggggaccaattctgaagctggattggtggtcttcatgggaataaagtgcgcaaacttagtcaagtgatccactaccacccaaatagcatccctgccctgaggagaatgaggtaagcccaccacaaaatccatggtgatatgctcccacttccactccagaatttccattggctttagcaaacttacaggcctcttatgctcggccttcacgcactgacatacttcacaggcagccacgtacttagaaacgtcaaccttcatccgcttccaccagaagttttgcttcagatcttggtacattttggtttcgccagggtgaacggtgtaaggcgttttatgagcttctctcaagatatccatcttcacctctgatttctaaggcacacaaaggcaacccctgaaacgaaccaaatcattctcatcaatagagaactcccggggtttaccatcgccaaccctctttcgagcttcctgcaataaacgatcctactgctgagccgcacgcactctctccatgagggaagattgaataagcatacgagtctccttactagcggtgccgacatagcacaaagcgatccccaaacggtccagatcagcaatcaactgcaaggccacttttggaaccccggacctactaagggcatcagccaccacatttgccttcccgggtgataatgaatagacaaatcataatctttaatcaattcgagccaccgacgctgcctcaaactcagctccttctgagtgaaaatatacttgagacttttatgatcggtgtaaatgtcacaagcctcgccataaagataatgcctccacgactttagagcaaaaaccaccgtggccaattcgagatcatgagttggataattcccctcatgcttcctcaactgctttgagccataagcaatcactctgccttcctgcatcaacacatagccaagaccaattcgcgaagcatccgtataaactgtgaaacgcttaccgctctcaggcaaagctaggataggggcgtccaccaacttgctcttcaatgtctgataactgacctcgcaatcaccggaccagacgaagagaacacccttctccaagagtctagtcaaaggcttagcaatgctggaaaaatttggtacgaagcaccgataatatccagcgagccccaagaaacttcggattttagagacactaagggtctcttccacttcaccacagccgcaacattcttgggatcaaccgtaatgccctgctgattaatcacatgcctcaggaaagccacttcggacagccaaaaggaacacttcttcaacttaccataaaactgattcttccttagggcacccagaacgagacggagatgatgctcatgcttagcctcgatctttgaataaatcagaatatcatccaggaacacgaccacaaagtcgtccaagaactcatgcaacatcctattcattgcttccataaaagtagcaggggcattagttaagccaaaagacatgactatgaactcataatacccatacctggtgcaaaaaacggtcttctcaatatcctcctcacaaatcctcaattgatgataaccagagttcaaatcaattttggagaacacctgggcacccctcaactgttcaaagagaatctcaatacgagggagtggatatttattcttgattgtc

SEQ ID NO: 160609 - DNA, 679 bp, Zea Mays
tgatcagtgaacaaaggttcaacacacaaggttaaataaccaatgagacaatgcaaatggatataatatggtctctatattggtttgaatatatggacaagacttgagaaatcactatgcataaatatgatcggaatagaggttgaaatgattaagaggattgatcaagccaaattgaataagatatgaggaatcatgaattggcttgaccatattactattagtccatatatgcttctatgagaatcatactagagcttgattgatcttagcatttatatctagaagacattaaagcaaggttcacaatattgaagaaatggttctctcaatgtatgctcagtatgatgtgactcaagaatgacttggtagggtgaagatagcaaggaaagggcttcgagggatcaggcgaaggtgaaggccaagcgacggtttgtggaccgaggtaccatggctaagttgaagaagagagtacttgcactaagtcgatgaactaatcagctatgaaaagttacattgtgttgatgcatcagtaaggtgacttgaaaccatgatttgagctcatatatggtgaaatggttcaagtcacatggattgatttgtgtttgcttcaaaaggtgagacaaagatgtttgtgatcctaatgaaggaacgtcatggagaaatcacacatcggaca

SEQ ID NO: 160610 - DNA, 598 bp, Zea Mays
caggcccacgaagggatggccttgcgaaataatgggcccaaggcctttcgcgaggtcttctaggcttctagtggacccggggtatatctgtcccccagaggtactccgtgcagacaaacaatccttgacatgtataactctgctaactgggctcctgtgtaagttgtcttcacaggtataaagtgtgcaactttagtcaacctgtcaactataacccatatggaatcatagccgtcatgagtatggggtaatgcaactatgaaatccataccgatttctttccatttccattccggtaccttgagaggttgtaacaatcctgctggtctttgatgtttggccttaactcattgacacacgtcacatagtgcggcataagtagcaacatctcttttcagaccgtactaccaatacttttccttcagatcctggtacatcttagtatttccagggtgaatacaatacgctgaatcgtgagcttctcttaaaataagttggcataggtgctcgatttctggtacacatattctctttttaaatcatacggtgccttgttcatcttccgtgaaatcggaggtctttcccaaattaatctgtg

SEQ ID NO: 160611 - DNA, 924 bp, Zea Mays
atttctgcgacgggaaagctggcgcaaaaaaaaagttctgctcgtcccttgtagtgtttcttgcgtgctatctactgctaccgcaggtcgcagctgtcactcctcaatcaagaactctggttacaaacggaaagaccaagatttggtgacgaaaacggaggcttgtttcgatttcttcgctcaatgttggctcgacaatgacttgtctgaacctgtaaacgattaaagaaaatgcagagaagctccaagagattagaaacaagcaaaaggaccaagcgacgcgaggagaaaacttcaactgggttataaatatctgacatatggaggacaccgttcaactggagaacgcacacgaagggataaaaaggaaaccttcatgcatgaaatgcgtccaagtgggctgtgcatggcgagcgatcacttgctcgcacacgctcgtggctccccgaccttgcgacagacacacgacgggaggcttaaaatctgccgagcgagaagaagcggagcatgtcaacggccccttgtcgggccggcgaaactgactcacgagaactcagaaaacggagggaggccggcaacttttgattcctcctaacatccgagaccctcggtatagcgatgaaatgtcacgcggtttcaagccgtcgaaatgttcagagattgcggcggtacggtgacagtgacacaacgagggagaggggttggattgttgtaaaatcgaagtagatccatcttgtttgctgttgggtcttcaatttcggtagaggttggatttctctgccaccttcagggacccaacccaatttgtcaattgactaacccagtcacactccacaaacattatgaacttctccttactgcaactggcctgccatgcgactcatcagagacctggtgagctccagcttccgtagtgcaaaattt

SEQ ID NO: 160612 - DNA, 403 bp, Zea Mays
ctgaatgttcttgtttctaatgagagctatctcactgagtcaccaggtcgtgacttcaaagcaatctctccatatttgcgagggaagacttttttgcctcattctctagacctcactcatgttggagcctccgacattgggtctgtcctgcctcgaatgttcttgtcttagagccttcatagatgaagggtatttattcagtgatacagtagtggggttcattatctacaccactttgatcaataaattaatgttttatattcacatacaagcttcttgttgtgcatgtatctattgtttcttttggtaaaatcaattgcgacacaagtctaggctttgactgttttgttgcccatccttattcttatcttcagcgaaaggacctctagccgagttggttaga

SEQ ID NO: 160613 - DNA, 821 bp, Zea Mays
aaaaatgaagacctaaaacgactactaatttggtacagagggagtaagatcatacaaagcacaactagataataaaatcaccatataagtacatccaaaaagattgagctggtagatatgaaatttctaaaggcaccacagaaccttattttcaacagacatgtctcctaccactaaaaaacattccctaaaatcctagaatacatatgtaagaaaatgtggacccgtatcaagtcgatgaattaagaaaatctgagcattcgtatcaagtcgatgaattaactcacacggtcaccacgagaaacctaatcagttgaactgttttcgtttttacaagttgaacttttttgttgcccccctccccccgttcaattggctttaatccataccggcttctattacttctatagtgttttgactatacggattgcagctgcagcagtctgaataactagctttaatcctaagcgaagagtatagagttgtactaattttggtttttctctgaaccttattttcaacggacatgtctcctaccactgaaaaaatagtgcctcaatcctagaataaatatataagaaaatgtggactggtgtcaagtcagtgaattaagaaaatgtaagcactcgtgtcaagtggaggaattaacttagacggtcaccacaggaaacctaaccagttgagctgtgttcattttttacaagttgaactttttttgtataatttttggctacgccaatgagccaatgtccacatagacatgatgtcttgctattgttttgttttccattttcagatccgatttgtggtactaattttgg

SEQ ID NO: 160614 - DNA, 389 bp, Zea Mays
gaccgaaaccaagatgcccaagaacttccagcagaaatggccaagaaacagaatcaaatgccttgccaatatccagtttgagaagcactttggaaattttttgtttgtggattgctctggctgtttgttgcaccataataaagttgtcttgtatgcttctcccttttacaaaagcactctggttaggggatatcagctcaggaagcgtgggagcaagccggtttgccattaacttggtaacaattttagcaaaactatgaataaggctgataggactaaaatcttttatctctgcagcatcagatttcttaggaagtaaagtcaccaaagctgagttaagaaggtgcaaattcgaaacatcacccaacagaatcctccccatagctgcc

SEQ ID NO: 160615 - DNA, 777 bp, Zea Mays
ctaccttccgctatttaccaggtcacggcaacccatgaccgcacgcggaggtcacggcgacgcatgccggagcaccggattccaacccaccgtgccccactcccaggcctgaatagtacgacgcaaagcggaggcaacaaccattcaccagaggaggtactcaccgtgaatcaccccgcacaaagacctgcccacggcagaacgccggcaccaaggtctggtgcacgattgcttgagttccgcccagccgttcctcaaattggtggtggagaaagcttccccaagactcggcgatcaatcctatacccacactggacaccgaatggcccccagatagcgtgacgatggtggcggcggcgcttcctgtctctctctcctctccgctagatctgcgacgacgagcactgggcgcggacgcgcggtagcttcggtgagtgcgagcacggtcgcgagggccgggttttatagggtctacgccacggattccaagcagagggggggcacggatgttgcgtgaagttcgccgtccgctccggcgcgcgcggtttccgcggatttcgttgccggccgagtcaaacggggaagaagaccccgctgtcgagggggtcccacaagcagcgagtatgcacaggtgaagctcagatggaaaggctggccacttgggcccacaaatcggcgaaacaaggcgcaacacagccgtgggatgaggggctgatcgcagccgcagtagctgacccgtggggccggggtgtcggcaccaaggggagtttgggttgt

SEQ ID NO: 160616 - DNA, 781 bp, Zea Mays
gaaaacagctcgtcctcgagctggacttggtggtaagaggccttgaactgctgtagcgtctcccaggtagcatcagtcacctgtaatccgttgcagtgaactagaacatgccattcacctcttcggagttgagccttgagtaccttttctggggatggtagcagccgaccattttccatagctggtagggtaggagaggtagtacaggtggaggccccctgtatggtttgagaagaacaacatggaatacgtcatggatgcgagctccaggtggaagctccaaacgatatgcgacgttgcctcgttccgtgacatggaaagggccagcgtagcgtggacctaactttcctttgggtctgctgatcaaagactgcctggcgattgagcaagcggagccaaatccagtcatccacagagaattccagatcccggtgacgtccatcataaaaacgtcgagcgtgcttctgtgcttgaagtaatttatctctgacttcagcaagaaataagtcacactcttggagcatgtcatcaactgcctgtctggatgcggtgcctggctggtaaggaagcagggctggcggttctctgccatataccactctgaatggggtggtttgcaaggctgaatggtaagaggtgttgtaacagtattccgcccaaggtagcaactcaacccatgctcgagggcgatcccctgtaaggcatctgagatacatggcaatagttttattgaccactttggactgaccatctgtctctggatgaaaagctgtgctcattc

SEQ ID NO: 160617 - DNA, 1008 bp, Zea Mays
cacacgagcaactttaggactatattcccaacgaaaaacactagcatcagcattgcatctaagcatggattagtgcctagttcgaccatgtagccatttgcattttccctgtgtcgagccaaatggtcagtgccaatggtagaacgagcactaaattcttttttgcagaaatgacatctagctcctatcgttacctccacaccattttcagtggcgaaaatcttgtttatgtcctcccagacatcggatgtgcatttccacttcctacttgtgcttgacgtcatggaggccgtcacagcaccaccgccatatggggtaacctcaccctcaacaacgacattgtcatcgccgagatcaatagtaggggtaggggtagcctgatgtgttgcagtggcactgaagagctcctccagaccattgtgcatgtcatccacatcgtctggcgtttgacccatcaactttagttcgtggttaatggaggtcggatattagggtttagggtttgtagagacagaggggattaggggagtagatgtagagatagaggagtataccttggctggagcaccagttccatttacgattaccacgaacaaggtttaggggagtagatccagaggcggaggagaaatcagtgcaccgaggagggtagatccagggatggagggtacaccgagaaactagtgtatggagggagagccgaacagatgaacacatagactaaatgagcaaaaccacatgatatatatggccaaacaagtcgtcgactatgatccagtccacaggagaacagaaacatgagggatttaccttgactagagtagattcagagacagaggagagcagatctagtccatcggagatagagaggatagaggagatgcagatcagcagatccagtccaccggagtccaaagaaggagaggatagaggagataggcgatagggtggtagatccagtccatcgacgctcggtgaggtcatctaagtcgctgcgtcggagcccga

SEQ ID NO: 160618 - DNA, 400 bp, Zea Mays
gccggaggcgttcgttcgttcgagcgtggccagcaatttggaacctgggagccagggcaccgtgggtgcagtgcagtaaatgaggtgttgcaatggcgatttatcggggggtggtggtggagtgaatggatccacgagtttacgttggtgctcagtgctgctctgccagccaacgtcggatcgtattgatgcgtgcttttccctggctgtgaggccccgccgccgtaccccgtccgtgcgtcataggatacgcgcgcaggcaggggcagcttcgtgtctgtgtctgtgtctgtccaacgtgttgttggccgtggatgaggacgagatgagtaaacgcccgccggccattccattccattccgttccatgtgctttggagtgtgggatttcaacttcccgc

SEQ ID NO: 160619 - DNA, 435 bp, Zea Mays
gcaggtccatctatattgttgacatacctatggttattacaaatcctttgagtctttgagaaaggatatctcattgaatttgttctttttggaattgtccctcaacacaaatgctaaaatgattttccacaggagagaatgtatgatcctccattttcaacaacctttttaaacaccagtatgaaataatacttttttcctttagtatacatctgtgttcctataatttaaacaccagtatgtccatggccacctgcagcagggttttgactccaccttccagtgcctccttatccagctctccatgtagacatgtccaatatttctccaatgcctttaaataacctaatgagggcatgtaaacattttgttatacaatgactcatttatgtcctacagatttgttatgcccatatgccagttattggaaaaacc

SEQ ID NO: 160620 - DNA, 313 bp, Zea Mays
tgatgcatgcacgatggctcaaagacaaatgccattgcatgcgtgagaagaatgtgtaccgtgtgcgtacagtatagtgccatcgtgtctagaatccagatccatggacactgtactcccatccactaggatcacaacaagctatagctagtgctccgtactcttctgtctatgcacgtccgtccgtgtgcctccatatcttgtgttctcttgtcattgtttggactcgttgcgtgacgggctgtatgccggtgctgcttcggctgcagtcgttgacatgcatggcactcatgtcgtccgtggggtgtcactc

SEQ ID NO: 160621 - DNA, 425 bp, Zea Mays
tcgggttcgccatggaatcgggctgcggcgtggtctgccaccgtgcggctgggcgaggccgtagctcagcttaccggacgctggggggagaagaaactcgtcagccatcggatccgaaatgaaggctctagattagaagagggataccccttcgtcgttttgaatctggcgcgttgaaaggaaatcgtgtggccgagagggagtgaagggcatcgtgcgccgtggaccgcggatctgggatccaacggttgtcagcgtagcagtgtacataaccgggtccgggttaatctggacgcgtgatttctaatcggacggccgatattaagcgataccctttcgctctggctttttagcataagagaccctggaccttttggaaatagaacccgccatccagagcacagcgctctgagtctcgggattag

SEQ ID NO: 160622 - DNA, 446 bp, Zea Mays
attatcttataccttgtgctctttttctgctgctttaccagctttggctcagcggtgatccgatgctaaggagaagtatacctagagccaggctgacttgaatcaagtctcttcctttttggacagtgtccgcaccttgaattcttctttgagtgctcaacttgacttagagaagatggcttatgaggtaaactttcttgactgcttctactttgcttcgatgcttagtgttgttcttgcttgcaggaggtgaggcgaacgctccttgcttctcgcgataatctagacaaattatatcgcgacgccagcaattccttgactattctagagaggagtcatcgcttcaccatgtcagacctggaccatcatcgggatgaactgagggcatcccagactaaactgtctcgacttggtaagctgctgtcttcaaaggattctgtcatcaa

SEQ ID NO: 160623 - DNA, 598 bp, Zea Mays
tgtcctgcgtggacccaggtatgagcatgcttgcttcaccatactgcctggactactaaccatgtgcatgcacatgcagtctcagtttgcattcccagccttgttttgatgaaatggataagcattcagtcttgattcctgatgaagtgtgcactagaatggcccaagccttgatggtagctttgttagactacattgcaatttttacttgaatgacatgtatgtttaaaggacaatggtgaagataattctaaatgcatgcatatagaagctttctcttcatttggtcatatattcttcaaggcctgaaatattagagagttacatagctaaatgtactacatgctacgtgaaatggtacatttaagtagagtgcaccccaataggctttacattgcacttgcgtaagttttctccttttcaccagcacctaatttaccacaggtggaacaaataggtaatcttcaagatgaaagacaagatcgctacacaatgcacacaatagctcaggctcatgtgtgtgttgcatcccacagtctcatgcgcatgtttacttacagaagttcatgaaaagacacgtgcacttgtaagttgtaac

SEQ ID NO: 160624 - DNA, 479 bp, Zea Mays
agttgattggcgcatgtgcgtcgactataccgatctcaacaaacactgcccgaaagatcctttcggacttcttaagatagatcaggtagtcaattcaaccgctggctgctctatgctctccttcatggattgctactccggttatcaccaaattactttggcaaacgaagacgaggaaaagactgcattcatcacgccgtttggggccttctgctatacctccatgtcgttcgacctcaaaaacgctggagcgacttaccagaggctatccagacatgcttagccgatcactagggcaagcgtgtagaatcttatgtcgatgatgtggtaatcataatcgaaagcctgaagaacttcatcgaagatttacaacaggtcttcaacagcttgaggcgctaccgatggaaactgaatccagagaaatgtgtgtttggagtaccggccgagaagctgctctagttcatcatcagtcatcgagg

SEQ ID NO: 160625 - DNA, 551 bp, Zea Mays
tggacatatggtagatggttcttggctagtcttcatttcgcttcatgcttcaatgcttctgttgattagacttgtacttcagtagctatatttggctttcctccgatctccatcgatatctttcttttgtcttgatacattcattgcatatactgtatggatgtgactgcttgggaaaatctattgaaaattcctggacgtcccctcccctataggtgtaaccaagggacggcttggtacgctgagcgtttagcaaactgcccttgagtagtaacttgatgtgaccgcggggtgtaatcatatcgtccaagcagttgacctcagtccaaatggtgtcgtgttacgtgaaacggcgtctgccgcctgacttgtttccagacgatttgaattgcttattgaaaaattgcgattgttcagtgaccgtggtaggtgtaacatcccaaaatctcaacccaaggtttggaaccctaatctcctaaccccccttatttctattttctccctaaactccacccttaggtcatctcatcatatgcatacacttgggttgt

SEQ ID NO: 160626 - DNA, 392 bp, Zea Mays
tcgcagaagagtccctaagctataccagtcatcgtcctgttcctgcatatacatctgtcgaaacaacgagagaaccttctcatgcttcccagtttgacaataccccccaagcagggcacaccatgaaactgcattcggagccttcatcctatcgaataccttgcgtgcatccaccatcataccacacttggcataatgtcaagtgtgctgctctccacgatgacgttcccacacaggccacgtgtcacaacctgcgtgtgtgcctccctaccctgcctcactctcttcatgttcccaagcgccgacatcatagagccaaatgtgcagccgtccggccaaaccccatctgtcctgactcctgagcatagcctgaaaccaccgcagggcctcgt

SEQ ID NO: 160627 - DNA, 353 bp, Zea Mays
ggagaacatgagcagggaatgagcggagggagagctctggcgcacaacttttatagtgaagagaggggagaggagttaagccagattccatgacattaaattaccacataaacgctgccatttgattttcggggaagaacgtctaccatcaatactattgatgccattacagggaagagagaaacggcgaggaaatgaatgtcgtgggcatggcgcggcgaggtgcgtcggtgcaggggcagggcgcggtccatggcttagcgcggccgggtcgaggcgccgggcttcggtcggggtagcgagcaggcgctcggtgcggggctgggcaggggctcaggcgcggctggagcggg

SEQ ID NO: 160628 - DNA, 1510 bp, Zea Mays
cttctgctctagccttcacgactaaatccaccaccactcccgcacacctcacctgcccgcgtcgcctcctcccctgtcctccgcgcgcgttgggcgggcagccagctcccccaccaaaccctaatcactccggcgccgcgccgcgccgcgcggccctgcctcgatccgctccagcggccgcccgccgaggcggctgtgcggtggttgcgcttgcgcttacgcgcgcaggtccccgtgggtctctgcgcgcagcgggacccgtccacggcggcgaggcgcgggcttcaaggcgggcgcaggcggaggggcggaattgctcgggcgatgacacggaggctcgcggccgcggcgtcgcgtccgaggccgtgaatgggagtggcggggcgctgcgggcggcggctgcgtacatggaggccggggcaccgccccgcggctggcgctgtggggtgctctggctcgtcagcgtcgaggtgagcccactgccttcgatccggtacgggttttggcgggcgggcggtgggagctgagtacagattcggggcggagtggtcgggaaagttcggggggctcagcgtgctctcagcggatttggtataggctgatgcgggcatcgtgtttggaggttgatttcagatatttggcttccctgctgcgcgtagggttttactgtttctctgcgcacttttggggcaacaaatatttgtctgtctctcggagctatttttggatgcttggggcgcgaccaaatttaggtacacctagggttttatcatttatatgtggattgcttgacgtttgctctctctttcgtgaacatttgggcttcttataacttgcgttcaagtaccattgtaaggaggaaccgtgctttttgtattgatcccgacgatttttctttcaattcttttctcgtgttgcagattgtgttggttctagtctgcactcgcggagctggtgcggattctggtgaaagcaaaggatcgtttctgcaagactctgaagctggagaaaaggatgtctaccttagccactcctgcatccacgacgagatactacatcaacggcgacgagctgggaggaaggagtactctgtcatgccacaagtgtaccatgagtctcgggaggatgcggagcgtgtaagaggacgacacttgttgggcatgtcatcttggcgtgctccgcacgagaatgccaggaagccaatacgaatatacctcaattatgatgccgtcgggcattcgcccgaccgtgattgtaaaaatgttggcgacatcgtgaaggtcagtttgtcacattagcttttctcattgcaccaccagctattttatctgtgtagtagaattgaaactgttgtttctatttggtagcttggcgaacctcctgtatcatcagcaccaggaacacctatatgcgatcctcatggtgatccaccactggtgggagactgctggtacaattgcacccttgaggacatagctgggaaagacaagaggcaacgtctccgtaaggt

SEQ ID NO: 160629 - DNA, 672 bp, Zea Mays
ctggtgctggatagctgcctgtcgagccttctcggctgccagatgagcctgctactgtgaaagagactaaagtatcacagccagagcaggatcaatagcaggaggggcagcaggggcagcactggaacccccggtctcgtgatcatgtgagcgaggaggcataagaggtggtggcgggatcccaaagtcatcatcaccattagttgtaccctgggtctcgaactgtctgaatgcctcatccttagcctgaatatctggcactagatctggcactaggatcgggttcttaggggctggacgatatgaaccaaactggaggcgtgaggcctcgagggtgccctggaactgagacggcatgattagctgcgggaagatgtgacagaggtaatgcgcatacgacagctgacggcgagcacagagaccatccaaaactgtgtcctcgatctcacagataagaaagtcaacgacgtcaaactcagagtgtgagatcaaggcaccaagtagccataactgaatatgagtggtggcctctctatatcccatcctgggtagcagtgtccgtctcatcacctgatacaaatacttcgccgcaggggtgaagtcaactggagagtgtcgtgacccatctgtgaaaggaggtctcaacagggccacgacgtgagcagtggctgg

SEQ ID NO: 160630 - DNA, 690 bp, Zea Mays
caaaaggcggtccaccaccgttagaatttccgacttgtcgtgtatgcgtggaaggctctcgatgaagtcaagggcaatgtctgacatatctttgggagggaacatcgagcgactaaaggagaccggccaagtgtagcgactcgatcttctgtgctgacatgtagcacaaacacacgtaatcgcgcaccaagatgcagtcaccctcgacatggaaatcggtatgcagccattgtagagttttctagaagccctcatgccccatatgtgcgagttgtaatacatagggaaggatgtcgagggcgagggcaagaacacctctgagccatggaggaggttgtcatggatgcgccataggttgcccaacgcatcgcgagcgagtttatcgtgcatgtctgtcggtgtttggactcatggtcctaaccaaccagtgaaatagcgtcgcgtgccccggacccatatggtgatatgagttgacacaagcaatttatcctggtttgggcgacgaaggaccctacttccagcagaggggggatgaggcttatattactcgcaccatagtgctcgcagtcggggttacaagcacagcgggagaggggaggaccccaagtccctgagagtgattgaggcaagtgcccataccgaatgaaggagaaaactgctaagtgttcgccctctcaccttgtggagccg

SEQ ID NO: 160631 - DNA, 511 bp, Zea Mays
gaagaacgtaccgaaatagataaacacctcatttttcaaaaggactcttccacccctggtaaattttcgagtacactctcccacctcgactaacgtacgtgtgttggtttgcggtttgcacgttcattgtaaaatagcaagcaagatcacaagaggtcaaaaccagacaagaccgttcttttaggacgtatgcaatgcaatacaatagtagtgacgagcgcgagaagatagattaatgaagaatatagctagggcaaagagattcggtccctagtaccgtcgtcaaaaagtatatatgttgcaggaaagtttcagtctatagtagtctacacctggccaaatgagcccggccggtctagcttgtttcgagcagctcccaacaatactcggtcgacatgatcaaatttctctctataaaaaacagtgtagtttcgtatatcccctatttttgacactcatcatactactcatgcatgggcttctatctttcattgttttagattagaaaaag

SEQ ID NO: 160632 - DNA, 798 bp, Zea Mays
tgaagatgtacatactgctgaggctgaagaagctgacattgaggaaggaaatactgatgaagaagaagactacaacactctagtcccatcaaagcccagccacttagattttgaaaaatctactgtctctgaggctgatgtgccaatgatgatgaagctcggttacttcggggagacagagaagaagcttcttcgttttgccggcgaagaaaccatcccagagccaaaagatgatgaagtggtagttttcaaaagctttttcaaagctggattgtggtttccgcttcatgagatgattggggaagttttgaataattatgaaatttatcttcatcagctgactcctaacgctatcgttaggttcaacatcttcatttgggcccttcgaagccagggaatggatccaaatgctgaaggcttctgccgagtacatgagctacattatcagacgaaggccagagaagatgggcttcatgagaattttggctgttacaactttgcttaccgtaaggatatgaaggccccggtgctaagctaccgcaccaagtggccaactggctggaaaagtgagtggttttatattaaagttgatgagaagaaaagggagaagctaaagacgttagtactgagcccgctgagtttgagctacgggttgactaggcccttgtgccgtatgtcgtcgtggtcaccatgccaacaggctgtggcaaaatttagagttgtgactgagcagatcggcactagagatctggtgcaagaattcttagcctatggggtatttccaacgttgagtgaatg

SEQ ID NO: 160633 - DNA, 351 bp, Zea Mays
ctaaggtcagatcgggagagatggtgacagaaaccgttgatcctgggatgtacggttggggttcgatctggcatagctgttcatgcggtgtagtgtggtccgttggatcggttgtagagggatgggattagatcgcagttttattaaatcatggccgtcagattcggatctaacgatgggcgctgcgtactggttcacttaatgcgtcatgtaatcgtggccctcggaatgggatccaatggctagaatccatccatacctcttcggctgtgcatctttgcaaaagagacccctagtttaaatggaatcaacccgccgtcctactactctttgccctgtgtcttataaatg

SEQ ID NO: 160634 - DNA, 701 bp, Zea Mays
ttggggagtagcacataagattttaggacttatttttgatacatttgtactgcagaaaatacaggaataatttctagaaaactggagggccaaaacacaaaatggtcgtcttctaccttgagttcgtgcttgtgtgcagggaggagcttgacgggggggagtcggccggacagggagcagggaagtggaaggcgactcggtcgaggtggctggggacgggtgcggctgggggcacagtgtagactgacggtctagtgagctccacggacggcgagggcgagcagagcatggcgcgggtgagagaaagaggagagggagagcttgagcaggggagagggagagagctcgatcggtccttttatagagggagaggggaatgggagagggcatcggggggagaagcaatggacggccatcaatggccctaatggcggcggtgacgatttcttcaataatggcgaggagaagtgtgttagggagaggaggaggtggcgcgacggtttctggtgcagtggaaaccgaggggacgagggccggggcacggggtcgacgtccgggcagctcggcgggggcgctcctgcgtgggcgcaaagacgaggaagaaagggcacctggcgggtggggcccgtaggtaagtgagagagggagagggtagatggggagatggcggccggtttgggcctaatgggccaaattggcta

SEQ ID NO: 160635 - DNA, 1049 bp, Zea Mays
catgagcggcatctccgtctcgttctgggtgctcttaggaagaatcaattctatggcaaattgaagaagtgtgctttttggctgtctgacgttgctttcctgggtcatgtgattaatcagcatggcattgcagttgaccccaagaatgtcgctgctgtggtgaagtggaagagaccctctagtgtatcagaaatccgaagtttcttggggcttgccagatattatcggtgttccataccaaaattttcgagcattactaagccattgactagactcttagagaagggtgttcttttcatctggtccaatgattgcgaggtcagttatcaggcattgaagaacaagttggtgaatgctcctatcttagccttgcttgagagtggtaagcgtttcacagtttatacagatgcttctcgtattggccttggttgtgtgttgatgcaggaagacagagtgattgcttatggctcgaggcagttgaagaagcatgaggggaattatcctactcatgaccttgaattggccgcggttgtctttgccctaaaatcatggaggcattatatctatggcaaatcttgcgacatttacgccgatcatgagtctcaagtatattttcactcaaaaagagctgaatttgaggtaatgtcggtggcttgagttgataaaggactatgatctatccattcaatatgacccggggaaggcaaatgtggtggttgatgcccttagcaggaccgatgttccaaaagtggccatgcctttgattgcagatctggaacgtatgggggttgcattgtgctatgtcagcaccactagagaggagactcggatgctcattcaatcctcccttctggagagagtgcgcgtggctcagccgcaggatcgtttgttgcaggaagcttgaaagagggtcggcgatggtaaaccccgtgagttcaccattgatgagaatgatttggttcgtttcaggggccgcctttgtgtgccacagaaatcagaggtgaagatggatatcttgagagaagctcataaaatgccttacaccgtcc

SEQ ID NO: 160636 - DNA, 455 bp, Zea Mays
gcattgttcagggattgcatccggattctgttgatgggacgaacatgtcggttctgaaactgaaggcttggggtttctctatggattgcctgccttctcgctgtgatctccatgttgaagagccgacgtctattggagaagatggatcctgctttcgtcgcacattgatttactctgtttcggtgaaggtggctatttcggttgcattgttggttgaggagcagcctctattttcctccccagaagatgatgaagatcgggataacaaacatcagcgtcagaggcagcaccttccgaatcatcagttctcttcggtccggacctccgtacatgcacggttgggaccgcgtatcgctccttcttgtgggggaggtagaccagttgatgccgctcctctcccgaattcctcggttgatgagttgcaggcgcctgttccctccctcccatgcaatcct

SEQ ID NO: 160637 - DNA, 470 bp, Zea Mays
gagagagagaagcactccgagatctggtcttctcggtgtccaacggtccacagcccaaccctctcgagtctcgtcttctcccccggactccgagatcttgccgatctgcaccgacgccgcggtccgcggccatggcggtgccctctcccgccccgcggtccccgcgccgaccggatgccattgtggccccggacccctcgtccgctgacgtgccaccatccctcgacttcggcgacccggcctccctcgccgcgctccgagtcctcaccgacgcgggtgccgccacccgcctcctccacgagtgcgtggcctaccagcgcgggctcgacgcccgtctcgacgctctcctcgcccgccgtgctgacctcgaccgcgccgctgcttcgctcctccgctctgccccgcctctgctctcgctcgcggcttccgacgccgccgcgcttaaggaatcctcctccaccaccgcggcg

SEQ ID NO: 160638 - DNA, 1012 bp, Zea Mays
aaataagaaaatagaagaaaagaaaagataataccctgcgcttgggccaacatttgctggcctcggcccatctctcagcccacccgcgctccccctcgcgtggcccatcatccatttgcccctgtgcggcctagtaccggcgccgacgtgtgggcctcccccgtcagctgacccgttttccgcagaagatttctgtcaccgatctgtgggctcgggttgtaagaggttgtcttccacctcgaatccgatccaaatcatgcaccgtgctcaccgggtggcatgcgcgtgggtcgttcagatcccccgcggacctcgcgtttcagttggttgtggcctggccgaggctccctctctagctataaatggaagtcgcgacccccttcctcgccatgctgatagccgggaacagaagaagagaccgagagggagagaaggctagccgccatgggaaatcggtgttcggtcatcgtgagggcctccaagctttgccgagaagcttagccatggcgcagggaacgtttatgtggcccctgctggcggattgggctgttcgtggctctggaatcgctcaccggagcaaccccaacgccgcagatccgccatgaccgtggatgggtacctgcgcctcgacgttcgccggtaagttgccctcccatgggtttgccgtccaccgctatacgagtagagcccattttacggaagtattgtgcgtaggaattaggttctggcgtggtccagccatggcgccgccgtggatccctggccgctgttctttttggtcgggggcaagaagaagcctggtggactgttgagagtgagatgggcgatccagattcggttaggcatgagagatgaggggagttgagcagccgccgttggatcttatgctagcgcgccagattagaaactgaggatacctcttcgtgcgaattgatctggaccgctgatcgcagagcgtgcggccacagatgcataccggttcgttgtagccggcttttaatctgggccgttg

SEQ ID NO: 160639 - DNA, 589 bp, Zea Mays
ttggcactgcggagaccccagtcacttcaagaacaactgcccccagttgaaggcatcaggacctgcttactccaactcggtgaatggccccaagaatacctcagcacccgcccccaaggcgccctcctccatcaaccagtagaacaagacccagtatcaaggaagggcacaagtgaatcacgtcgatgctcaggaggctcagcaagcaccgggagtagtgctcggtgagttccttgttgaatttactcccgctattgtactttttgattcaggagcatcccattcttttatagccactagttttgtggaaaatcatggcattacctctacccctataaagattcccttggtcacccgaaccctagggtcagaccttatatgccagctcaaatgctcccaagtcagaattcttttaagtggggtagtgttcttggtagacttaaccgtctttccatcccaagggattgatgtgatcttaggaatggattggttgaccaagcacaaaggtatcataagttgcgcaaacaagacagtccttctcacagaccaccaaggaaagtcagtctcttgtcaggctcagccacccgcc

SEQ ID NO: 160640 - DNA, 375 bp, Zea Mays
tacctcttgaaaggcttgttcagcctcttcggtccaagagaatggactggacttccgcatcagcttgaagaaaggcagtgccctctcagccagtcttgagatgaagtggataggagcggctagggaccccgcaagcttctggacgtccttgatgcgggccggaggcctcattgcctcaattgccctgatcttctctgggtttgcttcaatgccccgatgtgaaaacaggaaccccagcaacttccctgcagagacaccaaagacgcacttgtccgggttcagctttgtgctggttgcgcgtagcctgtcgaagaccagggttaagtcttccactagggtcgaccctctcttagtcttgaccacgatgtcatcaac

SEQ ID NO: 160641 - DNA, 633 bp, Zea Mays
cgaaattgagctgcggtgactaattctctggtccaaatgaagctatgcatagtggggaccgaggggaacttaacgaaggtgcttaccaccgtcagaagatgaagtgggggctcggccacagggaggtgcagactacagaggtgatggagttacgacgagcaattgtcgtgctcccagtcgcccacaacactaattctaccggtgccacgcgacgaggaggacgaggcgaactcagacgaggactacttaccgaggttttggctgcaaccttcctttcccacagggacatgcgatccatggcggctcccaaattccgatgaaaaattgcggcgggttcagaggtcgttccaatctcacgccaccatgccgagcatccaaatgggtcggtgattcacctagccccgccatgcacgcatatccgttggtggctcacgctcgcccagaagcatgtcagcaacgatggcgtgacagataagggtgggcaagggggcttggcgagcgccgagcgccatggcagaggaggtgagggggcccaagctgagaaagacatcggcgttgggcagaggagtaggagcagggctacccccacgcaggagcacccgcggcggcaatcctattatccacggcgccctc

SEQ ID NO: 160642 - DNA, 825 bp, Zea Mays
tttcatatcatttagcacgtcaacacacttggttgatagtaccagagcccaccttgatcagcctcctatagctccactaaaaacctgaaccgggacgtttgacttgtgatcctttcgaccgctctaccacctctgtagaagctatcacaccggcaccatcacggtcatagatatcaagaaagagcttggataagtaagaggtgagatcgagtgttccacaaatactttcatattctactttctcttgcttccctctaacatggtaggatccaattcaagtgttcatggtggaaaccatggagacggagagccccctgtctctcgggctaaattgcatcaaatggccgactcactcgtgggggccatggaaaggatgttaaatgaatgtctgcccacgacaggaggttgaaggctacatcatcgtgatccagaagaatttaaccgcgaaacatctgaagatgagaattctgttttcggcaatgaattcgatcccttcagcgatggtcatagaggttatggtgatggtcgccacactgatttcgataatttgcatggaaggcgtcgtgcacacggatgccgagtaagatttgaagacgaggagtctgaagaccatgatcatgaggaaggatctgatgaaaatccttttgcaaatgatggaatgtttggtcggcgtcatcatcaccgacatgctgattttgaaaatagagaccattatcatgggcggcatcatagaaatgacccaaaccaaattgtccgagtcaagttggatattcctaaatttactaggaaagaaagtgcagatgaatatcttaattgggttgagca

SEQ ID NO: 160643 - DNA, 602 bp, Zea Mays
gtggattcaatcgtaaacgctgccctcgccccccttcgccaaaggacatctatgggaagttgtgcgcaaaacgaaatatcttgtgcttgaacagtcattttgtgcttattgtgcatcttgtatttgaaataagttgtgtctttcgttgttcgcgctatctattagaatgcacttgttgtgctaatccagctacacccttaggtgacttgcttggatagaaaacatgtgtctctcggatgacttcacatccttaaaggttgtgatgcacttgttgtgctggtccagctgcacccttaggcggctttttctttgatgcaaacatgtgtctctcggacaacttctcacccataggtgttgtaatgcacttgtgccgatctagctacacccttaggcggctttgcttggatagaaacgtgcatctctcggacgactatgcatccttagatgttgtgatgcagttgttttgctggtctagctgcccccttaggcggcttttgcttggatagaaacgtgtttctctcggatgacttcacacccttaggtgttgtgataaaattgttgtgtcgatccagctgcacctttagctggcttttgcttggata

SEQ ID NO: 160644 - DNA, 1055 bp, Zea Mays
ccgaagtgggttcaattactattgcactgagtcgctgacggtttgcagaaaagcccctcacgttctattccttcaccgcgccaggtccccgacggtgcacggcgtggcagagctccggcgagcacgtagaccggccggaggaggccaagaccggtgctcctgagcagcgggcatggaattgaaccattcccgatcacttcccctaagttaattgcacgaatggtgacctattctactctgcccacgagaacagcaaaggctatgggcatttgctcgtgttcccggtgattggtgagctctcagtccaaattggtggttcggcaagcatcacagagttatgagagtgctcaaacgagggagaggggaggatgaactgaccggagttgtactggccgcggagaggttggtttcacggtggcggaaaccagtttgggggaaaaccgaaattcaagctctatgacgcacgattgctagcgattctcggtggctgggtgggtgatgaccttgcggggctggcggagggctcaatttataggaagcaagagcggcggccgggaattttagcggtgacgcgcggcggtcagaggaagaagaagagcactggcgcagtggattcgtggccagcgccgtagcaattgctccggcgatcaacagggagccgctaaggcttacgacgatgcggtggaaagttagagccacgcggcggacaacggtgacggcagtcaccggcgttcttatcggtttctactgcggtgaacatggtacggcgaccggaattgtttatcggccggagtttatccccggcgacgtacaccagtgttatccactcaccccgagcacatgttggaccagcggcggcatgaatcgcggcggaaatcggtcgtcggtggtgagtctgccgcgctgtcgttctgatccatttgggacactgtaccatcgcgatgctaattcagtgtgtctgatagccaagatttagggccagattcctctcaatttcctatggcaacatacccgagtctctgcagcaaagttgtagagctacataccagctacaa

SEQ ID NO: 160645 - DNA, 893 bp, Zea Mays
aaaccctccgcctttctgttctttacatgccgagatcctcgacgttgagcggtgttgcagagctccggggagctcgcgtaccggccgatttgcgcaaggactggcacccttctttggcctaaaccaaattcgggatctaatgaacgtttcccccaacctaattccaagaatagttaaccggttggctttggccatggcgaccgtgggcatcgcggacagttaaacgcgttcctggcgatcattggctttctagttcaattgggtgggtcgatgagcatcacaggcacatgagaacacttaaacgagggagcaaaaggtttgaattgacctgaattgcactggccacggcgagggtgttcttgcggtgggttagagaagatttgggggaaattcgaaattcaagctctcggttgcaagattggaggcaatactgggtggtgtggtgcgtgatgatcttgcggagcttacggagggctcaatttatactaagcgagagtggtggccagtaattggagcgatgacgagcggcggtcggaggagggaaagttcactagcgcgtgtgattggtggcaaaccccggggcaaggccttaggtaatagaaggacggtgtgttgcgatcgactgcaacgtggtaagatggctgacggcgtggcataactggaaagaacggcggcacgccggtgatggacatgcggccacgtcgccggtaagtggatgagcgacagagtggctactttgctccaagatcatccacggtgagatcttttctccagaggatcgttatctgtgtttagctgggtgggaatcacggcgccggcgtgaatccgagcgcgcgatcgccggtggcgaggggctgagctggcgacctgatcccttcattgtaccatcgaat

SEQ ID NO: 160646 - DNA, 477 bp, Zea Mays
cgaaccaatagcatttgtttgaatataagtgtggaaataagggggatagcgtttcctgctaacctcatagtaataggtactcagggaatatatgtcatcctagggatgaattggctagataaatatcaggcagttatcagttgtgataagaggacaatcaagttggtgtccccactaggagaggaagtggtgaccgagttagtcccgcctgagccgaagaaaggaagttgttatcagatggctgtcgaaaacagtgaagaagacccaattgagagtatcagggtcgtgtccgaattcctagatgtgtttccaaaggacttaccaggtatgccaccagagcggaaagttgaatttgccatagagcttcttcctggaactgcccccatctttaagagagcttacagaatatccggaccagagttggttgagcttaagaagcagatcgatgagttgtcagagaaaggttacatccggcca

SEQ ID NO: 160647 - DNA, 1113 bp, Zea Mays
cttgggatgtacgtgtctttctgtactccccaagtcttgtgcaaacatgatccttaaattgttctaattgtgtttatgttttgcagttaaagaaccttgaggatcacattgtgtttgagcatggctacgatatgagcagtcaaccggttattattgtaagtagtatgcttatcagacttgatattccttgaactctacaccaaccaattaagatctcaactgtaacaacttgcagtttctggagatattgcgagagtttggaagagaggagcagcgggctttcacacaattcagcactggagcccctcatctcccacttggcggcctagcttcgcttgatcccaagctcactgtcgtacgcaaggtttgttagcatagcaaattatacataccactagggcacagacctattcttttgttgaatacttatctgccatgcatcttgcccgacagcaatgcgatggcaatgtagacgacgaattgccaagcgtcactacctgccggcactttatcaagctccctccttactcctcgaaggtaccaaatatgcctgatatagactttatcaagcgtcagtatctgatggcaatgtagacttgatatacctgtttgttaatctgtttttatttttgtgaagatgtaaaactaacacctatttacctttgatatctgttttgatcgcaggagataatgagaaagaagctcaaatatgccattacagagggtctaggccctttccacttatcatgataacaagactgaggtccaccagatggtggaagagtagtgtacattattgtaggaggaggtagatagcaactgattgttgtacatttttgtgaatcacgcgacagctccagatttgatgtaaacagccatttagacctctcagtattctgatttagctctctttttttaaactaaaatttatctatatttttttggttgggaatcagatctaggcttgctcaagttttctccactctagtataattctctacctagtgtataaaacatgcatggcaacaaatatgtaaattctcgtacattttggatgaaataatatctatctcaactatattaaaacgctagttttgatgggtgtcatttttt

SEQ ID NO: 160648 - DNA, 1073 bp, Zea Mays
tgatcgcggatactgaactctgatcgaggcgttctggttgattaggtgaagtcaagctccaagggctgggcaggtgacgatcacaagcacatgtgggtgctaaaacacgaacaacaagggcgaggacggacctggaatcagctagccgcaagtaggcggttcacggcggcgcagtcgactgaactgggggaagaaggaaattctcctgctacggtggctaattgagggtgagaatgggtgcttcggcttcgtgataacatggcgcaactgactcggccttcaatttatagaaatgctaagcggtgacgtccaattttgaaaggagagaccggcggccgagaagagagatgagtcatcggcttgaactgtcgtggcgcttcctggggtaatttctccggcaaggaactgacctcttacggatatctacagcgacatggtacatcttctaagcacgtggcatggttataatcgccggcgaaatccgacgaggacactacagtccactgcgcggcatgtgtcgcggtgaatagtccgacgttaagcttctctcctttccccgagttgagatctttctctacccatgattatccgtgagtcccagtgcacgaatcgcgatgatcggcgttaatcacgacggagagtcaccggccgtgagatgcgttgcatccctaatattttgttaccgtaccatggcgcaacttctttagttgacctgacagagcaactttgagctcgattttctcctgatttcatgtaacaaccggttcaactctctgtatcaaagttatagcctaataaaccagctacaactttgctacatcgtgtacccacaaaaagtcatgatatcatgcttagaactgagtcccaagttcatgcaatctcactgtttatttgacttcagactttaaatagtctgacagcacgactttgggcataattttctccaaatttttcataacaacaatgcttaatcccttaaacaaagttgttctcctaacatagctctatagatttgatgtgttgaccctaggcaaattctcaatagttttggatctacagagccctaaagtcaa

SEQ ID NO: 160649 - DNA, 375 bp, Zea Mays
gcacctcctcctgcaacatggcaaactaacaagcaatatcgagattcacatgacgctgaataatgactacaactttaagttcatccttcagtccatccacaaatctggcagtgatcattgcaggtgttaactgggtttcatgtgccaacagttgatgcaacagttgatcaaattggtctatgtactcgctgactgatgcatgttggtgtatgtggtaaaactgtctgatcaacattgatcacgaccaaaacgagtgttcaaggcactacacaactcatgccaacttatatctctagcccgagactccatggaccacaaccaatacagagctgaacccacaaaatggatgatggtagccacatctaacttggaaca

SEQ ID NO: 160650 - DNA, 423 bp, Zea Mays
ggactacgcagtcaggacaagattacagttgcaacagctacatctggtgttgcggcttccatattgcctggggggaggactgcccattcgcgcttcaagataccacttactattgatggtggtgttgtatgtagtttcacgaaacaaagcgggacaacgaagttgctacaaaaagcatcgctcattatctaggatgaggcatcaatgactaagagataagcaattgaggcgctagacaatagcatgcgtgatataacggaacggcctgggctgccctttggtgggaagactgttgtgttcgggggtgatttcagacaagttctccctgttgtgcgcaagggatcaagggctcagattgttgctgcctctctatggagttcttacctctgggaatccatgcgccacctaaagcttgttcaaaac

SEQ ID NO: 160651 - DNA, 477 bp, Zea Mays
cctctgcctcgagctcatgatcggccaacagcttctcccacctttcaaacatttcctccctgaaggcgaggtccttctcctgccaagcgagatctgtcgcccgcttatccagggaagcatccttctccttgaggttctcctcggccagggcaatgctgttggccctgtcatctagctcccgttgtagcctctgcaggctgtccacagccgcagtctactagacccgctgctcctccaggattttgttgaaggcattcagcttggcctggagctccgtgacgacctcctccctctggtccaagtgctcctccttcttggccagcctcttctccttccgggccacctcctgctcctgggcgtacaccttctggaggtccttcttgtagtccttgcggtcccgctcaagctcgaaccgctcggaggcaaactggcgggacgctgcgttgttgagctcctccagctgggtacgccagtcgc

SEQ ID NO: 160652 - DNA, 805 bp, Zea Mays
aggggtaggggttttaggttctaagtgtcaaacaaggtccaaatcaacccaaattctacccaaggcctctaaatagtgtataaaactcatataaaaattttgggcatttttggaattaccatttgttttctaaaaatccagaactattgatttaagctattttaaatgccttaaaattccttatttaacctaaaaatcacacacttatttttattaaattctagggaaaataaggagtctaggaaaattggtttcacaattttatcatttttctactgttttttataattgttttggctctggagataaaagaaaaagaaaaacacttcaacagtcgtgggctcaaactggcttaggcggcccaacatcgcacagaagcgcgcttgcgcacgcgtccacgcctgcgttggccatcttgcaaaagggccctcggggtttctggctaaccggaaacagctctagccactgtttacagagtcactgaccgtttgcataaacaccctcctaattctaatcctttgcagaccgaagtccctgtcgacgagcgacgccggtccgcgctccggcgaaactattccggccagatgacgccatgactagagttctcaagcgacaggaaccaaattagctacctaccgcacctttcccctcacttaatttctgaattgaagctctacacccttctgcccacggtgtcagcgcgggtgattaagtggatcaaagtgttacggatcagcgagggctgggctggctaaattgaagctagagaaaggttcctgggttcactagagatgacgcacatgcc

SEQ ID NO: 160653 - DNA, 771 bp, Zea Mays
gggacacacaagtcaggactatttgcacatgatgtccttaagctgtacaacgaattgttgcatcagtttttttgaaacttgtacatttaaataatactttgtagcaggaaacatactctagtgttaagaacaggacatgtgggagacaaaataaatgatgtcctcaaatgttgcatacgaatatgacatagaagttcctagaaatgtgatatttgtaatagtagtagtaaccatataattatgctgctaagacaagaacagaaactaaaataatgtggcccgcaatgtatggtccgtattgatttgcttgtcgtcttaatcaccctaaacgcatctatcgtcgaacagattaatatagagttatttggtcacgccgtcggtttgtgttcatgaaaccctaacctaaagaccaaatgtaaggttactttggcggccacatcgtactggaatccgttgattcacatgagttcggtcaactacggaactgaaacataaaattttcgaatataaagttacaaacaagtaactgcgaagagggggaacaccatgtttgtacatgatgagctgaagatccggcccgcaacaacaagattcgaaccgatgaactctggatctaagcgagccctcgatggtcggagaagaaatccaccgatggcgagacgtaccggcaaaacggactgggatttgtgggcgcttgcgcttccgaggcgaacggacttcactcgtcagcaacaggacgtggtcgtcgtcgccgccgacctcctccggctc

SEQ ID NO: 160654 - DNA, 623 bp, Zea Mays
ttgagctcaattctaagcatgatctagtaagaatttgttttggaatactataacaaagatgaagatggtatgttagactaccactttgctacagagccttgcattggttgccaagcgaatttaggagaaaatccagcttcaggtcgctctgtcaggtcgactgaagatggatgccattgtacagtgatctgaataagaatagatcgatagctcaattcttcgccgccgacgaccgccgcgcacggattcgcgtttttagccaccgtgattcgtgctgaccgattggatagcgctcaaggtcacgtaaatatcgtcgccgtggataactccggccagtaaacaattccggccatcgtaccgcactcaccacgacggatttggataagctcgccggcggcagccgcctcacggcttggcgccacgtgccctggcacctccaccgcgtcaccgtgacccgctgtaatcctctgtccatccccggggagatggccacggtaacccgacactaatcgcgcgccagtaactccttgtccctccggccgccgcgcgtcgtcgctcaaattcccggccaccgctcatgcttactataaattgaagccaccatgagctccgtaggatcatca

SEQ ID NO: 160655 - DNA, 414 bp, Zea Mays
cctcagacagagaagatggcttgagttgattaaggactatgatttggaaatacaatatcaccctggaaaagcaaatgtagtagctgatgctttgagccgtaagggtcaagtgaacaacatcactactcatttgatgtcacaagaattgtgttgggaaatggaacaactcaaccttggattactcaataatgtagaagcaacagttatggaagttgaatctactttggaagaagagattcgtaaaggacaagagtctgatgagaaaattaaggaaattaaagctttgattggtttgggtaaagccccagatttcacggaagatgaacaaggcacagtatggtttaagaagagaatcagtgtacccgaaatcgagcacttgcgccaacttattttgagagaagctcatgattcaac

SEQ ID NO: 160656 - DNA, 773 bp, Zea Mays
attcaatcgttcttcttccagtatatcaacatcctctagtctagtggcctcagcttcagctatgttttcgaagatcaatcttggtgccccaaacttgagatcagcaggtagtactacctctgaatcatagaccataaagaagggagtgtttccatgcaaagctcggctaggttgagttctcaggctccagaccacatatgccaactctctgatccactttcctgcaaacttttcattcttgtcgaagactttctttctgagtgcttccaatatcatttcgttggctctttctacctgcccgttggctcttgggtgtgtcactgatgcatatttgatctggatgcttttttgttcacagaaatcaaagaactctgaactagtgaaattggatcccaggtcagttatgatgctattcggtattccgaacctgaatattatgtcttgtatgaattccactgctttagctgaagttagagaagcaatgggcttgtactctatccacttagtgaatttgtcaatagcaaccagtacatgagtgtatcatccttgagctttcttgaagggtccaatcatatccagtccccagcacgtgaatggccatgtcacaagtatggtttgcagttgctgtgctggtagatgctgttgttttgataagtattgacaagcttcacatctctggactaactcggctgcgtaactttttgccattggctagtagaaaccagacctgaagaccttcccaactagagtcctggatgctgcgtgtatcccgc

SEQ ID NO: 160657 - DNA, 477 bp, Zea Mays
gtatcacaaaaggtcattagctagcccaataatgtcctcatccactagttgtactctaataccctctcatgcgaatacaatgccctcaatatcatagaaacactatttttagtttcaaaggtgatctattgttttgaattctttatattccaactttttagcgactgtatggtggaaaaaaggtgccttaaaaccttaacctatgtttgtatagttctctcactcattgttttagtttgagaaacgatgtggcatattgatgtgtgttgttttacttgagtggacataaacaccgtctaggtatgccttgaatacatgggattataggaaacatggtatcacaaaaggtcattagctagcccaataacatcttcatccactagttgtactctaataccctctcgtgcgaatacaatgtccttgacatcagggaaacgtcatttatagtttaaaaggtgatctattgctttgaattct

SEQ ID NO: 160658 - DNA, 512 bp, Zea Mays
tgtcctaactgcgccaccgcattgccgtgcttcgttttagcttcccgtcgatcgccggagcaattgccacggcattggacacgaagcacttgcgccagtgaacgtttagtcctccgaccgccgcgcgtccttctccaaattcccggccaccgtcgatgccctctataaattgatggcacaggcagctgcgttaccttatcgtgagaccagagcccccattcctaccctcaatcatcctccagagctcaccaatttccaaatttccccaatttcggtctccgccgtcgtgaaacacgcctcgctgcggctagctcagctcaggttagttcataccgattgctccctcgtttgagtgctctcgtgtacctgtgatgcttaccaagtcttcaattcgaattgggagtccaccaatcgtcgggaacacgatcaagtgtcagtagtctccgcagttctcgtggacagaagagagtagatcaccatttgcacaattaagttagggaaaaggtttagga

SEQ ID NO: 160659 - DNA, 564 bp, Zea Mays
ggtagggattgcacattctcaatgaattctccaggctccgaatggtcggtcacgacaccgatcggattccaaattggcaatccattttaggaaccttgacttcatcctggacgacgaagaggaaatggtcagggccccagaagtgtaacccttttctgcctagggtctcgacactaccacgatgaccatgttggccccatgtcgtttgcacccccaaagtagtcgtccgtttcgggagcctcgacttcatcatcaatgaagaaggcgagatggtatgggtgttgcccactcgaccttcttcgcccgaaaacctgaatgttgttgcggaagcacttgccgaccctagcctcagcctcaccctgcaagggcaaggtacagggcagagatcatacttacccttcaaggccgatgagataaggcgacatattgtaatctatatggggcccaacccctcatatgatgatcagtgggccttcttcttgttctacgtggaactctctgtgttctacaacaaggaaaggttgtcctgccacaacggctctggtggtagccctcgcgagtttc

SEQ ID NO: 160660 - DNA, 341 bp, Zea Mays
gtggtgcggttgaggatagagcgaggcgcagcaacagcagggacggctccaactcttccttctcggttgctacagagatgaaaacatcgtctcggtaactgacatacggaggaaaagggaggagaaatatggagcactctagaaactctctcgagacaacgggagggaaattatacaaagcgattaggaaaccgttgctcgaggaccggaggtggatggagtaattgtatgaagcgaagcacagattaattatttataagtaatacaaaatagttttaatgcataaaaatgtttagaagagtctaaaaaaattcccatacatgctttcgagtttaataaac

SEQ ID NO: 160661 - DNA, 787 bp, Zea Mays
aagaagaatagcagccgcccctattgccgccgttggtaatgcccgcgcatggggttctctggctttggtcggctgcttcggttgcatcgcctagagccttgtgattccacgccggtgcgaactcattgtcgcgcctggagagagatgagattgagggagacggtggatgcttctgtgcgactgaagttatgattgcacgatggcgacatgcgcccgaccgcacccacgctgcagggtcgtgaagactggtcaggtgtggagtcctcttcctgggacggtgaccccgggttcacccaccgttgagccttgctgcgtggtcagaccccccaccattaatcatttcttcggtaagacgccatatctagttcattataaattctgtgtcgcgtagctagaggttgcggtatagttggggcgcttggttgcggaaccgtgtgtttgctggtgggaaaacgtcgagtgctttggcgtcgctgctgtgccggcgttcgagggtgggagacgccagtcgccggcgagcgcacctccgcgaacgacctgggccttttatcgctcggcctcggttggggaagaagttcccccagccgtggattctaggatgagcggtggagattagaccacgcgcataccctctcgctaaattcatctcggcagtaggatcgtgatcggagggttagggtcggatctcgggatcgtagaatactggccgttggatctagatccaatagttctcggtgcgtaccgtttcgacaaaacctaaatctaatccccgccatcggttgtcgat

SEQ ID NO: 160662 - DNA, 597 bp, Zea Mays
ctagtccacctaaaaaaggaaaaagttctatgataaaggtgttagaaggaataattaatgaaatgcaaacatcaaggactacagatactaaagttttcacccaatttacaaatacccagcaaaatagaagtacactacccatagaagaaattgaaagttgtttgaacttggcagaagcaagtggagctgataaagcatcagatgaatactttgtggccaccaagttgtttagggatgactacaacagagctatcttcaaccaatttgatacagcagaccaaaggttcaagtggctgcagagatggtgcagggagtactatggttgactaggagattatgtcatttgagagtcttttagtctgttgtgtggacttatgtcatttgagagtcttttagtctgttgtgtggacttatgtcatttgagagtcttttagtctgttgtgtggacttatgtcatttgagagtatgtgttgttactacttcagttttatgccaaactattctctactactacttatgtttctaatgtaggcgcccacaacacggttctgccgatctctcccacgcacgcgcatggaagcaggcaggccttccccg

SEQ ID NO: 160663 - DNA, 693 bp, Zea Mays
gtaagttttcctaagactcagtttacccgtgcagtggaccgcgggtttaatccgcagaaacggaggggctcttatgcaaaagagttggccgaaggggtacgggccaatatgtgccgtccgatctgtgtgcagcgggtgagattagatcgcgctgagttatgaaccggtatgtaattataaccacacgatcgtgatccgatggcacatgatcaatagatcgaaagggtatgctcaaactaatctctaccgtccgtctcaaatcctaccatccggagccctcttctagtcctaactgttcatcgcgagatcaatggttctgggctcgtcttcttccccggctacagggcacggtggcgatccccactacggtggcataatcgccggagaacctaaatcccgcctccggcgacctatcagggtattaaacgagcaagaggagatgacggcaaacgccagaaggtgtcataccgaaagtttgaagcggcgatgagagctgaccacgaccacgacgcatggtgatcccgctgtcgaggacgaacaacggcgaggtgtggccatgactgtcgctgagtggacgaacaggcgaatggattggtcctgggcaggagtgggagcgcgcggagaagggtaccgacaggatctcggtggcagctgtgcgggcgagcgcaaggacatcccgccccgcgacacaca

SEQ ID NO: 160664 - DNA, 304 bp, Zea Mays
tgcttaaacttatttaactcataaccacctattaacctattttgtttacctaagaatctgccttcactacatgtcccaaatttggataacaacttcaataacgaagattgaaggtgatcaacctcataaaatcaaggaaggataaggttcaagcgagatcttcaaaggaatcaagatccacaatcttggatggagtatttccttaccctatcctttcttgcccaaacctatctatgctttaaaggcatcttctatcctacataataaagtggacatacatatacacacccatgttttcctaacc

SEQ ID NO: 160665 - DNA, 519 bp, Zea Mays
acaaattgagcatagaagtgattccttctggcactttggattttatctccattgagccaaccttgctagatcaaattgtcatggcacaactcagtgataatagggtacagattatcgaggaaatgctcacctagaaagtagaaaagtgtaagtgctttcgccaggatagtaagggtatactatggtttgaagaccgacttgttgttcctaaggacttggaacttacaaagagaattctggatgaggtttatctctccaaattctccatacaccctgggagtaacaagatgtaccatcacctgaaacccctatactggtggacgaggatgaaaagggatatagctaaatatgtgtctaatagcaacacgtgccaaagaatcaaatcaagtcacctcaaagcagcatgcaccttgcaaccgctcacaataccttcttggaactgggatgatatcagcatggactttatcgtgggattactaagcacctcactgagacatgattccacatgggtcattgtgg

SEQ ID NO: 160666 - DNA, 845 bp, Zea Mays
gtgccttctccctctccctctgcccagtggggccgctctgtcggcgctagttgacctcgcccacgcgctcctctccctctcttcctcgcgggcccgcctcgtcagctcgctgaaccatttcccccgcacacccgtttcctctcgctgcgccgtgggacccccctgtcagctccaccttccccacgcctcgtcgtggaccagcacgcgcgcacgcacgccgagatcccaggccacgttgcccgcccatgcaccccagctcccttttgagcagagcccgcacccgcattcgctcccccatcccattttgcgcaagctcgccctctctcgcgctcttccctcaccgctcggcctcgccggagatccgcgcccgccgtgccggtcatctagctcgctagacgccacgccaaacgacctcgagctttgccctgaggtgagatatatgttcctgttctaaatttccccgattatgccttgtcgccgggcaatttcggcttcgccggagttcgaccgtggcggtccgccgcgcccgcgcggtgaccggctgaattggcccggtctagtgcccccgcgttggtctctggtgttcccctcgctctgctgaagccagtccaggccctagcgtgcctcagaccccctccccacggctggaattcctcactggagttgccccgacccacccagagcctttcctccaccgttctcccctctctgaccccggcctcgtagtcaaatccccaccagtgagttcgccacgtcttcctcttcatttctagccaaccacgatgaccctggaaccgtcgtagcacgcacctgccccaactctggtgacctcaccgccgcgagga

SEQ ID NO: 160667 - DNA, 608 bp, Zea Mays
gccgccctcatcgcctccattgtagttgttgtcgttgccgctgctgcggctgtcgccgccatcatagtcgctcccatcctcgccaccgccgccctcctcatcgaagtcatccgagtcatccattccttcgagccctgtccgctcgatggatcagatgtaggccctctccgccgttgagagccccatcgagtcgttcgagccctagaatgacggtgagagggggacagacgatggagactccttgcccttggaggagaactgctcctccgagaacttgtagtcaccgaagtcctctgaagggggagtcgaaggacgcttttgcttcccaccatggtctttcctatcgtgcttgcccttgccacctttgcccctagccattgtggttttcaatggagaagtgaaaacgagaagagaaaccagagcgagtgaagaagacggtcgcaagtgggcggtctatttaaagaagccaagaggcgacccttcgactcccgtccatacagcgaacagtcgcaaagacttcaagagctgtgtagatttccaaggagatgagcaagtcactgacacccattggtgtaacatggcaccgaggaagagtaatatcaaccgct

SEQ ID NO: 160668 - DNA, 579 bp, Zea Mays
caccgctccgccacatctcctcgccattactcgcccaccagccgaattggcgccttgcacctgccccgagccatcccatcaccccgtctgcccgagccatcccatcgccaccactgtgcaccatcatcgccgccgagcaagcatcgccggtgctcgccacctctcctctttccccctccccggccgcctataaaagggaccgcccaagctctagcttccttcacaccagcttctgtcacctctcttccccttccccgagctcaatcgagccagcgcgccaccctcttcctccgctccggtgagccctccctcccttctctggtagcctacagttcaattggtttggctcgcaaggttcaccgctccatcgcgaacacggcgcaccctttcccttcacctattacaccagtgggcatcaccggcgacctcaccgccacgagcgcccgccacctcaccgcggaccgaccattctaaacccccaccggccaaatagacccttctaccacgaccccctatccccacccgtgcttcgccacctccccgacaaccaggaaccgggtcaccagcggagaactgccg

SEQ ID NO: 160669 - DNA, 409 bp, Zea Mays
gcgccaataaaaaatacataatttgactaatgaataatatgtaatttaacaaacaaaaattgataggctgccttaaaaaagtaggcaaattattttggacgacggttacgttcgttggtatccattgatttcgtcgttagccttcgctacaactactacaactacaagaaacaactgccaacgactatggcagcagtagagcaacagtgtcggtacaagcagatgcggcaaatgcaggttctacgcagaagctagctcattcgaggggctgagcagcatctccgtgctggccattctgtccgatccaacgagcctcagccggtccgggtgcacctcgacgtgtccaaacgcatcggtgcccggcgggcactcgagcgcggcctccagcgtgcggtggtgcacgccgctg

SEQ ID NO: 160670 - DNA, 753 bp, Zea Mays
gcgcgcgcgaccacatgggcaagacgacccagcttggcccgtttgcgaggcacagcacgagcagcatggagacgacaccgtggatgtgggcccatgtgccagtgagagggaggggaggacggcgttaggggggaaaacagttgtccacccgcggggaaaaatcgttcgccggcgggttcgactgcggttccccgccagtggcctggttcttgacggttagggagatgggttagtacgagtaggggaaggcggttacggtggcggggttgattttaccggcggtggttcagaagggaccgaccatggctaggtggcggggctctcacgacggtgaggtcgccggcgaggccttggggcgtgataggggtggaaggtggtgttctatgtccgtggtgatgtagtgaagttagtgagctatcttaatttgaccctaggctactggagaggggaggtggagagctcatcagagtgaagggaggcgtcgacgctagctcgattgagcccagggggagggagggagagtggccgaggccgatgtgaggagaggtggagcttggggaggcctttttataggcgcccgtgggaggggagcggctgaagcgggttggcgccaatgagatgcacaacgacgacagtaatggcgacaaagctggggacgtgacggttcggggggggtgtcgtgtgagggtgcgagcacagtgggcgggggacaaagcggtgcctaacttcactgatgtagaagtaatggcgggg

SEQ ID NO: 160671 - DNA, 392 bp, Zea Mays
gttctgctgattattggagttgttccgcctcggatatgggcagtctttgatgaaatgtccagacttcccataattgaagcaaccagttgatgagctcgggagtgcggggaaacgagcaccaggggcactcggctgagttgttgaggtgggggcagtggcagggcagatgaatacatgttgtttgaaggggtaggagggtggacgaggtgaagaacggttttgattgaaaggtcggatcaccaacctttgtcgcttttcaggcccctggttggacctgtcaccaccaattccctttgatttgcctggcctgcatacttagcttcaactgccagcgctgtgctgacaggcctgctgtaggagagatcgaggcaagtggccatcttccgttgtag

SEQ ID NO: 160672 - DNA, 610 bp, Zea Mays
gggttatggagtcgtctaatcctagccattgaatacccaatcgacgatcagggcgtacctacacgctttcctctctcccctgttcactccagccggtggtgagcctgatacccatggcggcgacgtcgccggcgcgaagcgcgtggcccacaccgaggccctcaacttagaatgacaatcactagacggtgtagagcatcgagaaaacccattggatcaatgtacttaccggcgtcgaggtccaagcgggctggccacggtgaagtgccgaccgtggcgaagtgttgacgacggcgaggaaattcgcttgccccagacacaggttccgccaggtgagggcgcgcacacatcaaccaagcgacgctgcgaagctacccgaccaaaatcaaggccctggcattagcgtggacggaaaatcagccacggcggcggtgatttccgaatcccgaacgcacacgagcttcaccctgcaacggcgccctgcccggctcgcgatagaagacggaccacctccgcggtcgagccccatggcggttcaggcgggccttatagggggcaaggaagtccgagcggagcagcagcgagatccccgcgcggattttactccctg

SEQ ID NO: 160673 - DNA, 630 bp, Zea Mays
cgcaccggaggttcgtgttcggcgggttccggcggcggctgctcattcgcaggccgtggcggcctatgctggtcgccatcccggagtgaccgatcgattaatcgcgtgtccggtgagttggtggcgtgaattagaggcgctgggggtatgattcggcattcgagtgcgtgagtcagtccgatcaacttcgaagcaattgggggtatgattcggcatttttctggggtgcgcttgtgatctgtctgtaactttgcgtgctcgctggttcttccctgttccttcctaagtcctaatcctaactagaaggttccgttcttttttctttctcaccattgaacatacaaagttatttgatccgaaaaggaatttatagcggaggatcggagtatgtttcatgttggtgtagtgaaacgcggtctgcaacgacctcggtccccgatacagcaaacccaatgttggttggtgtagtgaaacggtctgcagcttccctgccaatatttcagttcaaatttgtaaaatttctcaaacggtgtgactgagcttctttgcagtatctctggatagccgcgcccaagcttatcggtaaaggcaaagctgctttgcttttacttttgcactagttgccaaatg

SEQ ID NO: 160674 - DNA, 700 bp, Zea Mays
gagaagttatcttagacttgttgctcttataaatgcggaattaacttagacatcaactcaagttatttgaatcaaagtccaagcaagagaacttagagagggagagagagacgaacaaatcgcaagcaaatgcaaatatacacaaagacacatgtgatttgttttaccggagtttggttccaaagaacttacatctccattgaggtatccctaagggcgggatctcttttaaccctctcaagtgatcccaacgatcaagattgagccctcggatcttcgatgatgagagacagagtctccacaaggtactccacaagccgaagcctcttgttagcctttacaatagagaatcaccaacacaagagcaagaacacagcaacacaacaccacaatgcaaatcacaagagcgcactctctctagaatgactatctctactcaactgaggttctcgagtctctcgaaatggcttgaaggtgttgcacaagtgtttgggactgaagcacatctctagtggtgatttgtgtgtcgaattaactttttagggtatttatagccccaaacacctcaaagagccattgaattaaatgttgaaattatgctttcctcgggtacaccggacctctgactgtagcagaatcatcgggatcctgattgaagccttccttctatgttggcatcggatcagctcgatgcaccacc

SEQ ID NO: 160675 - DNA, 272 bp, Zea Mays
tcttgggtcacacaatttctcaggaggggatatcagttgatcctgagaaggtacaagaagtgatgaattggaaacccccgactacagtgaggcaaattcggagttttctaggattggcagggtattatcgacgatttattccggacttctccagaattgccaagccaatgactgagttattgaagaagggagccaaatatgattggagccagaagtgcgaagatgcctttcataccttgaggcagcatttgacaacagccctagtgctggcc

SEQ ID NO: 160676 - DNA, 654 bp, Zea Mays
cggctgttcatgacctcttattgtgtggaatttcattttttttctgtgtaaatatttggggattcctctctctctcgagaagcttacaagggaacagattcaacccataattgattggatagctgatcaaccaccgggttggaaatctgatatgatgaatagggattgtcgtagaattcaagtacaatatgttctctctagtatgttggtctaccttgccatgtctcttgataaacctatgtgggccttaaaagccatcgataaaatacgaaggtgttgaaggggtttcttgtggagaggacacaaagatgccaagggaggccactgtcttatggcttggggaaaggtttgtcggccacttgagatgggcggccttagtatagccagcctgcaggagatgacctgggcattgcaaatgagatggttgtggcttcaaaatatggaacctcaacggctctggtcgacattttctatccaggtgtctaacaaggttcaggatttcttctattttggtagtagaaatagtggttggaaatgggtctgcaactttattttggatagaccgatggatccatggaaagaggattgttaatcttgctccgtggcttttcgctaccataccatccctaagcaaagagctaatatgaggacggt

SEQ ID NO: 160677 - DNA, 842 bp, Zea Mays
acaatacgcaagtggtaaatcccatcaaagcgtttctctcctgcaacctgtacgccatgtgaaatccggcctatagactgggcagctccatgcgactgcgccgtgatgtcctcgacgcttattactcccctaccccgtacgccatgcgaaatccggccttcacgcgctaggcttttttccctgtcacttgtaagatttggggcctaggtacccttggattcatctctacgccacccacacgccacccacacacgctctgcttcgcatctacaccatcaagtggcctatacccacggattcatctggttcgtcgtgcacgcagacagattcatttggttcgtattctggctcttgctgtcggcgagaatctctgtccctccaatcgtgcttttacaaattgaaacgtgggtgcgtcaggcaagtgcctcagtctttttcagattaatttagtttttcactagcagatccctttgttgcttcacatgcatgtaagaggcaagaataagagtcacatgaaattgtggaactacaacaaaacaatatgttcatataatctttaggtggcaaagcttctcccaagtacatggtacctagggatgaaaacggtcggtaaacactaaaaccattaccgttttcatattttttatcggaaacaaaattaagacacaattccgaaaaattctgagacacaattccgaaaaatcacatgttggaaaattctgagacaattccaaaaaattccgaaaaataattccaaaaattccgagacacaaatccggtaatttccgacaaaaaccggtaaccgaaggaaacggtcggtaaaacaccacaccgattccgat

SEQ ID NO: 160678 - DNA, 543 bp, Zea Mays
gataagctcgggcaggtaaatatctggcgccgggattgggttgagcctcgtggcggctaagcccgccgtacttcctccccagctcaccggtcgctcggataactctcaccgccgtcgagcggtcgccgttgcgcgccacgtgcttatgcgctagctctcgtcacggtgaatcatgcggtgcatgtccggtgatcaccggagcacctgccacggtgaaaggccacctgtgtcatgcgctagagcccttttcccctccggccgccagctttgctcggctaaattgagcgccaccacctaagcctcctataaattgccgccaccactcgctctgttaggtaattgcgcaaccagtggaaccatttgtgccttgaatcgttccctagagctcgagaatctcttgttttccccaaaacagttctccgccgctgtgaaagcacccttgccgtggccagccctccacaggtctgatcatgccctctctgttctcgttttagcatccttatatactggtgatgctcaccaacccgctcaattgaactggac

SEQ ID NO: 160679 - DNA, 2655 bp, Zea Mays
ggtcagtgcccctcctcagttctcgctgttgtggtccggtgcccgtgcccataccggcatgtgaggactgttcaccgggttccaaaattcgataaatccgcgccttgtcgtgcctttgaccgtgctccgtgtccgtcgcgtgctttctcaacagcgtcggtgcactgtttgttcgtccttcgtcgagcttcctgaacagcgtcagcccactgtgttcctgtccttccactgcagctcccatgccgctgctttctcccaatcccattatatgaagtccctctgctgttgtcttcctttcccccaactggcaggcgctcctttcttctcgtcgactctgtcgccgtcgtccgttccttttctttggatccctatttcttttgttttgattcctttccgtctctgcaccagattcatgtgcattggctcatcgttcatgtcgctcgtgtagatctgccacgttggagacctggtgaacacgcacaagtcctgaaatcgtgcagtctgtcccttcttcagctatttgaggtaatccttggttccaccgttccttgctttgttatgttgctttggtttttttggttcattgcagtacacgccattgctcttgtgttcttgtgttcattctgcaactctctaataagtgagcacttaaggactctatggactccgaaatttggtcactaaagtatacaataagtaatgtttttttgcacttcatgaaattctaggttatgttcttgttttcagtctgcaactctctaataagtgagcacttcaggtttctgtagactctgaaatttggttactaaggtataaaactctaataagtagccagttttttgtctcaaagcgcagagaactatgaaatttggcatactattaagaagttaggctatgtcattcgtttctttttacatttaccatgcaatgtttgtaccatcatatttctttgaaggaaaattaatagttttctttagggatttttatttcttttgtttacaaagtggaactatttggttgtcttcttcattccagaatctagagctctagctttcatagtaaaataggacatgacacattcatacatatggcaggtgtttgtttctggagctattgagctcaagtttttgtatcataatgttagtgtgtagaataggtgccaatcttctagagttcagcttgccatgaataattaggttgcattttttattcatcatgagtttaacatggaataagtcacgaagttatgcttcattttagttggttggcatgctccctcgtatcttgtttatccatttgaaaagcaaaccgattacatgcctgtctgctttattcttcttgtcgagttgaattgtgtttgtagcttggtttctttgacatctcagttctaccatctactgcaaactggttgttttatttctgagtgcccagcaggattagaaaaagctacacatttggcaattcctgaatccagtgccacctgacataaagtatatttggttcatgttaataaagaacttactaccaactgtagatattacctcaactgatattggttttcttccatagagttgtggcaacgccagcaactaattactgaggttattcatggttccatgggtctaaatatgtgtcattaaatttaagtttgcgtagctctagttctttaaaattgggaacccattagccatacagttcttgtaaactagcttgactcccctgcaagcttcagtcttttcattgcttgttacttgctgcttttgctatttatagtgtgaacacggctgcttattgctgcctcattgtttggtgatgcttcttgttgctttttctattttaccctatacctgcatttttttagttatatggaatactttcacagctagctttgttttaggttccatatctttctatgtgaaaggctgtaccaggaagtacgcattaaatactgtcatacattaatagtggtgtctacagcttggttgatcatggaacacttgtgcacctatttttgatttagggcccatatcttactctctgaaaaattggatctgcccttgtgaaccattgagaacccttagatgtcactgaaaatggatgctcctctaccctgaatccccattcttgtttagcctttatatgcttctacctttccaaactaggtaacaacaacgcgttagaataaataggctagctttggttagaagcaaaggaaactatcttttggtatgtagtattttcttatcggttccattccttcccgtcaaacacgtcgtactaccaatatcatcagatggggtgtactcaggtggcacttccttatctgtgcctatgtggcaaatcgattcctttagagtggactttttatggagaaacatatttgacaaataggaaacattgcctctattacatgcgtaattatattacacatgtaggaaacgattgtattcagcgatttcgcaaagtctatactgatattatgcgttctttgggttgaatatggccttaatttcagccaatatgtccctttctctttcacatagccaatcaaacattcgttatgtctttgaacagctactatcgaacacatgaacccacttgatcagccattcgcttcggtgtcggcacatgcgtcgcgttatgcgattccattcc

SEQ ID NO: 160680 - DNA, 1034 bp, Zea Mays
cttggatggcgggttaatttcttaaaaatgtgagggctcttaagcatatatcctacgacgaagggggtacggttcattatggactgcccgatcatacccgagtggcctagattagatcttcataacacctggaccaatacgagttctcaataattggatctcagattcgtggtcaaggtttggccacaccatcgattaatctcctctatccgactctgatccagtggatcagatcaaaaaaatgaaggggtacgtggacgctcaatctcaaccctcggttactcgatcaacggccatgtgcctcatccacaccacaactcttacccacggcggcgcagaacagggccccacgatagcgtattctcccctacggcggcgccatggtcgccgagcacccaaactctccccacagctccatcatcgacacgattgggaagaaaacaacgagaaggctactacggtttggatagtaggggacttaccagagttggtgaggtgatggcctgtagccacggcgatgggaggcgttgtggctgtgaaggccgacaagggattatcggccggtcaagctttaggagtcttcaatttagcgcgatgaagaacttgggcacaattttgagcgcagtatagaggcatggaaggggatcactaacggtggccgcaacctttctcttcgccccgctgatggctcactctgatccccaattgctcacgacggcggtggctattaacttctatgatagccctcggcggtatagtactagatggccaaggcagcgccgagctcgggttttatattggagcagagctaggatcgtaggggggagaatggttgaatagcccgaactttatgcgcgttttgttgaggggatagggatggtcctgatggggcggttccatggtttagtgaaacgagccacaaccgaggtgtgctgacaagcaggcaagcccatgcgcacgcaagggagtggtggctgtcgaatggggcccatggtccagtggctggctgacttgtagggtctccctgtcggcac

SEQ ID NO: 160681 - DNA, 488 bp, Zea Mays
aggccgcgtgtggcgcagcacccgcacgtgggagtgtggggaaccccggggggactgggggcacaggaagaacaacaccacgagagtctagagatcctgcagaagacatggtcgacagtcctataggagggactgtcgggttagggaattcatctaaaaaggtgaagtccgcagccgtgggcggcgagggctgctcagcgaaagggaaggtggactcgtcgaagacaacgtgacgagagatgatgattctattggtggtaggatcaaggcatcggtatcccttatggtgagcagagtagccaaggaagatgcaaagggcagaacaaggtgcaagtttgtggggagcggtggccgagagattgggataacacttacaaccaaaaacacggagatgatcgtaggacgacacactaccaagcagggcagagtgcggggtcgagaaatcgagcgtcttggttggtaagatttaaaaggaaatagggtcaaac

SEQ ID NO: 160682 - DNA, 468 bp, Zea Mays
gtatatcacccgcagtccaacggagttgtggaacgtgccaatggaaaaattttcacagctgtcaagaagatgctcctcgacaaaaaagggcaggtggaccgacttgttacctgaagcggtctgggcgctaaacacgactgagtgcagggcgactgggttcacccctttctgccttctatatggatcggaggccatgaccccacaagaaataaagcatgggtccccgcgaatagttgcatcagctgtccccgacgtggacgaacccacttcgaaggatcttatcgatggagaccgcgtcttcgctctacaggctctaaataaataccaagcccagacaaaagcatggcacgacctcgcagtcatcccgcgggaattcagcgaaggggacctcgtactcgttcgaacagctcggacagagtccaggggcaagctggagcccaagtgggagggccctttcattgtcaagac

SEQ ID NO: 160683 - DNA, 1709 bp, Zea Mays
tatttgacatatcagtctctaaaagaggcactagcctctacctatgtacagagatatatccttactggttggctaattcttatgggctgtttttttccagtgatctaggtacttgctgtttggggggaattttgtcgcagcttggaggagaccgctcgccattttgcgttttcgatcgtcggtgagtttgtgtgcctatacgcctgatctgttttataatgtgttgtttgttacgagccgatttattcactagtgttatgtgacgttcttccatactatgcgatatatagagctatgcctgattctccatgtgtgcgtgttgcgagatgccacgaagcgaagcgcccgaggcacaatgcaattgcacagggttagtcctcacaagttcgctgctttgtttatgcatgcgatggccggtacccatcctaatttgcgatacttctcttgcgggccaaaaaatacgcagcctctttagattgcccaatctttgagacaactgatgccatcgcatttttcatggtgaagacgaagtagacccatctaacctttcggggacctctaaccagccaatacctgcgctacaggaaacacgtgcgtacacccatgttttttcagccattacttcaacaaaaaacaatatggtgttagtgatgcttatgtcggcacaggtagtagatctgtaatgtcattcccttcaacgcttgccgcatccaataggcgatgccggcgcagtagagtacatcacatggtacctgacgagccattgtcaaccacgcttcctttggacaggtcatacgtagatgctctaaaaggtgtgtattatgcccaacattcctggtaacattcttcctgctttgctttggtgctaccctttctcttcttcctgtgtagtgcctaccctgagaggtcatactatggtggacctgaacatgtatacccatacagccatgctgttttctggttccaagagcgtgttaaaaatgattcctgctacacccagaggaaaattgtgtacaacctttgctgcagaggagggaaagtgaacctaaaaccgtttgagcgtccgccgcctttgcttgctaatcttttgagatttgatggaggtactcgctcaaggcgtttattgaggcttatccggtcctacaattcattgtttgcattcacctctttcagtgcagctatcgatagaacgataaataacggcactgcaccctacgtttatggggtggtgcaccataagattggcaccctacttccacagcgtgggacacaaccataatttgcccagttgtacacatatgacacggaacatgagacctagaataggctagggatgtttgagaccgatgatggcgctggtggccagccagaccctgaaatagcgtcggcgctgctcgatatgctgaatgaaaacaactcgcttgtcaaagcgttctgatacgcgagagagcgccttgagcgtgagggtgatcaaaagataacactcagattgctaggctgcaacacacgccatgatgtacaatacaacctaccctcaaatggcgagatcgctgtcattatagttggcgactacacggctggggaatacacatacgatgttcttgtgcatgatagagagtgtggcctaaaacgtgtttcatgcttgcatccagcatacatgcctttgcaatacccgttgttgtttccttacggtgaacatggcttccatc

SEQ ID NO: 160684 - DNA, 813 bp, Zea Mays
ggacaaactggattctgggctgaattccctccccctcagcccattcctctcaccactcgacccacgaagataaaagtgccgacatgtgggccactgccgtcagtcactcccccgcgcctgcgtattccctctctcgctgatgttgcggggcccactgctcaaatcccctcaccaatatgcgtgtgttcccagtcctgggcctctatcgtatgggctccatgtgttagcctgggcatatgtcgctgacgtgtgggaccccacggacaggtccgtcttcgtcctcccaaaatcctaccagaccaccgctcgtcgcgcgccgttgcaacgaccgccgcgtgatatccgccgccagactggggcatcctcagccggagctctcggggtcggactccaccgtcgggtataaatgccgagccgtgcgcccttcttgctgcccaccatgtgccgcttcgtgaccgtcgtgtgcgcatagagaggagataccgagcgcgtcgtcgctatcgattcaagcacctatggccattcgaagcataaagatggatcctagggcttcgctgggtgcccaggggcatacttgttgcggcgctaggatcagagaccagctggttgttggggaatttctaatcgtcgttcatatgcgaccgcgcttgcgccgtgcttcgtggtcgggcctcgccgccgtcttgagcaccggtatgaccgcctccatggcattcgttttttttttctgcaccgcgctgcacctatccgatgtccgattgaaacgcctgtgcggggggtcgatgaacaccggcgtgcttccgctgctgttgc

SEQ ID NO: 160685 - DNA, 998 bp, Zea Mays
ttcgacggtgaagtcgaagcccagaagtttgcccacccaatgatgctgagggatcgtcgcgaggcgctgatcgagcaggaacttcaagttgtagtgatcggttttgacgaggaagcgacgcccctagaggtacggccgccaattgcgaacggcttggaccaggccgatgagctcgcgttcgtaggcggcgagggcgcggtgtcgtggcgctaccggcctgctgaagaacgccaccgggtggccctcctagacgaggaccgcgccgaagccgtgtgacgaggcgtcacaatcgacgatgaatggctttgcgaagtccagcacggcgaggatcgaggcggaggagatcgccgccttgagggcgtcgaaagccgttgctgccgcttcggaccactcgaaatcgtccctcttaacaagggtagttaggggcttggcgatggtcccgaaattgtggacgaatttgcgatagtatcctgccaagccgaggaagccgcggaccgcccgagccaaacgtggaactggccactcatggatggcctgcaccttggccggatccatggcgacacctggcttggagatgacatggccgaggtacgcgactgaggtggcgccgaaagcgcacttggtgcgtttgacgaagagttggtggtgccaaagctcggaaaagacagcacggaggtggcacaggtggtcggccaacgtcttgctgtaaattagaatgtcatcaaagaacacgaggatgaaccgacggaggaacggccggagaacatcgttcatgagcgcctgggatgtggccggggcgttgcagaggccgaacgccatcaccaggaactcgtacaggccatcatgagtacggaacgcggtcttgtgcacatcctcagcccgcatccgcacttgatggtaacccgaccgtaagtcaagcttggtaaagaagcgcgcgtcgtggagctcgtcgagtagctcgtcgaccaccggaatgggaaaggcgtctgtcggtaccc

SEQ ID NO: 160686 - DNA, 669 bp, Zea Mays
tttcaagtcttcctaacgtcatatgtagggtcgtgcgctgttgtacccctagtatggtattccatcttgtccgtttggtacatgagtccctatggcttgcttggtgtcagcgttgtggtacctggcggattccgcagagttggcttatggtaaggttcgaggttgtgtctggtaatgtttcatcttctgtcataccccttgcatcattatatatcaagcatgcgtaggtatacgcgtggtatggggtattgtttcgtcctttccggcgtatgggttattgtagagactccagtgttgaggtctccgtgactggagttgaccggccccatgagttagcgagggcacttccgtaggcgcatgtgggggtgttccatcgagtctgcctgaggcctttcggtactgtaggtacagtacgatcgtgatttggtgattttgtgtcttgtcgtggctgtcgtgggccgacaacgtcggcctggattccttctttgtgaccctgcctgatgggggtttggttgtttgccccgcctcaaagacttgtttggcggggacttggtcggtcgtcccgccgcgcagacttattgtctgggcagggacttgatcgatcatgccacctcgtagacttactcgacgggagtttggtcggtaaattggctagagagaggtttatag

SEQ ID NO: 160687 - DNA, 614 bp, Zea Mays
aagaaaagaagatttgggcactcagctcggaaacgatcgctcgaaacggggaatttggtgaattttaagcctgggatctcggattggcgtgaaatttggcaagtatgttactgggagtgttgtgaaggtgcctgaaaaatttgggttcaattggagcaattttggctggtttgggcatttcaccgaacacttggcatgcggtgaattaggttttgggagattgaggcaaattaggttgtgaaaccctcccaaagggagctagaaacctgcaggaatacacagtggggacaattgaacacattccacctttgagattcattggatttgacaggaatttgaaaaatggacaaagggtggagaaggagtgcctcactgcctcactgaccgatagaaatagagggaaggagaggggggaagtgctgctcaccggagagggaaggagaggggcacgaggtcgccggagagtcgccggtgggggggaggtcgccggcggaggagagacgctagagagacagagagaagcactagcgggggagtgaaaggagcctctggctcagtctcgggctggaggcctttttttaaaacgcgatatgggcgcaccggacagtctacag

SEQ ID NO: 160688 - DNA, 752 bp, Zea Mays
caaaattgtccatgcggtggtaagtaataatgtcaggtagttccattcagttttgttcatgtcgaacatagtcacactaaaagctggaaatggatggtatttttgtttcagacttcatttgttaagcattgatcttgttcatacatagataaataacttcaagatgaaatgtgatgaattgacagatatatgtacctcttttagaaattactcgccttaaaaaacgcatcatgaacacaagaataatcggtagtccttttcagcaatagttgtttcaatcctgcaaggtcaaaaagaagagtatgttgatagtggaataactttttgttgattgagaagggtttcatacccctaattttatccccagcatccgttgccctcgaatgcctttattcaggtacaaggaccaccactgtggaactcagcaactgcggcgctacttatgaactggtcccgtgattcaaacacagttatgggattgctcagattcagagtgtttttcaaacacagttatgggattgctcagagtccttggattatctcaatcattatatacagctaacatgcatttgctgcccgtgtcctgtgccataaaactgtttgcctggcacatttcaaaaccttaggccaacttaataacggacggtagtacagtaacaaaaaggctgcttgggttgtgaggcataaaagttgttaccagcgagtacaatagagtttctgctagatttctgaagacgacaagttgccaccag

SEQ ID NO: 160689 - DNA, 1472 bp, Zea Mays
acctgcgacgcagaccccgacatctacaaagcaaaaacacagccagccaaaccaatgctccctaactgcttggccccagctagaacccagcaagcgagctcatcaaaaaaggatctcaacaccttcacaatggaaggggactcctcatggaagatcactcggttcctatgaagccaaaggcaccatgccccaaggatgatagcactgtcgaagcccttcttgtctttgtgcatctgattgatcactcctcccgaacactccacaaaggaggcttccacaggactaggaataaggtgttctaggttaaaaggggatagaatgccatgccagaaccgacgtgcaaaaacacatgtagttagaagatgttggactgtctcctgctcttgatcacaaagggggcaaacaatcgggtgggacatgccacactttcgcaatctgtcagctgtccaacacctatttcttatggccatccataggaaggttttgcatttgggggggcatgatttccataaacgctcccatggctcaaaggtgatggagctagaaaataaaacatttttttcaggatttagaagagaactgcccagatgactcatgcctccatacatgttggtcagtttctagagacaaaacaacctcacgaagagagtcccaaaggagaaggtactgttgcattccaaccagagtaagaggtaacttgatatctctgatccactgaccattaataagggcttgggccaccgttctagaggaggtcaacttcttgtacacctttcagaaaactattagagctaaatccttgatggaattcccgctcaaccacctatctatccaaaagagagtatcattaccgtttcccacatgggaggtcactgaaatggcaaccaacgccttgacttgaggctgtacagggatatcaagaccaatccaggacctgttagggtcggttttctgtagccacaaccacctggcttgtagcgcccaccttctgtaaagcagatttgggaggccaagaccaccaggatgtagcggcctaataaccttctcccaagccacaaggcagctaccaccatttatctcctttctacccttccagaggaaagcccgtctaattttatcaatagctttgatcacccacttgggaatgctcatagcaatgagaagatagactggaatggctgagaggacgaaacgaaccaaggctgttctcccaacgagattaagaagggggatgccttccagttaggcaacctcacagcaatcttttcaacccaatcaataaggtcacttcttcgcagtttcttgttggagatcggcaaggccaaataagtgcatgggaaggcagaagtagctaattttgggtagtacagttttgaaagcaccttcaacgctgctctggtttttggcttttatctttctgctgtttgaaatggtgaaaataaagagtgtttcaagaaaaatagagataggag

SEQ ID NO: 160690 - DNA, 3159 bp, Zea Mays
catttttatctaactcttattttaatttgaaattaatagtttaaaagtttatattttagtttggctaggccatttgttatggttgaagatacgtatattttctgtaatttaatctttttttaatataactaaagttaacgcctgctatattttttgctactaaccaacaattgttaattgttatgtatttgtgattcataattatatgaatttaatatatatgtgattatatgtctaatttaattgtgattgatatgtactttttgtctgatatattggtttgaaaacagtcatagacattctatttgcatggcgccccgccatcctctataacctccacattctatgacctacatgaaactaggcaaaaggcgtggtgcgtcacttatccattcaaacacaggaatttgttgcaatcacgggattgtagaagaaaactacaagatgtgatgatgctgatgctacataagtcatgctaaaatgtctcgtttattgaagtattgtatctcaaatatattattttttaatttctttatcttgtagtttatatttgagattttattattatatttagtcactgcacactctcattaaaagagtaacgacctttttggtgactaaagatgcttatgaagaagggagattgctattaaagatttatgtattacattgagcccttatacgatttatatagagtacatgacataagagacaaggcaacccatagatacatgtggcaattcgagacacaatatctagactatcaaatatactctaacactccacaatcatagagggagcatggtagacgtttagactatagaagtctatatggactaaaatcccccatagtcgtgacgttgtcggagtgcagatgcaacgacttggagaagaaaccgacgagaagctgatgtagacgatagttctctgtgtcgatgttgaggtagcctagtacaaggatgaacagttgtggtcgataatcttgcaaaggatagttgtggtcgatgaaagctatcgaggtcactaagaagtaggagccacacaagtcgtgtgcttgatgtgttgtggtgatggtggcgaatagaaggaagcaccatagacaaagatggtgatgcagtcaaggcagtcaatggagaaggtcgatggcgaagtcgacattgtcgaatcaacgtggctgaggcatgtgtgaggtttactagctaagcccaaaaacacaccggggatgaaggtacgcaccagtgttgctagcaaaagacatactaggtagaggaccccaaccatacgtcagtgtctaaagtgactagcagagaaggcctccgcgatagttgcaatgtgtagaagaacaacgaggaagcatgtgtcaatgcaccaatggttgtcggtgtggatgaagtagacgaggacagaggacgacactggcaacgagattgtgatggacgaagtcaaagaagtagatggttgacacatctagggacccagagtggcagtggtgagatctgcattgcgcaaggagtcatggtggtgctagagtgttgcaacagtggtgcttaaagaagatgacgaagagcatgaacggtccaggtataccatgtgagagaggcgcacaacgacgtagtcgacggtgatgtaggggcaatacaaggatgaaaataggcgacgatggcgcaaaacccgaccaattaggaagaaaaagggacccacaacaacaacaaattttgttacatcaccaagtacccacaaatagtccattctcctaactcaactcaccctccttatcctcgatcagaagactgaaagagggagaaagagataaaccacgatcacaaaggctcgacttggctaacagggagaggcacatagcctagcacaaccaacatcctctttttctttggcaggggtcttaatggctttgttgcttttctcctcaaataaatctccaaagatcgcatccattggattcactatgcaggggaggctaggcaatgcctctttgagcttgtcgcctgatgtatcctcctaggcgggctttttctcgacctacttcgacatagaatcaaagttaacaaggtcgaccccgaaaggacttaaaaataccatgatgtttgttttgtcattacctcaattttctgagcgttcagaacaagactcttcaacaacagctcgtacatgttcttcagtggtaggggtctttgcaatgccagcaggcttctctgaggcaaccttagaggcctcgacctagaccttctacttctcaccttcatggtgtttcctttcaaagcgcttgggtgctagcaacttttcctttgccacaatctcactacccttgtattttgcctttggcttcaaggactttgtcggagggccccctctagcctccttttcactaatcactcaacccctatctataattcttactttgcatttcctctgcaatctagcatcatgatcgacaatgaggttggggtagtctagatattctaagtcatatgctttgatcacacgattatgtattctctttattgccactcactatcgcactaagtagatgatctctttcacaatatagttgcataaaactttgttagcaactgtctccaccataatgagccactcattgctcggctttatgaagatgctgaagggattgaatttataaggtaactgaatcatctctcgagcttcaatctccttcgtgttgtcctcatcttttggcttaggtatctcctagccaactttcataggaaatacatggtaggcaatatgctcttgaattcgtctcttagcaccctaggggtcaagggtgacaaagcccatgggctcacacggcctctccagaatcgtcaccacgacaacacgtggatgtcgtctgccccacaaccatcaccatgattgcatgcacaaaggacaaaggcatgatccaaccggtaggagagcccaacaaccaccatgacatgtagagaaaccagcgagcctctgatttgttgaagcttgacaatacaataacgacgatgaacgcgacaaatcagaaggattagtcatgcatcctaactacgagagcgcaactcttgatggagatcaatttcctcgaggcagcgcgacgacgacagcagaaggggaagcctaagtcatagcctaaactcgttataccatgttaggggg

SEQ ID NO: 160691 - DNA, 329 bp, Zea Mays
agcggggagcaaatggcatacccatggaagaggcttgacgacgaaggttgtcgtcagtctcccgctgacgcctcgccagctcatgcacatcagaagatatgttcctgcacatggaaaagaaggttgcaataccatgggccagtcgagctcccatcccacgaccacgacctcgaccacgaccacatggtgtgggagatccgcgaccaggagaggaacgcgagggaccggcagcagcatgtccacgagagctggagggggctttcctcagacgccctgctggattgtttggatcaatccagaagggggtgtacgagagatgtcttgttcct

SEQ ID NO: 160692 - DNA, 704 bp, Zea Mays
ctatgatccccacacaagatcggtagcttatagggaggagaagaggttttgtgcactgaccaaagcaagagcaggctcggatgagtgacaacacgtgccaaaatttgggcagaatgaacgtgcacatgtttctgaccctggtcggcacgccggcgttcgccctacctacgtgcgcgctcgctccagtgcccggtcaagtccaccgcgtgcccccgcccgcgccgtgcctataaaaaagccccaaggcctcggccgtactcccctgcacgctcttggtcctgcccaagccagagttcaccggactttgccttaaacacgccgcgccaccgcctgccaagccaccccgagcctctgccaccgcagccagctcactctagccactcctaggctgtgccagctgctcgcttagttttgcctgaagcccatgaatctccccaagtcctcggacccggcagagcctcgctggagaccccaaatcaccctcgccggactccttccgctcaccggcgaacatggaccgggtaagtctcagtgtcgttctcaaattccttccgcaaaccgtctctacatcacctggtcaagcctcccgcgctaatgactatagtgccgtgagcaagccggattcctcgccgccgacgagctcgctcgcctgtgcacgtagactggcctactccgaccatctcagaagacgatccgcacatcgg

SEQ ID NO: 160693 - DNA, 1322 bp, Zea Mays
ccgattctcttctcgatgcgaaagggtcccacataccggggagctagcttaccacaaacgtggaacctcttggtgcctcgaaggggcgataccttgaggtacacatactctccttcctcgaaggataactccctccgacgtttgtcgacataactcttttgacggctttgtgcaattctcaaattctccctatccttggccacattctccgcggcatcctcgaaacctgccgggcccaagaattggggtctcccacctcttcccacattagtggggttcggcacttgcggccatacagggcctgaaagggtgaggccttgatgctttcctggtagctattattgttggaaaactgggcgtatgggaggctgtcctcccaatttggtccgtaagtcaagacacaagcccttagcatatcttccaggaccttgctcactctctcggtctgcccatctgtttgtgggtgaaagcctgaactgtaatctagggttgtccccatggcttcatgtagactcttccagaatttagctgtaaactgcggccctttgtccgagagtatgctaagaggggcccatgcagttggagcacatggtgcacatagaacatggcaagctggtaagtcgtgtaagtcgtcttgacgggtatgaagtgggcggttttggtgagacgatcgactatgacccatatggaatcatccctcttgggcgtcctaggtagccccacaatgaagtccatacctatcttttcccacttgcacatagggatctcgaggcggttcagtagtcctgccggcctctagtgctcggcctttatcctgcggcaaacatcacatcgcgccacaaactctgcgacatccctcttcatcttcttccaccagaagatgccctttaggtccttatacatcttggtgctacccggatggatggaataccgggtacagtgggcctccgtaaggatggcttccctgattccttcattctcaggtacgcataagcgttcctctagctagaggattccttcctcatcctggcgaaagtctgggtgcaagcctttctccacctcgtttgccaaggttctcagttctgggcactccccttgtgccttcttgatccaatcctctaagtcacatttgacccgtaactcattcagctactcagagctaaggatggaaatcctcattcgctgcatctcctcacaaagttcggcagctagctcttcccccatgagcaaattgtagtaagcctttcggctgagagcatcagccaccacattggccttgccggggtggtaatggatctccagctcataatccttgatcaatt

SEQ ID NO: 160694 - DNA, 467 bp, Zea Mays
attaagggcaaaaggaaaatatcgtggtcttagctgattggtgctatcacaagaggctctcaaccacagtcctttttaagcagtcatgttagctgaagaagtcattttttgtggcagcattctgttctattgctatccaacaagtcatgccagtataatgttctattgttattcaacaagtagtcatgttagcggtagcagtcatcttagctgaagcatgaagcagacattttttgttcattttactttattgtgagacaatagatagctcattgttttttggtttgtttaattttaagaacatcctcttcaagactatgcaatattacaatgaccagttagtactctgcatgttaagctgatagatgtatcttgcttttttcaagtatcaccagttttgaatcatatacaaattgaactaagctgaactgagcagtttagatacaaatattggatcaattcagttt

SEQ ID NO: 160695 - DNA, 824 bp, Zea Mays
gcaaagtgtcgaatattggtgctcctgttgcatattctgcctggaatctgccaccttccaagacttttttcaattttgtgtccaatcctcctgctagtgacaatggcttgggtcttagagtgcgaccctctcccgaagaagttgaggctctggttgcttcacttggtgatctccccaatgatgagagacaagttcactttgagatgcctataaacccaagcgatgcagagataagtgctatgctggacatgttggctgaggattcttctgactctgtccctactgaaaccatagctattgcgattatcccagagcccgaaaaaaccttgaatgctcaaaaatctgatggtgctcacccaaagcgccttcgcccggccagtcactcaactgctcctgtcgaggggaagaagaagaaaaagaggaggcttcggcgagtgtcatgtttgaatcaggatgtcggcccttctgttcctgctgctgaagaagtaccagtggaactttttactggagctgatcccaatgggtgtgaccctgctgacgctaaccccaatgggtgtgacctcgatgatgctgaacccactagatgcaatccagccagagctgaccccaatgggtgcaatccagctagagctgaccccaatgggtgcaatccggccagagctgaccccaatgggtgtgttgttcgtattgttgacgaggatgaggaagaagatgaggaaatccccttaattcggaaaaacagtcggcgctacctagtcagtggggagagtagtgatgttccttctccagctttgtctgctcttgttggtctgcaagagttgtcc

SEQ ID NO: 160696 - DNA, 497 bp, Zea Mays
gattgtggccataattgacattctcgtcgagtcatggagttgagtgcctgcatcttgtattgactctcctccttgcacactaagcccttggggtagaacatcaatgcctaacaacataaaaatgctaggatctacggtggccatcaataggctaggcgatttctggtaacttgggcgctagaggtagaatgagtcccatctaaatatggaggctagtgttttctaaggcataagagtcttgccttccatgttgacccctacctcagttgatatagtgtatatgaccgaggaccacaaccatgggaggtttgtgaccctgattagggtgtaagttagttctagactcattctattgaccgagttcgagaacatagccttcttctctactttattctcgactttcctgttctttaactttctacgttccaccatttgacgaaatgacacattgacccctatggattacgtagaccaattatgtgctatcaaacttattg

SEQ ID NO: 160697 - DNA, 660 bp, Zea Mays
ctttggcaccagcaccactccctcctacacccatctttgtgttttaggtgtgcatgctaccctagcctttctgtcactactccccataaacttgctcctcaatccgccctttgtcttccttgattactcctctaatcacaaatggtactaatgccttgacttcaccactaatcatgtcataatatcccatcacgccatgtttgccaagtactgaaactggcccttgatccctcctactccaccgctgactcccttccggtgttggactttcttcttgacctcgtggctccctttagaccacttccctttgttttttctcttgtaggttcatccccaaaactcccacctccaacacatacaccccctatggcgtctcttccccatgttgtcttcagtccgtagtgcccttgccaatcctcactagcatcatgctatggaggaagagtactgtgttctccttgccaatcacacctaggatttggtgtttcatacctcggtggtaatgtggtgaccgacaagtgaatatggacccacaactggaagctagatggctctttggaccatacaaggctcactaggttctctaaggcttcacccaatgttctggggttgactatgataagacgtttagttccgtcgtgaagcctgatactgtttgtg

SEQ ID NO: 160698 - DNA, 622 bp, Zea Mays
agtgacttgccttagcatgtccggtcatcgccggtggtcaggccacggtgaaagccacgaatcacttgcgccagtgaccacccctctctccggccgccgcacgttttctcaaaattaacagccaccgccgatggaacctataaattgccgccccagtgagctccgctaagtagttgtgcacccaatgaactagccctcacctccaatcatcccccacagctccccaatttgggatttcccccaaatcagtcaagaacaccgcaatgtgtgagctcggcgtggccaaccctctacaggttcgatcacaccctccttgctcttgtttcagcactcttgtgtgttcttgatgcttctcgacccagctaattgagttagaaaacataggatcaccgggaacgcctcggttcatccgtagttcacgctatcaccgtggacagagagattaggagctagaactttgcaattgtttgaggggtaatggtcgttaggggttgaattaggtgtcagccttatctaagggtcggtcgttgtgttttccagccagtacaggctcgctggagccactgctccgccgccctggtcggggatctcgacttgtgaagaaatagaaaagggaagggcc

SEQ ID NO: 160699 - DNA, 678 bp, Zea Mays
gggtggatgatgccaagccttgggctggcatggataccccgacggacgacactgatcgagcacttttcactacctcaacaagggtcgtcgttggagatggccatagatgtcgtttctggcatgacacttggcttgatggagaagcgccacgccacttagctcctagcctatttgcgatatccaggacgaaaaacggatcggtgttcatggagctccgggataaccactggatcaacgcgctgcgaggatgaatcgccactgcaacccagatgcaggagttcgtctccctttggatcagaacctaggacacccaccttacgcctagcttgagggactctattctatggagatggacggcagacggaacatactccgctcgctcagcttaccatgtccagtttagaggctccttcaggcctttccggtccagcctaatctggagagcacatgctgaaaacaagtgcaaggttttcgcatggacaatggcagtggaaaaagctctcatcgcggacaatttacaaaaaaaggggttggcctcaccaagatcactgcactctgtgtaatggcccgttggagacttgtatccatttggcattgctttgccccttcgccaaatcagtttggtcactcaccctggcttgggggcatttcgacgaaaatctaatcactccatcagag

SEQ ID NO: 160700 - DNA, 469 bp, Zea Mays
agtataaaagcggtcgagccggtgggtgtagaccaaatttactacctcaacttgatgaggacatcctccactattactcattggcaaagacgcaattggcccaattgtagtcggacggcgaccgtgtgagcctcagaattatgccagctcgcttaacttgggagtaggaagctgccttaaaagggagactcacccttcccccattggactagtcttttggggcgattgggcctttccctgagtagggtgtgcttaatgaactgtagagctctgggcaacactaattggttgggcttcgtccaaccccacctgggctaggtgtatcatctggtatcagagctagggcccagttcaagaaggtgggaatgatgacgacatcttctactattactcattggcaaagacagaattggaccagttggcccaattgtagtaggatcgcttaacttgggaggaggaagccacctta

SEQ ID NO: 160701 - DNA, 497 bp, Zea Mays
cacctggaattcgtttccggtgctgcctaaattgctcgtcggagtcacgccctagcagccaacccgctctgcgtcgtgtccagaccctccaccacgccgtatcaaggtaatatgtaattctgattgactcgcgtcagctggggatcgggcagagcgtttcggctaggagcttgagtgtggaatccgggggcgagggagtccggccatggtgcgccgtcgtgcagtactatttcgtcaccggcgatggcttggggaatgggaggaaattgtgatcgaccgttggattcagcggacggtctggattgagcaaacggggtcagatgggaaacaacccggaaccgttgatttcacttgcgacggctatgattagaacccgcgtgacctttcgagctaccgatcacgaccctctatcggtgatccgtcggttgcgagcccaccttggtagttttaaactcggcccgtagatttaggatttggcggatgtcaatagatatccg

SEQ ID NO: 160702 - DNA, 552 bp, Zea Mays
ccggaatccatcctaatcgacgacgaccaccggactacgcatcggatcaccatccctgagccttggtgagtctagcccataccttaattgaactaatccggccctggattcacctacccacgatgacggcgatcaccgaggtcaaactgaggcgttcccgacgagtaagcgcagtctagctcatttagttgagccgacaagcatcacaagcatgcgagggtgctaaaacacaaataaggagggtgagtgcggacctgagagcggctagcccagacggggtgattcacgacgacacagatgataaatttgggggaaaacccaaattctttggctatggtggctaatcggagatgagagttagtgtcctgggttcgtaataacttggcgaagtagagtggggcatcaatttatagaagctttaggtggcggcttcgaatttgggaggagagtggagcttatctccctggtgaggcaatcaccgaggctcaccgtggagcgcatgcgttcaccttgcgaccgtcactatctcggggatgccacgatcacggcaat

SEQ ID NO: 160703 - DNA, 626 bp, Zea Mays
gcttgcgagcggttaggagtatcgcatacagtagcttctggacttgaggatactttatcattgagggctcgaggacttcactaatgaagtagactgaatgttgcaccgggtatgcgtgtccttcttccacccgctcgactactaacgcggtgcttaccatgtgagtcgtgcaggagatgtataacagcaggtcttccgtcgactgactcggtgtagctcggtgtagtggcttgagcactggtggtgtggccaagaacttcttcagtgcctctagagcttcctgtgcctccgtcgtccactaaaacttgtccacatttttgagcaatttgtagaatggcatgcctttctcgcctagccttgatatgaacctacccaggcctgtcatgcatccagtaagcctctggacctttttctgtgatcgtggagcttccattctcatgatggcctcgatcttttctggattagcttcaattcctcggtggatgacaatgaatccgagtaactttcctgccggtactccgaagacacacttttgtgagttaatcttccaccggtagcgcctcaggctgttgaagaccaactgcaattctttgatgaagttttctgagttttctgttttggttacc

SEQ ID NO: 160704 - DNA, 350 bp, Zea Mays
aactgattcaagaggcagaagaacaagtccgtataattcgggagaatttgagggtagctcaaaccaggcaaaagagctatgctgataatagaagaagaccactggaatttgaggaaggtgatcatgtgtacctcaaggtgtcaccactttgtggaatgaggagatttaaagttaagggcaaattgtcccctcgctttattggaccattcagaatctttaggcgagttggggagatggcataccaactcgagttacttgataacctgtcggatgtgcataatgtatttcatgtttctcaacttaagaagtgtctccgtgtacctgaggaacagttaccaaaggaagagctt

SEQ ID NO: 160705 - DNA, 728 bp, Zea Mays
acgagcttggcggcatcggaggcctccagtccctttacctcttcgcgaacagcctgtcgggtgtgctcccacggtccctgtacaacctgtcctcgctcaagaacttcggggtagaatacaacatgctgtctggaactctccctgccgacatcggcgacaggttccccagcatggaaactcttagcttctctggcaaccggttcagcggagctatcccgccttcggtctccaacctctccgctctcacgaagcttgacctctccggaaatggcttcatcgggcacgtgcctcctgccctggggaagctgcaaggcctcgctgtcctgaacttgggcaacaaccggctagaagccaacgatagccacgggtgggagttcatcacttccctggcaaactgtagccagcttcagaacctgatccttggcaacaactccttcggtggtaagctgccagcttcaatcgccaacctatcgacggctctcgaaactctctatctgggagacaacaggatctctgggcctattccatcggacatcggcaatctggttggtctgaaactacttgagatggcaaacatctccatctccggagagatcccggagagcattgggaggctgaaaaacctggttgaactgggcctttacaacaccagcttgtcaggcctcatacctccctcgctcggaaaccttacacagctcaacaggctctacgcatactacggaaaccta

SEQ ID NO: 160706 - DNA, 399 bp, Zea Mays
actgctgctttggccaagactgctgcttcggccactccagatgaggctgcgccaaagagcaaaaggttgaaagtccttacccaccagccacgttatattgaaccggtcgtagtgcctgagtttggcggggagacttctttagctgctgaaccaaaagagcccattccccctacgcataaggttgaagattcggctataatgccgaaggtacccttagccgagctagctgagtcgaagactgataaagataaggccgaagagccaaaaattgaaggaacaaaaacgttagaaattttaagcccttcggcagaagtaacagtgccgaaggcacaaaaaagttttgcggcaactcccaaaagaagaaggatggcaaatgtactagatgtgttagaaacagta

SEQ ID NO: 160707 - DNA, 287 bp, Zea Mays
atggataggttgctggagatagactaactttgtacctgcacagttttgttaccaaaacacattttcaggtggaagaacaatgaatctgatagttgtaacaggtagattgagacgtagtcgatctgtgtgcttgtggtacgctcaggatggcactagtttattagtaggatgcagctattaaaggttgtagaaatgaggctagcgttgagcagcctgacgcactgtgatgtactatgccgaaaatgtatatttgtgtctaacaatttgtcaagctatgcaatagcagt

SEQ ID NO: 160708 - DNA, 964 bp, Zea Mays
caacgatgccatagagaaggaattcacaatatcggcttcgttgacccacgacgcgtaaacgagccaatgattaaggattttcgagagactacagtacaatttatgcataagtgtcttcacaagcaacgcaatatggattacatacttgtttcatataattttaagttagtgttcattatcttttcgtattcataccttttctagattaaatgtgttgtctaaatttgctctctctgtgtttataaactttgtacagttttcactgggtacttatggtggtctcaatgaatgaaggcattgtatttgtccttgactcattgaggaagccagccgacgacttaaaactaatgacagaccttcttaaagagtaactcttaccattcgaacctttcactataaacctctgtacgattgaatcatgcatgtacgaaggacttataattttcattttttggcagagcatggagtcggctacgcaaaaagaatgtcgatcttaaagaaactcttgattttaggatgaacttttcggtatgtttgcagcttctcaatccctcaagttatttggtaataataattcacaactgttttctcgatttcagtgtttggtacagaaacagggtatcaacctctgcggtttctacatttgtgaatttattcacacattcgtaggtcagaagacagtaaccaaagatattcaggtacatcaacattttctacaatatttatgttgattaatattaattaataaagtatcttagcttttagtttaatgcaatcaggggcggatccagtatataaggtgtgctgtcacctgataacaatgcctttaaacttggcacaaatatgtttctctattttagtgggtgacaacagcccagtatatacctggtgacatcagtgtttctctgaaatcagtctgcgtcctctcaaattgcttcttcacttgcactgagtctcttgttcc

SEQ ID NO: 160709 - DNA, 471 bp, Zea Mays
tattaatgccaattcaataagtctataaaccaatggaaaaaccttatgtttctctgtctcaaccatcttagaagccaaactagcaatatcagtgcaagtagagaatgttgcatgccttcttacttgaagaatataagcctgaagttgctgtctaatttgtgcaaagtcactagtagagaaatcagcatcataaatctgagcacctcgaacaaggctatctatatcaaacctagagaagttattctttggatcaagacatgagaaacatgtcaatatctcaatagtggattctccaaatcgattattcatctcaacacatattttatcaagaacaacaaagaaaatcccgacacgataatgatgaaggaaagtagtagtttcatttcggcgctttgcacgacctctgactggtatttcatccatcatatttggcaccgaaatattcttttgctcacaatatatcttagcctc

SEQ ID NO: 160710 - DNA, 558 bp, Zea Mays
tttgagtacaagttcaccacaaattggaaattcaaatttagattcaaaaatgagaaagaaaatagaatagaagaaaaggaaaattaaagaaaaagaaaacgaaaagaagaagactcacttaagcgcttgggccaaatctcacctggtcggcccatttgtttctcacgcgccagcccacgcagtccgctccgcactgaccctgcgcgctcgcagctgacaggaaggcccaccctgttagcctccccaatccttcgccctaccgatgacacgcgggcccgcttcgtcagattgtcatcttccccggtgaaatcaccacgcgcaacagaaaaccgggcaatccggcgtggtcaagacttcgggggccgattccttcggcctgtatataagcaaccccctgccctctcgtcctacgtgcttcgccgtcgccttgccctcgcgcaactcgcaaacgctgaaggttttgggccaccaggtcacgagctgagagccgccgcagggaaatccctagttcacgccgtcgggtagtcgtgaggagcagcgcgtgtgcttcgccaccac

SEQ ID NO: 160711 - DNA, 729 bp, Zea Mays
cgatgcagatgattggatgcgcacgatcaaaagaaaactggaagccattggttgcccagaaaatcagcgtgttcaactggctgcccaccaactttctgggatggcttagcctggtgggacaccttcaacgtcaccatcagagatgctacctgggcggaatttgaagcagctttccgggagcaccatgtgccccaaggacttgtacaacttaaggaggacgagttccgagaattgactcaagacggaagatctgtcagcgaatatgtgcacaagttcacagaattagcccgctacgcgccagatgatgtcagtaccgagagcaagaagatggcccgtttcctgaaaggactcaggcctgaactcaagacaattctggctagccaagacttcctcaacttctctcacctttccaacaaggccatgcaagttgaaagggcaaaggaggaagaaaaagggcatcttaaaaggaagttccaggttctccgggcacagcagcaggaccggcaccagaagactcgatcatttgggtttccacccaaggggccaaacttcagtaggccagctggacccactccgtcgcgattcagccagcagagtcagagctcttttcattccccctcagtggcaagcaaccaacccccggcaaatgcatgttggcactgtggtgatcccagtcacttcaagaacaactgtccacagctgaaggtaccagtacccgcctactccaac

SEQ ID NO: 160712 - DNA, 570 bp, Zea Mays
cggtcatgtactcatgtgggcaattgttgctgtgttctcaatttctcatattatccggtggatgtaactttaagcctgtaagctgcaacttgtgaacttatggcttgtactcatgtgactatgtgaggcaatggcgtgagagtgatttgaactgctgtcttgtactcttgctactgttttttacctaacttagttaatatgtatcgggtggttgccgggtatgggttacccgtcaagtaacaatacccactcgggtacgggtatgggtaaacatttctacccgcaactgggtatgggtattgtgtcgggtacatttttttgtcgcgggtgcgggtatggaaagacaatacccggcgggtacgtacccgttgccatctctaatatggacgtggcccaatggtacaccttgctaggcaaaccgtcgaaggcccattagaaagcccatggaagatttccatgcttataaagacccatgggatatctatttcccacacctgctgactccaagccacaaggcactgccagaaggacaactcctcgagcatcgactcccactatgcgagctaaact

SEQ ID NO: 160713 - DNA, 458 bp, Zea Mays
gtgccttaagcatccttgcaggttcctagctccttcgggagggcattcccacctcaaatggccatttccctaaaaccctagatccccgcacaccacgtgctcggtgaaatgcccaaaccagccaaacttgctccaattgaacccaaatttttcaggcaccttcaccacacttccagtaacctacttgccaaatttcacgccaatccgagatcccaggcttaaatttcatcaaaattcccgttttgcgcgatcgtttccgagccgagtgtccaaaaccctatttcttcgcctaaattcaaaccaagcacacacttcactcatattgacctatataaatccattcgtgaagtatcggctcaatcccatatcgtttcgtgcctcaatttgaattccaatcatcctatgtctctatttgtctgtcaaacgtcgttttcacggcttttgacttatcgatcgcc

SEQ ID NO: 160714 - DNA, 388 bp, Zea Mays
ttggctattggctaacgacgtgactattttctaattaccaacatacacaaactttcaccattttcggatacttgcacaacacacagctattctaatacatcacaaatacattcaaccccatcagtagggtactagcacatttccgaaaatttcccgagactacaacgaccaggtatcgatcttaccacacacctaaagcaccaccagcatatttacggaacctatcggttaacttgatcgacacactacgcatgttctttgcccatcaaaatttatcgcacaacaggaaacatcccacttgctactgacaccaacaatacctactgacctattattcaccacaccaacacagttacacgccgcatactagtttctaacataatcctta

SEQ ID NO: 160715 - DNA, 543 bp, Zea Mays
gggatgtattgtgatcatttgtcattctccttgctaggtcactagagaattctcctcttttttcctgaggaactcatactcctggatggcaattgataggtcactggataactctcctctttctcttcacttgggcataggatctcatcgataaacaaccggattccgccaaaaacacgccatttaccggtcaacgacgacgagaaaccaaacaactatgacaattcttgcccgggcacagcgaacgagaaccgctagatccgcactagaaaccaccgcccaacctccaaaactcgccccaatctcgacgggaaatgcaactcgcattgccgcctgccgcggaacagccgtggctgatgagattcgttgttttctcgtcgaaacccgacgctcgaccaccggatctcgccaagatcttgtcgggatgtactgctcgcacgagctccagacagcctgcaacagaggagagcaggagagcgttagggggtattgggctagctataggaaactgagttaaatgggttatagggttatgggttaaca

SEQ ID NO: 160716 - DNA, 839 bp, Zea Mays
ccatacaaggcctttctcagttttaggaccttgccacttccattctcaactacaaagcctggaggttgctgtacatacacttcttcgatcaagtctccatttaagaaagcagatttaacatccatgtgatgcactctccacccactcttagctgccagtgctatgatcaaccttactatctcaattctagctactggagcaaaaacttcctcaaagtccaccccctcacgttgggtgtatcccttggccaccagccttgctttgtgcttgataatgttaccttcagggtcctttaccttgaaaacccatttgagaccaatagcacggtgacctgctagcaaagttgctagttcctaggtttggttggactgtatcgactccatttctgtagtcatggcttttctccaacactcctctattagagcctcattaacactccctggctcttctccaacaacaaaacacactccactatattcaaacccatgaacctcttctgttgaatcattgatatcttgcaaggtgcgatatctcaatgtatttccctcagagtccactgctcctccagttggaggtgttacaaactacacaatcggtgcattcagagttacaagaggtgttgatggctctggtgactgcggtgttttgctcattaaccgtccatgaactgcctgagccactgttctaagtactgttctgagtgggagaccctgcatccatcactgaaaaccttggtgctacagctggctgtccaactgaatctactaaatcatcttgtacattgtctgatattgttgttcttccaagaatataatagaactccacttctactcctgttt

SEQ ID NO: 160717 - DNA, 526 bp, Zea Mays
aatatgtggtccggaccgctaggagctagccttgtaaacccaacctctggtacatagatctttggtgcccaattatgaaggaagaacacgttcccatccatcattttattttcctttttacaaatcccggtatccctgaggatctatgcttttattgtaatcatggaaaacaaattatgtaatttgccttgcacctagtttggagcctccttttgatgggctctgtttaagggaagagtccacattctctagggtggtccagagctaggtagccacttagcctggtcccgtatcgtaagcctacaccttccaccaaccccgaatagttgacttattaccttctggattgagtacctagggatctggactccattcagattcaagggatcgactccaaaactaggctcaacaaggttaagttgtgtgattcgaaggattggatacaataagagtaaaggacctaagggaacattgctggtcctagaccatgtcttatgatggtccctagtcttatggaagccttgag

SEQ ID NO: 160718 - DNA, 402 bp, Zea Mays
gtcaccagatcagtacaaacgaaagtgaaactacaaaacagaagaaccagattttattttcgggcataaaaagtcaatggtctccccaagaacaactaatagcagatacactatcagacgatgaattgccaggttttccaaaaaggaaacatcacaaggatgcccaactccaaaaagaagcaaatgagtgttacattgatggatggactattacttgaacacagttacagccccgtcgtcgcatcagttccaagaaacaaaaatggaaacatggaaaaagtcaagaaataacttcaagaaagtcttgctatcaatgtggacgtgaaggtcattacttccgtaactgtcctgagaagagttcactaccagatacctccaagataaagctatctcagacatgga

SEQ ID NO: 160719 - DNA, 767 bp, Zea Mays
tagtatgaattttctagggattaaacatgttttaataattattttcacattaaaaatcaattctgaaatgaatttcactacctctggtctgcgcgcatgaaatctggaaagcgcaggggcttgcgggtaaaatctcctagacacagagcgtccctggatatactgcggattaatttcctagtattccgagggttcttttgcaaataggatggccgaaggggtatcgtctgttgtgagccgcacgattagaaactagcgcgccagataagttgattcataactgtgaaccggtatcaaatgaaggccactggatccaggatccatgggccatgagtcaccacgtcaaactctcatcctgaccctagatcaacgatcccgcggcccggattgtacaaacgaagggggtacggtagcttctaatctccgccgccagatgcgaaaccaacggtcccaaagtcgccccaatcagaccggaccacggcggcgcaccaaccatccacggcggagcactcgcccttccggtgacccactgtcaacgccccagagctcccaaactaaaattaataggtcccgacgcaaactataaaggaaagggagctgggccatggccttacccgcactggaaggtagcagaggtcaccggctacggcgcggatggcttcacggcggcaccgaagtcgtcgacgagaaattcccaagcaccgcaacccaattcgtgcgcgcagtggccttggtttgcttcctggtacactgaagacgccccctgg

SEQ ID NO: 160720 - DNA, 1178 bp, Zea Mays
atttttttgaagtatttcacagtatttctaagcttgtctattaaagagtccacttcatgcaatccatcttgaacaaccaaattcactatatgggaagagcaacggacatgaaagtatgttggattgaaccgtgaattcttcctagcaacaaacttgaccaccaatgaattaacagcagtatcattgttattagcattgtcaagggttattgtcatgatcttgtcttctattttccactcaatcaaacagtcaaagatagcttgagctatgacaagcccggtatgtggaggatccaaatcaacaaaatttagtacacgacattgcatcacccaattaggatctatgtaatgtgcgatcagacacatgtaaccaatgttttgatttgaagtccacaaatcacaagttaaacttattgagtcaacatctttaagtgccttcttcaagatttctttttcagattcatataccttcatgcattcttttcttatacccttcctaccaatgtactgataatggggattcaaccaattcatcaagacattgaaccaagtatgctctaccattctaaatggatactcatgggcaatgatcatctttgcaattaatagacgagtgtggtcatgattgtattcataggggttgacaacaagagaatcaaccttgtcgggagcaaagttgagtgtaccttgagctttaagctttgccaatttgtttagcaatggtgtgcactttcctatgtggcggttcagctgtgaagttgggcctccggagtataagcataagtagtatggcaaaacctacacttggcctttgtcaccataacccctctctcctttgatgaagcaacctcgatttccttaaaatacttccagcaagaagctctccttcctctcttagttgcaggagctatggcatccttctgactctttgatacttcatctccatccttgcccgccccttcaagtgaagcacatgaaggcatgcttactgataaatcatcattcatgtcaatcctgttaatttcctcttcatcctcatcagcctcctggatggcctacattaaccacatataagagttaatttgtaaatctctataatgcacttgcatatgatttaccatgtgttgagtaaaaactaagtactaaccatgtctatggagggaggagcttccgacgcac

SEQ ID NO: 160721 - DNA, 891 bp, Zea Mays
ctggagccatgtaaccgcttagcctagtctagcaccctaagtccttacactccatcctaggatggttgttctggaacctggggctggcccctaaaggcttatgcctcatcttgaccgaggtgcaggtcttgagaccttgctcgctgaggttcagaaacaaaatccagaagattgaaagtgttaggaacaacgacccgtagatacactattgagcaccataacgaggccatgtgtagggacccctttttgcagatcaccaggtgaggaggcagaaaggagatgtcataaggaagagcggtgcctcaccaggcgaagcccgacgctaccttgtatcttgtgaacatagcatgaaccatcggggctattaacctctggagtgcaatgcaactcagcattaactgcagacaagacgtatacctgcccactctagtggcgggtgctacaaccgaagtacacagaccacacagtggctcacgttttaccgaggtgggacctttgactctttccattgcgtgggctactgccatcatgacctccattgtagtgcgcgaggtaccaaggcgaagggtggcaggtggagaagacaggacgacgttgccagagcatccctacacacggtagcgctttggcctatgccacaacctactcctgcgctctgcccgattagatgaggcaagggtacaatgggcagcagtacttcagcctacgccacaacctattcctgcgctttgcatcgattagacgaggcaagggcacgacgagccaggaaatcttcatgaagaccaaaagaagatctattcccccgcgcgtctggccgatgcgatcacgcacgcctgagagactgatggacttgcgctcggtgcgtgacgaaccatcgtaggaaaggatcca

SEQ ID NO: 160722 - DNA, 541 bp, Zea Mays
gtgaaatgcaaaactcaagtgtaacttaactccaaccaatttgaatagttctatctccaatgaactcgtgaagactgtgtctctgtcacttacaatagagcaaggaaatccatgtaatcgcaccactccctcaaagaaggccttggctatggatggagaagagtaggggtgacctaaggcaatgaaatgaccatatttggagaacctgtcaacaatagtttgcaccactgacttgtcgcccacctttagaaatgctttagtaaagtccattgaaatgtcggtccagactgctgatggaactaatacgggctacaacaatcctgttggatggagatgttctgtcttgttgcgttagcaaatcgagcaacccttcacacaatcctatacttgacaaagtgcctgctggttgtagaaggatgcgcgaaaacgttgcagcatgttctccatgtcttcgtgtctagaatcatgggcgaaggctagcagctctggccatagggatgaactatcgggaatgaatatcttgccctgaaatagcggcaaa

SEQ ID NO: 160723 - DNA, 1300 bp, Zea Mays
gcttataaatggcacggtttggtaagctggtaccgtaaaaatggcatggtttggtatgtggcaaggtcactgctcctcgtaagcttgtaggacttgctttgataattaattacttgtattagatgaaagagctaagatatggtcaagacgatatattggcacggtgtagggttaaggtgagatgaggctagagaatggaggaggtgtggacggaggcgataatggcgcgggtggaggccacgactgccctcgtcggctcctagctcaggtcctcctgcttctcgccccttcctcccctggtcttctcgttcttcatccatggacttctctctcctggactttcggccgagcctggccttcgaggactccctcagggatgccctggcatcctcagtttgccctgcccgcccaagtcttcggtcgtccttctggttggtggtctcctttggcagatacatcttcaagttgaattcggtctcggttggtcatcttcttcaggttgcccttggtgggttcgccgcgggctttgaggtgcttcagctggctgaccgggtttttcggttttcggtctcttcgatggccatgggttttcatatttacaactcaggttgcattgagcgtaaggaattcatggctttcttcaacctttggaatcgtggtggacccaattggaagcatgaattcaagcttttttcggatgaggaagcggcttcctggttgaaggtccggggcaggaagaatccttcctatgcggatattgttaagctccctctcaccggtgccaatgttgttccgattcgcaacattatcaagtcccctagtggtgatcagcattcgactcgggctggatcttcggtgttcaatcgtttgaaccctcctttccataatcatgctcaggttcgtagtaattggaggtcccttgctgggcctcggcctcgtcccagagtttctgtgttcaatcgtctgaactttccggctttgggatcgtggccttcttcctctaaggggaggattggatctcctcggttcttgggctctaattcttctggtgtagttcttggaggcggaattcccaaccgtcctaaatttcaaatttcgaattccagctggtctcgccctcgcaacctccaatggcgccccgtgcgtgctcgcgggcctgttgggcttctgggcccgtcgtccctaagctgtcatttctgtaagggctggggacacttggatttattttgtcccaacaagaaaacttccttcggttctcctctgacttcgttccctgcctttgggagtcgggccatcttgg

SEQ ID NO: 160724 - DNA, 765 bp, Zea Mays
caataagcgagtactgtcgacacctgtatgcaagcttgaattcttctgaggggtctgctaagtggtaatgcccccggaggtaggatataatctgagccttctagtccccttgacagatcatgttgatcggtattgcttctaagtctagatgcccgacgaagggtgtttcggtgacttggtaaaatacgtcgaagggtaaaaggtctcctcttatggcagccttcgccaaggtatctgcttcttcatttctagagcggtcgatatgttggacagtgaaacctcgaaattgattttcaagactccgcatttcggataggtattgtagtagaaccggctcacataccgcacaatctttcttgatttgctatcttcgagtctattttgatgatgcaggtccgacatcgagggctcttagtttgcgcaggcctagaacgattgcctcatactccgcaatgttgtttgtacatttatcggagtcatttgtgaatcttagtcggatggcatatctatacttggatcctgagggtgatgttgatattgcagctactccagtccctgaatggccctaggccccgtcacaatggatgatctaggctgtttcattggtcggtggcgaaggggtagcggggacgatccagtcaacgatgaagtcgactaggacctatgacttcatggcacttcagattcgaaggccaggtgatattttgacaactccatggcccattttcctatcagtgcggaggcttctaggttgttgtaaatgta

SEQ ID NO: 160725 - DNA, 418 bp, Zea Mays
actgcatctaagaagatagtgtacatgaggcacagggagagagacattctaacggctggtctcggtaaccctgagcatcctggtcgtgtacgaggaatctcatctaaggaaggatggaaggaaggattcggaccataatgggaaggtttgtacaagaaacgtgatcaatacaaggaagagatggcgaattattttaaggaggaggccaagaaagagttcaaaggcctgatgtctgaaatgctatcgaatcctcctctagaattgatgcagcaattggcgatggcgagtgcgatgtctgttcaacagatgaccactccacagatgcaaataattccagcagctcaaacgctggcttccaccgagggtacgaccatcccaagctctatcgcgtcaacgggaaataaggtccgctatccag

SEQ ID NO: 160726 - DNA, 793 bp, Zea Mays
gcaaaatcaaggtgtgtggtctcaccgctcaggcagcaatgccggtcatctcgatcgatctcctaaccgccgtcgcaggatgttccatgactccatctgagtttgtttcgttggtcgggttggttggttgctgatcgtgcgcttcgttctcttgtggcgcagacgctttgcctagggagtttgctggtgcaggtgaccctcgaccggtacaaggtgaacgaggtacgtgcgcctgaaaaaattccatatttattcttttgctggagtttgttgcttgggaggcctgggatgagacgacgattgatctgactcttgttcctgtgggtgcagaaaggaagattttgatttcttcagtcgcgcgaacaagaaaggggggagaggaagaggaggagatggatttcacaacggaggagattgatcgagcaatgtctgcctcctcatctcgtgatgcatcaatgcttaccacaaggtacttcctcttaaccataaggaattaaatgtgtgatttcactatgttgtttgtgcatattttcactcatctatttgcttggctccagttttcttcatttaaggcaaaatgtgaactgcgttttgaaattagtgatgttatctctattcttcagagaacattttcttacacttgtatgcctttgcagatggataccataattagtggaataatgcattaaattgcccatccgttttacaggtcacatgaaaagattctaatcttttgcaaattaacaccttggaccagattaaactctcttatgaagcagcagcttcggcttct

SEQ ID NO: 160727 - DNA, 349 bp, Zea Mays
ggagtaattgggtagaggatgaaaaagacgctctagaggagttttattatcaatgacacgtgtcagtaggcggttgattagataggtggcggtaaggaaggcatcatcccaaaacttaagcggaacatgggcatgtgcgagaagggctagaccagtttcaacaatgtgcctatgtttacgttctaccgagccattttgttgatgagtatgaggacaggaaacacgatgggtgatacctaaagatcggaacaagttgttgtgagctttttggtattcgcccccagtcagattgaacacattttattttggctcctagtaagcgttcaacatgggtttgaaactgggaaaa

SEQ ID NO: 160728 - DNA, 517 bp, Zea Mays
ctggggagctggaaaatgtgggaggtttgtgactcataaactctctatgcttgtctctgggaggtggctggtgctggtgctggtgattgttgttgagttgagcctgcatattggccattgcagtggccatctgctgcaataactgcgtctgggcagttaggaatgcttccattccggcgggtgggggatttggtggattcatctgcgattctgaattaattactgctcttcttcgacgtatgcgagcaggcagatcaactcctcctcctgtcctggtattgaccatctgggttagagacatagggtaagagagatttatagatacgatagacagcttggtacgcaacacttggctcttttgggtcaaaataattcagctgattaaagtacatgtccgagtaagtctatgacaccacctacctatcattactatactacatctatgttggtacatactagaatgtacctactatactagattttattgtggatataaccccacaaacttttcactcaa

SEQ ID NO: 160729 - DNA, 366 bp, Zea Mays
ccctgctaacggagcaatcgacttaagtcggcaacgacttaaggcggtgcaacatgctcacacttacttaactcggggtgaccactatgccctgctaacagagcaatcgatttgagtcggcaacgacttaaggcggtgcaacatgctcacgctaacttaattcggggtgaccactatgccctacaaacggagttatcggctaaagtcattaatggcttaagtcggtacagcatatttgcgctcatacaattcaggggatgacttccatatcccacaaacaagcttcataatcatcgtgcgtcgtttcattactacaaaattatgaactaatgaattctgatacaataaaaaagcagttatatcatc

SEQ ID NO: 160730 - DNA, 657 bp, Zea Mays
taggcctaatgaaacccttagctagcagatcatccaattcccgcttcaattcaacctgctcctttggagccatccgatacgaggccttatgaataggctgcgtacccgaaatcagcttgatttcaaaagctgcatcgcgctccggaggaatgcctggaagctctgctggaaatatgtcggcatagtcacacaccacccggatgtcttgcacccgcaaggtagcctcacccaccaccaccatggagaaaaagattcccgacttccttgaccagtgatccggaagcaattgcgccaacaaggataacgtgaactttggggaacttcccaagaataccacctccctacccgatggcgcttgcaataacactgtcttccaaaaataggatataaccgcgcgatactgagataaccaatccatacccaagataacatcgaatgcccccaaggaaattacaacaagattggccaaaaagacctcatcagcaagaataacggaacacccctgacaaactgaacagctactaatggagccattagcagaactaaccacaattgggtgacccaacctctgcaccgaaagaccagcccgcgacacaaaattctccgaaacaaaggaatagctagcgctagagtcaaaaagagcatgggccacaaacg

SEQ ID NO: 160731 - DNA, 539 bp, Zea Mays
gtgtcagttcaatcgggaattgcacagccgcaaaaaaatcagctagatctgatttgtgtgggctataaaaacctttcctccccacttttaaaccctaagactctcgaacctacaccctatgacggttgctctcctccgtttcaaagtgtgtcgacttcgatctcacgcttcaagtcctcccccttcgattggtgggaagattcttcggtgtgagataaattatcaattccaacgtgcattttgattcaagttcttcaatctctctctagtctgtgcaaatcattcttacttgcgatatatttgtttttggaacgcgttgttccttgtgcgcttgtgatcttgctttgggagtctccaaatctgtggaagaccccaagaacattttgtatcaccagctcttaatgggcaaattgagtaagggatcgccttgacctgtgtggtcggcattgaagaaaagggttgagaaagacccgaccctttgtgggcacctcaacgagcagtagggcaccttggtggtgtgaccaaaccttggtaaaaat

SEQ ID NO: 160732 - DNA, 983 bp, Zea Mays
tctcactcacacgttacaaaaacaccccccgagttctatttcttcaccgcccgaagtccacgacggcgaacagcgcagggccgagctccggtgagcttgtaccagttggattacttgatgacgggtgctctacttcagttgaaaccaaattcaatgcctaacaatcgtttcccctcaactaatttcccgaacggcgctctaacctgctctgtccacggtgaccgtatgatcaacggccaaaccaacgcgttcctggcgatctaaggtagcttagctcaatcgagttggtcgaggagcatcaggggcacacgagaacactaaaacgagagggcagagggcatgagcggacctgagatgagctaaccatggcgaggtcacactgctcggtgttcttgagtgatttaggggaaatcccaaactagggagttctagtggatgattcgaggcacgggttgcttctctggttgcacaattacatagcggagtaggtggggcggcaatttataggcttccacagcggtggtgtccaatttcatgaagatgtgttggcgaccgaagaggaagaaagttactagtgctcgggattagaggctttcaccgtggcaagctccccagcgatcatcgggcatgcacgatgtgattcactatgacgtggtcaagcgctttagcacgtggcgcatggcggaaatcggccaacggcggcgaggtctatccgaccgattcgacgagcaagtgggtacggtgagcttagctgtgaccgagcctgagtcgatccaggcgccaagatctttactcgcccatggttatccgcaagtcatggtgcacgaatcgcagcgactggcgtgaatcgcgatgcgacggtcaccggcggcgaagggggatgaacttggaatcttgttcagttactgtaccatggattccctattcagtgcacctgacagaccactttgcagtgcttagatcttaggtttttacatgacaac

SEQ ID NO: 160733 - DNA, 773 bp, Zea Mays
gcccaacaagtccttctaggaataactaatgcttcttctcatcatcagtgacttctacgggtgcatatctagacagctggataaacttgtccctgtactcgctcacagaaatccatccctgcttgagggaaacaactcctttatcttcatcaaatcgacaggaatatgataattcttgaagcttgtcgagaactcaactcaagtgatggtgtcagtggcagcatgtgctacgcaataagcatcccaccaatcagcagcggggccaatgaggcgactcgatgcataaaggaccttttcccgatcagtgcattgcgcgatattaagcattttttcaacatatttaatctagtcatcagcttgaagcgtggcttatggctcatgaatttgcggtgtttgtctctaggtggtggttggtgtgggtgatgttgattattgttgagctgagcctgcatattggccattgtattagccatttgctgtagtaactgtgtctgtgccgtgaagaatgcttttgaccctactggtagaggatttggtggattcatctacgattctgaattaattaatgtcgttcttcgacatatgcgtgtgggcagatcaacacctccttctgtcttggtattcaccatctagggttagggcacatcgttaagatagatttgtaggagaaatagcttagtggatggatataagctaaatgagattagacaaaatccggtttgatgttttgcttctagattgggctagataggtcatacaacccactatgcagg

SEQ ID NO: 160734 - DNA, 975 bp, Zea Mays
gaatgaccagaacactcctgctcgtggatctacacagaacaagactccgcagaaccagagtagaggaagagtcaaccatgtggcagtagaatcagttcctgaggacgccaacgtggtgtatggtatgtttcttattaactccatacctacattagttttatttgattctggagcatctcattccgtcgtaacacagtcattcgtggaaaaacataatataccaaattatcccttgaagaagaaactattaattcgatcactcgaaggtgaacttagagctactcactcatgccctcagactaagattgaaattagaggcctaagttttctagtagagctgataattttagaatcaagtggaatcgatgtgatacttggaatagactacttgaccaagtatgatggagtaatatcttgtgctaagaggatggttacattaaccagtccacaaggagaaagaattgaagtcaatgtcagtatgccagcaatagcagagacaatggtaaatcagttggaagagaaatctttggagcacatcaggatagtgtgtgaatacccagacgtatttctagaggaattaccaggtatgccacttgatcgtgatatagagttttctattgaactattacccagaactgcaccaatttcgaaaagagcttaccgaatggatgtcaaagatttaattgaactgaagaaacaaatagaagaattactagaaaaagcttttattcgccccagttcatcaccatggggagccccagttctatttgtgaataagaaagatggttcaagaagaatgtgtgtggactatagaagtttgaacgaagtaacaattaagaataagtacccgttacctcaaaatgaagatttgtttgatcagatgagaggagcgaaagtattctcaaagatagatctaagatcaggctatcatcagttgaagattcggactgaagatatacctaaaatagctttcac

SEQ ID NO: 160735 - DNA, 494 bp, Zea Mays
cttaatttttccctttaatccaatgtttggggtttaaaggctcaagaggggaaattagggttttagaacctttttcataggtgaagatacatgaaggctagggtatccctcccatcatgatcatcacttagggttagccaaagtactaaagctttgggtgccttcactttccacttaacacatgggataataggccataggtgtgttcattgagccagggccttgggtaacacctgggtgttacaggaagggcctctgccgctacatcatcaggagccggagcagaagggcctacaccttggtccaagcatgacagtcgccgaagtcgcctcttcttccttttttcctcaacaggtgcagtcaggcggctcactcggcatggacgctttgggcgggcacctacgggtttccgagtctccacctcttcaccaagttcttggccagctgtgatagccattggctcggcgtgggtcgagtcagatgattccccagcc

SEQ ID NO: 160736 - DNA, 475 bp, Zea Mays
gtcctggtaagcattcagtttggcatttcgtcgtatcgtcgttttacaaatatatagtaaacatacagattgttggatggcctaatgatacagttatttctaaaatcattatggaaattatgatgagggcataaatcatgactcaagtaccacattgtcgtgaagaccaatacgaatgcttcagcaatgaaaaaaaaaggggaaggtgtagggattcccatttctggagataagggaagggcatgcgtgtccaatatggcctttatagctaatctagaccctgaaacctgctttgctctgacattaggctgacacatgtactctgtgcaaccaatgatctcatgcttaatgcccctaacctcatagatagactggcataagtgcctccttgtgctgtttcaagtctgaacacaatgctctatggatttctctacaacagctgtaataataaagccttttagtcctaaacaaggct

SEQ ID NO: 160737 - DNA, 711 bp, Zea Mays
atatatatagggcaaataactatctaactataaaagtatgcaatatgacaaaataatgtttgtaacaatgtagcaaatatttatatgaagctaacacaatttgaacgaattaaaccagatataaaacagagaagttatgcataaacaagtcttaggttgttttattattagttttatgcttaaaatttaattcccatgtttatttaaatgagattatggctgcggtttcaaataaccgataacccagggttccgttgacaaaatctaggacttgtttattatggttcttaaaggtggaaggactgcgggttaattagagaagaatacgaggtctctttaacaaataagccacgacgaaggggtattgtgcgtttagatccatatgatcaaaatccaagggttcagaatagatcgtgaagcggtaagtgagcttggccatcagatctctaatcgacgacccagatttaagtaacagaggtcgacacggagccacccgatctgaatcaatggccaggattaagaattgaaccggtacacccaagatttaatcgcgtgcatccatcacagatccaacggctaccgtcaatgggctgaaggggtactcgccgcttgatctggtacgttcatcagtccgccaatggtcagggaccgtcgtcttccaccccagactgcggccagccaaggcaccgacgagccacggcggcagcgcca

SEQ ID NO: 160738 - DNA, 522 bp, Zea Mays
cgtcctcatcatcctccgccacctcaaatggtgggaacgccacataacagtgggagcacattacggccgcggggagccctgggaggtcttcgactttgcttcccgaaacataaaaccaataatcccaccagttggcccacttgttgcgagcacagggaactaattccacgacttccgccgaagtcttttcggtcctcggcgtgaaggtgtacgatccaaactgtgcaatctcacttccaatctttctcttttgccagtgcagacagtaattcttggcgaagacctctacagaaggctggccatcgtacgaagtcaccgcctagacatacttcgccagggccaccacggcgttaggtgccaactggtggacctggacctcaaacctctgcaggacctccgccacgaaacgatgcgcagggaggcgaaggccggtgatgaagaatgcctcaaacatgactaacttgcccttaggctcgggaatcttttccacccccgggacacgcccaacaccgttcccaaaat

SEQ ID NO: 160739 - DNA, 488 bp, Zea Mays
gcaaatgtttgttgcccggaatggtgtgttcttagagaatgagttactcaaaagagagaaaagtaaacaaaaggtgtatcttgaagaagttcaggatgagccagtgtcacatgatccaacaagtgatgctaatatagcagaacaagttgagacgtctgtggcaagagaaacaccaccacaaccacaaaggtcagcaaggcttcacgaagcagtagagaagtgctattgttgggcaatggggaagtgttgttgttagacaacgacgaacctgcaacatatgcagaagcgatgatggacctagattccgagaaatggcaagtcgccatgagatccgagatagattccatgggagaaaatcaagtttggaacttggtggacccgcttgatggtgttagacccatagagtgcaaatgaatctataagtagaagaaaggcatggatggaaatgttaacatctataaggctcgacttgttgcaaagggttttcg

SEQ ID NO: 160740 - DNA, 589 bp, Zea Mays
atggaaagttgctcgtgttcccggcgatgggtggctgtctagttcgattgggcgggtgggtgagcatcaccagcatacaaagatgctaaaacgagaacaaagagggcatgatcaaacctgtggagggctggccacggcgagggtgcgctttgcggtggcggagaccagtttgggggaaactaaaattcaagctctctaacgaacgattgctagtgatttttggtggctgggtgtgtgatgaacttgcggggctagcgggggcttcaatttatagggatcaacggcggtggccgggaatttccatggggacgcgcggcggtcggaggaggaagaagagtactggcgcagtggcttggtgtccagcgccgtggcaattgctctggcgatcaacggggagctagagtgagtcacggtgatgcagtacataggtagagacacgcggcggacaacggcgacggcttaacgatggtgagaatccttatccgagggcggtgagtaaggggagaggtaccgcggctagccggagtggcgtccagctcaccggcgacgaagattctcttaccccgcgatgttatccatctgccatgag

SEQ ID NO: 160741 - DNA, 644 bp, Zea Mays
catgatgctctcggaaagcggcttcaaattctgcccaggtagcatcacttacggcagtgctgaaagtatcccaccaggatagggacatcttggagagctgatgagcaactaggtgaacacgctggttctctgggcatccaatggcctctaacttcctctttactgtgtgcagccagtcatcatcatcgagcgggttgctagatccggcgaatgtgggaggcttcagccttaggaactctcccattctatcctaaggtcttcctccaatcaggcgctggttctcgaggcttctagtgaggacctcaatgagtcgggtttggttggccagaacttgggctaggtctaatggaagcttcggaggcgcatggcggtgggtctcactcccttatccaccgacttctcctttgatacctaggggagtccttgctccaattcccgaggcggtacgcatggttttatccgaggccatatgctagaggggagaaaggattactactatgcatatgccatcatttttttcaaacatgttattttattcagcactccagttcattacaagcataacaaccaccacagactacactacgcacgagcgttatccgctagagtgactccaaactccttgaggagatcatcaaggctag

SEQ ID NO: 160742 - DNA, 539 bp, Zea Mays
cataaaaccatttatttgtctagtcaattggccacttggtgcgataaccaattataggtgctttagtatcctttcggtatgcgaagttgtaccatccgaaattcttgtgtagcccatcagctctagccttagtctggtaatgaagttcatgcatccggcaaaatcctttagtgttggcactcttcccttggcttcggagagcccatatatatacgatgagtctaactatggcatttggggtgagttgatgaaggtagatctcgaacttctttaaaacttcactgatcatctcgtatagggggaaccgaagtcttgctctgaagaagcttttgaaaactacaacttcatcatcccttggttctggaatcacttcttccccagcaaaccgaactagtttgtcatcattctctccaaaataacctaatttcttcattaaaaccaaatcttgcgctttaaccgtagatttcccaaactcaatatggctaggtttgctcaggcttaaaatgtcatcatcatcttcgttatcattgtcagcttcg

SEQ ID NO: 160743 - DNA, 578 bp, Zea Mays
cctttaaccagggttctatttgcaaaacaatacaacttgcttgaaatttttgcctagtgaatgcactctaggtgtgtcaaacatatgcaaatgctaatgctcatgatgtcatgctcaagttttagttatagtaacaccaggggtgttacaattcccgatctaacggtgtacgagcgccaccaccctcccccaagctaacgcagcggtgccgccctagagctacggcggaagctcgccgacgtgcccacgattctcctcccaagcgttgtgaacactgaaatcgattgatactacgtgactaggaggacgaggcgagtcgattggatgggtttcttaccaaggatgcgcagtacaggggtgtggccacggcgatgggcggaagtacgacgatggcggaatcacggtgaggaattgccttcaattcaccgctgcctgtggccgcttattgaccggacaatcttccccccgatggcgcacaccaccacggcctggttttggtcaccagacgatgccgtagccaagatcccgaccacggcggcaatggcgcagccgcttctctctctctcggtttgggctct

SEQ ID NO: 160744 - DNA, 615 bp, Zea Mays
tttgttcttgcgtctctcgcttggtgagtttgagcgagttggacaactgactacagctcatcagatctgatctaccctcgagagattccatgagggaaacgatcatgtgaagaccagactatttgagacgtacaggcgagagtacgagaacttcacacagttggctggagagaccattgattctatgttctctaggttccaatcaattgtgaacaagatgcgtgccaacaaggcatagctacactatagtgatcatgagagggcgctgaaattactacatgctctagattggagggtttgggaggtgaaggtctcgatgatcatcgagtcgcccaactacgagaatcttgccatggacgagctcttcagcaagctcaagtccacagagattgaccaccagactcgagccaagattgagaaccctagtgcacccaccatggccctagtctctagaggtggttctgcttctaactcctcacctgctatgtttgctctatcttctttgttgtctattacagaggagcaggtggagacccttggggatgaagagctggcacttgtggccagccggttcacgcggttccacaacaaccgtatgagccggcggtgtggcgg

SEQ ID NO: 160745 - DNA, 650 bp, Zea Mays
gtttgatttcaaaggccgcatcgcgctccggtggaatgcctggaagctctgctggaaacacatcggcatagtcacacaccacacggatgtcttgcacccgcaaggcagcctcactctccaccaccatggagaaaaagattcccgacttccttgaccgacgatccggaagcaattgtcactacaatgataacgtgaactttggagaacttcgcaagaataccacctccctacccgacagcgcctgcaataacactgttttccaaaaataggatataactgcatgatactgagttaaccaatccatacccaagataacatcaaatgcccccaaggaaatctccacaagattagctgaaaagacctcatcagcaagaatgaccgaacaaccctgacatactgaacaactactaatggagccattagtagaactaaccacaattgggtgacctatcctctacaccgaaagaccagctcgtgacacaaaattctccgaaacaaacgaatagctagcgccagagtcaaaaagagcatgggcaacaaacgaatcaactgagatcgtacctgtcaccatgtctccctgctctctgccatccgcagagggtagcacatatgctccagaaatacccgcagaagaggaagctcccggagtg

SEQ ID NO: 160746 - DNA, 463 bp, Zea Mays
gcaacttttcacaatacagttgaggttctgtaatgttacctttgctacctctctatgtgttagcagggtgccctaggtctcttgaaactatttttgttctatatataaactgggtcagttgctattttccttttaggcggctcctttgctgtgttttattgttacaaataaaaaacccccatcatttaagctttataggagaggaaataacaggcctaaatgtcaaggaaggtagcggtccttgagttagctttgtaatggggaatatatgtatttgcagacatactatgtcttaacactaaattaactgagccatactattgtaacatcctccattccaaagtttttctttatgtctccaggctaaataggtatgtggcactatttggtgaatttagtcatgtaagtattttttagacaaatgatagctattcaacatatgcaattgttctgtaaatagagg

SEQ ID NO: 160747 - DNA, 447 bp, Zea Mays
gcggaaagaatctgagcggtgtgtcggccacttcttcatagatctgacacagggccctcaatgccttgcgagcgacgacttggcaggtgtctctaaatctgtgcccagcagcagtgacactccattccacatggtgcggactggatccaatgtatacagtcacgacacacttctctgtgccatgctcgacgaattcacgaccatcatactctggctgactcctgattccgaggcgaactgtgcatgctctcagcaacttggggaaaccatcttcattctggcaaaagctggtttggcagcgaatctccatctgacttctgagagaaggaaagagggaaagcatttttgaaatgaagggatgagagcaagattttttttaaaaaaaatagtttggactcaaaaacttttgatcaggctaagggttacgacctgcggccaacctaacag

SEQ ID NO: 160748 - DNA, 676 bp, Zea Mays
tccacactaggtctcaaccctggaacatcttaaccttaaccttcttgttgtacggtttggcaactacgatcttgtccttcttgatctcccttagagacaccaagctcttgtcgatcacttcatcaatattgtccatcataagatcgaagtaatcaccaacaaatagatcattctgcctggcgaacctgatagcatttaagcttatctccacaggtgtcgagtactcgggaaccgggtacccaaaattggttcttcaaaaactaccaactccgtcgaccaactccgcgagacgaactggatgaccaactctccgatggccaactctgcaagaaggaccgaatgaccaactctccggtgatgaccaactctcggatgatgaccaactctcggataatgaccaactctttgatgatgaccaactctttgatgaccaactctgcgagatagaccaaatgaccaactctcagatgatgaccaactctcagatgatgaccaactcttcggtgatgaccaactctcggatgatgaccaactctcagatgatgaccaactctccggtgatgaccaactctccgatgatgaccaactctcagatgatgaccaactctccgatgatgaccaactctcgtatgatgaccaactctcgaatgactaactttgacgaccaactcgccgc

SEQ ID NO: 160749 - DNA, 791 bp, Zea Mays
catttctccaaatgcctcggatagttcaatctgcttggacacaagcatgtgatggctttgttgaagagaagcgcagtacttgtcaacctcctagtcatgcgcatcaaacaatgattcgaacattggacgatgctgggtgggtagacaatttagcttgttgccaatcaaatatttgatgcgtggaacatatatgttgaatatctcagaaaccagccgttctggaaaaataacataacaagtctctgtgcggctacgaaaatgtttaaatcccagtgataactgttagcgtgtattagaactataacatttgtatcaacatcaaaacaaatgttaatgactaacctctccatgaccaaatggttctccaggttggcgggagccacgtctgtcagccctagtcaaatcttttatcgtctcgttgtcaaaaaacttgataaggggagtaccatacttgttccgaggtgacgcagtgtggtgtaaatggtcaaggtaatattctaagaaccttatagacaacaagcataaaacttaaatatcaatgtaataaatgattatgtatgcaaatataaaaaatgtttgaagtgcatatatgtggttgttaatcagaaagtaacttacaagaatgatgagggagcatccataaattgttgtggttatctttgttgtgctcctcctttgccaacgactagcagcatcacacagatcagtatagactaattgacaccaatcaatatcggccatgcggtccatgtttgttgtcattaggaactcattgttgataataccccatg

SEQ ID NO: 160750 - DNA, 416 bp, Zea Mays
cataactcctaaatggtcagacttatggctgtcaaattttaacaccagcgagagaataacgttatctaccacttttatagcacatatctacagaaaacacaatttagttcatcaaacatacagcacggtgaaattactgcgtgcagtccaaaatagcaattaataaatttcagctcctatacaattcaagaattgccgcgttctagatgcttgaattattctaacactttgacaattgttagagttaaaataactaagtgagaactaacaagtagacttactaatttttatacagttatttcgcgctctagaactaccatacacaattaatcaacgcattcaccacaatcatcaaatccggcatatatgtatatcgaagcgtttttcacccaataatttgcattttaacttagact

SEQ ID NO: 160751 - DNA, 367 bp, Zea Mays
ttgttttggctctggagtaaaaagaaaaagacaaatttatgaatagtactgggctgctttcagcccagtagcccagcacagaggaagaaagcgcttgcgcgcgcccgcgccctggtgattttgcagaaagggccttgcgtttcagaacaacccgaaaaagatccgtaacactattcactgagtcgctgatgctttacaaataaaccccccaggttctatttctttgcacggctaagtccacgacgacggcagcgcggggagcactccggcgaggttctggaccggccgattggggctatggctgggttctccgagcggcggccatgaaatcggggctaccctgaccatttcccccaacctaattgca

SEQ ID NO: 160752 - DNA, 770 bp, Zea Mays
gcggcatggatgaacggaggggagcggtgccgatgaccggacacggccgggaggagggatggccgcgtggcagccagagttagtgccctccaccgcgacggtcttatctggagcaaaaaggtcttcgcggggagatgctcgccgcccgatcatctcgaccccggcgcaaatcgcggcgcagataggtcgtcggtggtgagatttttctgccgcggcgatctgatccccaatagagcactgtaccatggcgagacctcatcagaacacctgacagagcactttggagctcctatttctcccaattttgtgtggtgactaagctagatctctgtaccaaaattatagcctgacaatccagctacaattttgtcatagcaatcttgatcaaattctcaataattcaagcttgaattcatgcttaaagtttcagtgattacactgtctgtctgaaaattcagacactggcaccctgacagcccaacttcaaccttaattatctccagatttttctcaataacatggcttgaactcttaagcaaacttgttatccattagtaggtctacaagtttgatgtgatgacctagggcaagaaccatatattttaaaagatacaaggctccaaagttgagcaaactacactgaaatctatacttaggctgaattcacaactagggaccttttttgcaaatgagcccaattcttagggtttggcttccaaattcacaccttagtgaatcaagtgacttaagatactttactaacttggttt

SEQ ID NO: 160753 - DNA, 576 bp, Zea Mays
tttaaagttcacttctgtaccttcagactgttgtatgcgaggctgtctgcgaggtcagccttcgtcatggcgcaaaggccagcttcgagcttcggaaatcccatacttttggccatctctcggcagacggataactctatgttgtccgagaggcagtacatgaaatcatctttgtctgtaccgttgaacactaaggcccccttcgggtacttcagttgccgggcatagtgtttggcttcaaaaatttcttcttcggacaattttttccacgaatcatgtcaaaaaatgtaatcaatatcttcagctagggcttcgggggcaggagattttgccctttctgccgcgttttgcccttctgccatgccaacatctgaagcctgtggattagttttatcttcaggcgcgacgaccttcgtctcaataggcgctgcaggctcagcttcggctttggcttggactttagcagcattagcaggtttcttaataggaccagggctcaaggcctttacggcctccaagatagcgtctagcacattggccatccttctcctcttgggagttgcggcaagagctttc

SEQ ID NO: 160754 - DNA, 449 bp, Zea Mays
cgtaccagtgcacagcgcggcgaaaaccccatccgcagagcagtgtgatcccctgacgaagcttcatcgtcggcaagcaattgccagccctccgatcgatcacccctccaaacaacgccacagacacatccgccaggataggccgagcctccctggccgtgttcttaactcagacgacggcactccctccgattggccagcggcaacaaccttcactccgcccagcggcaactctccctcacgttggcgttcatggccgacaaaactggtttcaaggaacaggtggccaggggaggtgaccttatagcgtagagacgcggggagagtccacgcggttggtccaccgacgagatttcctcgcacggccatgccgaggttgttacgacagggcatggtgggcgttgtcccatgccccaccactcggtgcccgcgcgtgcgcagcagagaaa

SEQ ID NO: 160755 - DNA, 314 bp, Zea Mays
tacttggtaatgaatgccgtcttcggaatgtctgaaggtcgaatcctgagctggtgataacctgacctcagatctatctttgaaaatacgctggcttgtctcaactggtcgaacggatcttctattctgggcaaggggtacttgttcttgattgtcacctcatttagagctcgataatcaatgcacatccttctagtgccatctttcttctccacgaataagataggggcggcccaaggtgaggtgcttggtctgatgtaacctttctctgacagctcatcgatctgcttcttgagttcaactaactctggtcc

SEQ ID NO: 160756 - DNA, 817 bp, Zea Mays
gttctgccctgcccccgttctgttactattccacagcaaaaaaacattccaaattccaaccgtggggatcgaaccgtgtatctcttgagagaactgcctaccatacaccctctagccaacgtgacttgtgttcaattacgtacaacctcaacaaaaaatgtcttttgtgtcgttttagggtgttcagcaaacaacaccaaccacatttacccctagccggcggcggattaccctgagccacggtccgtcttcgttctccaggcgtccggtcttcgttctccaggcgtccttctccaccgacggcggcctccatcgcctctccccttagctggcggctactcccttagctggcggctaccacagctcgttcccagcccggtggtcgatggcggccttctcccccggccggcggccttcaccgcctcttcgactagctggtcacttccccaaccgcttccccagcccggcggtcgacgacggctttctcccccggccagtagcctccaccgcctctctccctagctggcagcttccacagctccttccccagctcggcggccttcactgccccacccaaccaccccatgccgcagatccactcacaatcggagcaaccgctctcccacgaccacatttcccctggtcagcggattccgcccactcccacgcaccactcccacgacacaatcggctgcacgacttccacttcgcctgggacagcacacagtcgatgaagattattagtgagcatgtgcgatgcgtcaggccttctcctctgtgtacgagcacgcgtgtgtgccagagccggagtagttcc

SEQ ID NO: 160757 - DNA, 501 bp, Zea Mays
ctcaattatggctcttcagtcatttttgccttggctttggcaggatgcttcggcacatcggctactttggcttctgtctactctgttgctgtctttagaattagctcttcggctgatcccgttgtggcttcagtaggagcggggaactctggcctagcagtggaagaaggcccctcatcaagcttcggcacccttgccgtttcaatgtacctgggccggtgtgtcagaactttaatctttttacccttcggcgtagcagagatggccgaagcagcagtttttcttttctttccctgctttcgcgagggataatagtagtccgggtatacaaaaccaattacatcaaagactctgtttaatcttctcttgcctcatcctctaaaggctagtgtcatggcatcatcttcggcccttgtgtaggccccaagcaattcgtcactagttgcctcaacacaattcagccagtcatcgttcagctcatcaaattgatctctgtatctg

SEQ ID NO: 160758 - DNA, 697 bp, Zea Mays
aggaattccatgccgccatattattctaacattgagaggtgaaaagatttatgaacttcctttgtcatttgttttgaagagatgggagacaagatgcaagaggtaaaaataaatatgttttgtatttcttctttgaatcattacaatagtacatcctacctgaccattttttaacatgtgactttagagggattgtgtttgacgacgaaggaaatttattagaggaaaagcccaaagatcctaatgaggtggaaaggaggaaaaatatatcagcggtgaggaacaaggttgaagatttgattcaaagagagaagaattcaaaagaaggcatgtatttcttgctttcaagtgtgaagatcatagagacttcgtttggtcaaattgtgcctaccacagtacaagctcgtcgacaagaatatgagtcctttattggttgcacaattccacaagagattgaaatccatccaccaaccaatgttctttcgaagggaaggagtaaaagaatcaagagagccaaagaattaccaaagccacgaaagagcaaaattgccaagaatggcacctaaatatagttcatgttatgtatggttagtttatttggtggtgcagatttcagattgccatgttttgattgtgccatggatactgttaaatttgacatgttttaattgaaccctgcactcagacactctctcta

SEQ ID NO: 160759 - DNA, 898 bp, Zea Mays
cggaccacggacgatgaggacaattgcacacgttcccggtgaccagtggtttcccagtgcaattggttgggttggcgagtatcacagacgtataagaatgcttaaacaagggagcagaggggaggagatgacctgaattgggctgaccacgacggggtgtgttttacgatggcggaaaccgaattgggggaaatccaaagttaaggctcactggcgatcgactgaggatgattcttggcggatgggttcgtgatgatccaacagagctcactgcggggtcaatttataccaagtgaaagtggtggccggggatttgagcgacgacgcgcggcggtcggagaagtaagagttcactggcgcgcgattagtgtcctattaccgtggcagtcattccgacgagccacagagagtcacaagggttcacagcgatgtggtggacaggtagagacacgcggcggacggcggtgatggcttaacggcggtgagaagcttatccaagggatcagtgagcaaggggagaggcacggcggctagccggagtggcgtctagctcatcgacggcgatgctttttcaccccgcgatgttatctacttgtcacgagcacgaatccagacgctggcgacacaaatcgcggtggaggtatcatcggcggtgagatcactgaagcttatcttcttcagttactgtaccatggcattcctcttcagtccatctgacagagctacttcagggcaattcctctccagatttcgcatgacaacttcatcacccctctgcaccaaagttgtagggctacaaaccagctataactttgctacattgtgttcccacaaaaaatcactggatcttgcttaaaattaagccctaagttcatgtaatcctactgtcaatctgaaa

SEQ ID NO: 160760 - DNA, 988 bp, Zea Mays
gatgaatccatgtcttgccatgctattgttacagaaatcgagaaaatgattcttttttgggggtttggatttagatttgtactgtttttcatcttatttcaagcctgattagaactctttatctggttggttggagatatggggtgattggggtagtgtattgtagcatgtctccatattcacaattcttcatcaattctcggtgatggactcttacctatctgctccagctccttacttgcgctaaaactgaacatggaccctgaatttgggaattgaggcagcaccagctaatacaaattgttgcttaattatggagatgatcactgattgatcgcaataaaccaaacagatctgggtccgaatgtccgccgcttcattttgaaaacacaacatcaagaaatttccaaacgatgagcatgcaaggctgggcttacagattttaaagtgtagccactcacttacaggaacaacaatgctacttcttcatctagcctccctacaaattgattgattgtgctggccaacactcaacagtcaacactggcaaatgttggatgcatgatttcaggaacaacaatgttggctgcaaagtgggcacgtccgtttagaagaaaccattgatgaagtggtacctcagagtagatagagtagaccaatcattatactccttccttcctcagacttggagatagcttcagcttggtttcctacttctaaagaaacaagagaaacatgtttcagttgctggtcctactttcttgtcctgccagaacaccccaattcacgcttcgtcgacactatctccgcctgcctcaaggctggcatgttcactaattgttcattccctgtatctacgacacgataatcgctcatgtttccttccacttcaaaagttgttggcaggtcgatgcaagtcgaggatcctcggtcctgttacttgcttatgtcattgatttttatgagttgtgttggttgtagtgattta

SEQ ID NO: 160761 - DNA, 699 bp, Zea Mays
ttcatcgatatagctatggtggcttagttgggactatccacacagtgttgtagggcgatggttgtgaagatagctaatggtgacatgatgattacttataatatggtgttcgaagtggattggagggttgttggccatgcttttgtcacgctaataaggatgctatacaatggggtttatgatgcaatactagggtatgactggatatgagcacatagtcccatggaatgcgattagataaataaggtgttgacatttcaggatcaaggaagttgggtgcagttgagaggagattatgttccaatggaagaaatcacacaggtgatagttattctagttgagaagacgatgagagggaatgagatttggacctttgtgttgtgggaagaaaggcatgaaactaacaagcatcatgttccagagaagatttagggtttacttacagaattctaggatgtgttcgaggttccaaaagggttaccaccgtctagggaatttgatcctctcattccactgctccctagggctataccatacaatgctagatattatctatattctccactccataagcatgagattgagaggcaggtttgggctctgttggatgatgggttgattataccaagtgctagtctatttgcttccctagtattattagtgcaaaagaaagatggattatggagattttgcattgac

SEQ ID NO: 160762 - DNA, 572 bp, Zea Mays
gtggatcctttgatggctgtggagaaggtggatcccttgatggtggcgtagacagtgggtcaccaagaggatggggaggagaaggtggtggagccctgaatggtgatgcttgtggcggagacggtgggtcagaaaaaggatgaggagcagcatgtgaagtttgaggaggtgatgatggatgtacaataggaacagcaatttgagaaggcggagacggttgggcctgcgacgaattcgaccaatcaagcaattcgacatcccttcgaggccaaaggataaaattcttgatagcttgtccaagtttctcgataccttcgggcccagggatgtctaacatgtcgtcctcggatccttggacaaccgacgtcacttctactttgcaataatcatctggaatatcgtttccatggaacttgcgtcctgggatcgcaaggcctgtggctactttctttgtacgtttattgttaataccatatcttataaccagtgtgcacgcctcaggccttgtgatgtcatcaactggataacggaccttatttcccgttgaagcaacagagcttgggaatgtcgta

SEQ ID NO: 160763 - DNA, 276 bp, Zea Mays
gaatcagcaaatacccccttctgtggtcgaatcttggcccttcgatcagaatcgaacggttggcactataatagggtttagttgaaaccgggccgttgttctcggatgttgcggacgagattccatgccggttcaatgtatagtcaatctaatctgagcgctcatttagcaatccaacggctcacagtcaccgataccccttcagcgctatagtattacataagagacctcggggtatttacaattgaacctgccatccactcccataggaaatcc

SEQ ID NO: 160764 - DNA, 901 bp, Zea Mays
agtggacacaaataccaaagagtataagggtgaaactgcaaattctagggctcgggtgtaatttatttccaactacgattggatggcgggtttattctaacaaagaacaatggcccttacgcaaaatggcacgaccgaaagagtacgggcagattctggccgcatgattagaattccgcgatccagattagatctgaactgtatcgaagtggtacgcgacggtagccaatggatccaataccgacggcggggattttaaacgggcacgatcggttggatccgtccgatcgcatctgatggcctagattcgaagcgcgaagggaaaaccttggcttttaatctcaaccgccactccctaaatcgacgtccaccacgcatccttctcctatgccgtgatagggcggtggtgcacataatgccgcggcgaagctcccgccggtgacacccgtcccggccagccgacgactgattccccaaacctgctaggattatgtgcaaaagggaacacgacatatgagatgggacacttactggagacaggaatgacgcccgaagagccacccacggcacgcagcggcccacgatggcattgtgcggtctggcgagaaattgccggtgactgccggttcccgcacccaatagaacactcgagcaccttccttggtccctggcgactcctcccaccctcttgcggagcccaaagcaagcccgtggcatgaggtcgagatcggcgaccaaatctcccactcacccacgcccttctctcatttccttctctctggtgaactcgtgggctctcttctcaacgacggtcatagatggggtgagcacgacctagaatttatagccctagccatgcggactgtggttacattggggaggggggttgtgtcagctgggg

SEQ ID NO: 160765 - DNA, 380 bp, Zea Mays
ggctgaagagagatgtggctgcacatgtggctatgtgtgaagtgtgtcaaagagttaaggccaaacaccaaagaccagctagactattgcacccgttaaagatacccgaatggaagtgggaagagattggtatggacttcattgtcgggttgcctcgcaccacgaaagtatatgatttcatatgggtgattgtggataggctaaccaaagtagctcacttcattccggtcaagactacttacaagggctcttagttggcagagttatacatggctcggattgtgtgtttacatggagtaccaaagaagatcgtttcggatagaggctcacagtttatctctagattttggaaaagctttcatgagaatatggatacaagg

SEQ ID NO: 160766 - DNA, 1118 bp, Zea Mays
gatatttccatgacccaaagtgtggattaatacccagaaaggcctcacggagatgaacaaagatagaaatttggagtatagagttgggatttagatgtgttaagttgagagagtagaaatcgagaaggtcgtggaagaaaggagaaactggtagacctagaccacggatcaagaaaggaacaaaaactactgactcatgggtatcctctgttgggatggtgatcccctgccagacccatcaggagcacaactccttcgacggcaaaaccccaaattcaaccaggtgaagtagaccggattcaaaaacgacagaagcatagtttccacagaatggaagttggttgttggggtcaattgggggaatgccaggtgtgacagttccttgcttcttcctaggcgccaccagacctagcagacgagcggaatcaatcgcaatcacgagggcgaacatgagttttaggaaagtgtttgcgacaaaaaacagagttagggttcgctaccaggaagctgccagcgaggatgtatatgcgtgcgctaagtcaggcacatcaagacagacgaagtaacccggaccagacctcaaccgagtggagtaagtcggatggacatgtcagtcggacctatcaaattaagtcatcagccgaagttatcagttgggtctgtcaacagaactagtcagtcgaaattgtcagttgggctcactcgactgaggttttcaagcaaagcaaaagtcgagcagaacaataagcacaataccaaacacagcaaacaaagggttccattcatcagaaagggttcattacaaaggaaaagggttggctcattatgaatcgaccctatcatccctcacccctaccaccaccactaccactaccactacccacacaaactacctactactacactataataatattcatgccggtggcgccctgccaccgacattgttgtcgtcgcccttgctccgtcatcgcccctaccgccgtcgctcttttcgccaccatcgtagccactgtcgtcgccgtcgcccgcgctgtctccattgccgctgtcgtaggcctcgtagccgctcccatcgctgccaccatcgtcctcctcctcaaagtcctcctccttcg

SEQ ID NO: 160767 - DNA, 1366 bp, Zea Mays
ttaagtaaaaggtgagtttcctagacttagtcgatttgattatgtgctaatagtatttgtccaagtcgtatgaaagctcacaagaaagtccaaatcaaatggaacatgttatgcaagaaaatgacttagctatgctggtctgggagtcattagaccggtccggtggtgcaatagatcgcatctgtacgaactcgccactctcaggtttttatttataaaaatcacaacagatgaggagagcaatgcatctattgtggtggagtctcaagcatctaaggtgcagcttaaacctagttctggtacatcagccccaaaaggcaatcaaccttgcagttcaaggcaagtagtaaagcacaaccaaggacaaacaagtctgtagttgtgatgttgtggagaacaccaggaggggtggtggatgagagactttcaggttcttatcagcctacaatcttggctagtgcaaaaactaaggaggacaaatactatgtggatatgcagtgggctttgttcttctatgaatgtggtgtgcctttcaatgctacagcagctaaacaatttcagattgcgattgaggccacaacatagtttgttttagggtataagcctctaacaccttactaactaggcgagccattgctacaagagattgtgaagtcgacaaatacaatgagggaggaacatgagcgtgcatgaaaatactatggttgtacactcatgtccgatggatggtttgatagaaagggatgtcatctgattaacttcttagtgaaacagtctggaagacacttactttttagagtctattgatgcatcaaatgaagtacatgatgcatacatgcttactgatttgctagagaaaaaagtcgatgagactggtagaggaaaggtggtacaagttgttactgataatggtgccaattacaaggttgtaggcaatcttctaatggagaggattcctacattattttgaagttcatgtgctgtacattacttggatctaatgttggaggacatatgaaacttgaatgattccaagaaaccaatcgcacttgcgatgcgtgtgtcaatttttatatatagacatgggagaatccttgctaccatgagggagaaaactggtggggatgatcttgtgaggtccgctgccattcattttgctacttcctttctcacattgaagagattgtacaaacacaaagatgatttgaagtctttatttacaagtgttgtttggattgataacagtttatcaaagactagtgctggattggatgtgtataacattgtcttctccacaattttggaatttagtagaagattatcttagagctttagggccactactcattgtacttagggtggtaga

SEQ ID NO: 160768 - DNA, 629 bp, Zea Mays
ctggctggcagtagaggcacaaagataaattagttctaagtcataagtgaaagcaaaataaaataagcaaccatgcatgtgcagtaatggggccggtatactcaaagtcaatgttttcctcattggttaaattggggcagcattctccttgtcagactcaaagtaaatgttttcctcattggttggctcttgttcaggctgaaattcatcttcactaacatctctcattttgggacagccttgaactcttatgaagtttctcatattcctcaaccctacatgccaaatcttttggttctttttggctttttattttttcccattcatcctgttattgtattgcacaaacacttgttagcttgtttcttttctttatatgattctataaaaatacaaatgcaaatctaagcttgttgatacttcacaaatgacaaacctgaaataacaagtgatgtatattaataatataacttggtgctagaatcttaaccatacaaaatagctccaagttctttcacaaccggaatatataggcattgaagagagaactcttacaaccattctttgcaaaattggaacttgtgtcccataattgtcccaccattttcctaccagtgaaaggcataaac

SEQ ID NO: 160769 - DNA, 475 bp, Zea Mays
aagcaatcatactatagaactctggaatggctggacggggggtgggggtgggggaaggagcctagaacttaaattgatgctagtatgcgacctggcgaggacgaccgcggaggagaggatgttaccaatgggttggatgtagaggagggaatttgacggtaacctcaccagcgtccttgagatcgaggagcgttgcgggattggcctcgctgcgttggccggggagctaatcgcgtcccaagcgagctgttcccagtgcatttcatggcgagaaggcgcacccgccggcggtggggagctccgcctccccgtagtccgtagtcgtaccccagcgcggtcacccctcaccatatcgcctcacccggccggtacattaagcatcgcccagatcaacgtcggcacggtctagaactcgacgccgctgtagcacgcagcctccaactgcccggaggcttggagaagattgacattgatc

SEQ ID NO: 160770 - DNA, 1175 bp, Zea Mays
ctagctcacccgcctcgccgcccatgtcaacggtgcccatggaccaaaacagcacccagcctccctcgtatacaagctcccttggatccatggcatcttccccctccacgacttcttccagctctgctggacgcccctcttcctctgctagcgcaggggagcactccttcccttagcctttggccgtggtcgccctctggtggccgtgccgccccacccctgcattctgtccactagacagctcctgggcctagatcgttggctcgatctagcggcgagagccgcccaggcatctccgtcacaccggtgcctccgctcggcacaccctcccctcggtgcgcgctgctgcccccttgccgtggcgcccgctgggtgtgtgcctacgcgcttggccggtgtatggagggagaaagggtgttgccgccgccatggatctggccgcgccgtcgtgcacggatgggaagatgggagataacccggtgaccgtcaaattatgatgaacggtgggagatcacagaactactcgccggagtacctactctactgcgggtccgtacaccaccaacaacagtcgtatgtacttcactaacagcggtaagatcgttaccttgatgtccgccgtcaccctcgcatcacttgtaaccaatcgggtaacagttttgggcatggacgcgcaaaaccccgttcgtggccatggtgtcgtcgcggttgggattggccaccgttgctatgcgcggattgaggtaggagattgccggtggccgttcatcagatgatgggcgacccagattcaatctggtgagccagcacgctaatgtatcatcgtgaccattgatcaattagtggacgactcagatcggggcctcgtaaaccatttcgcttcagcgattctggttccttgtatcaggatccggtggctagaatgcgtaccgctttatcaaaacccttgtttgatcatgggcgtaggatttcgatcctacggatcagatggacagataccctttcggtgcgcatgttttgcataagagcccctcgctaactttaaaataaaaccgccgtctagtgcgggggaaaaactgtgtcttaagcgattttatgagttagacccttggttctctgttattgtgtgcacagcccaggactcagagaaaataggagaaatgaatttagaaaat

SEQ ID NO: 160771 - DNA, 441 bp, Zea Mays
cccaatcagccacgtggtaaattatgcttatatgccagacaacagacagctatgctacctagaaaatatgaatatatatgttgtgctttgagaatacttcaagcatcaaccacgttttggcaatacattgcatagtatgtacttatgacaaaacagtactgttccaacacccaccacccacctgaacgaatataatccaatcagcttcagtaacccaaaacaaaaggctaactaaaataaatgccaactaaaactagatatcagcaccctacctgccaacaacactaattaataaggtcccaaaaaaacaacacacacccataagagagaatctggcacatggatcaacttcagagtgtttgtttagcaaccacaagctgattgagcagctacccacatcagcatggttggttctcatatatatgtcaaatgcatgtcact

SEQ ID NO: 160772 - DNA, 640 bp, Zea Mays
tcgtaacaaactccatcggatgcataacaaactcttgtcgcggcgtaacaaacccgtacagacgtaacagactcagccaagattattaggatctcctcgaatccctgtaaccacctgtagccgaactttgtgcctcgtatggccaggttttcctcccggtgtataagtatagaagagcacccttccccaccccgtagattgaacagggtgcaccattgtcgagcggattcagagaaaggatgaggtagccgcgagagagcgtacatgtaggagagagacacagacaccacacccagagcctgcaatcgccgtcgaccatcctatctagcagtcaccattgccccagcactacgccgccaccgctcccaactcgatcagcctctgcctccatcgacttcaagaaaatagctattttgattacgcgtatccgtcgatggggtcgttgatatcatcatcaccagggatgtggagcagggcgtcgctttgtcgtacgggaggtgtgtattgcgtcctccatcttaactatagcagctagcaaaaaggctaacgtgattagttcctttgggtggcaattacgcattgttttagatagggattacgtgttggaattggatttggttatggctcatctaattaaaag

SEQ ID NO: 160773 - DNA, 711 bp, Zea Mays
ccacgatgttgtttccgccgtgggggggagagctcccgcaggttccttctcgacgcaatgttaggccacaccaggcggaacaacgtcacttgtgccgctcctccctcgtcgcgcccagcttcgatgacctccacgcgagtctttgagggaaccacaagcgtagtagggtcgctggccaactcgtccctttgggtgggaacattggagcaggcttgagcatcatcgtagtgagacggaccacccagcaacgctccgacctccatctgctaggagtggtggaggttgtgaatcatctaggcccctttggtgatgttttggtaattaatgacaactgcttgtggactaacgattcttggagaaataagaatgcagggttggaccacatagaacaggaaatgttggagaatcataagcattggttgtggatcagatgaaggcaaaggtataatataggtttcgtttttgccggtcttgaggagtttagagaagataactgaccggattagtaggctagatagtcgtactattaagaggggtcaatgactttgatctgtgtaaaacttagtgcctcatagagcatcaagtagttgcatttgcatgaggactaacagcgcttcaaatttcttgagttaaaagttctttcaaaagcgagtttgaaaaattgcaaagtcttggatgcgcggaccgtccgggccttgagggcggaccgtc

SEQ ID NO: 160774 - DNA, 393 bp, Zea Mays
cttccattcttccatgcatgcacacgtcgtcgtcgccaagtgttaatcattcgctattttttttctccatttcgggctgtccaagattttttgctcggttttgtccttgagatcgatcataagtacgatcagtctgaggctggcccttgagggagctagctaggtgaaagaaacaaccttgagttcagtcgaactcatcttctagctctctccatcatctccatgctcgctctgggctctggctgaccagatcagtgagcacacgcgtacagatgggctagctaagcgacacatgcgcctagctcggcgttgtacatgtcgcatcaataagtgcggcgcacagtcgcccacaccgctgccggcctggctcgctttcaatcaactgtccaagac

SEQ ID NO: 160775 - DNA, 374 bp, Zea Mays
cctcgacagtcgatcttcgaacatggtcagcagaaactctaaaatcagggtcagtacaaatcttcacatggttgcactgactttcagcaaaaccgaggcagtgcttcaggcgcctatccatgcacaatagtcttatcatgctgaggggacgcttttataagcacgggtttcactgagcacccaccacattaagccctccaagtcaccatccgaaaaattcttctctttagacaaagccccggtagaggatacagtcttcaataactcattatggcatctattgccgagggtgtgacagtttgctaataggatttagtagttttcattgagttgtctcatatgattcacttcatctttgaggtcatctattctca
